United States Patent Application Publication US 2004/0123343 A1 - sequence listing, part 44

SEQ ID NO: 143919 - protein, 150 aa, Oryza sativa
  Clone ID: PAT_MRT4530_44781C.1.pep
SQDIALGCSFFRSSRTMSTPHSRRGRGAGRSCCRPRRRSWRRGTSAYCAQPRTKRVNHEGGVSLRGRQEGLGAGCAVSGEGRQPPSLEGGASVGGISRVRDAVGGEGSRRAGGETEGWQQGREEEAFRVCRGECGGACGGRGCAGAVGGR

SEQ ID NO: 143920 - protein, 596 aa, Oryza sativa
  Clone ID: PAT_MRT4530_44782C.1.pep
MATAAAAGEGGSGRRYWRWSKADFFPEPSFASWRSYGGALAATVPRLVDRVGSRSSEAAEAGTLRAVSENPLRRCLSWLDLAFLGFGSVVGSGVFVLTGQEARFDAGPAIPLAYAAAGFSALLSSFCYAELATEIPSAGGSFSYLRVELGDIAAFLAAGNILLEAVVGAAGLGRSWTSYLAALLGRDTDSLRIHVPALAEGFNLLDPIAVVVLVSTSAVAMSGARLTSTLNSLASVVGIAIIAFVLAAGFSHFDAGNLAPSFFPFGAAGVFRAAGVVYWSYTGFDMVATMAEETKNPGRDVPLGLISSMSSITVVYCLMSLALVGMQRYTEIDANAAYSVAFAAAGMRWARYVVALGALKGMTSGLLVGALGQARYTTQIARTHMIPPYFALVHPTTGTPIYATVAVTLGAACVALFSSLDVLASVSSISTLFIFALVAVALLVRRYHVAGATTPGQLRTFLAFLALVVLSSIGVSAYYNSRYARRWPGYAAFGCGWAAGAAGLAACAEKQRAPRVYGAPLVPWLPAMSIATNLFLMGSLGTAAYARFGICTAAMLVYYVLFGVHATYDVAHADDAAADNLEHGKIAAAPAPTTPA

SEQ ID NO: 143921 - protein, 441 aa, Oryza sativa
  Clone ID: PAT_MRT4530_44783C.1.pep
MPHLRRRHRRRLLAAVVFLLLSAVVARPAAGAFTELESAQIGRFQDYLRIRTAHPSPDYAGAAAFLLPYAASLGLRAATLHFTPCKSKPLLLLTWPGTDPSLPSLLLNSHLDSVPAEPEQWLHPPFAAHRDAATGRVYARGAQDDKCLPIQYLEAIRGLRDAGFAPTRTLHISLVPDEEIGGADGFEKFAQSEEFRDLNVGFMLDEGQASLTDEFRVFYGDRLVWRLIVKATGAPGHGSKLFDGAAVENLMDCVETIAGFREAQFGMVKSGKRGPGEVVSVNPVYIKAGTPSPTGFVMNMQPSEAEVGFDFRLPPTEDVEHIIRRIKEEWAPAHKNLTYKAIISAGGKLAKPEILSSTTDSRFIRQLGIPALGFSPMTNTPILLHDNNEVNHLGLLLFNLGYNVMLKLRDVLNSQFLEDKVFLRGIKVYEHIIRALSSFKG

SEQ ID NO: 143922 - protein, 169 aa, Oryza sativa
  Clone ID: PAT_MRT4530_44784C.1.pep
PTRPVYMKAGTPSPTGFVMNMQPSEAEVGFDFRLPPTEDVEHIIRRIKEEWAPAHKNLTYKLMQKGPTRDLAGRPMVTPTNASNPWWSVFEQAIISAGGKLAKPEILSSTTDSRFIRQLGIPALGFSPMTNTPILLHDNNEFLEDKVFLRGIKVYEHIIRALSSFKGDS

SEQ ID NO: 143923 - protein, 154 aa, Oryza sativa
  Clone ID: PAT_MRT4530_44785C.1.pep
MPHLRRCHRRRLLAAVVFLLLSAVVARPAAGAFTELESAQIGRFQDYLRIRTDGFEKFAQSEEFRDLNVGFMLDEGQASLTDEFRVLYGDRLVWRLIVKATGAPGHGSKLFDGAAVENLMDCVETIAGFREAQFGMVKSGKRGPGEVASVILCT

SEQ ID NO: 143924 - protein, 101 aa, Oryza sativa
  Clone ID: PAT_MRT4530_44786C.1.pep
MMFEHVLFLSVYLFSIGIYGLITSRNMVRALICLELILNSINLNLVTFSDLFDSRQLKGDIFAIFVIALAAAEAAIGLSILSSIHRNRKSTRINQSNFLNN

SEQ ID NO: 143925 - protein, 817 aa, Oryza sativa
  Clone ID: PAT_MRT4530_44787C.1.pep
MSTSTGPSAAPSTSPSAAPPAEYAEHLSNLVAVPSLSHDHQYFLGPIGNLDPTEFIIVETNRIPFRLANPNISHWKNTFKSWPSLEKSWPVWYKRVSASMQAHWDEIGIGQALSLTIANSAKDEPLIAAATYFWSNTLNAFLFNQGPMTPTLLDIIMITGLDVTSSANSMSLNTKNTFDFKTKSIGGWSGYIAAYMGKRPVTSREHVAFLLMWLEKFLFCGSSSGPTTNWQFLAEALETKRQFPLGKILLGYLYQMLNNASAKIAVGSVVGAGGPWWLLQSWLNLVAMKAVNQPSVTEAEFPRLEPITDEDGEERTHRRLSCIDFDLQLEDQINWHALEPKGKIFWTCTGVKQISQASCFYINNIPRPQLGSIENIELARFRSKAFDRWWGEWKLHLFHQSASMYMIDLFLEAIPQTTESSPPCKSKSGEDIDYAPGLVPNGGGPSPPVIGYHAPKTSSLLQGQLREPADASKKRKTKASTVDPSALAPKKRAKKKKSKPTDDLPALDPSIEQALDEEEIEEDVDQAAAELSNPEKTPSASPKQTPPTPAAPAHFSRKKKTTVKKKSAAIQSKPAPPPETSNRTPSAAGSHNVEEEEQPAAPAIPVLADLFSFDIKDYLDETEEDTTSKALASLSDDVKRTLEDISHRLEESSLDTLVVDYGSIRARLHKIQALIPNELANALTPAVYLEQHQFKLEKAKQRLADHRERKDIEATIQLSEGPIKSNIDRLEARKIELIAQLEECNAELALEQKKLADLPKAIEEQKSQLKSAIRNVVDMTKSLKVIPGTDAQDVQALEEVEQIRQRAISAIQRYLSQ

SEQ ID NO: 143926 - protein, 119 aa, Oryza sativa
  Clone ID: PAT_MRT4530_44788C.1.pep
MASNGEATTGSETAAPAPVPEPTPPPCQGRLITVLSIDGGGIRGLIPATILACLEAKLQELDGPEARIADYFDVIAGTSTGALITSMLAAPDDDRRPLFAAGDLTNFYLENGPKIFPQR

SEQ ID NO: 143927 - protein, 104 aa, Oryza sativa
  Clone ID: PAT_MRT4530_44789C.1.pep
RAFAFPSAPATTTNPPVLTASTQMDVLAYPTMTQGRAGHEQCVARTSWIGLPRPKEDYLAWMLGWNRQEASAEAAMHGVEEADRRHKQWRRHARSGLEGSSFHE

SEQ ID NO: 143928 - protein, 43 aa, Oryza sativa
  Clone ID: PAT_MRT4530_4478C.1.pep
MALSSSPPVAWETVAIVGGSLAVSSRGCPPLIPGGTASNRLMP

SEQ ID NO: 143929 - protein, 49 aa, Oryza sativa
  Clone ID: PAT_MRT4530_44790C.1.pep
EQSHQIFRLKKRREHMKVLPRAAYCTCFIFFFNFFYYVYIYIFFFYIFI

SEQ ID NO: 143930 - protein, 182 aa, Oryza sativa
  unsure (1)..(182): unsure at all Xaa locations
  Clone ID: PAT_MRT4530_44791C.1.pep
FFFFFFSMPKKPFHLPLNNAEGQSQKLPSPSMIFCCPPMNHCIRRPFGYPARLLTIRDLADRSWLGKRNKETRVEESQIKTSAISRRRLRVDLAVAAAGVXTTVGSSADGLLASTRSSRCQPECLLXGGSCRXRCMCTWACWLIXIRXTCFLRGGTISSTVLAXXTDLGLGRLAHWXMDXGG

SEQ ID NO: 143931 - protein, 43 aa, Oryza sativa
  Clone ID: PAT_MRT4530_44792C.1.pep
MGAGVTAVIAIAVVVLGWITIEMARKPCLDFGRRAMDRALDPN

SEQ ID NO: 143932 - protein, 48 aa, Oryza sativa
  Clone ID: PAT_MRT4530_44793C.1.pep
HRTLSTPGADMGIYFSYYKSRKRLTSLHPATDALLYCKTGTSQHKFIL

SEQ ID NO: 143933 - protein, 83 aa, Oryza sativa
  Clone ID: PAT_MRT4530_44794C.1.pep
MKHTTTDTFAPSTIAPIPSTPHLDDLLVPRFYCLPVPYHVPDLPSCFCPRVPGKDGEAEETAASVPGKLHVCFDHGSWQMWRA

SEQ ID NO: 143934 - protein, 108 aa, Oryza sativa
  Clone ID: PAT_MRT4530_44795C.1.pep
MAEEVVVEWRPRRSKARGRGIYGRSVVASASSSSSSSSSCYYYHWGHRIFCDEGCIVVLVLDSPVSQQQQQQIAATPNRFKLRRFSDSDRPSLGELVSTTAFLKNCFC

SEQ ID NO: 143935 - protein, 158 aa, Oryza sativa
  Clone ID: PAT_MRT4530_44796C.1.pep
SRSRTGLLFFLFFFFFFFFFFFFFFFFFFLFFLTSCRTTVFHIQPFKFFKPFFYQKKCSPPSSFNIRTSAVNIPTSALCLLRLFRGKHSPTPPRRGEFKNTHFFFFSKFLVGGPSSKGGIKTYPFFWPLGKNKTFFSPPFKKKIKIFFFPNFFLSPFF

SEQ ID NO: 143936 - protein, 124 aa, Oryza sativa
  unsure (1)..(124): unsure at all Xaa locations
  Clone ID: PAT_MRT4530_44797C.1.pep
SYFFACTSLLHPAFVRSVVFRYRVRPCRPRPSLSPLSIPPPPASIQWQLPTPQPPAAPVGRPWAAAGALERCERYRSAPRPPRMGARGAPGRTPASSSTGRAXVXKALHAADNTCRAVPWAVLR

SEQ ID NO: 143937 - protein, 35 aa, Oryza sativa
  Clone ID: PAT_MRT4530_44798C.1.pep
HSLSTPYTQAECRLALSTRGVLKRWTCVRSGRHRD

SEQ ID NO: 143938 - protein, 86 aa, Oryza sativa
  Clone ID: PAT_MRT4530_44799C.1.pep
MGCVESKLVATIKYRRVEKDLDKKVAEALKERTKSKKKTFRSVNSITMGLPRFKEGLRNIRDVFDQYDEDSNGTIDNEELRNCLNK

SEQ ID NO: 143939 - protein, 84 aa, Oryza sativa
  Clone ID: PAT_MRT4530_4479C.1.pep
QPTSYEGSRSRYLHGASTYDQAYKNTQNEKFINLGNIFGMQPNMNGYGACLCFRCHHRTRSQIDAFLVTHKHWVKLEVPMANEG

SEQ ID NO: 143940 - protein, 144 aa, Oryza sativa
  Clone ID: PAT_MRT4530_447C.1.pep
MSSSVSSVRLPLRAAPPLYGRREWRADGARAPSPALVAVKPLSCRAPASYRSALLLHRRRRYALPPVAATATSKPVLKDPKKYQEWDSLTAKFAGAANVPFLLLQLPQIILNARNLLAGNKTALFVVPWLGMLTGLLGNLSLLS

SEQ ID NO: 143941 - protein, 574 aa, Oryza sativa
  Clone ID: PAT_MRT4530_44800C.1.pep
MAAAQQAQDSADHMEPLESRLVVEKSPSTSVSVKKQILSSEDHNLSSTALHGASSLKSTKSAQEKGSFLGKGGEQHFIYQPNVYTPQPHTVFSGGYLNHLGQWEEYPHVASADGTDAASPVMYSSYSPVPTMGDSQPYYPLHCPLSSPYYQPPASPSMGYSNSATGMSQFDPMQEYYLPDGLLYSPTPGFHQHFGSFDGTQMQQSVTGIFGQGNIPLASGMHQGSMYSSGSYKARQQVGNFGGSTPNWSAASRRFSPFDRGFKHDKGSLEFMNEQNRGPRATKPKKEVNNSSTEDKNRKSALINDSNLYNQHDFVIEYEDAKFFVIKSYTEDHVHKSIKYGVWASTASGNRKLDAAYREAKEKEATCPIFLFFSVNGSGQFCGVAEMIGPVDFDKSVDYWQQDKWSGQFPVKWHIIKDVPNSLLRHIILENNENKPVTNSRDTQEVRLDHGLQMLTIFKNHEVETTILEDFDFYEQREKAMLDIRQRQKQQHTDSEVQKPMVEAKEPVDLMNQISATFARAVQLGETKGSREDKPKVEDASAAAVAVPENEPVALAETEGLLADSEPSPLKESG

SEQ ID NO: 143942 - protein, 453 aa, Oryza sativa
  Clone ID: PAT_MRT4530_44801C.1.pep
MEAGGFLRGFIMLCVHLVLWCLAPLLPEEVKLKVMVMVCFFGLKEKKVARVARAALPKHFLEGVGMEGLEAVRGVKSVVGVSRVIPRVMVKPFLEDYLGVDVVVGREVKMVRGFYVGLLENMSDGRLELADLEGEEMIGFGSSSGYSGHDHHHLFSWCKEVYLVTPEEKRKWSPLPRDQYPKPLVFHDGRLAFRPTFQATLAMLTWLPFSLPLTIFRTLIFVTLPYPVSVAIGSVFGVRTRVINSPVGQAKADHPRNPKGHLYVCNHRTLLDPVYIAAMLNKKVSAVTYSVSRLSEWISPIPTIRLTRDRDEDRRRMEEALRRGDLVVCPEGTTCREPYLLRFSPLSLELVDEVYLVALVNWSDMFYGNSTGRSKCLDSFYYFMNPRPAYDVEFMEKVPTRMVVDGKTCESKHVANMVQGEIGRVLGFECTKFTRENKYLALAGNRGVVDANQ

SEQ ID NO: 143943 - protein, 192 aa, Oryza sativa
  Clone ID: PAT_MRT4530_44802C.1.pep
MAGTKLVALGFIVLLSIGLANAARVARYSNAEGNGSGQGGGVGYVNGGGSGSGSGAGAAQSGSNGAHATAGGGGGGGGNSQYGGYGAGGGSGVGSSSSQYATGYYSGYGGYSSAGGNGGGGGGGQAGGNWGSSGSGDGSGAGSGSSSANTYYGGPSYANADANGNGNGKGTGTYGGSGGGQGTGSGYGDASP

SEQ ID NO: 143944 - protein, 53 aa, Oryza sativa
  Clone ID: PAT_MRT4530_44803C.1.pep
LVKMFSTGAPIRVRSVNTPTHTVRSRVLYCCNTGFLACKTFCLAGALAVQKKN

SEQ ID NO: 143945 - protein, 151 aa, Oryza sativa
  unsure (1)..(151): unsure at all Xaa locations
  Clone ID: PAT_MRT4530_44804C.1.pep
LFGTSHIQTEQLFDDAGIDSYFESKEIPSGNSDEQPKLMQPVTSNAVSADSGMSIPGXQSAGDYQDCGVSPVLLMGEPPWHPPGPEGSFAGATRDDAITRYKEKKKRRKFDKKIRYASRKARADVRKRVKGPVVKAGEAYDYDPLCETRSY

SEQ ID NO: 143946 - protein, 302 aa, Oryza sativa
  unsure (1)..(302): unsure at all Xaa locations
  Clone ID: PAT_MRT4530_44805C.1.pep
TRAEVGSVVLMEDADWQKGFQINDILTDSEPPIYSATPVEEPTKTHLLYVGSSPSHLEPPWEDMNSWYQVQRQTKVLTLMKQRGISSRYVPQMVASGRVVHPGPCNKPNSSGSCGHPWCSTPILVTSPVGETISNLIRNGLFGVEDALRCCHDCLSALAAASSAGIRHGDIRPENVIRVSIGSRHPYFVLIGWGHAILXDRDRPLLIWFCXSTFALQEGMLCAASDAESLIYLLFFCCGGVCPELXSVDGALHWRETSWXWRVIQLMLGDVSAVLKAFADYVDSFCXSPYPMXYEIWLRRSR

SEQ ID NO: 143947 - protein, 408 aa, Oryza sativa
  Clone ID: PAT_MRT4530_44806C.1.pep
MGALCDFCGEQRSMVYCRSDAASLCLSCDRNVHSANALSRRHTRTLLCDRCASQPAMVRCLVENASLCQNCDWNGHSAGSSAAGHKRQTINCYSGCPSSSELSKIWTFVSDIPNVAPEPNCEQGISMMSISDSGVSNQDNAAGDSSLLDIASATLMSDLGTAGKPKSLIGSSSEAGVNLLPLATDQMAGSVDSTSAKVPYTADQDMFSKDSIYEDFCVDDVDLSFENYEELFGTSHIQTEQLFDDAGIDSYFESKEIPSGNSDEQPKLMQPVTSNAVSADSGMSIPGAKGDSSLCIPVRQARSSISLSFSGLTGESSAGDYQDCGVSPVLLMGEPPWHPPGPEGSFAGATRDDAITRYKEKKKRRKFDKKIRYASRKARADVRKRVKGRFVKAGEAYDYDPLCETRSY

SEQ ID NO: 143948 - protein, 332 aa, Oryza sativa
  Clone ID: PAT_MRT4530_44807C.1.pep
NPRFPILPPGANPRRVYPMAGGASAGPVQVRCAGCRGVLAVAPGMTEFICPKCRMAQRLPPELMPPSPPKASPTPPPQPQPHPQLQPPPLPAPLPPPSRRSAPRAQGVDPTKIQLPCARCKAILNVPHGLARFRCPQCDVDLAVDLSKLRNFLATAGPGFAPPLPLPPPPPPPMPPIPLPQVAVDVEREEDEGGTVGETFMDYRPPKLSLGLPHPDPVVETSSLSAVQPPEPTYDLTIMDELDETKVLSCLQIETIVYASQRHLYHLPTGARAGFFIGDGAGVGKGRTIAGLIWENWKQGRHKALWISIGSDLKYDARRDLDDVGAKYVEVN

SEQ ID NO: 143949 - protein, 123 aa, Oryza sativa
  Clone ID: PAT_MRT4530_44808C.1.pep
MGVGEKLEEGGGKVGVVLFLFCQPPIASRERGEGEGGWQQPLSAGRPLPIEKEERRVGPDTWDPCGAHLPRQLKLAMIIHVDMTLGVLQLYKTGHPRSLGGFDPGFSHVAAESAWDPRGPHMP

SEQ ID NO: 143950 - protein, 100 aa, Oryza sativa
  Clone ID: PAT_MRT4530_44809C.1.pep
MDSSAADGETKEESSKVKMLLPEDFLNTVLLCTAFLYKAMNTIGTLATIWATVVLLGGFSTLIKKEDFWYVTVIAFVQSIGTDSSSSDPDHADLFCSMAN

SEQ ID NO: 143951 - protein, 99 aa, Oryza sativa
  Clone ID: PAT_MRT4530_4480C.1.pep
NMKCCFLRSLKDLIFRLNHLSHQNLIFGHRDHLIYSYYSSISGIGPEIPNLSCTCSQREYTCSQEQTARDIFILASLKTGSDVPHHHHVQTTDSKTSKD

SEQ ID NO: 143952 - protein, 1181 aa, Oryza sativa
  Clone ID: PAT_MRT4530_44810C.1.pep
MAGGGGGGGSPSPVAASAAPVQVRCAGCRGVLAVAPGMTEFICPKCRMAQRLPPELMPPSPPKVSITGPPPPQHHPQHQPRPPPAPLVQPTSRSALRVQSVDPNKNQLLCVRIKAILNESHGPARFRCPQCDVDLAVDVSKVRNFLATAGPGFAPPLPLPPPPQPPMPPIPLPLMPFLPMMPHVPVPMPPMASPAELPEVIIEVAVDVEREEDEGGTVGETFMDYRPPKLSLGLPHPDPVVETSSLSAVQPPEPTYDLTIMDELDETKVLSCLQIETIVYASQRHLYHLPTGARAGFFIGDGAGVGKGRTIAGLIWENWKQGRHKALWISIGSDLKYDARRDLDDVGAKYVEGPAWGSFWQLQLLPESQAPPNSPDSYSDLHALNKLPYSKIDSKAVGITTGVIFVTYSSLIASSEKGRSRLQQLIEWCGSEFDGLLVFDECHKAKNLIPEAGSQPTRTGKAVLEIQEMLPEARVVYCSATGASEPRNLGYMVRLGLWGDGTSFQNFQKFLGALEKGGVGALELVAMDMKARGMYVCRTLSYKGAAFATVEAPLEERMMNMYRKAAEFWAELRVELLSAIEYYAEDKGNSSQIWRLYWASHQRFFRHMCMSAKVPAVVRLVKEALAEEKCVVIGLQSTGEARTEEAISKYGVEMEDFVSGPRELLLKLVDDNYPLPPKPDCFQQVGDEKVAEVQRKRHYGPDVCFKGQARKLAKMEDESDDGTDEYSLLNSWIDILGKEELPEVAKDSSVTSGRSRVLSRDASRGSRRRQRSCSTMAGCDVAADAVRKELSISGDGGLESVDGKDNKQRVRDPTLLVDRAGSATGRRGGGGLTLIGKADPGDGLGNDDGWLSFEKFSSSIHILMQWGLPITSMSMVYVHTHSLLLESYTTPVKSQRETESDHESTESEEEFNMCQICNTEELNAILGEDDVAPLYWLRRTCSPWLSDSSLDWYDTAVERKSNILQIIRSLDLPNNPLDDIIDQLGGPYNVAEITGRRGMLVRASDGKGVVYQTRNKKEVALDMINIHEKQQFMDGEKLVAIISEAGSAGVSLHADRRAKNQLKVANTRLLFTNLGGEKRFASIVAKRLESLGALTQGDRRAGPSLSAFNYDSTYGKKALMMMYRGILEQDGLPVLPSGCSEDQASLQGFITKAKAALVSVGIIRDALMCKLLCKLICLIPG

SEQ ID NO: 143953 - protein, 100 aa, Oryza sativa
  Clone ID: PAT_MRT4530_44811C.1.pep
PTRPATRSVVGVKYRPVVFPNGGAAAAAAGKSKATPASVTEAVYILCLKIHAESLGGHAVDGCGEFMPSPLHYAADPAFLKCAACGCHQNFHRRLHYAPP

SEQ ID NO: 143954 - protein, 132 aa, Oryza sativa
  Clone ID: PAT_MRT4530_44812C.1.pep
FFFFFITTYVDIKMWFLNLMLYIGNPGFLVLAIYIPVAVPCHFAAPHPKSVTQPQPKFGLHHFITRTATASLPCTRSFCSVGPAKFMTSLHTANLFLPVVDTFDYKHFGPKQYYCNISSTLRCKVLRAPKML

SEQ ID NO: 143955 - protein, 1552 aa, Oryza sativa
  unsure (1)..(1552): unsure at all Xaa locations
  Clone ID: PAT_MRT4530_44813C.1.pep
MDRQWMYADRWSKEFIDGVHYFLRVAEANRQRGFICCPCNKCKNQKEYSASRTIHFHLFESGFMPSYNFWTSHGEQGVEMEEDEVEDDNIPDFAQYVGFEGNQTGEEERDADGNDVADDLGQMLQDTKEDCESEKGAHKLDKMLEDHRTSLYPGCEQGHKKLDATLEFLQWKAKNGVSDKAFGDLLKLVKNILPEGNKLPETTYEAKKIVCPLGLEVQKIHACPNDCILYRGEEYENLEACPVCKALRYKIRRDDPGEVDGQLTKKRIPAKVMWYFPIIPRIRRLFRNKGNARMMRWHAEERQQDVMLRHPADGSQWRNIDRKFKEFGKDARNIRFGPKQPDNDIDVYLRPLVEDLKLLWKKEGVPVWDKDKQEEFNIRALLFVTINDWPALSNLSGQSNKGYKACTHCMDETESTYLKHCRKVVYMGHRRFLAANHPVRKKVKHFEHKADHRTKPKHRNGKTVFAMVKDLKVVFGKGPGSQPIESEDGHAAMWKKNSIFWELPYWEFLDVRHAIDVMHLTKNLCVNLLSFLGVYGKSKDTLEARNDLKHMEQRGDFHPEPKEKGSHYLSPASYTLSKAEKESMFEYLESIKKRRCRSRPSSRSGSYPSKEFAQASDMADRDEEQILYDTIAEGSSQYWNEKDGKEDPNQYLNKEGNITRARGDHESFVPDSEKEMLWTTMLETFTLPAGTEDKVKRWTLKKMAEQFQSFKGELYKKYILKGQTPNFDTFPKLRDHWDEFIAYKTSEQGQAMMERNKENAAKKKYHRHLGPGGYSVAMPKWEEMEARLLERGIEPATANWPERSKFWYYAHGGTLNPADGSLTPEHPGRTQGKGVIPWKIGFKEDIHTYRSRMRSKRDTEAKIVDLEFRVSSYELSMQEEVARKVDERMAAHRSNDPQPTIPPAMVSPSGNRSSCASTGQVGSQSMDAMQTQDESTCPVDDITQRTPCELHIPFKNLSIKVASGMTIPTDPSGTYHCRPIPAGYSKVEVELVEGAYEDLELDYPGGDGETHLRDTSHAIILWRRLYIILPGRQAASRAPSSLAPPSPPAPPSPPQDPAPSPPQDPAPSPPHAPAPSPPQAPAPTPLQXLHRLLLGLLHRLLRKLLFRHLQSQGPPRLHRLPTEGQRRRQKLTPPRTRTRGTIXTQEELDAYMASEVKRQFKPQSPEKKIPIDPSVMNFFRGMSAPAKEAIKLSDYERTLKKASSGKSKLVPQLGEQPNQEIEPLVTGKEMTIEEFITDTGLTTDQLLGVTPIEKAEVKYMYELGKPLVKPELLQSLPTQMYKFHPLYMEMSATGREMIGARIRDTDFLQGDDILWINFKGIYELYQLDAFNVSIMSCWILMEIQRARRRGVFDTGFIDPRKVNVAMLDQYPQATEDNLVHLLKAQHYKTFILLPYNIEFHWVLLLFDLSACTVNVYDSMDKKESTFDKVFELIDRAWYRFRHLVRGKWRERLRRKFKFPCAKQKKGTNLCGYYVCEYCHCLADQIITIRKLNFIRMRDNLTTHKEFIAAVQEQLMGFINEQILDPKGEFYYDGNTIHRSLASELATTTTSKS

SEQ ID NO: 143956 - protein, 1619 aa, Oryza sativa
  Clone ID: PAT_MRT4530_44814C.1.pep
PKQPGNDIDVYLRPLVEDLKQLWKKEGVPVWDEDKQEEFNLRALLFVTINDWPALSNLSGQSNKGYKACTHCMDETESTYLKHCRKVVYMGHRRFLAANHPVRKKGKHFEHKADHRTKPKHRSGKTMFAMVKDLKVVFGKGPGSQHIESEDGHAAMWKKNSIFWELPYWEFLDVRHAIDVMHLTKNLCVNLLGFLGVYGKSKDTLEARNDLKHMEQRGDLHPEPKEKGSHYLSPASYTLSKAEKESMFECLESIKVPSGYSTNIKRIISTKEKKFTNLKSHDCHVLMTQLLPVIIRGILPDNVRATITKLCAFMNAISQKVIDPDRLEALQNEVVQCLVSFELIFPPSFFNIMTHLLCHLVKEIRILGPMYLHNMFPFKRYMGVLKKYVRNRARPEASIAKGYGTEEVIEFCVEFIEDLRPIGVLESRHEGRLRGKGTLGRKAIMTVDNNLFCKAHFTVLQHSSLVAPYIEEHLALVRARNIGKSDAWITRHHIDTFPAWLRQHLMGNESINQQLAFLARGPSGSIATFQGYDINGYTFYTRAQDMKSTNQNSFVRVDAMGHDGTTATYYGAIEDIWELDYGPLKVPLFRCQWVRLTGGGVMIDDSGMTTVDLNKVGYSDEPFVLANDVTQVFFVKDMSSKGKKGRGPDEPKRQVVLPGKRKIVGVEDKTDEDYDQLDGDHKEGTIVRRKYVRSTVTADPCAAVVSAVAVAREDHRRARQVVAVLVHHFAVAGDHQSSIAVIDPKVSAASSSSPSPPVGLPPPFWSPVSSPRCPLRLGALRLRPSAAVRRRACAVRAVSSAEPPPLSVTSPLTSSGSSAMPRFKPEYLFGVEGFVQELRTMSFAIGFGTAPFYAQILHDRHEEKCRVKVTLNSNSEEVPSVMFEAGGRNYIHACQEVARIAIGELRDRYSNQLADTEYRYHPRQPQGSDRGSYLETEGIENNATTRHLVEMLWAMDESRAETVLAAQDREDRNRGKICKLEDKMDRLEKELAALKGEAPPQKARIRLTARKRALFVPRYQLAPKVRVVEKEVAPTLADPPVIIISDDEEEESKRNHSKIEWVATQDDEDEPNEPSIDLRCSEELDTTNPVEAGDWLHAIEKKLDLLQCTDQEKVSFASHQLHGPASEWWDHFRLNRITAEPITWLEFTAAFRKTHIPSGVVSLKKKEFRSLTQGSRSVTEYLHEFNRLARYAPEDVRNDEERQEKFLEGLNDELSYPLMTGDYSDFQKLVDKAIRQEDKYNRMEQKKRRMAHFKAQQGSNQKPRLTLGPQSVPQGGSSSVVRPQRQFFNNNAGNNIRNQVPRPVAASTQQQPAKREQGSKPVVCFNCGDPGHYADKCPKPRRVKVVPAQSNSTVPVPKARVNHVAAAEAQDAPDVILVREYPDVFPDDLPANELAEVKRTVDDLLLKGYIRPSSSPWGAPVIFVEKKDHTQRMCVDYRALNDVTIKNKYPLPRIDDLFDQLKGATVFSKIDLRSGYHQLRIKEEDIPKTAFTTRYGIHNVFHVSQLKKCLRVPEEQASPDHIEIQEDLTYVEKPTRILETSERRTRNKVIRFCKVQWSHHSEEEATWEREDELKATHPHLFASSSESRVAAVALTEPARTSATIRLPPIVAEAPFPSHA

SEQ ID NO: 143957 - protein, 60 aa, Oryza sativa
  Clone ID: PAT_MRT4530_44815C.1.pep
RHLYWLPPPNIGWRGALLINASPGGDGLQDDLHGDCMLIGELHSLLEHRGPIQLDHVAHH

SEQ ID NO: 143958 - protein, 437 aa, Oryza sativa
  Clone ID: PAT_MRT4530_44816C.1.pep
MGLQEGSTVASGSALPSGGRGGGGQGRQRPSLRRIQREGRRRRLTDVPAAASPLPSAGSSGRGGRGGPPASKRRQRPSSPPDPAGGELAVACDGNGDILGPVYLHNMFPFERCMGVLKKYVRNRARPEASIAKGYGTEEVIEFCVEFIEDLRPIGVPESRHEGRLRGKGTLGRKAIMTVDNNLFRKAHFTVLQHSSLVAPYIEEHLALVHARNIGKSNAWITRHHIDTFPTWLRQHLMGTPEINQQLAFLTRGPSGSIATFQGYEINGYTFYTRAQDMKSTNQNSVVRVDAMRHDGTTATYYGAIEDIWELDYGPLKVPLFWCQCVRLTGGGVMIDDSGMTTVDLNKVGYSDEPFVLANDVTQVFFLKDMSSKGKKGRGPDEPKRQVVLPGKRKIVGVEDKTDKDYDQLDVNYFGCIDYPYKSIDVWHNLLSFICYI

SEQ ID NO: 143959 - protein, 852 aa, Oryza sativa
  Clone ID: PAT_MRT4530_44817C.1.pep
MDRQWMYADRRSKEFIDGVHYFLRVAEANRHKGFIYCPCNKCKNQKKYSASRTIHFHLFESGFMPSYNCWTSHGEQEVEMEEDEVEDDNIPDFAQYAGFEGNQTGEEERDADGNDVADDLGQMLQDAKEDCESEKGAHKLDKMLKDHRTSLYLGCEQGHKKLDTTLEFLQWKAKNGVSDKAFGDLLRLVKNILPEGNKLPETTNLSGQSNKGYKACTHCMDETESTYLKHCRKVVYMGHRRFLAANHPVRKKGKHFEHKADHRTKPKHRNRKTVFAMVKDLKVVFGKGPGSQHIDSEDGHAAMWKKNSIFWELPYWEFLNVRHAIDSKDTLEARNDLKHMEQRGDLHPEPKEKGSHYLSPTSYTLSKAEKESMLECLESIKVPSGYSTNIKRIISTKKKKFTNLKSHDCHMLMTQLLPVVIRGILPDNVRAKITKLCAFMNAISQKVIDPDRLEALQNDVVQCLVNFELIFPPSFFNIMTHLLCHLVKEISILGPVYLHNMFPFERYMGVLKKYVRNRARPEASIAKGYGIEEVIEFCIEFIEDLRPIGVPESRHEGRLRGKGTLGRKAIMTVDNNLFRKAHFTVLQQSSLVAPYIEEHLALVRARNIGKFDAWITRHHIDTFPTWLRQHLMGNETINQQLAFLARGPSGSIATFQGYEINGYTFYTRAQDMKSTNQNSAVRIDAIGHDGTTGTYYGSIEDIWELDYGPLKVPLFRCQWVRLTGGGVTIDDSGMTTVDLNKVGYSDEPFVLANDVMQVFYVKDMSSKGKKGRGPDEPKRHMVLPGKRKIIGVEDKTDEDYDQFDGQPPFTVTIDPSILLSNEDTPYSRSDHKEGTIVRRKYVRSTVTADVLP

SEQ ID NO: 143960 - protein, 225 aa, Oryza sativa
  Clone ID: PAT_MRT4530_44818C.1.pep
MPVKSSASFRLTALPVVVVAQLLAAAVLTLTLVWVLHFRGGVSWSWHRSSTPQLVYTAHPLFMVIGLVICTGEAIMAYRIMLGSREVKKAVHLLLHLVALAFAAVGLYAAFKFHHDLRAPDIRSLHAWLGITTAALYAFQWLVGFVYFVFPGAVMTMRADYAPWHILLGIVIFLMAICTAETGLARFIFPFHGYPSEAFVVNFTGLAILMFGVAVVVAAILPSRY

SEQ ID NO: 143961 - protein, 512 aa, Oryza sativa
  unsure (1)..(512): unsure at all Xaa locations
  Clone ID: PAT_MRT4530_44819C.1.pep
MFRWHAEERQQXGMLNHXADGSQWRNIDRKFKEFGKDARNIRFGLSTDGMNPFGEMSSGHSTWPVTICIYNLPRWLCMKRKYIMMPIIIQGPKQPGNDIDVYQRPLVEDLNLLWKKEGVPVWDEDKQKEFNLRTLLFVTINDWPALSNVSGQSNKGYKACTHCMDETESMYLKHSRKVVYMGHRRFLAANHPVRMKGKHFEYKADHRTKPKHRSGKTVFAMVKDLKVVFGKGPGSQPIESEDGHAAMWKKNSIFWELPYWEFLDVRHTIDVMHLTKNLCVNLLGFLGVYGKSKETLEASTFVRATITKLCALMNAISQKVIDPDRLEALQNDVVQCLVSFELIFSPSFFNIMMHLLCHLVKEINILGPMYLHNMFPFERYMGVLKKYVRNCARPEASIAKGYGTEEVIELCVEFIEDLRPIGVPESRHEGRLRGKGTLGRKAIMTVDNNLFRKAHFTVLQQSSLVAPYIEEHLALVRARNIRAAVDAWTKKEFSGYSRVYMNLQGRTLNGPK

SEQ ID NO: 143962 - protein, 406 aa, Oryza sativa
  Clone ID: PAT_MRT4530_4481C.1.pep
MVTHGGGGGGGARTIWDDEAAAAAGVMRRSPRCVGEFIGDPLLGRDIVLGLWDSRPISRVSLHRRPMKSPVERRSVVGTLGESRREHTTDLCGGGEERRGEKPRRRQRGERMPRPEVQAPPEIFYNESEARKYTTSSRIIEIQSRITERALELLALPNDGVPKLLLDIGCGSGLSGETLTEQGHHWIGYDISKSMLDVALEREAEGDLLLADMGQGLGLRPGVIDGAISISAVQWLCNADKSCHNPRLRLKAFFGSLYRCLARGARAVLQFYADNVKQSEMIVTAAMRAGFAGGVVVDWPHSSKAKKSYLVLTCGPPSLNSSLPKGKGQDGAMCSDDDESDDGSGDEDGAQTVGIYERNRPKKRQKTKKNGKGKAWLLNKKEQLRRRGREVPADTKYTGRKRKSYF

SEQ ID NO: 143963 - protein, 1507 aa, Oryza sativa
  Clone ID: PAT_MRT4530_44820C.1.pep
MDRQWMYADWRSKEFIDGVHYFLRVAEANRQKGFICCPCNKCKNQKEYSASRTIHFHLFESGFMPSYNCWTSHGEHGVEMEEDEVEDDNIPDFAQYAGFEGNQTGEEERDADGNNVADDLGQMLEDAKEDCESEKGAHKLDKMLEDHRTSLYPGCEQGHKKLDTTLEFLQWKAKNGVSDKAFGDLLKLVKNILPEGNKLPETTYEAKKIVCPLGLEVQKIHACPNDCILYRGEEYENLEAYPVCKALRYKIRRDDPGEVDGQLTKKRIPAKVMWYFPIIPRLRRLFRNKGNARMMRWHAEERQQDGMLRHPADGSQWRNIDRKFKDFRKDARNIRFGLSTDGMNPFGEMSSGHSTWPVTMCIYNLPPWLCMKRKYIMMPIIIQGPKQPGNDIDVYLRPLVEDLKLLWKKEGVPVWDEDKHEEFNLRALLFVTINDWPALSNLSGQSNKGYKACTHCMDETESTYLKHCRKVVYMGHRRFLTANHPVRKKGKHFEHKADHRTKPKHRSGKTVFAMVKDLKVVFGKRPGSQPIESEDGVYGKSKDTLEACNDLKHMEQRGDLHPEPKEKGSHYLSPASYTLSKAEKESMFECLESIKYLNEEGNVERDAEGNEEGNDAEEASGSQPSAGQKRARGQRGAAKKIEGRHIITEVDEDGRPSAPAEAAKNFVRHSGWLVRDNVPVSTVYWRRTRARGDDDSFVPDSEKEMLWTTMLETFTLPVGTENLVKQWTLKKMAEQFQSFKGDLYKKYILKGLTPNFDVFPKLRDHWDEFVAYKTGQQGQAMMARNKENAAKKKCYHHLGSGGYSVAKPKWEEMEASLLERGIEPATANWPDRSKFWSQMRSKRDTEAKIANLEYRVSSYELSMQEEVTSKVDERMAAHRSQDPQPYIHPAMVSPSGNRSSCASTGQVGSQSMDAMQTQDETSCPVDEITQRTPCELHIPFKNLSIKVGSGMAIPTDPSGTYHCRPIPVGYSRVEVELVEAAYEDLELDYPGGDGETHLRDTSHAIILWRKWYIILPGRQAAFRAPSPPAPPSPPAPSPPAPPPPPAAPSPSAPPPPPAAPSPPAPPPPPPPPCLPTPPKTRSRQAPPPARTRATKKAKVDATKNKEPPYDCSQEELDAYVAGEVKRQLKPRSPEKKMPIDPSVKNFFKGMSKTNKEALQISDYDRTLQRAYHNKSKPVPQLGEQPNQEVEPLVTGEDFGITDFIADTGLSVDQLVGAAPIPKAEVAYKFELGKPLVKPEQLESLPIQMYKFHERYMEMSANGREMFGARIRNPDFLQGDDVLWIHFKDLFDLYQLDALNVSLLSAWILMEIQRARRRRVYDTGFIDPQKINSEMIDKYEKDTEDNLVHLLTQQHFKTYILLPYNTEVTVYDSMNKEEKIFDKVFKPIDRACDRFRQLVRGTWKEKLGRRFHFPCAKQEQGTNLCGYYVCEYAHCLSNQICTTRELDRIHMRDNLPHKDFITAVQEQLMRFINEEVLNPDNEFYYDGSTIHNVGPSSSDITPASKSKS

SEQ ID NO: 143964 - protein, 121 aa, Oryza sativa
  Clone ID: PAT_MRT4530_44821C.1.pep
MAKQKIVIKVEMSCDKCRSKAMALVAATGGVDSVALAGDGKDQVVVVGDGVDSIKLTAALRKKVGHATLVTVGEVKKEEKKPEPATAAVVEYSWSYHPYAYAPPAQHVVYQQYPASSPWWC

SEQ ID NO: 143965 - protein, 1788 aa, Oryza sativa
  unsure (1)..(1788): unsure at all Xaa locations
  Clone ID: PAT_MRT4530_44822C.1.pep
MEENEVEDDNIPDFAQYVGFEGNQTGEEERDADGNDVADDFGQMLQDAKEDYESEKGDHKLDKMXCEQGHKKLDTTLEFLQWKXKNGVSDKAFGDLLKLVKNILPEGNKLPETTYEAKKIVCPLGLEVQKIHACPNDCILYRGEEYENLEACPVCKALRYKIRRDDPGEVDGQLTKKIIPAKVMWYFPIIPQLSRLFRNKGNARMMRWHAEECQQDWMLRHPADGSQWRNIDIKFKEFGKDARNIRFGPKQPGNDIDVYLRPLVEDLKLLWKKEGVPVWDEDKQEEFNIRALLFVTINDWPALSNLSGQSNKANHPVRKKGKHFEHKADHRTKPKHRNGKTVFAMVKDLKVVFGKGPGSQPIESEDGHAAMWKKNSIFWELPYWEFLDVRHAIDVMHLTKNLCVNLLGFLGVYGKSKDTLEARNHLKHMEQRGDLHPEPKEKGSHYLSPASYTLSKAEKEIVIRGILPDNVRATITKLCAFMNAILQKVIDPDRLEALQNDVVQCLVSFELIFPPSFFNIMTHLLCQLVKEISILGPVYLHNMFPFERYMGVLKKYVRNHARPEASIAKGYGIEEVIEFCVEFIEDLRPIGVPESRHEGRLRGKGTLGRKAIMTVDNNLFRKAHFTVLQQSSLVAPYIEEHLALLRTRNIGKSDAWITQHHIDTFPVWLRQHLMGNETINKQLAFLVRGPSGSIATFQGYEINGYTFYMRAQDMNSTNQNSAVHIDAMGRDGTTGTLTGRGVMIDDSGMTTVDLNKDKTDEDYDQFDGQPPFMVTIDPSILLSNEDTPYSRSYLKEGTIVRRKKDVVVIVSQARVTADRDEEQILYDTIAEGSSQYWNEEEGNEDPNQYLNEEGNVERDAEGNQEGHVERDVEGNQEEEASGSQPSAGRKRARGQRGAAKKLEGRHIITEVDEDGRPIAPVEAAKNYIRHSGWVVRDNVPVSTVYWRRTRARGDHESFVPDLEKEMLWTTMLETFTLPVDTEDKRFKGNLYQKYILKGQTPNFDTFPKLRDHWDEFVAYKTGQQGQAMMERNKENASKKKYHHHLGSDGYSVAMPKWEEMEASLLERGIEPATANWPDRSKFWYYAHGGTLNPADGSLVFSDQIREAARRLTDAVEASSQGTFRPDREKDELSLALSRMRSKRDTEAKIADLEYRVSSYELSMQEEVARKVDERMAAHRSHDPQPTIPPAMVSPSGNRSSCALTGQVGSQCMDAMQTQDKTTCPVDDITQRTPCELHIPFKNLSIKVASGMAIPTDPSGTYHYRSILAGYSKVEVELVEGAYEDLELDYPGGDGETHLRDTSHAIILWRKWYIILPGRQAASRAPSPPALPSPPQALAPSLPHAPAPSPPQAPALTPPQAPVPTPPQAPTLTPPQAPRPAPSKSRAPQAPPPAPTRATKKAKVDAAKNKDPGYDCTQEELDAYVASEVRRQLKPRSPEKKIPIDPSVKNFFRGMSAPAKEAIKLSDCERTLKKTSSGKSKPVSQLGEQPNQEIKPLVTEMYKFHQLYMEMSATGREMIGARIRDTDFLQGDDILWINFKEDNLVHLLKAQHYKTFILLPYNTEFHWVLLLFDLEACTVNPHPRARAADGRAPRGSHSAHPRAAKPARTAGGGAPRPDGRRRRPPARRSGGRERGGKGERRRRSTAHLGATAAMREAAEAEGGGVAARVDGVGGAPAVGDRNGEVDEVGEDAANPKEAAPRWEAGERRERREVRDDGWAPPVSEGAGRARPMGCLQLVFMLPSSFFLGVGAPLDLAKTDYPVPGPALHGVQDFHWSLYVGQVFANFNLL

SEQ ID NO: 143966 - protein, 789 aa, Oryza sativa
  Clone ID: PAT_MRT4530_44823C.1.pep
MEEDEVEDDNIPDFAQYAGFEGNQTGEEERDADGNNVADDLGQMLQDAKEDYESEKGAHKLDKMLEDHRTLLYPGCEQGHKKLDTTLEFLQWKEKNGVSDKAFGDLLKLVKNILPEGNKLPETTYEAKKIVCPLGLEVQKIHACPNDCILYRGEECENLEACPVCKALRYKIRRDDTGEVDRQLTKKRIPAKVMWYFPIIPRLRCLFKNKGNARMMRWHAEERQQDGMLRHPADGSQWRNIDRKFKDFGKDARNIRFGLSTDGMNPFGEMSSGHSTWPVTMCIYNLPPWLCMKRKYIMMPIIIQGPKQPGNDIDVYLRPLVEDFKLLWKKEANHLVRKKGKHFEHKADHRTKPKHRSGKTVFAIVKDLKVVFGKGPGSQPIESEDGVYEKSKDTLEARNDLKHMEQRGDLHPEPKEKGSHYLSPASYTLSKAEKGSMFECLESIKVPSGYSTNIKRIISTKEKKFTNLKSHDYHVLMTQLLPVVIRGILPDNVRATITKLCAFMNTISQKVIDPDRLEALQNDVEVIEFCVEFIEALRPIGVPESRHEGRLRGKGTFGRKAIMTVDNNLFRKAHFTVLQQSSLVAPYIEEHLALIRAKNIGKSDAWITRHHIDTFSTWLRQHLMGNETINQQLAFLARGPSSSIATFQGYEINGYTFYTRAQDMKSTNQNSAVRIDAMGHDGTTDTYYGAIEDIWELDYGPLKVPLFRCQWVRLTGGGVTIDDSGMTTVDLNKVGYSDEPFVLANDVTQVFYIKNMSSKGKKGKVTDESKRHVVLPGKKKIVGVEDKTN

SEQ ID NO: 143967 - protein, 2432 aa, Oryza sativa
  unsure (1)..(2432): unsure at all Xaa locations
  Clone ID: PAT_MRT4530_44824C.1.pep
MDRQWMYADRRSKEFIDGVHYFLRVAEANRQKGFICCPCNKCKNRKEYSASRTIHFHLFESGFMPSYNCWTSHGEQGVEMEEDEVEDDNIPDFAQYAGFEGNQTGEDEMDADGNNFADDLSQMLXVAKEDCESEKEXAHKLDKMLEDHRTSLYPGYEQGHKKLDTTLEFLQWRAKNGVSDKIRRDDPREVDGQLTKKRIPAKVMWYFPIIPRLRRLFRNKGNARMMRWHAEERQQDGLLRHPADGSQWRNIDRKFKDFGKPLVEDLKLLWKKEGVPAWDEDKQEEFNLRALLFVTINDWPALSNLSGQSNKGYKACTHCMDETESMYLKHCRKVVYMGHRRFLATNHQVRKKGKHFEHKADHRTKPKHRGGKTVFPMVKDLKVVFGNGPSSQLIESEDGHAAMWKKNSIFWELPYWEFLDVRHAIDVMHLTKNLCVNLLGFLGVYEKSKDTLEARNDLKHMEQRGDLHPEPKEKGSHYLSPASYTLSKAEKESMFEYLESIKVPSGCFTNIKRIISTKEKKFTNLKSHDCHVLMTQLLPVVIRGILPDNVWATITKLCAFMNAISQKVIDPDRLEALQNDVVQCLVSFELIFPSSFFNIMTHLLCHLVKEIGILGPVYLHNMFPFKKGKHRPIGIPESRHKGRLRGKGTLGRKAIMMVDNNLFRKAHFTVLQQSSLVAPYIEEHLALVRARIIGKSDAWITRHHIDIFSKWLRQHLMGNETINQQLAFLARGPSGSVVTFQGYEINGYTFYTRAQDMKSTNQNSAVRIDAMGHDGTNGTLTSGGVTIDDSGMTTVDLNKVGYSDEPFVLANDVTQVFYVKDMSSKGKKAKGLDEPKRHVVLPGKRKIVGVEDKTDEDYDQFDGQPSFTVTIDPSILLSNEDTPYSRSDHKEGTIVRRKENVVIVSQAEVMADRDEEQILYDTIAEGSSQCWNEREGNEDPNQYLNEEGNVERDSEGNEEGNDEEEASGSHPSAGQKRARGQRGAAKKIEGRHIITEVDEDGRPSAPAEAAKNFVRHSGWVVRDNVPVSMVYWRRTRARGDNDSFVPDSEKEMLWTTMLETFTLPAGPEKRRRRTTQEKIAIVQQSFEPGMTVSLVARQHGVAASQLFLWRKQYQEGSLTAVAAGEQVVPASELAAAMKQIKELQRLLGKKTMENELLKEAVEYGRAKKWIAHAPLLPGDGDRHTDDTDVLLRIHHVIGELPTYGYRRVWALLRRQAELDGMPAINAKRVYRIMRQNALLLERKPAVPPSKRAHTGRVAVKESNQRWCSDGFEFCCDNGERLRVTFALDCCDREALHWAVTTGGFNSETVQDVMLGAVERRFGNDLPSSPVEWLTDNGSCYRANETRQFARMLGLEPKNTAVRSPESNGIAESFVKTIKRDYISIMPKPDGLTAAKNLAEAFEHYNEWHPHRANPLTPNFDVFPKLRDHWDEFVAYKTGQQGQAMMARNKNNAAKKKYHHHLGSGGYSVTMSKWEEMEASLIESGIKPTTAKWPDRSKFWYYAHGGMLNPVDGSLVFSDQIREAASRLTNAVVASSQGTFRPDREKDELSLALQTPRASRTNTRERHADRDEEQILYDTIAEGSSQCWNEREGNEDPNQYLNEEGNVERDSEGNEEGNDEEEASGSHPSAGQKRARGQRGAAKKIEGRHIITEVDEDGRPSAPAEAAKNFVRHSGWVVRDNVPVSMVYWRRTRARGDNDSFVPDSEKEMLWTTMLETFTLPAGTENIVKQWTLKKMAEQFQSFKGDLYKKYILKGLTPNFDVFPKLRDHWDEFVAYKTGQQGQAMMARNKNNAAKKKYHHHLGSGGYSVTMSKWEEMEASLIESGIKPTTAKWPDRSKFWYYAHGGMLNPVDGSLVFSDQIREAASRLTNAVNIGFKEDIHTYRSRMRSKRDTEAKIADLEYRISSYEFSMQEEVARKVDERMAAHRSQDPQPYIHPAMVSPSGNRSSCASTGQVGSQSMDAMQTQDETTCPIDEITQRTPCELHIPFKNLSIKVALGMAISTDPFGTYHCRPIPAGYSRVEVELVEAAYEDLELDYPGGDGETHLRDTSHAIIVWRKRQEELDAYVAGEVKRQLKPRSSEKKIPIDPSVKNFFKGMSTTNKEALQISDYDRTLQRAYHKKSKPVPQLGEQPNQEVEPLVTGKDFGITEFISDTGLTVDQLVGGAPIPKAEVAYKFELGKPLVKPEQLQSLPTQIYKFHERYMEMSAKGREMFGARIRNSNFLQGEDVLWIHFKDLFDLYQLDAIDVSLLSAWILMEIQRARWRRVCDTGFIDPRKINTEMIDKYEKDTEDNLVHLLTQQHFKTYILLPYNTEVTVYDSMNKEKKIFDKVFKLIDRAWDRFRQLVRGTWKEKLGRRFHFPCAKQDQETNLCGYYVCEYAHCLSNQICTTRELDRIHMRDNLPHKDFITAVQEQLMGFINEEVLNPDGEFYYDG

SEQ ID NO: 143968 - protein, 63 aa, Oryza sativa
  Clone ID: PAT_MRT4530_44825C.1.pep
FFFFFFLGTEDHIISYHEQWGVKATSHGCAWTGDFSFTPSPQNCAHHSTMHPPHQIHINSTLS

SEQ ID NO: 143969 - protein, 60 aa, Oryza sativa
  unsure (1)..(60): unsure at all Xaa locations
  Clone ID: PAT_MRT4530_44826C.1.pep
IQVQALEGPSITMVLHTSTDHRCNLKDGWTDFAVNNSMRLLTMHFHFYKKXHLQATIDIF

SEQ ID NO: 143970 - protein, 170 aa, Oryza sativa
  Clone ID: PAT_MRT4530_44827C.1.pep
MASQQELLSRMSRIRISQKARSSHLIRYGEVRVLARKSAFCMDKEHLKEGRDSRQSGYQEICYVAACNLLVKRKEQCYTWWHTQDEVMTNFVEWMFIYRDEGILSRTIPLSESAARGTLQMETSDEALLKALEQGILIACNSSAKVPDEQQTHSLVSNEYELPPIETAIH

SEQ ID NO: 143971 - protein, 193 aa, Oryza sativa
  Clone ID: PAT_MRT4530_44828C.1.pep
MPCLAGYTWKPRPMLLLHVRLIRKLINGFDQSYNQDTVIYDKEKQIFAWSDLYKYVNEGKFYLTMLKTSCLYGSTPRSTNASTTNVDKASLQIIRLLDRSRTGVPDKERRLEFYMETIRTTRIISILVSLVVLGQGDTYGYKYKAPLGGEGTRNNKSRHKINVQANIRQDKPSDIDIRDMPRPTLSGTYRGRP

SEQ ID NO: 143972 - protein, 98 aa, Oryza sativa
  Clone ID: PAT_MRT4530_44829C.1.pep
MAGSPGLEHTWGGRSGEWFPAVDGSTTRGVADEGWRCRQMTQESDESGRRGCLAVMETTNKVEMGRRPSNFVDGKIECRWCVIDGEIKGEEPRKLSAA

SEQ ID NO: 143973 - protein, 131 aa, Oryza sativa
  unsure (1)..(131): unsure at all Xaa locations
  Clone ID: PAT_MRT4530_4482C.1.pep
MSKFSPLRHLVNSWTKKPNIPNGPLRRGVQISYTRIIRFGYMFWRSCRHPDHASCYMLYINRATASSQYTRXNQSRVCLLLCIMSPLVVYSVPLADVYLXSGEEISRPIALDVLPRKKVPIRFLVSASRDR

SEQ ID NO: 143974 - protein, 110 aa, Oryza sativa
  Clone ID: PAT_MRT4530_44830C.1.pep
MAPPQPKSGLFVGINKGHVVTKRELPPRPSDRKGKSTKRVNFVRGLIREVVGFAPYEKRITELLKVGKDKRALKVAKRKLGTHKRAKKKREEMAGVIRKMRSAGTTDKKK

SEQ ID NO: 143975 - protein, 34 aa, Oryza sativa
  Clone ID: PAT_MRT4530_44831C.1.pep
QVQLEQNGYFKLPKHSIYGYNIRPTQYYEWYSKV

SEQ ID NO: 143976 - protein, 905 aa, Oryza sativa
  Clone ID: PAT_MRT4530_44832C.1.pep
MGCVGIEKKDCYTRLGIQIWEAVFESSSLGWTKKFEAYCPGVKHMEWMPNKLGLAYGDERGLITLLQYNKEQGCFKSKIIHDKPSRGETTSISWSGNSSYLASSFHPRATEDETSNSMIIIHKRASASRTNEVQSIEMEGRPNLIAKFHPVHNCLFIAKRRWGLDIKIFSNTITGFEKESDKWVQVASLVDNIISFYKYDHYSGSEWTPTAKQRVSFQYKVNTGNRFKKILSMGCYIDSTIAIGYTDGSIEIFTKKRGKYVSALNKYWEHHWSKAKCWASTIPCLSWQYNTEKTPKVLAVGGEHGFVLFYDFIEAGPYTEIPNRDYEWETNYYKCPSEPDEEVEEEEEEEEEEPTHDVTQELNSQEEVEPVKETKFAICQQIFCSRTVNMEDIKAIGFKMEYTLINYKVTFENLAYVEAKKRLVNGKYPEKILEWNYNSEHMIRGLIIDKKKGNIIKVDHYNNVKMSYHGMNEMPYEESKNVYGSTFMFEEPEFAAMDTTFSCCEGYLFAQLVDLMDTNPQEVPAPTYMTLYKHLREAFDQGYKDGTLKQSVANDLARYIDKDPSLLPMLQNIKNKGISTFLITDSLWDYTDIVMDYALHQDKVNKHSWLQYFDIVFTGSRSFFSEESHVELFDVEIETGKISNPKEYQLGRSKTNQAPKEIQKVYQIDCNLMPLMPCTVNVHMTQTPHNSPTHTHSYRVTPPRAVYMHAKPPPVKSKDEKCLVWIVEGWNDRFRLGGDVGHLQRLLPNTNDPKQVLYVTHHITKEMLNNKAQGWKTMQIIPELEKELQIIREQGSIRQTFSPTEWFSICLHATMIKGDSDVRRKKGMDSERETAEKRLASKFNDKWGPVMKAGNKNSRFAREVERSAWLYTSRASNLAAERCYEQSDQLMAHDSDLLSFHLGKD

SEQ ID NO: 143977 - protein, 168 aa, Oryza sativa
  Clone ID: PAT_MRT4530_44833C.1.pep
MSSADSHFPTSRLLPAEVEVGQSGDYGQARDGERRWREIPHDAPPWSAPMKSHAPTPRPIKRRRGGGRPPQGEGGKLGSAEGTPIDGSGTGDARDQMSGMVPDGGQIPPFLPLTASTSIDARAAKGELVQHLWKQLERALGGSGAVLVRVQDEAEAAPSGTVPPGSSR

SEQ ID NO: 143978 - protein, 46 aa, Oryza sativa
  Clone ID: PAT_MRT4530_44834C.1.pep
MAPCCAGRAPSAVRSGGDDRRLPTCRILEVELSVLSVNYIGEVTDQ

SEQ ID NO: 143979 - protein, 71 aa, Oryza sativa
  Clone ID: PAT_MRT4530_44835C.1.pep
RACSLLSITEQDMSRTDDKKVHLSIVSSVLCLLVQGQCIQQKPFLFQSKRVYYSNQWNQPVMCIRFDYAKH

SEQ ID NO: 143980 - protein, 55 aa, Oryza sativa
  Clone ID: PAT_MRT4530_44836C.1.pep
FNTQGMHCKPTPLRNITCKPNSTFICHTWQGMPAIAASSKTMAKGLHVGACMQAL

SEQ ID NO: 143981 - protein, 127 aa, Oryza sativa
  unsure (1)..(127): unsure at all Xaa locations
  Clone ID: PAT_MRT4530_44837C.1.pep
IEGEPGFGGVTDDIPAAYGRSDRRRQQXAAADLGGQTGDLIAVRPIATRRSDRQSNFGQTAICRIRGVFAMATPARFXTKPHVFDGTDFSQWCSKMQFYIWRKVSHSYVIPEAINTAAEKTAFEQNC

SEQ ID NO: 143982 - protein, 318 aa, Oryza sativa
  unsure (1)..(318): unsure at all Xaa locations
  Clone ID: PAT_MRT4530_44838C.1.pep
MEDGDDVDGDSDHEEGGGRRRRPYRLARAPSGRAVASLGSATLPPSPASPSPLLKLAGTVSSPTSSAVVIFSFPGSTASPSTPTAARLRLETADRRAGLSILLVVNVASGSPFRRARAPADVAISSSGIAASRLPSALPPLHLNPSAIRRRRHRSSSPIDVPSVARLVVSLRRHSHRHHSGVFHAVLVSVQPLPAALVASSPAPVVVVVVLSSFPVVVVFVPPSSRSRSPPAFRQVCSSPVIVFVLGPASSSLVPAASRLRPRIASEVVFSPFVSAAPVRRRRSHASSRGGKDQSXRCPPLSFWCCHHARCAVVGPGL

SEQ ID NO: 143983 - protein, 73 aa, Oryza sativa
  unsure (1)..(73): unsure at all Xaa locations
  Clone ID: PAT_MRT4530_44839C.1.pep
SXGEFNSLFVQQNTVNKSYNXDNDNVVXPTXAATKTXNYFFSDXXDGAQCXEGMLFEIKVAHVXASVFLXHXF

SEQ ID NO: 143984 - protein, 35 aa, Oryza sativa
  Clone ID: PAT_MRT4530_4483C.1.pep
AMIMNYSGDLFMLNHVFFILRICMCCSYLEIRLWG

SEQ ID NO: 143985 - protein, 487 aa, Oryza sativa
  Clone ID: PAT_MRT4530_44840C.1.pep
MDPNSLKTGGLLLPTIERQCASPPSVIVIGGGISGVAAARALSNASFEVTVLESRDRVGGRVHTDYSFGCPIDMGASWLHGVCNENSLAPLIGYLGLKLYRTSGDNSVLYDHDLESYALFDKAGHQVSKETVAKVEETFERILDETVKVRDEQEHDMPLLQAISLVLERHPHLKLQGIDDQVLQWCVCRLEAWFAADADEISLKNWDQEHVLTGGHGLMVNGYYPIIQALAQGLDIRLNQRVTKIARQFNGVTVTTEDGTSYSADACIITVPLGVLKANIIKFEPELPSWKSSAIADLGVGIENKIAMHFDTVFWPNVEVLGMVGPTPKACGYFLNLHKATGNPVLVYMAAGRFAQEVEKLSDKEAVDLVMSHLKKMLPDATEPTKYLVSRWGSDPNSLGSYSCDLVGKPADVSARFAAPVENLYFAGEAASADHSGSVHGAYSSGIAAADECRKRILMQKGIPDLVQVKAYEEMAGVIAPLQICRT

SEQ ID NO: 143986 - protein, 52 aa, Oryza sativa
  Clone ID: PAT_MRT4530_44841C.1.pep
ISFFYRAGFNCPCILNLAQALTHDNLVCLIFMIGNTLIMETNSIYTSFHAGN

SEQ ID NO: 143987 - protein, 434 aa, Oryza sativa
  Clone ID: PAT_MRT4530_44842C.1.pep
MAEDFGAFMERFVLPPPPPPSSQQLPLHGLTFAIKDIFDIAGRVTGFGNPDWARTHAPAAATSPVVLAALAAGATSLGTTIMDEMAYSIYGENAHYGTPANPCAPGRVPGGSSSGSAVAVAANLVDFSLGTDTGGSVRVPAAYCGIFGLRTSHGLVSAQNVIPMAQMFDTVGWFSRDLSTLSRVTKVLLPLPDDTVKHPTHVTIPMDCFQILGSLDDPTYQIINASVAKKFGSQAIDNTNLGDFISDNVPSIGKFIADFSESELPSVPALSVISHVMLSLQRSQFKANHAEWVNTVKPNLGPGLRENIHGAVASGDDEPLEEFLAVRAEFKSALAALLKDHGILAIPTVPGPPPMVGIQAQAAPLDNYQARAFSLLDIAVVSGFCQVSIPLGKRNGLPVSVSLVARHGADHFLLNVAEELYQTLIDEAAKAWAS

SEQ ID NO: 143988 - protein, 165 aa, Oryza sativa
  Clone ID: PAT_MRT4530_44843C.1.pep
MAGASLTPSRTGAQSSHRKRKVPAAAAAAPAREDEAAEEEDMEELEREVDRLGRRLLQHRREDAARLLNAAASRLTALRPRLLVSDADNIMYIAEVTTASQHIAGTPVAKVDQEKKEKLRIVKAKSEANIGAMPMVLKRIGESIAKIEKLEHLNVNIHPVFKTKR

SEQ ID NO: 143989 - protein, 153 aa, Oryza sativa
  Clone ID: PAT_MRT4530_44844C.1.pep
MPEHLVVDGLAMTTLASIQSFLIDTKQFAFGRNILDSSTAAAAAEIFHHREEATALGGEGRSQRRLQPPQVLEQQRIHGDRHRADAGPPPSRREQVPHRPSLENGWVDREQSPLPLRRPHFHPDHIRRLGGGGGGGGVEALVPAAAGCGAEEV

SEQ ID NO: 143990 - protein, 78 aa, Oryza sativa
  Clone ID: PAT_MRT4530_44845C.1.pep
SLCPLSMIRVLASVFPKLFIAVQCRHSSALLLHEQYEGHSRVRFRWFPIHPRRPGRPPPAFRWLPWLAHVASANAFAF

SEQ ID NO: 143991 - protein, 62 aa, Oryza sativa
  unsure (1)..(62): unsure at all Xaa locations
  Clone ID: PAT_MRT4530_44846C.1.pep
RCDDDVVMDWCRCCEXXASESDAAXNVWSEYVCLSSADLVRLSRRSSDCRCLDRVVGVVFSS

SEQ ID NO: 143992 - protein, 77 aa, Oryza sativa
  unsure (1)..(77): unsure at all Xaa locations
  Clone ID: PAT_MRT4530_44847C.1.pep
PHMGVSNYXPITLPKFNVCKHAFLPHVSLIICLSPISIFSFIKNKSPPTPSPIHXPPPTPXXXKKKKKKKKKKNSYS

SEQ ID NO: 143993 - protein, 46 aa, Oryza sativa
  Clone ID: PAT_MRT4530_44848C.1.pep
MAEKPPLSPSSARNVVPIDPEKFTPDQKKDFDAMMQQARDQFLNSF

SEQ ID NO: 143994 - protein, 163 aa, Oryza sativa
  Clone ID: PAT_MRT4530_44849C.1.pep
MAAMPLLAFACPSTRGVSLQDSSRKYRSSCCRPKGIEDWGGGLLDWVLGESMEVDEMGKFWSRVTQNKPNGPRALEFANFAKPMGGTAINTGSSPRFDVFGKDFGWGRPATVRSGGTDKFDGKVTVYEGPTGAGSMSLEVCLTPVALAKLVADEEFMDAVTAP

SEQ ID NO: 143995 - protein, 103 aa, Oryza sativa
  Clone ID: PAT_MRT4530_4484C.1.pep
EPPPRAAMLALRGARVAHLRYAFAAVGATSTPSFSGFSRRLPLLASAALLPLPGCICFFSGFAVRRDRYRPMHPVCGAVLRFDPDHQGGMVCGCYCSQGGQGD

SEQ ID NO: 143996 - protein, 105 aa, Oryza sativa
  Clone ID: PAT_MRT4530_44850C.1.pep
IQLMIKTIICLPACLSVVLCNSFCLPLACHDMGRLHTLLQRTRRGKRRGHGCYRCIHKNIAYLGANLEEHLVAAMGGGEGERMWRVGGGKGAERERERERENERE

SEQ ID NO: 143997 - protein, 508 aa, Oryza sativa
  unsure (1)..(508): unsure at all Xaa locations
  Clone ID: PAT_MRT4530_44851C.1.pep
MAAAGGGGDAKYNSYKAAGLRGAILEAAHVSCLEDRYALGPQLGWGQFGVIRSCSDMVTGEALACKSIAKDRLVSPDDVRGVKLEIEVMARLSGHPNVVDLKAVYEDEASVHLVMELCAGGELFHRLEERGCFSEHEAAALFRYLMEVVAHCHSKGIVHRDLKPENILLVSKSPSSPIKLADFGLATYIQPGRSLSGMVGSPFYIAPEVLAGGYNEAADVWSAGVILYILLSGIPPFWGKTKSKIFECIRSTELRFPSDPWDKVSDSAKELITEMLRRDPRQRLTAKQXHSWIQDHADQSQDSCGHCHEINLRGEDAGSFDSMGSFSTPLASCSRDVSFNTGGPVACQSMSEEACSPTFACRSSFSAFVAENAPSCALSGFSFGGVCEPCNAVFPSPVASMPSFSFFCGQEPGEPESSPDGDALGEKAHCDATVVALVSSSAPRTAEVLRAAVRANPSRAIGMNSRRNHTIGAGEREHLDVAVAESVIRWASCTNLSTTHSLRASLVC

SEQ ID NO: 143998 - protein, 454 aa, Oryza sativa
  Clone ID: PAT_MRT4530_44852C.1.pep
MKAPPPPSPVAKRARVSPFVFLLVLFLLLFSFLYGEDLKELLGSQAQARPSLHFNAAAAGDGIELPAATAATTEGRTTTRRWRGRLPFAANGDGEEEEEECDVFSGRWVRDEAARPLYREADCPYIPAQLACEAHGRPETAYQRWRWQPRGCALPAFDAAAMLDRLRGKRVMFVGDSLGRGQFTSLVCLLLAAVPDPAARSFATSPDQQRSVFTAAAYNATVEFYWAPFLLQSNADNAAVHRISDRMVRRGSIGHHGRHWEGADVIVFNTYLWWCTGLQFRILEDGPFDAGGNSSTTTWVSTEEAYAMAFREMLQWAREHMDFATTRVFFTSMSPTHGKSQDWGGGEPGGNCYGETEMIGDAAYWGSDSRRGVMRAIGEVLDGDGADVPVTFLNVTQLSLYRKDAHTSVYKKQWTPPTPEQLADPKTYADCVHWCLPGLQDTWNELLYTKLFYP

SEQ ID NO: 143999 - protein, 193 aa, Oryza sativa
  unsure (1)..(193): unsure at all Xaa locations
  Clone ID: PAT_MRT4530_44853C.1.pep
ECIRSTELRFPSDPWDKVSDSAKELITEMLRRDPRQRLTAKQVLEHSWIQDHADQSQDSCGHCHEINLRGEDAGSCSFSTPLASCSRDVSFNTGGPVACQSMSEEACSPTFACRSSFSAFVAENAPSCALSGFSXFGGVCEPCNAVFPSPVASMPSFSFFCGQEPGEPESSXPDGDALGEKAHATPNRWWPSS

SEQ ID NO: 144000 - protein, 266 aa, Oryza sativa
  Clone ID: PAT_MRT4530_44854C.1.pep
MMAFSSKACRCLVLMSFALLPLSMAMDSIGSYCSGNSLAGNSKAVASINSVLTDLVAKGSTGGGFATSSAGKANNVIYGLAQCRGDVSTSDCQACLASAANQILTSCNYQSDSRIWYDYCFMRFENENFIGQTDTDAGVILVNVQAMDNGKAFQKAVGKVMGKATSQASQAGSGGLGRTKDQYTPFINIYGLAQCTQDLSPLACAQCLSTAVSRFGQYCGAQQGCQINYSSCRVRYEIYPFYFPLATSARSATTDMTKYTKIVVHR

SEQ ID NO: 144001 - protein, 78 aa, Oryza sativa
  Clone ID: PAT_MRT4530_44855C.1.pep
EGLRLRGDVIFPRLITRLMYVLLGRREFLHRYRIIWKIISVVADCVFQNRELPNGSCSLFFSKFTVKCFSVLASTTMN

SEQ ID NO: 144002 - protein, 42 aa, Oryza sativa
  Clone ID: PAT_MRT4530_44856C.1.pep
MTISCATLVIAGSTTTPSNHHGASPSQDSNDKINSEIFAVIG

SEQ ID NO: 144003 - protein, 61 aa, Oryza sativa
  unsure (1)..(61): unsure at all Xaa locations
  Clone ID: PAT_MRT4530_44857C.1.pep
MMTIRNICVGSHQXVYYPGVLKAELAXFMFTLIFVFVGQGYGMVFSKLTGGRATTLACLIA

SEQ ID NO: 144004 - protein, 417 aa, Oryza sativa
  Clone ID: PAT_MRT4530_44858C.1.pep
MGTRRRSARARARPPLAMPLAVLLLFACSSGVAAAAAQGIERIKDDPVGKLKVYVYELPPKYNKNIVAKDSRCLSHMFATEIFMHRFLLSSAIRTSNPDEADWFYTPVYTTCDLTPWGHPLTTKSPRMMRSAIKFISKYWPYWNRTEGADHFFVVPHDFAACFYFQEAKAIERGILPVLRRATLVQTFGQKNHACLKDGSITVPPYTPAHKIRAHLVPPETPRSIFVYFRGLFYDTSNDPEGGYYARGARASVWENFKNNPMFDISTDHPQTYYEDMQRAVFCLCPLGWAPWSPRLVEAVVFGCIPVIIADDIVLPFSDAIPWEEIAVFVAEDDVPQLDTILTSIPTEVILRKQAMLAEPSMKQTMLFPQPAEPGDGFHQVMNALARKLPHGRDVFLKPGQKVLNWTEGTREDLKPW

SEQ ID NO: 144005 - protein, 196 aa, Oryza sativa
  Clone ID: PAT_MRT4530_44859C.1.pep
MPRRHSLSLFPFLSLSPLSLSSLFSSGHGRRGRPQRRRSGSSGEGGRGGGVDPEVLRSLLVTVYSHSMAAAAAAVKEEDDSIECAVCLAELEEGDEARFLPRVGRGRRSCGATSPRTPTGPAPMAAPSTRLPGRGGRGGGGRRRGGGGGCEAGEGEGGGEATVLEVLDDVSEPLGGDAAVVGEEVERLLEAGHHGE

SEQ ID NO: 144006 - protein, 101 aa, Oryza sativa
  Clone ID: PAT_MRT4530_4485C.1.pep
MKIYVKTCGTLHEHLLAGGQGGDGQERRETRSPLPLGGRRRRRLGCLLCCFDGGKDGEGKGEELGQCAARALRTTSLWVRDHGVELPEMVVQAGRRRRKPH

SEQ ID NO: 144007 - protein, 114 aa, Oryza sativa
  Clone ID: PAT_MRT4530_44860C.1.pep
MGVELAGGAASWRELVVAEYAIGTRIFFILRHSVRRRQSSSSSVRLPPPAPRPTAGTAAFLSVRRRHPRATALVMLGVLCHSLSLMLSIVMLIAYLFFQLKTHRQLFEPQQVRD

SEQ ID NO: 144008 - protein, 101 aa, Oryza sativa
  unsure (1)..(101): unsure at all Xaa locations
  Clone ID: PAT_MRT4530_44861C.1.pep
QSSSSSVRLPPPAPRPTAGTAAFLSVRRRHPRATALVMLGVLCHSLSLMLRYXVTSGEHAIVSGDAALDLSCACSIVMLIAYLFFQLKTHRQLFEPQQVRD

SEQ ID NO: 144009 - protein, 49 aa, Oryza sativa
  Clone ID: PAT_MRT4530_44862C.1.pep
MGVVPFIIKEDLGAQRWGKKITLMQVHKKRLLFSVKKKIKHDLPRGLTR

SEQ ID NO: 144010 - protein, 205 aa, Oryza sativa
  Clone ID: PAT_MRT4530_44863C.1.pep
APTATPRGRATPARAAVSPRRRRRPPCRTRSRRRRRPGAPTPQQRPGDPCTRPQESSASPVCSPAASRRPDPAGPSGRRGRTGSRGPGRLARRGWTPRRPRRTSPTRPTRRTRPPRGFRGTSPLRPWTARTSGRRASLPPTSRSQPYAAAAARSIGLRCRVIYRSNLLRFTVTPLATTDLYRRGERENVVRRVMGLEFVPGPGIH

SEQ ID NO: 144011 - protein, 243 aa, Oryza sativa
  Clone ID: PAT_MRT4530_44864C.1.pep
MGSRSKISLKLLVDSKSKKVLFAEAGKEFVDFVFSLLTLPVGAVVKLISAGTMQGSIGRLYQSVEHINASYLLPNKDRADLLQPKVLHPDARELLLLQPESGGAGGSPLARFKLYTCAGHCTTAAMEAKAACPQCKQAMDTEVALVLPSASSPAQSSAAASGGDGESSGYVKGLVTYMVTDGLEVTPMSAISSITLINKFSVGKDVELAEKYVSIAMDEGLGILKAALRSDTVLSDVFLAKKK

SEQ ID NO: 144012 - protein, 62 aa, Oryza sativa
  Clone ID: PAT_MRT4530_44865C.1.pep
WFEIDQSVEMVKMKKVRRPWWRRGARAFDHHGRQSLLISSTNRCAFCTYPASPTRTYSTVDR

SEQ ID NO: 144013 - protein, 155 aa, Oryza sativa
  unsure (1)..(155): unsure at all Xaa locations
  Clone ID: PAT_MRT4530_44866C.1.pep
KHQPEEDIALGPNCWICNHXRKSLSSRVLLPLAGGADSTSDASIIWCMCPLVTEDIXIGHELVKADAMRIAQXRDGHFPIDRIXLSKPLXYTVYMGTDYKCPGTTSRSKMPAQYIGSLHWYDPLDYMIYALAVLCAXLTGKRPPYKDEWGCSTEN

SEQ ID NO: 144014 - protein, 56 aa, Oryza sativa
  Clone ID: PAT_MRT4530_44867C.1.pep
ASATRPPRVRTEHGTFSDHVTADPSRCRTAAELASGSNKSTARAARTVSGGDGTSA

SEQ ID NO: 144015 - protein, 99 aa, Oryza sativa
  Clone ID: PAT_MRT4530_44868C.1.pep
MRRRGGALEYGGYKRYVWRVLKQVHPDLGASAQTMDVLDMMMADMFERLADEASRLFKLSGRLTLTFREVQSAVRLVLPADLANHAISEGTKAISNYLS

SEQ ID NO: 144016 - protein, 60 aa, Oryza sativa
  Clone ID: PAT_MRT4530_44869C.1.pep
MHLQDAKEKNQVSRNTLNTPGAPGAEDALGCAIAVAASAYGRSRNHHHRCCSLQVTATVV

SEQ ID NO: 144017 - protein, 938 aa, Oryza sativa
  Clone ID: PAT_MRT4530_4486C.1.pep
MASRGGDGLVGGGRGPLGGRDGRGRGPAGGRGGGRGGGHPQQQQQQQPGYGRGDGGGRGPAPAAGGVVGRGTGGGGGGGRGDGGRGRGRGGGGGDGVRPAMAAAPAASTPGPVAVAARSTPPPTPAVQIPAVASSSSAQPAAAAQPPPAAAAVSALARDVGRQLAVVAGGGRPAPPAAPPAPIPVSSKGVAPPSRPGFGTVGERIVVRANHFLVRVSDNDMIYLYDVSLSPPPKTRRINRVVMSELARLHRESHLGGISFAYDGSKALYTAGKLPFDSMDFKIKLGKELREIYVIVSRSFYSTMFGRQDIGDGLECWKGYYQSLRPTQMGLSLNIDISSTPFFKPISVVEYVKNCLGTPTNANGPDPRRPLSDIDRLKVKKALRGVRVETTHQGKSSKYKITTITSEPLSQLNFSMDGTTQTVIQYFSQRYKYRLQYTSWPCLQSGNPSNPIYLPMEVCTIVEGQRYSKKLNDKQVTGLLRATCQPPQKREQKIIEMVQHNNYPADKVLRYHDSGKEKTCNPRVGQWNMINKKMVGGAVVQKWTCVNFSRMHIDAVHRLCGELVYTCNAIGMVFNEMPEIEVGSAAPNNIEAALSNIHTRAPQLQLLIVILPDVNGYYGRIKRVCETELGIVSQCLKPGRKLLSLDRQFLENVSLKINVKVVASMDWPEITKYKALVSAQPPRQEIIQDLFTMTEVAQNADAPAQKAEGSKKNFICGGMFRELLMSFYSKNAKRKPQRIIFYRDGVSDGQFLHVLLYEMDAIKKAIASLDPAYRPLVTFVVVQKRHHTRLFPEVHGRQDLTDRSGNVRPGTVVDTNICHPSEFDFYLCSHAGIQGTSRPTHYHVLHDENRFSADQLQMLTYNLCYTYARCTRSVSVVPPAYYAHLAAFRARYYDEPPAMDGASSVGSGGNQAAAGGQPPAVRRLPQIKENVKDVMFYC

SEQ ID NO: 144018 - protein, 161 aa, Oryza sativa
  unsure (1)..(161): unsure at all Xaa locations
  Clone ID: PAT_MRT4530_44870C.1.pep
MVASNESSSNIDLFPSTGDNRRLGSKTDSDDDDDIPPDXKXLYHSRLEVEPPVNDPCDEATSDAVTXWVRRHPVLVWLTGKHPFNSEPLLPCLMLDGFITPTPVHYVCNHGAVPKPDWSTRIVEVTGLVKRPARLHRRGANFYSTESAIGLRCFGTQRRPQ

SEQ ID NO: 144019 - protein, 481 aa, Oryza sativa
  Clone ID: PAT_MRT4530_44871C.1.pep
MSRLRRAALAAALAGTAAVAAKLSGISVRVSHPPQDGAATTTRGHLGLVRAHPGLRDLNAALAGSSSGRDALFLDAAHALAAGALRAPTFTGRYLREYAKKLAAAESTVVYRVEMGLALVHARDGRFDQALADVARLVADRPGDPHLRITSAALRLLHGRMGTPAEWLNGLPEDAGWRVAFEVVFAMPGSSPLYTQLAEAVLVKNFEQGEWSVADKLAISLLLTALRLFVSKYSRFPYFTRPKSTPPPPSSGGREIKPVNLQPVFLVECSQAMLASLLRARPLCGERLREARATAERALADAEAEGDDLAAVDVNLLLAFLAARDGDFDDALRRYKAAVQKDPSDSQPYELAAALCAINGDAAESEAWRRDGKQHGRATVAVAVAELELPALLDELVVAAALGSGILTTLDLERGGRRRLVLVAAWREVDARLAAAVLDDDLTLPERVQLRLLRRLLRGETQLLLDTASHGLMKNSTRESD

SEQ ID NO: 144020 - protein, 68 aa, Oryza sativa
  Clone ID: PAT_MRT4530_44872C.1.pep
LLLEPLEGSAKGTFASLPRWLAGSEGLPRSKTVRLLNQPREWGRRGILGPMPPRAKPLPQQQEHNYNG

SEQ ID NO: 144021 - protein, 1865 aa, Oryza sativa
  Clone ID: PAT_MRT4530_44873C.1.pep
MYSEEGNVMMMVEAQDKVENLKQEGRTVQEYASELQHLWADLDHYDPLQLKHDDDIVIGNKWLQRRRVIHFLKGLNKEFEDRRAAMFHQATLPNMEEAISAMVQEEMRQKVMKGSNPVRSAYITINDRECYNCGLKGHVSYNCPSPRNNNGRGVARGGARGGFGGFNGSRGGYGGYVGDRGGRGGERGGRGGSRGRGLGGPRANVVMGESSSITLTGEQAAQWEEWQKNKGPVDSNQQNSAKATTSHFGNFANYAHTGEGTQAHALASTYRHHVDWIIDSGASKHVTGLPNNFSSYSPIAPSETIQIADGSSQLIHGIGSVECTPSISLSSVLHVPSFPVNLLSVSSIIDQFKCIVIFDENSCLFQEKGTGRRIGTGVRRNGLWYINQEEMGLAVVVGDTEKEIILLHCQLGHPSFESLSKLYPDLFTKVDKSRLVCDACEFGKHTRSTYAGIGLRSCEPFILIHSDVWGPCPVTSVSGFEWFVTFIDCYTRMTWIYMLRHKNEVIRCFQDFHKLVTNQFDARVRIIRTDNGTEYINSEFVSYVSDHGIIHQTTCPGAPPQNGVAERKNRHLLEVARSLMFQMNVPKYLWSEAVMTAAYLINRMPSRILGMKSPAELLLGKREFKVPPKVFGCVCFVRDHRPFVGKLDPHAVKCVFVGYASNQKEEFSTVIEIDSREGEIVEVDAHKQGDEDVVIGSIPSFVGDTIEKVVDIGEKVVDISCDKDEGVVVGTIPCPLERVEVQQTKMRVYQRRNKNQVDKVTGKEQVHQRSQIQNQGERSGEPMQEQDKESQQLQQFEYPVPDSSSSLSPTSSSLLETSGNISPTFKQVELPLAQRRETRSNAGRPPIRLGFEHLSSRHDIANYISYSHISPAYKAFIASLQIVPIPKDWRCAKQDPRWKDAMKEELRALEKNKTWELVKLPMGKRAVGCKWVFTVKQTPEGKVDRYKARLVAKGYSQTYGIDYDETFAPVAKMSTVRILISCAVNFGWPLHQLDVKNAFLHGDLQEEVYMEIPPGFGNSQTVGKVCRLKKSLYGLKQSPRAWFDRFRRALCNMGYSQCNGDHTVFYRHRGAHITILAVYVDDIVITRDDVEEIKCLKQRLGEAFEVKDLGPLRYFLGIEVARSSKGIVLSQRKYVLDLLTETGMLGCRTSATPIDRNHQLSAQSGDPVDRETYQRLVGRLIYLCHTRPDISYAVSVVSRYMHDPRTTHLEVVHRILRYLKGTPGKGLWFRKNQHLDVEGYCDADWASSVDDRRSTSGYCVFVGGNVVCWRSKKQAVVARSTTEAEYRAMALSLSEMLWVKNLLLELRLFRNNTVVLHCDNKSAINIANNPVQHDRTKHIEIDRFFIKEKIDNGALRLQYIKSSEQLADCLTKGLGPSEKKIPKTELYYLRIVKGYFQELSLSNIISRFYHLRILDVRQCSGHFNLPSDMSNLIKLRHFLDPNDSFHSAIANVGKLKCLQELKRFEVKGQAEAFALRQIGQLEELKGSLCIYNLENAQTGEEANLLNKRHLHKLELLGIPQLAKWVGNDASHVFSLLEVFIIRDCPELMELPFSHSTCPRSGQEMNLTQFPTLRELEVVNCPKLSSFPHIPWTSSPCRVLIDEVGSDFQRLDYSKNNQSEFCLKVVGKDGHLDMSFWNVLAFSNLTELKVLYLKKCPPLPLKHLLVLSCLRSPTIHDSSNVLLNVEAENTVGYQFQIEGLSIDDCSCSGKELTLLLSLFPKLSMFSLQGCGKIRVLGVAKEQTMAMSALSSSPSGHKLEDAHIGQEQEQEQLRGEDEKAAADAGLLLLPHQLQDLYIENISKLILQFDSLVDGMAGGLRSIGGGLQGLHFLRTLTIRGCPNFLSSYYSSSVVCLLPISILPAISAS

SEQ ID NO: 144022 - protein, 290 aa, Oryza sativa
  Clone ID: PAT_MRT4530_44874C.1.pep
MSPSRPDEADPAADFGSHPTDQELVTKYLRRHVDSGGNPWRYVHEADVYAADPDDLTGKYSPAVASDGSRAWYFFTTVRSKSTGGQRRARAVGDGGCWHSEAGAKDVVGGIRSPRPIGRRQFFSFVNKEGPRRVRSGWIMVEIGLKYAQQNASSDELVLCKVYRSPRAPPAAAAANKSMAAPPPTATKSKTEEATPPPDDVKPVVAAAQTPDTKILRAAKEAAATGCKRKADVKSSGARRGKRLCSRCRAETSESDSETAVLDRSPSIEDETADSSEIHGSSDGKFIRFL

SEQ ID NO: 144023 - protein, 151 aa, Oryza sativa
  Clone ID: PAT_MRT4530_44875C.1.pep
MDPYAILKCRSQEQRSSIASVLWCIADEWNDLTVRIIPKECIAMCNFCYVDCGKGSNPEWNENFVFPVSDKATELLIKLLASDTGSPDDFVGEATIPLEPVYTEGSIPPPLYNVVKDDHSCGEIKVGLPFPPEDVRQRGLPEDFGGWKQSR

SEQ ID NO: 144024 - protein, 47 aa, Oryza sativa
  unsure (1)..(47): unsure at all Xaa locations
  Clone ID: PAT_MRT4530_44876C.1.pep
WVXAAPDVEYRCXVGGXAXTXDRSLXAXXSTYGXILXSKIINDXKTG

SEQ ID NO: 144025 - protein, 52 aa, Oryza sativa
  Clone ID: PAT_MRT4530_44877C.1.pep
FFFFFFFFFFFFFFFFFFFFFFLGNKLWGNFNSGKTGQKHFGACHYPQRFYS

SEQ ID NO: 144026 - protein, 422 aa, Oryza sativa
  unsure (1)..(422): unsure at all Xaa locations
  Clone ID: PAT_MRT4530_44879C.1.pep
SGSPGLQVLARLAAYVPARARPAVVQTRAPCPRHCRRRPPMDIDLDRARALRVLGRGAMGTVFLVEARYGGFRYALKVFDKRSAAATRHDAERRARWELSVLSRLAHPHLPCLLGSAETPGLLAWAVPYCPGGDLNELRYALPDRVFSPAAIRFYVAEIVSALCELHASGVAYRDLKPENVLLRADGHVTLTDFDLSRLLPPKTAAPSSASPPPRMFQGGGHRPRVSARSEIPLFSHATKPDPSPPAANPSAKQQLQSLVRFIMKGDRSELSKKAKSARVSPVSRKPASFASSWGKSFSFVGTEEYVAPEMVRGEGHGLAVDWWAVGVLAYEMAYGRTPFKGKNRKETFRNVLLKDVEFAGDSRRRLPELTDLISRLLERDPRKRLGYQGGADEVRAHPLFRNSGXDMLSVVSQPPYIPPPA

SEQ ID NO: 144027 - protein, 546 aa, Oryza sativa
  Clone ID: PAT_MRT4530_4487C.1.pep
MAGTSTMAPWSDLPSDLLGLVIARLPFPADRARFRAVCRAWHSALRRHVAAPPQLPWIVLPEGTFVTVSDGGVHRMAFPESNTVCIGSTDGWLALHRTDNDDDDSVDGARTTKTRHTFLLHNPFTGATVPLAELGDILDDDFFEEFRVCKVIIRSHPNGGGHLVAVMTNHWDCPLILCQPGKGIWTPDSCTMPFVRVVDIAFFADKLYLITKAEDLFAVDLADDKDGKPTVTSVERIIRQPRSPDGVIDAFRWSDDEDDDDGDAQDNDGDASTNDHDESLNQEGDSENDSEIEPVGDDGIDDVGHQWQYLTGEDLIWKTTKYELEGDDYAVNGSWHLLESSGRLLMVRRECLIAAFVKDADHTRSVDVSKADMDAGTWVPVTGGGLGGQAIFLSELFNKSMPAPAHGEVLEDTMYFVDTPDVWDLKSGRRIRVRFIKVHTRLCAKAQAAAEKKIRDERAKAQKEAEDKRHKGGRGEITRLRRMTVEGGSSALHGEHGRAARCQQQRWSHEDRGERLIGVGGGERLELVVRRQQLVMANPVARSHQR

SEQ ID NO: 144028 - protein, 33 aa, Oryza sativa
  Clone ID: PAT_MRT4530_44880C.1.pep
GRTLNPFDIFIQGRNSNRARSFMVPLIQSRCRH

SEQ ID NO: 144029 - protein, 37 aa, Oryza sativa
  Clone ID: PAT_MRT4530_44881C.1.pep
LVTHMYIFVISLFLLVLYYWYDQFGQNTWVITLFLWQ

SEQ ID NO: 144030 - protein, 58 aa, Oryza sativa
  Clone ID: PAT_MRT4530_44882C.1.pep
MAGGGRWWATAREAPGVAAAISLLRTLAEPYRRPSSRWPLLWKRWIKLFLGNYNHRNA

SEQ ID NO: 144031 - protein, 140 aa, Oryza sativa
  Clone ID: PAT_MRT4530_44883C.1.pep
ELYLGSLLEMLLRRRLKGGHCMMSKDVHRRQAGYESDRAFAQHPKTILATSQHTPCNPTAKRPSAANYPGRTRRRQHNRQHLQSACPTPDRSRRNPPTGKMATQPPLVPSEESGKGRISGLGTQIRNKNMEGSMKGRKRY

SEQ ID NO: 144032 - protein, 411 aa, Oryza sativa
  Clone ID: PAT_MRT4530_44884C.1.pep
MASTSRRWWWWPWATPPPFSSSASRHHKGEGWGLGGPALVKAVGWLLLAGLLFRVLCSFPSSTSSPEISEEPIEVYHDKEYRNRRWHFQSYNFTVSLVWSPFLTKSEVFENENGQSTSEIQLHLDILDPIWTSQYETFDYVVIAGGQWFLKVAVYWENDRVIGCHYCQDKKLRELGFEHLYRRTLQQIFRFIASSNHKPAVLFRTWAPDHFENAEWFNGGTCSRVLPYKKGEYSGKDMDRIMRPIELEEFRNAMAALGGSRNSANLKLLDTYSISSMRPDGHVGPYRYPFLKGPEDEDDGAAELARSGMGLGGSGLEGGGVRKSWMTASPSSPVPPRAPTSFPATIFPSPHMCLSPGCHQRPVELVVVTLLTTATRWMPVTAYMCCGGVAWGHTLSQRTARVVPRRALTNP

SEQ ID NO: 144033 - protein, 421 aa, Oryza sativa
  Clone ID: PAT_MRT4530_44885C.1.pep
MASTSRRWWWWPWATPPPFSSSASRHHKGEGWGLGGPALVKAVGWLLLAGLLFRVLCSFPSSTSSPEISEGKCNLFDGEWIPNPSGPAYTNKTCRFIDGHQNCMLNGRPDMSYLHWRWKPYECELPQFDEVRFLSAMRNKSWGLIGDSILRNQVQSLLCLLSKAEEPIEVYHDKEYRNRRWHFQSYNFTVSLVWSPFLTKSEVFENENGQSTSEIQLHLDILDPIWTSQYETFDYVVIAGGQWFLKVAVYWENDRVIGCHYCQDKKLRELGFEHLYRRTLQQIFRFIASSNHKPAVLFRTWAPDHFENAEWFNGGTCSRVLPYKKGEYSGKDMDRIMRPIELEEFRNAMAALGGSRNSANLKLLDTYSISSMRPDGHVGPYRYPFLKGDKDAKSVQNDCLHWCVPGPIDAWNDLVMKMVLG

SEQ ID NO: 144034 - protein, 428 aa, Oryza sativa
  Clone ID: PAT_MRT4530_44886C.1.pep
MLLLAGLLRRARPPRRPSVRRLSGLLDRYGFVPPASLTPHSASDDGGAKKRRPKKPPYRPPSSLDRGGRPAARSDLPFDFRFSYTESSPGDKPIGLREPKYSPFGPGRLDRPWTGLCAPAVDTTLRDAHADDPAPAAERELEEARRRERERVLGEPLTPAERAFLVSKCQKSRTKKQINLGRDGLTHNMLNDIHNHWKNDEAVRVKCLGVPTVDMQNVCHQLEDKTGGLIIHRHGGQLILYRGRHYNPKKRPVIPLMLWKPAEPVYPRLIKTTIEGLTVEETKEMRKKGLYVPVLTKLAKNGYYASLVPMVRDAFLTDELVRIDSKGLPKSDYRKIGVKLRDLVPCIIVSFDKEQIIVWRGKDYNGTIQDNTQKTSVSVLEEESAGAESENGDQEQASSDWASDECSQLSSSDEMPDDKSAISEADSD

SEQ ID NO: 144035 - protein, 200 aa, Oryza sativa
  unsure (1)..(200): unsure at all Xaa locations
  Clone ID: PAT_MRT4530_44887C.1.pep
MASGGSSNAGSLTQWLREKGFDEEAIGRMSRRCKNLHGLDAGEASGVWDYLLNVVKIERRKLRYVVTKCPKVLTLSVDDKLVPTVQCLTTLQAKPGEVAQAIVKFPQILFHSVEEKLCPLLAFFQTLGISEKQLAKLLMVNPRLISYSIEAKFSQTVDFLVGLGIDKEGMIGKIMAXEPYIMGYSVDKRLRPTAEFLKSA

SEQ ID NO: 144036 - protein, 257 aa, Oryza sativa
  Clone ID: PAT_MRT4530_44888C.1.pep
VADTVNTHGLLSDNKVTSVLMAIRKALEVQVEESSSRELCILTTLARSEPPLWEEALNRIKVIRELELLGVDDARRKLYPSAEESLKHLLWLTEPEAVFNAALGLYDLNLSAIVALNSQKDPKEFLPFLKSLECLPPAIMKYTVDLRLGRYESALKNIVSAGDEYHEDCMKLLNANPQLFPLGLQLFTDPDKRHQILEAWGDQLSEEKCFADAAITYQCCSSYQKSLKAYRDCGDWRGVFTVAGLLKFKKEEILQLA

SEQ ID NO: 144037 - protein, 173 aa, Oryza sativa
  unsure (1)..(173): unsure at all Xaa locations
  Clone ID: PAT_MRT4530_44889C.1.pep
EPYGSIFXSIPTILDSSLAPDGRHILHIFTTSSIEDWEGLPPKEYEAKKEDVAARIIQRLEKKLFPGLSSSITFKEVGTPRTHRRFLARDKGTYGPMPRGTPKGLLGMPFNTTAIDGLYCVGDSCFPGQGVIAVAFSGVMCAHRVAADIGLEKKSRVLDVGLLGLLGWLRTLA

SEQ ID NO: 144038 - protein, 47 aa, Oryza sativa
  Clone ID: PAT_MRT4530_4488C.1.pep
MADTGYRCQVIESVGNAFGTLAFTCATVVLSIFANFFARLLENDNMT

SEQ ID NO: 144039 - protein, 110 aa, Oryza sativa
  Clone ID: PAT_MRT4530_44890C.1.pep
RNLISKRRLEGGNATPARTHGRETEPTSQPTTGLGISISGSQLASPVPAPTAGGGIMTASGSGFVQREPWAMTAGGGDQRSNDERWSGGQPDKQRGAARRSGIAGSMARR

SEQ ID NO: 144040 - protein, 53 aa, Oryza sativa
  Clone ID: PAT_MRT4530_44891C.1.pep
QNKVGESLNKSIFLLSVAYHVFMLYKLYHSHCFHLFDTTKSCLRVKLKCDIVP

SEQ ID NO: 144041 - protein, 119 aa, Oryza sativa
  Clone ID: PAT_MRT4530_44892C.1.pep
MSWHRAGVLLLGAQSCLPVPGVPAVGGVGKKRLLRQRTRLTVDRVHGSGSQKRTAEIDLSKTDGQDLMVYDRSTADGVDDVSGDVITGDGSDGASSPANNGTATRTEDTYGLRATRRTH

SEQ ID NO: 144042 - protein, 165 aa, Oryza sativa
  Clone ID: PAT_MRT4530_44893C.1.pep
RAAGIRHESQETQITDMAVDRPIGDRCLVSNSGDVSTALRKLIDQGMVNVGDIESELGVSSESLEAALVPETSTFSPGLKLKIIKLLQNTIRVPSVQEKCSKEGSLALQGTVFTGESKSLTDTQICSELEEGISSFDHCCPEGDNTNKDWADSVENGFHNCGEDC

SEQ ID NO: 144043 - protein, 73 aa, Oryza sativa
  Clone ID: PAT_MRT4530_44894C.1.pep
SSNYLHVPYCIHNTTIVCSTTNISTTPSNCYISSLVLLAMIIANKSRIDETLTWQCHLIQNLHVSLVYIVWCV

SEQ ID NO: 144044 - protein, 66 aa, Oryza sativa
  unsure (1)..(66): unsure at all Xaa locations
  Clone ID: PAT_MRT4530_44895C.1.pep
XQEAPSXSTXSVVVGRRRRRPRPSPGXRGRRHRXRHGSSTGTXPATXPPPWLQHHLVHLRAMDGEM

SEQ ID NO: 144045 - protein, 116 aa, Oryza sativa
  unsure (1)..(116): unsure at all Xaa locations
  Clone ID: PAT_MRT4530_44896C.1.pep
GRQRRRCSCGWSRRGGAGRRRGRRWRGRGRVQCRAAPGAPXSRRGARRPRARRRGRRKXGASTWETXHSFLPWITPHIINGISYSGGGATGRAASPSPPSPSTLXPIVNGEERACA

SEQ ID NO: 144046 - protein, 68 aa, Oryza sativa
  unsure (1)..(68): unsure at all Xaa locations
  Clone ID: PAT_MRT4530_44897C.1.pep
HASEKKKKKKKNDIKKKKRKEKRADVLXFQILLSSLCEPLSFFIVSPKPISLAAVHNLQTGKSQILPS

SEQ ID NO: 144047 - protein, 73 aa, Oryza sativa
  Clone ID: PAT_MRT4530_44898C.1.pep
YMPQSPCCHALRHMVQGTRPLIGDAHSVPNPFCPNPDPAVILLSTVSCHITCAHLQVFDHLRGTLDSLHIIHS

SEQ ID NO: 144048 - protein, 74 aa, Oryza sativa
  Clone ID: PAT_MRT4530_44899C.1.pep
MVGRQAREASRSLGGSPSLEQPAVAHPLVVADLKASLLLTVQYNATTTAAIVAAWAADEEEDSGAEVRKMVEIL

SEQ ID NO: 144049 - protein, 60 aa, Oryza sativa
  Clone ID: PAT_MRT4530_4489C.1.pep
MVFPSNAHPGRVVEGGGRERGGRNSGDKSSAPAIREEKRRRVASSDWPTMAVSLVGDGFR

SEQ ID NO: 144050 - protein, 458 aa, Oryza sativa
  Clone ID: PAT_MRT4530_448C.1.pep
MALSRRLLPLLLRRGSTPSLSPARALSTAAVTADAPAAAAAAAEEEAMTIKGVRISGRPLYMDMQATTPVDPRVLDAMLPFYLSRYGNPHSRTHLYGWESDAAVEEARARVASLVGADPREIFFTSGATECNNIAVKGVMRFYRDRRRHVVTTQTEHKCVLDSCRYLQQEGFEVTYLPVRPDGLVDVAQLADAIRPDTGLVSVMAVNNEIGVVQPLEEIGRICKEKGVPFHTDAAQALGKIPIDVNQMGIGLMSLSAHKIYGPKGVGALYLRRRPRIRVEPQMSGGGQERGIRSGTVPTPLVVGFGAACEIAAKEMDYDHRRASVLQQRLLDGIRGQVDDIVINGSMEHRYPGNLNLSFAYVEGESLLMGLKEVAVSSGSACTSASLEPSYVLRALGVEEDMAHTSIRFGIGRFTTEEEVDRAIELTVHQVKKLRDMSPLYEMAKAGIDLKSIQWAQH

SEQ ID NO: 144051 - protein, 237 aa, Oryza sativa
  Clone ID: PAT_MRT4530_44900C.1.pep
METFARWRPPPPPAAAGRVSLRPAYGRRSRAATVSPRAFGGGADFDGFVRRAWRGANAGAERLAFEVRQTAQRLDGRFSISRRLAEAARAARARAVEIDAELGIGRRWRSFSVDFSRNWPRYRRELTDFMATPIGRAFTTIFFIWFALSGWLFRVFIFGTFVLPFAAPLLLGTFGNRVAIEGTCPACKRRFVGYRNQVIRCMNCQNIVWQPNNRSSGRASSSRSSGPDVIDVEFEEK

SEQ ID NO: 144052 - protein, 95 aa, Oryza sativa
  Clone ID: PAT_MRT4530_44901C.1.pep
MPASTAQTVPPCSTAADVRIKFVMSHIVFLLATAPPLAGQRSKAEPLEYWSPIWLQQRQGLGLRWFHAWMLRMEGPGDVERSHKARQGVMPAERD

SEQ ID NO: 144053 - protein, 63 aa, Oryza sativa
  Clone ID: PAT_MRT4530_44902C.1.pep
NKLVPSPNKSTVFFYGRKSAKTPKHLPLRIIPRILNEHQDRPSRSVIQVPGAEDLSSSSVASC

SEQ ID NO: 144054 - protein, 138 aa, Oryza sativa
  Clone ID: PAT_MRT4530_44903C.1.pep
MPLPLLPPARRHRRHPCMEPSQPQPLSLLQPNRTPVLQRLCLAALPGCTELLSYALRGLICRSDDLLQCAADAAASRREAAGGVSSIPKGGAVARRKTMCDITNLMRTSAAVEQGGTVCAVDAGMEGITRLVKDLISL

SEQ ID NO: 144055 - protein, 55 aa, Oryza sativa
  Clone ID: PAT_MRT4530_44904C.1.pep
ADGMSPTPCRIGLATASAVPPLTFTWKGPCSNIPRLLNRVRESQTEGSGPNIFYR

SEQ ID NO: 144056 - protein, 267 aa, Oryza sativa
  unsure (1)..(267): unsure at all Xaa locations
  Clone ID: PAT_MRT4530_44905C.1.pep
MFTLYSSSSTTTPSSFQRPLPLGVRRRCYSSSSTTTPKLLSAPSPFTVVCRCYSSSSTTTPSSFQRPLPLLWCEASMLLSLYCGVRRRRXTSMVTGAQGNDARRIRARMRRARAQEATTDDDEGRVSEGLELPRLAAEPADEGSVTAVPPEPHSQPIRRGGTKHAHTAHMSHTGLIQIGPGCHIHPSTHAKLNMRTQLGVGIRSNRKFRSRSSVFRSLKIEDRISMQKMSGQTNSVSVLTEIQQHFHICKENGNFQHKSYKKIRKHL

SEQ ID NO: 144057 - protein, 59 aa, Oryza sativa
  Clone ID: PAT_MRT4530_44908C.1.pep
VSHTHTHTHIYIYIYIYTRKNTRALQRVKVILNLLFLYGLVKMKFTVEIHLDIYIFRKS

SEQ ID NO: 144058 - protein, 191 aa, Oryza sativa
  Clone ID: PAT_MRT4530_44909C.1.pep
VMAMSVCRWPLTPEASGIRFGSHSARGAGPKQAPDDGRPAPGKLREVIAPWAPVPPKVTGLRSPEGFPKSGRRAPEATLGRGSSEGPLKPDMPAGADHISCALTRQAKNQALVDVNKCVLRAPTNSDTVDGCQAEHAITQGMPLPGLGNTRKLKEIIWTGDPEDHKKNLYVLTTLIVIFPVDKSTHWFWSH

SEQ ID NO: 144059 - protein, 562 aa, Oryza sativa
  unsure (1)..(562): unsure at all Xaa locations
  Clone ID: PAT_MRT4530_4490C.1.pep
MATPPPPPRGPSLRSSSPRPTSLPIHTASKIPKRTIHHLGIQESPAKNSQEPEDFREGGSSRTLSIGDSVRGEEEAGEMVRLPYTTALTTLFSYGLLFAFGQLRDFFRKLIDWFKAKNVKGYAPICLGLEDFYVRRLYLRIQDCFGRPIASAPDAWFDVVERYSNDSNKTLKRTSNTTRCLNLGSYNYLGFAAADEYCTPLVIESLKKYSPSTCSVRVDGGTTKLHTELEELVARFVGKPAAILFGMGYVTNSAIIPCLVGKGGLIISDSLNHNSIVNGARGSGATVRVFQHNSPAHLEEVLREQIAGGQPRTHRPWKKIIVIVEGIYSMEGELCKLPEIIAVCKKYKAYTYLDEAHSIGAVGQSGRGVCELLGVDPADVDIMMGTFTKSFGSCGGYIAASKEIIQHLKLSCPAHIYATSMSPPAVQQVISAIKVILGEDGSNRGYPCAQKLARIRENSNFFRXSTKFWLFTIWAPITHLVSVSFAFIATPLLLARARICIYASXTNEDLSKGFVVIRRVGDXMGIKYFLGEPPVIGETARARLQSSTAGIGTFNAQTAGIL

SEQ ID NO: 144060 - protein, 51 aa, Oryza sativa
  Clone ID: PAT_MRT4530_44910C.1.pep
QERPRLGSQQQAQVDIQGQPANVRKQDDRLQQGAEDRQAQRIALILQNRRA

SEQ ID NO: 144061 - protein, 214 aa, Oryza sativa
  Clone ID: PAT_MRT4530_44911C.1.pep
SFLLSFSKLARKQAAGSNGVAGEEEAGGDGKREEWYSKAIAYWQGVEASTEGVLGGYGCVNDVDVKGSDAFLRPLLAERFGAARRHLVALDCGSGIGRVTKNFLLRHFNEVDLVEPVSHFLEAAQENLTECMEVGEDTHKAANFYCVPLQDFTPDEGRYDVIWIQWCIGQLPDDDFISFFNRAKVLHLIHILCKFYCYNDLFLFVLKYSSVLDS

SEQ ID NO: 144062 - protein, 78 aa, Oryza sativa
  Clone ID: PAT_MRT4530_44912C.1.pep
LLCKVKLENLKDKKMSRTAIILHRFRQAAASQSLVETSLQSCPYFGVPLRWLSCTEQTSKWETSTSYQIDDVDQYSPN

SEQ ID NO: 144063 - protein, 79 aa, Oryza sativa
  Clone ID: PAT_MRT4530_44913C.1.pep
LFNPYIYSEMSQTLATVPNHGLCIIFHISSQLASLKLFICLTTSIGCLMTLIIVPMTRSDINPVLSSVLKLIINRLTYL

SEQ ID NO: 144064 - protein, 364 aa, Oryza sativa
  Clone ID: PAT_MRT4530_44914C.1.pep
MGKLTDVTRSNDIQLKIVGHSLTMAMDDGEFFSSRRYCVGGHDWEIRLRPKDPWVGRRDRPLTLKLVLRGAPRTGSGSVKAQLSCCLVDPTQKLRPSEMKTVSHKFHKPGDYSPRAVFMARDELEASGYLTDDSYVVQCAITVLREQPEIAAAAAAAGDSANAAVAPSSELHAYLGALLESKTGADVTFVVSGESFAAHKAILASRSPVFMAELFGAMKVKASERVEVKDMEAPVFKAILHFVYTDTVPELDHRDGEETEAASTATAMAQHLLAGADRYGLERLKLICESKLAERIDVDTVSTTLALAEQHDCSHLKAKCVEFIAAGTAENLDAVLATDGFKHLEASCPSVLTDLVKVARGRKN

SEQ ID NO: 144065 - protein, 58 aa, Oryza sativa
  unsure (1)..(58): unsure at all Xaa locations
  Clone ID: PAT_MRT4530_44915C.1.pep
GKLLTSVLXRCIIGKTDRVTYTNTIILLSYSYGVPLGVYVFQFCFAIWHVTHVTFSPC

SEQ ID NO: 144066 - protein, 54 aa, Oryza sativa
  Clone ID: PAT_MRT4530_44916C.1.pep
MSSRRGGGGGGGRITDEEINELISKLQALLPESSRSRGASRSSASKLLKETCSY

SEQ ID NO: 144067 - protein, 387 aa, Oryza sativa
  Clone ID: PAT_MRT4530_44917C.1.pep
MEAVEEVVVLIVGAGPAGLATAACLAQRHVPYVIVERESCTASLWRHRAYDRLKLHLAKEFCELPHMAYPVGTPTYIPRDMFVEYLDSYTDQFGIRPRYHTAIESAIYDGGKNRWAVLARDTDTSVVTRLTAQFLVVATGENSAASIPPVPGLTRFEGEAIHSSAYKSGRAYTGKNVLVVGAGNSGMEIAYDLATHGAHTSIVVRSPIHIMTKELIRFGMTVVQNLGLTVTTADSLLVMAANFYFGDLSKHGITRPKIGPLLLKSQTGRSAVIDVGTARLIKGGVIKVFQGISKIKTNSIEFHGGKQIPFDAIVFATGYKSTVNTWLKNGESMFKDDGFPKKFFPNHWKGENGLYCAGFARRGLAGIAMDAKNIADHIVATMDQVSC

SEQ ID NO: 144068 - protein, 79 aa, Oryza sativa
  Clone ID: PAT_MRT4530_44918C.1.pep
LAQEPLFWYVCYTFLLQCNLQVLSFDSVYSSVLLLLCYSPFWIISKFHDSDLLVVHWYLHHQCIMYILFFCPHILLSNP

SEQ ID NO: 144069 - protein, 88 aa, Oryza sativa
  unsure (1)..(88): unsure at all Xaa locations
  Clone ID: PAT_MRT4530_44919C.1.pep
TSSAGDSEGGIEMTGSMLLIREFCDRFVPAEKATRTRIFFPEANEVSFARQSAFEGCSLKLDYLTKPSLFEDFGXTTKVKMSDRVRPE

SEQ ID NO: 144070 - protein, 670 aa, Oryza sativa
  Clone ID: PAT_MRT4530_4491C.1.pep
MSTWSGAASMPLRSAAGVFSAADNRLKEIDTLVGEIQMDFRSLHTPNCVFNGEEIEDDDDVVDPEYLEIMTLAGQIRCGVRELQTALDRKRIYDSSYGDEDRSMEETQGQACWFPSASQLELVIHSLDAQLRHCLLCLAMFPADELIKKKMLIHYWIGEGIVQSVTAGKDCFTDLLSRGLIQPACQRQHCSKVHYCKIPPIVSNFLVKTAHRMGFYQFDGEGKPMEDFDSERSRRACLWERQIGGRGDDVNELYGPSSCKDLLTLYNFNRQYVNMDKTWLSKQAEMSTLQLGQWKPSWRHRIEIVSPETLEAATMCESLKYLSLRGISLIEYIPDSIGNLQNLVVMDLSACHNLEKLSDSIGSLRKLQFLDVSECYLLDEMPEGIGSLEELQVLKGFLVGGATSKSNPCRLADLASLPKLRKLSISTGRRALVVQEDELNKLQGCTALESLTITWGAAAAAQGPKRQLISGVEGSIKGTSMGSELLLPPRLEKLDLRRTPMENLMHLLHPGNAENLKRLYIRGGKLKSFGDVEGWNVETLRVRFLKVLECDWERLRASFGKLRFLEMRECPNLTSWECDGEGVWREDDDNGTTHSSCSSLNGGSGGGWSGCGVLMLCYAAGKCRGNFHAKQLSQRGELLTVVWLLVAHFGMGNQYRVEAGHARAKLITEN

SEQ ID NO: 144071 - protein, 292 aa, Oryza sativa
  Clone ID: PAT_MRT4530_44920C.1.pep
HASAHASAHASAGNKLAMQEFMILPTGAASFKEAMKMGVEVYHNLKSVIKKKYGQDATNVGDEGGFAPNIQENKEGLELLKTAIEKAGRPGKVVIGMDVAASEFYTEDQTYDLNFKEENNDGSQKISGDSLKNVYKSFVSEYPIVSIEDPFDQDDWVHYAKMTEEIGDQVQIVGDDLLVTNPTRVAKAIKDKACNALLLKVNQIGSVTESIEAVKMSKRAGWGVMTSHRSGETEDTFIADLAVGLSTGQIKTGAPCRSERLAKYNQLLRIEEELGAAAVYAGAKFRAPVEPY

SEQ ID NO: 144072 - protein, 338 aa, Oryza sativa
  Clone ID: PAT_MRT4530_44921C.1.pep
MATSYCSISNPPLSKTSFPNKQVPGWVLRAISKGKGNYTGGIYTTTKRNLRTGFHVCAVNGGQGTRNVSGAEFPSDYTELLAQAKEAAESAFKDGKQLLEIEFPTAGLQSVPGDSEGGIEMTGSMLLIREFCDRFVPAEKATRTRIFFPEANEVSFARQSAFEGCSLKLDYLTKPSLFEDFGFTTKVKMSDRVRPEDEIFLVAYPYFNVNEMLVVEELYKEAIVSTDRKLIIFNGELDRIRMLVAFLNKREAALMMFENNYPPFFYPKLAELSKTFLPKLETVYYIHNFKGLKGGTLFRCYPGPWKVLRNIGGSFFCLHEQEEMPSLKEVALDILPSA

SEQ ID NO: 144073 - protein, 156 aa, Oryza sativa
  unsure (1)..(156): unsure at all Xaa locations
  Clone ID: PAT_MRT4530_44922C.1.pep
MADVLSAFGFEVIAQSEFGLVSPPETGLTFVENALLKARYASKMTGLPAIADDSGLAVDALAGAPGLYSARYAGIEDDDTANRRKLLAEMQNVPDGQRAAKFVSCIVMLKHEXDPTPKIAFGECFGEILREERGQNGFGYDALFFYPAKQCTFAEL

SEQ ID NO: 144074 - protein, 63 aa, Oryza sativa
  Clone ID: PAT_MRT4530_44923C.1.pep
MEENPHFIMTPNASVSPPRLADFILPCSIRSCIHDLTVVLRRQDQLRVRRRRRRLLDRAVDGV

SEQ ID NO: 144075 - protein, 159 aa, Oryza sativa
  Clone ID: PAT_MRT4530_44924C.1.pep
PGGPSLRFFEVPEPVRSSKTFPPPGLNPSLEMVAPFVNIIKTPLEGFPGPNVPPVEPRQKCFTFGGLPHGRYRGYPPPRFVMGGGPVQTPQDWWGKKRYFPLFFLSFFSESRGEDFFVWAFPCPGIITSILFLGGGKKKKKKKKKKKKKKKKQKKSKKQ

SEQ ID NO: 144076 - protein, 67 aa, Oryza sativa
  Clone ID: PAT_MRT4530_44925C.1.pep
MASAPTASSAVLVIVVLVATLAAGGANAATFTITNRCSFTVFGVFSHMYSVGTTVTSHVAAGGILWS

SEQ ID NO: 144077 - protein, 269 aa, Oryza sativa
  Clone ID: PAT_MRT4530_44926C.1.pep
MRLFEEPPAKLTHWAHPEHELTLAATAGAPFRCDGCQEPGGDGPRYRCAPCNFDLHTDCALPPATLQHPLLFKGGGCTFVFLREPPAPAAASRQCDACGDDVRGFVFHCADRDLDLHPCCASLEDRIVTGGGGDGDGRVFELTKAASSSSSRRRCGVCGDKSRRTFWFYRGRFDGEDVFIHVACVKELAVRRWEASYRRRSGAGQIALAGAPLMEGALQSLPRRTRRSGGFERFSKIVGVIVSAIIAVIFGNPMGLIAAVAGPDGLLRG

SEQ ID NO: 144078 - protein, 267 aa, Oryza sativa
  Clone ID: PAT_MRT4530_44927C.1.pep
MASMYRLPRNAICAACYEGAKAIIAFFNDDDDEHADADQGSVKPSRLTKLNSTTKGLRDAWEEVKQMRCREEETKQRASFLQQGFAAAWKDGIHTDIAVRPGTGPPIQAHKAILATRSEVFRHILAGDDDCKAPAGDSLSLPELTHDELSHLLAFLYTGSLATCTEERHLHALLVAGDKYDVPFLRRACEARLAAGVEAGNVLRTLEVAELSSSAALKERAMGAVVEHAEEVVFSPEYEEFAVRNAALCVQITRALLANKAFPAKTP

SEQ ID NO: 144079 - protein, 147 aa, Oryza sativa
  unsure (1)..(147): unsure at all Xaa locations
  Clone ID: PAT_MRT4530_44928C.1.pep
SDTSRPGRQKRXGVHSEPHTIPPTTRXXGXSAPPXKPTXPPAQKNPTXQTRAPTTNPRARGSATGXPKXPHTSPNRRTPQTPKRSXPGKPSHNNANHGARTKPREATPQNPAPQQNGSKTPRHXQRKPXRPAKRTGETNPAGQPEES

SEQ ID NO: 144080 - protein, 64 aa, Oryza sativa
  Clone ID: PAT_MRT4530_44929C.1.pep
KKYSNYWITHMSRKECYKPQLGMLVQLMKHQFGCITASDLFIYLFIGGEGFGFVRGKLYMYPKS

SEQ ID NO: 144081 - protein, 119 aa, Oryza sativa
  Clone ID: PAT_MRT4530_4492C.1.pep
SVHFCLPLSQGTIKHLWKKNSFSTLTYIVLACELNLYLLSISAEDQCVHRQQDEPTKAALLHITYQASSFGKSAVTAESISSTSAEHSEPRASMKNSAIVDLYPLFLVGGWMEDRLMLG

SEQ ID NO: 144082 - protein, 272 aa, Oryza sativa
  Clone ID: PAT_MRT4530_44930C.1.pep
MEAAILSGLLKILASRMLSLVDQKYNLYKGFKGDAEFLLKELRMIAGAIDEQLLRTVSRGSVLLLSIEELRDLARDIEDCVDRIMYQKTRDQQASLFSINSVTGTSKLQLAKEMKKLRKRADEAKERRERYTVVVGHQSSPVSSDEQRCSGASDGRNLQADLVGIDLPREELLEHLKEAEPKKLKVISIVGFCGLGKTALARELYNNSGLGRSFSKQAWVSAAHGDPSKVLREIIGQLVSNPPSDASVVDLDQLIVNLTDQLTNLRYQQFFF

SEQ ID NO: 144083 - protein, 63 aa, Oryza sativa
  Clone ID: PAT_MRT4530_44931C.1.pep
MQPDSAFHRIARVAAHLSPTPCPQMEEGMRPAPCRANGGTPGIKAAVMRAEEGNGQALEVVMK

SEQ ID NO: 144084 - protein, 97 aa, Oryza sativa
  unsure (1)..(97): unsure at all Xaa locations
  Clone ID: PAT_MRT4530_44932C.1.pep
PTRNLTLSLLRRSKDDYNTTAXTASATAAVVEPDSKGGAGGGAPKPERKGAIDFKWIRENTDGGAANIREPHYGPNLDLVHKVYDKDLALQKEDERL

SEQ ID NO: 144085 - protein, 79 aa, Oryza sativa
  Clone ID: PAT_MRT4530_44933C.1.pep
PEPSSRRLLYRPELCFAPKNSTCIPLARMHFNSCTVLCPSQPTTIPGCTMVVGWVWSCLQFWVILCCPYCKPKCCFPYS

SEQ ID NO: 144086 - protein, 151 aa, Oryza sativa
  Clone ID: PAT_MRT4530_44934C.1.pep
MVASDEFRRVFGSFDQDGDGKISATELRLCVKASLGEDMPDEEVQALMALADTDGDGLLDEEEFVRLVTEMEADGDEEEDDDDETCRCLREAFAMYEMEGRGCITPLSLKLMLSKLGTHLDVAECQAMICRFDMNGDGVLTFDEFKTMMMA

SEQ ID NO: 144087 - protein, 42 aa, Oryza sativa
  unsure (1)..(42): unsure at all Xaa locations
  Clone ID: PAT_MRT4530_44935C.1.pep
KFTWPGIRSXLXHVRSXRPQQSXEGFLSEAAAFLXVGEGLSS

SEQ ID NO: 144088 - protein, 191 aa, Oryza sativa
  unsure (1)..(191): unsure at all Xaa locations
  Clone ID: PAT_MRT4530_44936C.1.pep
GIDTFGPSLWDGATPELAVTGPNVGSNIWLQVPFSGTVGAACYAAPEVGIPAIAFSGASGGNTAFNAKPVPERSXVYAELATTFVKKITDSGKPYLPKDVYLNVNFPKVEGKCTDASKFQWVLTRINSGLLSERDTEWCGEDRLPTETEIALKSGCYASISVGDAADKTTADAARQKIVLEKIKDMLVCVD

SEQ ID NO: 144089 - protein, 84 aa, Oryza sativa
  Clone ID: PAT_MRT4530_44937C.1.pep
ISFSYRSLARRTVRSVINRMGTFCDLRHSLRFWTRILPYQIDDAQVERGNGNSIWDDSTDIKRRTFDCCMVKARGDHYYSYRAN

SEQ ID NO: 144090 - protein, 113 aa, Oryza sativa
  Clone ID: PAT_MRT4530_44938C.1.pep
MRPVQHGAVVNHSVIFGCLSRWLATAVLALESCIHCGIDEIVKQHDSCDNILLWCGKDIGVVYATLNDVVLPCNAGFFTFVWSTGHENFEDLSLVVSVLGAMVAFDIEVYVAV

SEQ ID NO: 144091 - protein, 44 aa, Oryza sativa
  Clone ID: PAT_MRT4530_44939C.1.pep
FFFFFVFFFFFTSNLSFQLYCRYFSLSSHYQQQFLRSSYLFIIL

SEQ ID NO: 144092 - protein, 126 aa, Oryza sativa
  Clone ID: PAT_MRT4530_4493C.1.pep
AEVSRPILCSRQTCSEFSRRGPRSFPGRNRHRPGCLRRRNWRWRLVAPITVSSVMSRHSIPPPSPHHHQPGGSADQAHPPPPPPPRAGCGREWCASMGIIGWRWCSLLLLVVVVVVKRTDAWADAW

SEQ ID NO: 144093 - protein, 81 aa, Oryza sativa
  unsure (1)..(81): unsure at all Xaa locations
  Clone ID: PAT_MRT4530_44940C.1.pep
RVPVAWCEVHLVDSXKCRGWXPRVRLRLLHLRSSTPAVAAPQRQPRHCRRAAAKREVLFFPRRRGLDGERGIPLRRRREDE

SEQ ID NO: 144094 - protein, 40 aa, Oryza sativa
  unsure (1)..(40): unsure at all Xaa locations
  Clone ID: PAT_MRT4530_44941C.1.pep
GRIPMTCHFQYVNLELPRLKRISDYIYXVTLYSLPSKKKK

SEQ ID NO: 144095 - protein, 311 aa, Oryza sativa
  unsure (1)..(311): unsure at all Xaa locations
  Clone ID: PAT_MRT4530_44942C.1.pep
MAAAAAAPRFLPVRPLFLLLLLLVLAGVASGKTVKRDVTALNEIKSLLEWRVDYLWVGDDPGAHGEIPPXSEGTCFHQGDYRGVTALXVYTIAELRPFYISSANLKDIYRHCLSHSTVRGQVHTHKGPLANHKKKKLRWNKLQDVLPPEIGELKKLTHLYLSFNNFKGEIPVELANLPELRYLYLHENRFTGRIPPELGTLKNLRHLDVGNNHLIGTLRDLIGNGNGFPSLRNLYLNNNDLTGVLPDQIANLTNLEILYLDNNNFIGRIPEGLYKHPFLKELYIEGNQFRPGSKSKGTHKVLELPDADILV

SEQ ID NO: 144096 - protein, 335 aa, Oryza sativa
  unsure (1)..(335): unsure at all Xaa locations
  Clone ID: PAT_MRT4530_44943C.1.pep
MAAAAAAPRLLPVRPLFLLLLLLVLAGVASGKTVKRDVXSREIKSSLGWRVVYSWVGDDPCGHGDLXPPWSGVTCSQQGDYRVVTELEVYAVSIVGPFPTAVTNLLDLKRLDLHNNKLTGPIPPQIGRLKHLRILNLRWNKLQDVLPPEIGELKKLTHLYLSFNNFKGEIPVELANLPELRYLYLHEDRFTGRIPPELGTLKNLRHLDVGNNHLIGTLRDLIGNGNGFPSLRNLYLNNNDLTGVLPDQIANLTNLEILHLSNNRLIGSISPKLVHIPRLTYLYLDNNNFIGRIPEGLYKHPFLKELYIEGNQFRPGSKSKGTHKVLELPDADILV

SEQ ID NO: 144097 - protein, 526 aa, Oryza sativa
  Clone ID: PAT_MRT4530_44944C.1.pep
MDLPPLSHQALFAAVRSADAAAVAGLLADAGASGPTTQALAAAQTDAGETALYVAAEAGSEEIVRLLIPLYDLEAATVRSRLDLDAFHVAAKQGHTGAVKEFLGRWPELCSICDSSNTSPLYSAAVKDHLDVVNAILDTDDSCIRIVRKNGKTSLHTAARIGYHRIVKALIERDPGIVPIRDRKGQTALHMAVKGKNTDVVEELLMADVSILDVRDKKANTALHIATRKWRPQMVQLLLSYEALEVNAINNQNETAMDLAEKVPYGESKMEIIEWLTEAGAKNARNVGKIDEASELRRTVSDIKHNVQAQLNENAKTNKRVTGIAKELRKLHREAVQNTINSVTMVATLIASIAFVAIFNLPGQYYVDRDSGGDIGEAHIANLTGFRVFCLLNATALFISLAVVVVQITLVAWETGAQKRVIKIVNKLMWSACLSTCAAFISLAYVVVGPQNAWMAFTISAIGGPIMIGTLLFLAYLLLRPRFKFGEDRQRRIKRASGSKSFSWSIHEGISDLEAFSDHEKRIYAL

SEQ ID NO: 144098 - protein, 61 aa, Oryza sativa
  Clone ID: PAT_MRT4530_44945C.1.pep
PTGPPTGPPTGPPTGPTNTLLAKMYVHVICPIYHRVKKVQPVHCIPQNCVLLIVNQIFSLP

SEQ ID NO: 144099 - protein, 227 aa, Oryza sativa
  Clone ID: PAT_MRT4530_44946C.1.pep
EIEERDKLSRYRRYWTDLWSDDSGDIDRRMTELKGILRWPIDVFGLISVRDSLDRNRNYIFERTRNNCQTLTAKDSSLVLTGPSRAILLMDPIEFEIELRVKGTSPSEDKILSAEAFGYNGTAQRHRCGSLRSMLLSGARSTLEFKYAHIPVALEATIKVRITGGLTDFCGKFIAHTASIKEDVVLLDSGEEMVAISHDGAIHFSRSVVAVEGNGVLTVGVHARQSG

SEQ ID NO: 144100 - protein, 331 aa, Oryza sativa
  Clone ID: PAT_MRT4530_44947C.1.pep
MAAGEGEATTCHKRSAAGQEEEEESKRPRDGSEEEEELLTDLSRYRRYWTDLWSDVSGDIAKRTEFGPMRYTEEPVPPFAKLQDLLEVFSFEVTELKGILSWPIDVFGLISVRDSLDRNRNYIFERTRNYCQTLTAKDSSLVLTGPSRAVQLIDPVEFEIELRVKGTSPSKDKILSAEAFGYNCIAQRLRCGSLRSMMLSGARSTLEFKYAHIPLALEATIKVRITRGSTDFCGKFIAHTASIKEDVILLDSGEEMVAISHDGAINFSRSVVAVEGNGGVLTVGVHARQSGGENMRCSYKEFIPVRCGRSHDTLDVGFCQMSVEVAWSLIF

SEQ ID NO: 144101 - protein, 338 aa, Oryza sativa
  Clone ID: PAT_MRT4530_44948C.1.pep
MAAAAKPEAGEGEATNCHRRSAAGQEEEEEESKRPRDGNDEEEELLTELSRYRRYWTDLWSDDSGDIDRRTEIGPMRYTEESPRFAMLLDLLEVFSFEVTELKGILRWPIDVFGLISVRDSLDRNRNYIFERTRNNCQTLTAKDSSLVLTGPSRAILLMDPIEFEIELRVKGTSPSEDKILSAEAFGYNGTAQRHRCGSLRSMLLSGARSTLEFKYAHIPVALEATIKVRITGGLTDFCGKFIAHTASIKEDVVLLDSGEEMVAISHDGAIHFSRSVVAVEGNGVLTVGVHARQSGDENNSCDYKNFIPVRCGRSHDTLDVGFCQMSVEVAWSLMLSY

SEQ ID NO: 144102 - protein, 152 aa, Oryza sativa
  unsure (1)..(152): unsure at all Xaa locations
  Clone ID: PAT_MRT4530_44949C.1.pep
LSGWWAYPMYWGATPAGXXVKRQCVGHGAPGGAXSSNSNKTGGGVGGXXXHXXXISXXLDHMVGGIYRELGAADVGHPMAVVFPGCRRGDLDRAAASLRAFLLVDILFWTGGVCFWLGFXWTPGTGHLASYAGVVDFCGGCSVPCAFHLAGG

SEQ ID NO: 144103 - protein, 373 aa, Oryza sativa
  Clone ID: PAT_MRT4530_4494C.1.pep
LLARGTRAVSEARMAARAGDTGLSKVRRYWPGRAPDWAWAGAAVAHDEDDARLVSTLDEIKHVEEEALRSPRRRRRRVRQPPEIVSAAPAVDCWHEPDQIEEEEEDDDDAREERRARIRERALLLRQHEEEQLLLHHHHQRHQEDEAASESDETAAESDSDDEQMAVVYMAAPLFVPKSQRDTIRLREEEQHRQRRRLELELDKKRLEDRKAQTRRILLQEIIKEELLAATTASAEAEAAIDGVDTDDEVDQAEEHESWRRREAARVKRSREESGIDENPVADDRPKKMTIKKQMRFMRRYYHKGCFFQDDADGAAQTAAGACEIYRRDFSGPTGLDKMDVSVLPKVMQVETRVACKWQNEDERGLDLGAHEN

SEQ ID NO: 144104 - protein, 108 aa, Oryza sativa
  Clone ID: PAT_MRT4530_44950C.1.pep
MADGVAHGLGGCEQSETCQRTASGLAMPKLDSAEVLGGRQVGLAKVEHVIDNRWHGNARLGSHWIYCMGVFGESSGGASAPTVGMEGNAQREFSSPAHQKNKPKRNMS

SEQ ID NO: 144105 - protein, 265 aa, Oryza sativa
  Clone ID: PAT_MRT4530_44951C.1.pep
MGRIKRVHLQPVMDKLGSRLAGWKGKLLQQAGRKTPVTSVLTSIPTYFLTALKPPKNFLHDMDKIRKRFLWAGDQEISGGKCKVNWPTVTIGDGRKASFWESNWIGEQPLKELAPALYNHAKRKGRTVQEGLANDQWIIDIRHSLTVELVNEFFEVFYHVWKTLFLQKIWERVLSSLYCHDIDHPHDENEARLEWWIKRTSQVGKSKAKALKSIHLLVAWEIWCEHNRRVFRSQEKTMLQLLAKIQDEIKLWSMCGAKDIARIST

SEQ ID NO: 144106 - protein, 92 aa, Oryza sativa
  Clone ID: PAT_MRT4530_44952C.1.pep
MLHTELSWAAFLCLKQSLALVHADVDDDKVLFVPWVKIHFYDQLVAISPLYPIRKRCCREGGEARGGDGAGGDGGSEGEGPATKTGMERNGR

SEQ ID NO: 144107 - protein, 42 aa, Oryza sativa
  Clone ID: PAT_MRT4530_44953C.1.pep
KNEPMRVRTARPADVARQRRRHNPDKISSHPRRGYMWWSEHE

SEQ ID NO: 144108 - protein, 435 aa, Oryza sativa
  Clone ID: PAT_MRT4530_44954C.1.pep
MARLEDMVEARLSVLRGVQSRTNQTFTIFRVPAFLRESSRTSYEPRLVSIGPYYHGAAALRAMEDHKWRYLHDLLSPQGPPEPNHRVPLPPLVSGLSASALVEKMRSLEAEARACYSEQPVDLSSDDFVQMLLLDGCFILEFFRKWRRNQPDVLCDVGWGLTFVISDLLLMENQLPFFVLKKLYVTAFGEQDGQAGNNLLQLLLQYIAGRQVPIRWPNGQVNHILHLYYESFVPQSQRTPQQEQSTTAPRVLPCAVEMSEAGVTFAVRRNSDNGYDVVFDSLRGVMEIPTILIDDAKTPLLANLIAFEQSLGNDEAILLSSYVALMGQLIVTARDVALLRRRGVLENMLANDDDAARFFNHLGDCGAVNHDSHAFVGLYKDVDRYCGTWWRRKTAALRRDYFASPWSAISFVAAAVAVVLAVMQTYFTMFPLKKG

SEQ ID NO: 144109 - protein, 65 aa, Oryza sativa
  Clone ID: PAT_MRT4530_44955C.1.pep
SNGYSFCLANREGELLDKGEHQHIFNFDMDIMSLYGKERVTSGGSPDVHHCDDTSMIIYLTRGPL

SEQ ID NO: 144110 - protein, 99 aa, Oryza sativa
  Clone ID: PAT_MRT4530_44956C.1.pep
MVVAVGRQVDSWACTLPPPLLLAIADEYAAACTTVDSTGTVNVPTADEVADVLSSPGGHREGLERKVKFMTPLVRACMATVSGSGMWGYMTWRIERRGE

SEQ ID NO: 144111 - protein, 78 aa, Oryza sativa
  Clone ID: PAT_MRT4530_44957C.1.pep
IITLSRATFLTIVIKQYKIADCTYDTSTHYVIRHMRCAMTSLCRLTFNPSVLSFKLESRPSITIRHNRLYVLLVVNLV

SEQ ID NO: 144112 - protein, 107 aa, Oryza sativa
  Clone ID: PAT_MRT4530_44958C.1.pep
MRGWRRKVEGQLRSRDMAVGSILLINSDSDSKARAEVKGEGKEPISPAHQLRVRFGKQGWRQKARARHRAVGAIRVKKTASLAEIKITYRTAMKGDKDYKCVCDSVE

SEQ ID NO: 144113 - protein, 221 aa, Oryza sativa
  Clone ID: PAT_MRT4530_44959C.1.pep
MATIRGKFGIIMVAMILVVRIIAFASASDNDELPALFNILQQKPGKAAQVGSDCFDECWRDCILGTPFTSYQDDNGVKASPICFVNLLPSVAPPLNEASIVGGEVKGLSNGVELGFGAVEKDVVDAIPFLSKCPRQPALMPVAVYSDGRLVAAMTMGMEAPDLPAPPRIEVENCFSLSENTGSMVDMINVAARCAFLLCATSSDNDELVAPFDTSNGLRTL

SEQ ID NO: 144114 - protein, 182 aa, Oryza sativa
  Clone ID: PAT_MRT4530_4495C.1.pep
GPVRIPGFITRALNTPKPTASVTFKVTVMGSSSAPSVAFFSSRGPNKASPGVLKPDITGPGMNILAAWAPGEMHTEFADGVSLSFFMESGTSMSTPHLSGIAAIIKSLHPTWSPAAIKSAIMTSSDVADHDGVPIKDEQYRSASFYTMGAGYVNPSRAVDPGLVYDLHTNDYIAYLCGLGIG

SEQ ID NO: 144115 - protein, 123 aa, Oryza sativa
  unsure (1)..(123): unsure at all Xaa locations
  Clone ID: PAT_MRT4530_44960C.1.pep
GTRTPTGTRVSAPSWATCGPPPPTPSFTCTTPLPTATSRPGRTPTPXGAPMPSAGPTPPSAPSRPAPTTRPSASSASSPTPPSARSRTPSAARPSATSTTTRRDGVLLFSRLQLADSGLMTML

SEQ ID NO: 144116 - protein, 83 aa, Oryza sativa
  unsure (1)..(83): unsure at all Xaa locations
  Clone ID: PAT_MRT4530_44961C.1.pep
QKETIDHILLDCPKSKLHTIXQPLYFPSNNACFIEWWCDARKKVDKANRRCFDTIVILVAKNSMVENDIKVNRLDISIVEVVP

SEQ ID NO: 144117 - protein, 121 aa, Oryza sativa
  Clone ID: PAT_MRT4530_44962C.1.pep
MEQPSTHSLGDMPQSGRWRAVPMLAMARSSSVEAGSGLSHYHGRTTERKSAPACLEVVVAIRDTAGVLQRVDTGGKPALEKRWGDCGACERMGGMESRMIPIVPLEIGRLDSIWYHQVLVP

SEQ ID NO: 144118 - protein, 78 aa, Oryza sativa
  Clone ID: PAT_MRT4530_44963C.1.pep
PSLSSQILSKESTKLPPAPGWPRLVITTGDRVLVIYSMKVFDVASETVHLQRRWIMNSNKNIGDGTDSQSGWIASVEI

SEQ ID NO: 144119 - protein, 46 aa, Oryza sativa
  Clone ID: PAT_MRT4530_44964C.1.pep
GACIGGGGQGAQQAGNLLVPEGCIDLVAKNFDSTVRSEDGRCFYTF

SEQ ID NO: 144120 - protein, 324 aa, Oryza sativa
  Clone ID: PAT_MRT4530_44965C.1.pep
MKWGLRSSRHNQREKQQRTQEEEHKHEQQEDKGNKSRAAFLSFSPLAWLSKLTAKNNAAAAKPKPAAPADKSAVAATGGFPSCFFKGASSSTSTSVSLSSSAASQSSLADSSPADHQAPRRLSVGNDGDTAEAAAARQLYHRRRHYSVGGDRDLQTLRNLIPFSRAASPIPVPAPFVPALKTTPPLLPSDTDEEKRPRSRRRRRRSGGGGRRSFSGRTPGARVAATVRVRSPRRVASAAAAAVSELERFAVVRRTSDPQREFRASMVEMIASKRIGRPEELETLLACYLSLNADEHHDCIVKVFRQVWFELNPARVAAVAPPRS

SEQ ID NO: 144121 - protein, 113 aa, Oryza sativa
  Clone ID: PAT_MRT4530_44966C.1.pep
FPPLFLLLPPAAAAASSSLPLTRDDDGARELAGGSPPPLPLRGSRARLPPPASPPRTLGISRSPFPRAPLEGYFAAAANPSFRRRGEGRWREGDRAVRKLLDIDYLWWMTSSQ

SEQ ID NO: 144122 - protein, 297 aa, Oryza sativa
  Clone ID: PAT_MRT4530_44967C.1.pep
MGAGVSDLAAGMEAVGKVAGGAGLGELPELCAAEVLLHLDAPEICRLARLNRAFRGAAAADFVWEAKLPENYGYLLDFVDGAMEGGGGGRERSVMGKKEVYARLAKAVPFDGGKKELWLEKSKGGVCIALSSKSLVITGIDDRRYWSHMPTTESRFHSVAYLQQIWWFEVVGELEFCFPAGTYSLYFRLHLGKASTRFGRRVCSSEQIHGWDKKPVRFQLSTSDGQHALSQCYLDEPGSWILYHVGDFVASTTEQPIKLKFSLAQIDCTHTKGGLCVDSVLIYPKGFQQEKVISSQK

SEQ ID NO: 144123 - protein, 607 aa, Oryza sativa
  unsure (1)..(607): unsure at all Xaa locations
  Clone ID: PAT_MRT4530_44968C.1.pep
MAVVSGPDKGRGAEAVVVVAVRAAARDISKAALVWALTHVVQHGDTILLLAVMPPPHNSGKKFWGFPLFAGGCASAHRSVLTQNSDVADLCNQMMLKLRDFYDPNKIITKLKVIPASPGGVATESKRAQASWVVLDKELKHEEKRCMEELQCNIVAMKRSRPKVLRLNLVRSPPKESKSPLPPLPELSDSVGETESSINEQRCPIREPAVTPSSSPESETAFGSTDVGTSSVSSSDPGTSPYSASETNSTFKKEATKDNFQHSDVNVSDSESEASTPPAASSLQPWMADILKGSASSRLAGNRPRRTRTPTADALLEKISKLDLLAEISAIRSRSDLNFRGNVRDVVSLSRSAPPGPPPLCSICQHKTPVFGKPPRWFSYAELELATGGFSQANFLAEGGFGSVHRGVLPDGQAIAVKQYKLASSQGDVEFCSEVEVLSCAQHRNVVMLIGFCVEDKRRLLVYEYICNGSLDSHLYVVFSLNFLPHNEGEVSSYRVQVGDFGLARWQRDGDMGVXTRPIDTFGYLSAEYAQRGYTTERAGDCCLGIVFFXLVTXRWAVDMDRPSGQRSATEWGTAVLEEYGREEPIAPWRGEWFREYGIPCILYATY

SEQ ID NO: 144124 - protein, 111 aa, Oryza sativa
  Clone ID: PAT_MRT4530_44969C.1.pep
MAALQRSSQTFRRSGSSGLVWDERLMLDGHSERDQEDGALELRHSRSVGLIGLQRRHGDGAGHTRCNNSQAFHTRRVPPAQDPPSPKVPGCIFCGIFRKPVLSEPSKPRRF

SEQ ID NO: 144125 - protein, 105 aa, Oryza sativa
  unsure (1)..(105): unsure at all Xaa locations
  Clone ID: PAT_MRT4530_4496C.1.pep
FYILGYPYGNLIARPTDSMFENDLTLTQFVERNFPDHILHILDVHLXEESQGFIHPTSKPKIPHTHAWFLFHHYPFLVRVGSPQTYEPERSTLRFMRFQLHIRSH

SEQ ID NO: 144126 - protein, 552 aa, Oryza sativa
  Clone ID: PAT_MRT4530_44971C.1.pep
MLSNSVHLTRIHHETIISPIRSQELARFAAINTRKSLGNPYNCSTLTNRRHKLETPQKESTRLGERRTRVVIASNHKQEEEEEEEEEEEEEEEEEEEANQIEAARTNKPQRTSPPPTPPSSLPPLHRDGSPGCPTSSSPLSLARSLAAASSSCFCLSGRSAILHKPKEKKILSLSLRNRNDFRLREGRGAVKAPTTTTGRGAHAHRQVGPTCCRLGVWFVATPFDRSNRPDRGLRRGAAPVRVAVEWGPYSAMAHASVGCYGARYRIVIHVPPPPPHRHPPPPPRAIRRRCRRPIAIRRRRRSGRARMDAGWPIGTGGEHDGRSEMTASSTICRTGRIRRGMAMTTTGDDDLGWRRIWRRRRRRLATARRRATTTSETTVDNSADDGWRRRNDDLSDLAMARRRRRPAIVDLAPARRRRATAASGNDNLDSTSDGILTTTVGGERKGRGMLSAQRLSSALDASLHGEEGHSLEHRVVKWSTENPKRSCVGHGHLPWLSVYFNRRQMDHIHVKTYYTPGFQTGTTNPGRSLVPGEKTGSKNTSLVPVGVTNRD

SEQ ID NO: 144127 - protein, 90 aa, Oryza sativa
  Clone ID: PAT_MRT4530_44972C.1.pep
MSDVGGDDASNGNEDGATSKGTPASKGVTIPFDYSKITIPSHNFVSVPSGRAPPFDGTHYAAWKHKMKLHLISLHPSIWKVVCTGVGAPN

SEQ ID NO: 144128 - protein, 361 aa, Oryza sativa
  Clone ID: PAT_MRT4530_44973C.1.pep
MFTGCGLFACVRRCDGGDVRKRGEAGAMSSRVAADPAGVEEEGSCKNVAAASARQLAWADVESVTGGFSSRVIGHGGFSTVYLASLSSSRLGAVKVHCSSERLHRAFRQELEVLLSLRHPHIVRLLGYCDERDEGVLVFEYAPNGDLHERLHCSEVAGGVASVLPWARRVAIAFQVAMALEYLHESRHPAVIHGDIKASNVLLDANMNAKLCDFGFAHVGFSATVGCRPSARAVMGSPGYVDPHLIRSGVATKKSDVYSFGVLLLELVTGKEAVCRDTGRRLTAAVGPMLSEGKVADVVDRRLGGEHDGAEAAVMAELAMQCIGDSPGLRPSMADVVRALQEKTSALASAVGSRLDRKMMF

SEQ ID NO: 144129 - protein, 70 aa, Oryza sativa
  Clone ID: PAT_MRT4530_44974C.1.pep
HCKPINMAMGIYTQFKNGNSKRLFTTKSLSLLSKHFEELAKPWHENVFNTGWIKRPGSTKRIRVGRKPLE

SEQ ID NO: 144130 - protein, 85 aa, Oryza sativa
  Clone ID: PAT_MRT4530_44975C.1.pep
GSLSQKLGGPKLHPLFPPRGEDKEIGWPRPIFGGKFFFWGFGKNTTPVWENVWPQKGPGLFETFFFGPPNRGFFGKLGPRTFEGA

SEQ ID NO: 144131 - protein, 187 aa, Oryza sativa
  Clone ID: PAT_MRT4530_44976C.1.pep
MASSMEDNHSNSSQSLWRLSLFYPYLESVIADVQSSVLVDPVYICVECSEVHRNQQTMAAHCRSHIRSDGMEKGTVRHIKYNPDHTFSLLCHQSSNKIYYQVTVPNYPNNPNSSEIGVVWASDILKKCVDLGYLQHPASVNASSAVFVPAATPTALDLTLRLGPRSTAGSTNRQIVEALFAGSGGSA

SEQ ID NO: 144132 - protein, 600 aa, Oryza sativa
  Clone ID: PAT_MRT4530_44977C.1.pep
MTELASGAVSSLLAIIRNEAALLGGVRDDVQFIKEEMKSMNSFLAHLAKSAPQGGEHDELRGGKPDKNQATCEPDVPPDKNQATGEHAGVMDHNGEAYFTEIEQKIDEIKQEFKKQLKIKGIMDKIKHHLIEYKIKHDLPNECPLIILKFDDMMDGSRWEEFNLDWTMGCRRQRFDALIHRYLVCPVDIGGTGKVKSCVVNDPVHGFITTIARKQHIVETRLSHHLARHFSIFNDLRLRSSDGIHTFFQSLSRSSRVSLLKVLDLEGSQCFGVKNQRYLKDICSKMLLLKYLSLKKTEITQLPSEINCLRELEVLDIRETKVPANATVNVLLLKLKRLLAGHIDSSPRNSGTSVQIPHRIDKMVNIEVLSNVKAQRRDDLEDTGKLWQLRKLGVVVDDKRGHLGNLLKAISNLHECIRSLTITISTTTHKDTPSNPELPDHIGSDLPHPKKLESLSISGARHLFPLLIKSDNNKLAKVTLSSTPLNQDDLEVLAKLPKLQCVRLQHISCIVSELIFKEENFKCLKYLLIEGFNLTNITFEDGSACELEKMVLSSTSIESVSGVDVLPKFKELELNNSHVPNELKEAVENNKRIILKCNEP

SEQ ID NO: 144133 - protein, 48 aa, Oryza sativa
  Clone ID: PAT_MRT4530_44978C.1.pep
MPLRVWRRKSLAPIVGFNRFTEVADMEIVNTLSEMHPISNIIYQSRFK

SEQ ID NO: 144134 - protein, 1295 aa, Oryza sativa
  Clone ID: PAT_MRT4530_44979C.1.pep
MTELAPGAVSALLVVIRNEAVLLRGVRDDVQTIKEEMESMDSFLAHLARSAPPGGEHNEQVRTWMNQVRLLAQDCKNCIDLYLYYSGNKDIYRAKGRLQRGLWWVYWSMRKMVAQHRAAVQLSQLKDRARGVGDRRLRYGVEVPATTKAAAAPDAAGGFAAGDDGGEDCEDQLAVATVIHHSARRAVFEAPTLDDYLKAKLLEWIEEIPGGATETLSMAIVVPNAHNKEVIALAHETLVAPNYYRRSIIVNVPAMHLDSLPLRPKEVLYYILQELMRAKVAGSQKQATDQGQWEEDPDPWKDYVKKCGNHRSKKRMLRKIKRKIEKMKIYEKFEKIKSDIQDGQQKGDKTLLLQLQKKGVHRVDLHVLLQLLLFQSQQDQASAVDMYKLSEWNGSIIMKIARKLKRHMEADEKTKEFNKQIGVVEEITKQGGERKEEEKNEGEEENGEEEGKEKELKGRKDKEKKEKGGREERKEEEHHEKQEKEKEEERKEEGQNEEKEGRKEVGEEEKEDDDDDYDDDDDYDDDDYDDNEEEKKYDDDDDDDDDDDDPIHLHTAQYMQILQEVFLKTISCKAQQQERLAAKQATKTATTTLDEERIKQMINEAKQDILRELQGGKPDKNQATGEHTSVSDQNEQAYFEEIEQMIEEFKRKLKDQLKIKGVVDKIKHHLQGECPLIILKVDKMMDGSRWEEIRKALSLLECSADALIFTTESTEQAKGYCYPPREPIDYSLVGLYHYTVLEITSKQINEDNYNPQIFRDILEKCEGHEFCMKIFTHALYANPKRSNKELSKLHSTLQASHKSLDAIAKTMFMYSYNDLPKEYKSCLLYLAIFPKGEKIRRSTLVGRWVAEGLTFREDWPSSVRQANRCFDALICRWLVCPADIGATGKIKSCVVGDPVHGFITTIAKKQHIMHTRLSHHLARHFSIFNDLQVRSSDRIDTFFQNLSRSSQVSLLKVLDLESCQCFGGKNQRYLKDICSKMLLLKYLSLKGTDITQLPSEINYLSELEVLDIRETKVPANATVKVLLLKLKRLLAGHIDPSPSNFGSSVRIPRRIDKMINIEVLSNVKAQRHDDLEDIGKLWQLKKLGVVIDKKSHLVNLLKAISDLHECLLSLSITIPTATPEGSPSILELPDDIGSCLRHHANILESLSISGAMHLFPLLTKGGNNKLAKVTLCSTPLNQDDLEVLAKLPKLQCVRLQHISCTGSVLIFKEDDFKCLKYLLIEGFNLTNVTFEDGSACELEKMVLSSTTIESISGVDGLPKFEELELNNSPVPNEVKEAIENNKRINLKCNEP

SEQ ID NO: 144135 - protein, 46 aa, Oryza sativa
  Clone ID: PAT_MRT4530_4497C.1.pep
SSGPLGWVISICVLWRSSPLVTSGLSQLCYWFALLLSLFSSLGCEF

SEQ ID NO: 144136 - protein, 494 aa, Oryza sativa
  Clone ID: PAT_MRT4530_44980C.1.pep
MLSCSGNMLRAVHVLAIAAAVLTLAPLAASYPWQACNGSSNYTANSAFQRNLGVLAAALPGNASTSPDLLANATVGGAPDTVYALAFCPPIDNQNASGCRACVASAFADARSLCPNNRGAHIIYDGCVLTFSGRDFLGAATQPGDIERKLRNTENVTVSDVGEFNGAIYEVLNATADYTAAAARRFGTGEISFDPTYPVIYSMAWCTPDMAPGRCRACLADTIAQMHAYFNPNAQGARLVGVRCAARYEIYPFYTGRGMVQVPVSRPPAVPGTPGKKSKTDPEKRKQIDWAKRFMIIKGITGGLQYLHEDSQLKIIHRDLKASNVLLDANMNPKISDFGLARLFGDDQSQETTNRVVGTYFGVLLLEIITGRKNSDSYNSEQAVDLLSLVWEHWAMKTITEMVDPYLRSDSSSLDEILRAEDGWRGVESIAHKVFDRRAMVKERMSSGTVIAMDELGIWMRQRWQGLREGGQDQIEWREATFEYLPAKDWLDRV

SEQ ID NO: 144137 - protein, 505 aa, Oryza sativa
  Clone ID: PAT_MRT4530_44981C.1.pep
MVETTKDHEDHQEWQIPPERSETCMQERAEKLKGDIRTLFGTCNDISARMNLVDSIQHLGIVHLFQEQIEDALMSIHESEFTSSSLYEVALRFRLLREHGFWVPPDAFNKFKGDDGRFRNEIANDPRGLLSLYNAAHLLIHGEPELEEAITFAREHLKLMSQDNVLNPPLACQVRRALTLPLPRTFKRVETICYMLEYQLEEGNIPILLDLARLDFNLLQHIHLKELKAISEWWKDLYGYMGLSYIRDRTIEGYTWSYMMFYEEGFAFTRMFVAKLIALCRWDKSAISILPEYLKKYYSKLLINFKEFQDQVTDNEKYMVACTKEEFQKQSTYYLQEAEWSNQKYKPGFKDQVVLSTKSSAVQLLCVAAMVGWGGTMTTEAFEWVASGNAAVIACAKIGRFMNDIAAFKRGKNKRDVASSVECYMNENGVTSEAAFAKINALVEDEWRSTNQTRLEHRTLLPMVQRIVNFTVSMALFYDDKKDAYTFGTLLREIVESLFVKPVPI

SEQ ID NO: 144138 - protein, 1290 aa, Oryza sativa
  Clone ID: PAT_MRT4530_44982C.1.pep
MTELASGAVSSLLVVIRNEAALLGGVRDDVQFIKEEMESMHSFLGHLARSAPQGGEHDEQVCTWMKQVRLLAQDCNNCIDLYLYSGNPEIHRAKGRLRRHLWWAYWYLRKMVAQHRAAIQLCQLKDRARDVGERRMRYGVEVPATTKAAAPDAEGGYAAGDDEDYEDHSARRAVYEPPALEDYVNAKLLEWAEEIPPDAIETLSIAIVAPDTDNKEVLDLARDTLVVPGNYYHRSITVNVPAVHADFLPLRPKEILYYILRELEPGSQKHVTYQGDPWQDYYNIYCGKKRVLHKIKRNIEKMNVYKKLEKIKSDIKDGQHKSDKQLLLQLQKKGVDQVDLHVLVQLLLLQSQQDQANNKAVDMYKLPEWNYDNIMKIARKLKKHMEADEELNEQISVEKRTTKQGGGGENKEEKDKGDGDREEGKEENEKDKGEADGEGEQEEEMKDKEKGGEERKEEPHHEKQEHKKEKEVKEEERKEEQNKEKEEREGTEEKQVGGGEKKEEKEDGDDDGVIDDNYDEEEEEEEEDDDPIHLHEAQYVQILLEVFPKITSSKAQQQDKSEAKQATNTATTTLDEVRIKQMINDAKRDILRELRGGKSDKNEATGEPDVPPDKNQPTGEHAGVPDQNGEACFEELELKIEEIKQELKEQLKIKGIVDKIKHHLQGECPLIILKVDDMMDGSRWEEFRRALSLLECSADALIFTTESTEQAKGYCYPPREPIDHCSHVGLYHHTVLELTSKQKNKSNYDPRIFLDILKECEGHEFCMRIFTHAVYANPKKSTEELSKLHSTLQDSQKSFDAIAKNMLMYSYNDLPKEYKSCLLYLAIFPKGQKIRRSTLIGRWVTEGLTFKEDWPSSVRQANQCFDALIRRWLVYPADIGATGKIKSCEVGDLVHGFITTIARKQHIVETRLSHHLARHFSIFNDLRLRSSDRIQTFFQSLSQSSRVSLLKVLDLEGCQCFGVKNQRYLKDICNKMLLLKYLSLKGTNITQLPREINCLRELEVLDIRETMVPANATVNVLLLKLKRLLAGHIDPSLRNFRTSVHIPHRIDKMVNIEVLSNVKAQRSDDLEDIGKLWQLRKLGVVINAKKSHLEKLLKAISDLHECIRSLTITIPTTTLEGTPSNPELPDHIDSNLPHPKKLESLSISGARYLFPLLIKSDNNKLAKVTLSSTQLNQDDLEVLAKLPKLQCVRLRHISCTESMLIFKKDDFKCLKYLLIEGFNLTNITFENRSACELEKMVLSSTSIESISGVDRLPKFKELELNNSPVPNEVKEAIENNKRINLKCNEP

SEQ ID NO: 144139 - protein, 106 aa, Oryza sativa
  unsure (1)..(106): unsure at all Xaa locations
  Clone ID: PAT_MRT4530_44983C.1.pep
NPVRPPETSLTSNGPIAFMPTTICVILEWKYYLVIFQMHPVSYPNSSRRSSTTCHGXYDIVYGVAIAWRSRLVLIGSHVVHVTLDKSESYPXTRRSGHEREHVIKI

SEQ ID NO: 144140 - protein, 1841 aa, Oryza sativa
  Clone ID: PAT_MRT4530_44984C.1.pep
AWDHHDIISVKPEYNDSSRCSTSARLASIAPYSGRKETSVYATDIISGITIHCKVFVDRISRIRIFHHAVKIDLDEVATLRVHAFDDEDNVFSSLVGLQFLWQLTPRWVDTNSHHLVHIPLKETHLSDCSGFCGDMNIRFELEDRNLGSDLFVVKGIEIGQEVVNAQLFEPQFEHVNDTITLTVAEAMSLEPPSPVLVTVGAMVKFKLKVFRQKVPQDTRVSGHAQVSSLHVVIPQALFLYLVPVVDDSAHFHGITSIPSSEVWYVFPGRKYVVLAKAFAEGFDFKEMFITEENELKLASSTVEFWNLSQVPDSSAGSYEVQTSRLLTPISKGKGYLDAFLTYRTEASGPAKVLKLQQEVNVCSKVKAIWDEEMDNSRTIYLPWVPGAYQEVELKAVGGCGKMPEDYKLSSSDESVASVSDSLIVRTKRPGRAVIKVVSVFDALNFDEVTVEVSTPSAQAILPNFPVEVPVGTQLQAAVTLKTSNADALSTETLKHYAGSWAQYGNPCAWVSLNASAAGQATLVATFSFDSESYSEIFSGPIFLKSTSKISAYYPLVVLQAGSGNRFGGYWVDLSRIHSGIQNMVNNSPKELYLVPGSTMDVFLSGGPEQWDQLVDFVETVDVIGESKNYVVSSTAVQKLSSRLYRVSCPSKGNFKLLFSRGNMIGKDHPVPAKADLLFWKLQAELNCTVRATVIGFSSRVDGRTREEEHMFLQSARDTLTDAIQLQIVSSLRVTPDYVLIVFHPEAQETLAVSGGTCFLDASSNDTQVVQILQHPGKALCSQLILGARGLGTATVTIQDIGLSPRALTDSLVRVANVDWIKINSEEHISLMEGSTEDFHISAGTQDGQVFRDSQVPPMPPCSCISDLYTLIACISVVFVFLIVKILFSFHLVILYDNFLYKYMGIEVHLGDETLELINSHELLDGPKFSVKAAKIGTTSLYWLIWPASFTTFTLQVTAKQYSGQRVLSQVVKVEVYKPLQIHPEYIYLTPGASFVLSVKGGPKVGVVIEYTSLNVETVEVQNSTGKLSAKTVGNSTMRAVAFSNEGTFICEAFGRVEVDIPVAMILSTQSDRLCVGCSMPIYPSLPKGDLFSFYETCQSYTWVIEDDKVAMFQLARSWQYGLDQGLYSEGKNYPWFSNGSSNAFINHVIGRSAGKTKISVSITCDFLMTGSSGSIAYSASKTILVVPDPPLALGLPITWLFPPFYTTTDLLPRSVDPDSDDLESTIGYSLLRNIGKSDLVLQNANIIDGSKIRTGESNAIDCIQAKDHSTGRTEIASCLRVAEVAQAQIAAAESSIHIAYLSVHDKVELDIKYSDELGYTFSEALGIVPVKIETNHPDVVSILMPKEGNGTHGTHERFVLQARSHGTALVRLQISHIPKKADFIMVSVGAQMYPRDVVLRSGQQLNFTIIGDRMDVRGSSQWLSSNEKVVHINRITGEAQARGEGIAEVIFKGPNTKLHTTVTVLKVNQIVVNAPAETLTNAAGPPGGYKFSVKLRFRFTAGDCDLKLVNILQHTSVLSNIREQDGGGRRIIVAGTGQIVLYFLRPKMKPFLRSDSTGHSADSSINHINVPFDCKVEPSFVGFVEPWSDDAAKKSYCLFHPYSPAQLLPVKLNLKEGFLHIVVHANLKEDPKVTGSAHALFVKGFYIKEPRKLNLTPSCNHSIITIGGNTDVELFWNAKDLLSASRVDTNGRGVPSQISYQVEALKRQSFYDKITIILPATGQTEEIEVIYDTGERREPSTSGLTTLAAIVTCIVVPIATIALFMKLLEKKPIREAPPRHATPAPASAPAAAMADPASPATGELSPRTPQPFMEYVRRTIDDTPYYKRDARRRFNPQNTY

SEQ ID NO: 144141 - protein, 34 aa, Oryza sativa
  unsure (1)..(34): unsure at all Xaa locations
  Clone ID: PAT_MRT4530_44985C.1.pep
NSARVYSERLMTLSGVYGFWKYVIXFDRRETRAT

SEQ ID NO: 144142 - protein, 278 aa, Oryza sativa
  unsure (1)..(278): unsure at all Xaa locations
  Clone ID: PAT_MRT4530_44986C.1.pep
MGRSPCCEKAHTNKGAWTKEEDQRLIAHINQHGEGCWRSLPKAAGLLRCGKSCRLRWINYLRPDLKRGNFTDEEDELIIKLHELLGNKWSLIAGRLPGRTDNEIKNYWNTHIKRKLLARGLDPLXRTARSMPPPPSPATTTSXRRRLQLLARRNKRPQQLQRRRRVPRRHRPQPVHKPAVVVVPAVFPAAAAARSRGETRRSDGELHLPPPLLGDEGEDMPVLEPPRAARRRRVQLRRLVGLFLLLAAAGDGELASVHIRQCIVVNSVKHREIQRFSD

SEQ ID NO: 144143 - protein, 62 aa, Oryza sativa
  Clone ID: PAT_MRT4530_44987C.1.pep
QICSYTLFHICCYNSTDRLTKPFGNATYLHSKKILNLPLYGTRGGELNCCEKKRESRYDYLH

SEQ ID NO: 144144 - protein, 49 aa, Oryza sativa
  Clone ID: PAT_MRT4530_44988C.1.pep
KNQNSLEAKLKPVKQAHTKTGNRRQLKTGRTMLFSFLALRCRYERAVGK

SEQ ID NO: 144145 - protein, 108 aa, Oryza sativa
  unsure (1)..(108): unsure at all Xaa locations
  Clone ID: PAT_MRT4530_44989C.1.pep
XQXQNLIAGXELKAXKVXCQFNTXXYFFLPASPXFXXFTPRIFFALSXXSFMLLXRLXNLGGXAIPXXPXHXIFTVTTISXSSWLRQXPDRYXIRXRSELTRQGILIP

SEQ ID NO: 144146 - protein, 65 aa, Oryza sativa
  Clone ID: PAT_MRT4530_4498C.1.pep
FWKLPSPISGNFKKNSQGFKFGGTFAPLGPQKLVCFNNGPQGRMHAQCLPQLGMLCSIDQIHLSS

SEQ ID NO: 144147 - protein, 181 aa, Oryza sativa
  unsure (1)..(181): unsure at all Xaa locations
  Clone ID: PAT_MRT4530_44990C.1.pep
MEARLSTGEKTKKMATTSRPSSPLPPEEETAAETTTSEEEEQQQMERFYALVAXVRALRAMFKEAALPSCREDDVSGGGGGEQRQKRPRAAPWRPAFEMAVFECGGGGGTTTDDIEAATTKGQDGNCKKGKRSEANAAAEEDKGEVIEGKPVAIAIVADGPDQPYSCKEIEETSKNKIKAI

SEQ ID NO: 144148 - protein, 59 aa, Oryza sativa
  Clone ID: PAT_MRT4530_44991C.1.pep
WEVAAVQMEATMLDDRAILCEAHIPKSRRNSIRIHMAAPHGFPDVRRTCPFSDPPPTPA

SEQ ID NO: 144149 - protein, 119 aa, Oryza sativa
  unsure (1)..(119): unsure at all Xaa locations
  Clone ID: PAT_MRT4530_44992C.1.pep
FFTTPRLGNFFNSLLVTAVDRATXGRGAGKSWIGDNLNDSHLDYYYAFLLLLAVINLPVFVWVATRYEYKKEYLSDGGDVVAGMASRETEMAGGGKGKVVERSKVIDAPLVVVEEVRAV

SEQ ID NO: 144150 - protein, 180 aa, Oryza sativa
  Clone ID: PAT_MRT4530_44993C.1.pep
MGRPRGGKGRKSTEAAKADDGSSSGGGGEEVIPAYKRRGRPQQQKHHHLKDDHAAGDDEDEDDDSVAKTEEEEEEEEHDDIAKIDDDAAKTTAAAAAAPQASKAGSSKAAAQNPGRKRRRQLKRGSDNSNSNSASAIERRRRKDGGEPSSSRQQNGFRQHGSRRKNSTPRRAAEAGVGCK

SEQ ID NO: 144151 - protein, 36 aa, Oryza sativa
  Clone ID: PAT_MRT4530_44994C.1.pep
PLKKTNNKSNPYLYLVLLTELALFYSHITHYYILPY

SEQ ID NO: 144152 - protein, 80 aa, Oryza sativa
  Clone ID: PAT_MRT4530_44995C.1.pep
ALKCGGGGPVLVSLPASSFFAGNLAEVFLLTTLAETHLRTWRPAPVACASPPSCPPSSRHARPHAHLGQGRRPRRQRQAT

SEQ ID NO: 144153 - protein, 47 aa, Oryza sativa
  unsure (1)..(47): unsure at all Xaa locations
  Clone ID: PAT_MRT4530_44996C.1.pep
NVVHLYINKHVXVDKFFTSSVPFSEINSALDFMRKGEGIRCIIRMEN

SEQ ID NO: 144154 - protein, 117 aa, Oryza sativa
  Clone ID: PAT_MRT4530_44997C.1.pep
MHGWRSSLLRVSYHGMVLAWGIVPSFCIDGQRLRPGGGAASNVAAVYAVAAESAVLREEELHGMVRTEQHVTGKVDFDVEGHVAGLGYLKCKTPFFEGEHKSVVYSCGVYQLLEKCT

SEQ ID NO: 144155 - protein, 230 aa, Oryza sativa
  Clone ID: PAT_MRT4530_44998C.1.pep
VAMDIERQVQETFSNHYKSVVLIRRGSDGIGTGFIIGKTRKSYVAMTCYHVISGNPSGALKVRLPRDTKDYVAELLYEHQGYDLAIIKVNGVSGECPILQFGDLEGVAHRANVVQLGYILGSQFALNLDPSVSPGSVIRPANQNGMMGSQDVVYSAAARHGASGSAVMFDDKVIGVLYSMSTNSQVAYARSSTTVHMALKNWLHPNDAAITTEKMIELVVKPLNDSELDD

SEQ ID NO: 144156 - protein, 75 aa, Oryza sativa
  Clone ID: PAT_MRT4530_44999C.1.pep
GFSMQRTGTQNKQRWHTHTNPTWPKEDLYHNQGRNINDTQQRDGEKKPAFDLDKQARKQGRAKTPQRHSPTRNNT

SEQ ID NO: 144157 - protein, 88 aa, Oryza sativa
  Clone ID: PAT_MRT4530_4499C.1.pep
AACRSCLQQMSQGYGHAIASYLRVLLSNKCCKGIIVPLPQKKASPIHCMQGVGGQFPSVLPRQSALATRDRRRRRGRLDPVPDRQQRI

SEQ ID NO: 144158 - protein, 138 aa, Oryza sativa
  Clone ID: PAT_MRT4530_449C.1.pep
KLSKGGINFVGSLSGWTATLLFMWMPVAQMWTNYLNPSNIKGLSAFTMLLAMIGNGLMIPRAVFIRDLMWFTGSAWASFLQGWGNLACMYCFDSISRESFLATTFGLLLWLGFTLWRDTIAHGNSSPVTSLKELLFGK

SEQ ID NO: 144159 - protein, 80 aa, Oryza sativa
  Clone ID: PAT_MRT4530_44C.1.pep
MEEVVGKPPCRSAPRIGGAAADCQDFYQFSCRRYTGTPTHICISKQTRSQMLFSTLNTTVAPLGSESIAGNAPTPRATFT

SEQ ID NO: 144160 - protein, 929 aa, Oryza sativa
  Clone ID: PAT_MRT4530_45000C.1.pep
MAHLQLSAVAGGGRPAAAGGGGDEMEDVRLLDSYDEEMGGGAAAAAAGEEEEAHVRVTGMTCSACTSAVEGAVSARRGVRRVAVSLLQNRAHVVFDPALLKVEDIIEAIEDAGFDAEIIPDTAISQPKAQKTLSAQFRIGGMTCANCVNSVEGILKRLSGVKGAVVALATSLGEVEYDPSVINKDEIVEAIEDAGFEAAFLQSSEQDKILLGLTGLHTERDVNVLHDILKKMIGLRQFDVNATVSEVEIIFDPEAVGLRSIVDAIETGSNGRLKAHVQNPYARGASNDAHEAAKMLHLLRSSLFLSIPVFFIRMVCPHIPFIRSILMMHCGPFHMGDLLKWILYLEVLAKGKTSDAIKKLVELVPATALLLLKDKEGKYTEEREIDALLVQPGDILKVLPGSKVPADGVVVWGTSHVNESMITGESAPIPKEVSSAVIGGTMNLHGVLHIQANKVGSETVLSQIISLVETAQMSKAPIQKFADYVASIFVPIVITLSMITFLVWFLCGWVGAYPNSWISGTSNCFVFSLMFAIAVVVIACPCALGLATPTAVMVATGVGANHGVLVKGGDALERAQNVNYVIFDKTGTLTQGKAVVTTAKVFSGMDLGDFLTLVASAEASSEHPLAKAIVEYAFHFHFFGKLPTSKDGIEQRKEDRLSQLLLQVEDFSALPGKGVQCLINGKRVLVGNRTLVTENGVNVPPEAENFLVDLELNAKTGILVSYDDDFVGLMGITDPLKREAAVVVEGLKKMGVHPVMLTGDNWRTAKAVAKEVGIEDVRAEVMPAGKADVVRSLQKDGSIVAMVGDGINDSPALAAADVGMAIGGGTDIAIEAADYVLVRNNLEDVITAIDLSRKTFSRIRWNYFFAMAYNVVAIPVAAGALFPFTRLQMPPWLAGACMAFSSVSVVCSSLLLRRYRKPRLTTVLQITVE

SEQ ID NO: 144161 - protein, 168 aa, Oryza sativa
  Clone ID: PAT_MRT4530_45001C.1.pep
SLHQIPVFFIRMVCPHIPFIRSILMMHCGPFHMGDLLKWILVSIVQFVVGKRFYIAAYRALRHGSTNMDVLVVLGTTASYVYSVCALLYGAFTGFHPPIYFETSAMIITFVLFGKYLEVLAKGKTSDAIKKLVELVPATALLLLKDKEGKYTEEREIDALLVQPGDIL

SEQ ID NO: 144162 - protein, 57 aa, Oryza sativa
  Clone ID: PAT_MRT4530_45002C.1.pep
LAGAMAASQVGISSPGVGGDDNRLILGEPWAWVFTPPEHGRLIHSIDITRTHWSLRI

SEQ ID NO: 144163 - protein, 76 aa, Oryza sativa
  Clone ID: PAT_MRT4530_45003C.1.pep
QMTAMDLPVNQVEAGDVVEEAKTSGRAEAVDEVEWRRLMTHIGAEAVDDAETGGYAVGCVVTPRELGRMVSTIRMY

SEQ ID NO: 144164 - protein, 100 aa, Oryza sativa
  Clone ID: PAT_MRT4530_45004C.1.pep
MRIATRAAKRLIQIRVYPYQWPRWHQQDTNDAGRPMQPIHHHHCILSLISFTSHRYVLLFLSSYRRQRSLLAACLGCCGHPMSCFLRLMIRLTNSLPCLL

SEQ ID NO: 144165 - protein, 49 aa, Oryza sativa
  Clone ID: PAT_MRT4530_45005C.1.pep
PMGMSRNTLGLTVENAPGAIGASVIDRVYYAIILFSFAFFFFFFFLLIV

SEQ ID NO: 144166 - protein, 189 aa, Oryza sativa
  Clone ID: PAT_MRT4530_45006C.1.pep
MPPPRRPTTQVPLHAFRFQAIYHPLHSPLPQLAGPGPLSSRPSIDLLLFTSKRERRHLHRSMAATATAVAASLSVAGGLGRPLARVSSPAAPMKAASPAAARRAVVVRASSSGEPVRREKASAAAAAAGIAAVAAVAAALAVPEVAEAAPALSPSLKNFLLSIASGGVVLVAIVGAVVAVSNFDPVKRT

SEQ ID NO: 144167 - protein, 103 aa, Oryza sativa
  Clone ID: PAT_MRT4530_45007C.1.pep
SKAGAIFLQLTPSKKPPQKSEAQMHTQSNKGFASNSHFIQPNSQLVSFGKTATNKIEEHIFFWQYIKIQPFDRYSSPQENRTCRPHLPKNTKKKEKKRKKNHH

SEQ ID NO: 144168 - protein, 102 aa, Oryza sativa
  unsure (1)..(102): unsure at all Xaa locations
  Clone ID: PAT_MRT4530_45008C.1.pep
SLAYFLIANKGFIGVSADELSRHYIGLQGLHPIGFYWILLSFYYITIIRLXLYIVIYIGHIVDCSKPYXHRGDQTDWHARISTTFGPALELNRSPRPLCSST

SEQ ID NO: 144169 - protein, 107 aa, Oryza sativa
  Clone ID: PAT_MRT4530_45009C.1.pep
VSAFDDSHHTILTNSVCILWCLRSDLTNLACEPLSVHSYVHETTRACCPNEYEQNTLRRRTGKGETFPRGPTYNLQSFQNRVDNGILPLIRLTTELAGLPNNSGYTL

SEQ ID NO: 144170 - protein, 549 aa, Oryza sativa
  Clone ID: PAT_MRT4530_4500C.1.pep
MEAVAGGGGGGGGESVGELLLRAAAMVPAEHYALAALAVVSVLAYGFLELHFLGDLLRGFRGGRVELTFHPASEIYHRVASKCRSLHGRYLATPWLASPHLQTLFLGISGRPPSFTYKRGFVASRLLMLAKGVEVQYVKHMAYSMATKGCNTVVSNHRGLGGVSITSDCLYNAGWTEDLREVINYLHHKYPKAPMLCVGTSIGANIVVKYLGEEGENTPVAGAASICSPWDLVVGDRFISRKLVQRFYDKALAFGLKGYAKLHEPVLVRLANWEGIKKSRSIREFDHHATCMVAKYETVDTYYRRCSSASYVGNVSVPLLCVNALDDPLCTREAIPWDECRANKNIVLATTPNGGHLAFFQGLTAGRLWWVGAVSEFLFALLDSKYMHQQKAQDHILRSSLESSIDKSPYVNVMEDGMIAPVTDDGPCDDITPSHQVNDIKQDNGDFTQQNEHTREVDDKNITEVNAMPSQSPEQSAGQQVEEHYVGKFHEAIAPVKRSINQLTRYQGKSVWLLAYIAFVTSWPLLGSLAFIAFRKKFRNNLLAKWLRR

SEQ ID NO: 144171 - protein, 128 aa, Oryza sativa
  Clone ID: PAT_MRT4530_45010C.1.pep
SIQTTNLTNVFIFCFCLFSWSVSSVSSVRCSVVPFVVRTSRCVREPPQRTQGRPRPLPHPRRRADWLPSCRCRLVLPLADCFSGLPVVGANVERQLSSTREARFSSILCHLTPTSRRTSVSCILVRSS

SEQ ID NO: 144172 - protein, 174 aa, Oryza sativa
  Clone ID: PAT_MRT4530_45011C.1.pep
MPLSSNISTQKTHYEVLSVNEGATYDEVRAGYRAAILNAHPDKSQAKLDSLVSSVEHGEFFSVQKAWEVLRDPKSRTEYDKQLQTSRQNSANIAYEIEIEEMTVESTGDAMELMYPCRCGDHFSILSSDLAEMGILVDDDGEIYFQSSDCVSASVVLSCGSCSLKTRLVINRTS

SEQ ID NO: 144173 - protein, 150 aa, Oryza sativa
  Clone ID: PAT_MRT4530_45012C.1.pep
VYFQPSPFFFLTLYALIKSSKLSLPPPLRSTDRSDPRRALSSTAGGHIAYALVRMIAMGAMLGVEHPVVLHLLDITPSTGCIDGLIMELGEAALPLLKGIVVSTDVWVACTGVTGGVLDLGGPAAGWILRCVVVVHAAACCSCMLVRVAV

SEQ ID NO: 144174 - protein, 88 aa, Oryza sativa
  Clone ID: PAT_MRT4530_45013C.1.pep
AADSHLFHMQISFAADLPQTCRILFQYDEESAADLPQTCCRPAAYSFSMMKSLRQVCRRLAAYSFSMMKSLRQTCRRLAADLPQTCCR

SEQ ID NO: 144175 - protein, 65 aa, Oryza sativa
  Clone ID: PAT_MRT4530_45014C.1.pep
AGNLAFFRRKPKGLNPRPGQSTDSKPGTKSFNWTPLDPIGKPPRVFLGNGKGPLNPTQGVEKSLP

SEQ ID NO: 144176 - protein, 210 aa, Oryza sativa
  Clone ID: PAT_MRT4530_45015C.1.pep
QHHLQTPLARFSPRSPRRTLRMPSLPLSGAPPLPLPTLATPSSRYRRSRPRQCPLNRAATTSPRVDPVAQRRGQGGSSVVLTTVVSPRQRAPRGRVMLPNPLLYSLSPSPSLLSRSRDGGEVGCDRSRAAGPIYLSGAGGGSSSAMMATTSQTHPPNIVQQDRRPCHGRRPLLPSYQLETWQHFHGHHLCTTGRQMKQWSTNFKSLNLYE

SEQ ID NO: 144177 - protein, 86 aa, Oryza sativa
  Clone ID: PAT_MRT4530_45016C.1.pep
SLCSRAMGKYSRPPTDQVASHGEGSRSLRTQGDSVVFASCLVKETDLEDVIAQSSNSLEDWEAGRLHSEVAIKGQAGLQIAGYLDL

SEQ ID NO: 144178 - protein, 86 aa, Oryza sativa
  unsure (1)..(86): unsure at all Xaa locations
  Clone ID: PAT_MRT4530_45017C.1.pep
EVKHETTQVQLYFSFGYILPPRERQNSSHCLKLWTPRVNKDXSSWSGYCQSEVIEMLCRDASHSLGXGSCVGQXSRSMDKVYIHLV

SEQ ID NO: 144179 - protein, 48 aa, Oryza sativa
  Clone ID: PAT_MRT4530_45018C.1.pep
AYIIFLFHFITHKKILYIFTFRLEILKFLTLKIKNKHFFQKKLLPIDE

SEQ ID NO: 144180 - protein, 603 aa, Oryza sativa
  Clone ID: PAT_MRT4530_45019C.1.pep
MATPAPDVSAIGAALRSPAATVSEADVEKLRLIEELTSDVDAVQERVLSEILGRNAGAEYLTRCGHDAGDTGRATFRAKVPVVSYDDLKPYIQRVADGDCSPVLSTHPITEFLTSSGTSAGECKLILVAMDDSGRRQALHGLIGPVLKLYVPGLEKGKGLYFMFVKSETKTRGGLTAWFALTSVYKSEQFKSMAIAYTSPTAAILCEDAFQSMYAQMVCGLCQRHDVVRFGAVFAAALVRAIRFLQLNWGQLAADIEAGELGPHVADPSVREAVSGILRSDAELAEFVRIECSKGDWAGIITRIWPNTKYVDAIVTGAMAQYIRTLQYYSGGLPIVSTSYASSECFFGINLRPVCDPSEVSYTIMPNTAYFEFLPVGEVVDATNLVDLARVEVGREYEVVITTYAGLSRYRVGDVLRVTGFHNAAPQFRFVRRQSVLLSVELDKTDEAELHRAVERASSALLRPRGVSVAEYTSRACTERIPGHYVVYWELLTESPVGAGDGDTVDGETLGRCCLEMEEALSAVYRQGRVADGSIGPLEIRIVRPGTFEEVMDLAVSRGTSIGQYKVPQCVTVPSVVELLDSRVVSSQFSPALPHWIPTPRSD

SEQ ID NO: 144181 - protein, 430 aa, Oryza sativa
  unsure (1)..(430): unsure at all Xaa locations
  Clone ID: PAT_MRT4530_4501C.1.pep
WRRRRTPPSPTTSASGRRTSAATTPSSPPSAARPPSSPPPSSPPPRRSXPKKQPPPPXDPDPRRPPPLPPXPGASPPPPPPLPPPPPPRPRPSPLRRRPAAPGSPPPSPPPSSRPRPPXPAAPPPVRDDGFDAGAELVLRPSHVRRVVPDRILSVRVLPLVDRTVVAAGNKLGNVGFWDVDGGAVAGADGVFEYLPHRGPVGAIVSHPATPQKVILDDTVRIFSVDDFGNSSIMKHNNKTGRWLSTFKAIWGWNDTDLFIGNMARAIDIILVDLNGSSLLAMNNARLESEHMTAIPGRFSAHPYKVGHLACASSGGKAGPTGSSSIGKGRGRRRPGSARLHAGRPNMASSGDGAHAATGDGKWRRGRRHRRPKATAAAEDDGACAEDGGAHRREGKREEGSFSPRLAGARGDDGERREDDGDGRTISGTS

SEQ ID NO: 144182 - protein, 184 aa, Oryza sativa
  Clone ID: PAT_MRT4530_45020C.1.pep
MGAWMSRVWFLMFPAKEYKIVVVGLDNAGKTTTLYKLHLGEAVTAAPTIGSNVEEVVFKNIRFEVWDLGGQESLRTSWATYYRGTHAVIVVIDSTDRARINIIKDELFRLLQHGDLEGAVVLVFANKQDLKDAMSPAEITDALSLHSIKNHDWHIQASCAITGEGLYDGLGWIAQKVAGKATTS

SEQ ID NO: 144183 - protein, 45 aa, Oryza sativa
  Clone ID: PAT_MRT4530_45021C.1.pep
RYASFSRPPSFFFFHYQVKARRKRTTRLNLLCAATSRSPFHSLNE

SEQ ID NO: 144184 - protein, 61 aa, Oryza sativa
  Clone ID: PAT_MRT4530_45022C.1.pep
SQLSCDPGVHPVICVSKKLIPGVSFAGSLNVIWCTGNLGTKNISRHNSILEGIYINIKSLL

SEQ ID NO: 144185 - protein, 293 aa, Oryza sativa
  Clone ID: PAT_MRT4530_45023C.1.pep
MGAWMSRVWFLMFPAKEYKIVVVGLDNAGKTTTLYKLHLGEAVTAAPTIGSNVEEVVFKNIRFEVSPLLPSPLFAFFSSLAKFRPPPDLTNDRVAVADLLLCCSVVVVVAAQSYAGCLRSRYVSTFVSQFPPFDFLRRFGEFSNQLSEPTQEAIEMYPFALRVCMLLLIPFGFVWDLGGQESLRTSWATYYRGTHAVIVVIDSTDRARINIIKDELFRLLQHGDLEGAVVLVFANKQDLKDAMSPAEITDALSLHSIKNHDWHIQASCAITGEGLYDGLGWIAQKVAGKATTS

SEQ ID NO: 144186 - protein, 119 aa, Oryza sativa
  Clone ID: PAT_MRT4530_45024C.1.pep
ICPLKSPTFCSSQPTRGNSNGGLEDVPASICSYNPCGLALRPDLKLQPVPASVSSRSRVARPSLPWLHLDREQTRPSLPWLHPDREQPGRPCLVSIQIGSSSTGGLTHSSGITFDEWFI

SEQ ID NO: 144187 - protein, 374 aa, Oryza sativa
  unsure (1)..(374): unsure at all Xaa locations
  Clone ID: PAT_MRT4530_45025C.1.pep
HFFNGLDMPIXEMKVTSIQESVDMSTLTLDSLYTKLKTDEMNILSRKVDSKSSALVSPSTYYVDGSSTSTFTALFAINAXSDDQLEQFEEALVLVSKKLSRAINNVKFKKRGGRVXCFECGGLDQIRLHRPKLERANKENNGDKLKDDKPRSMFKGRKSKEALKNVLNQVYVAFEDVDXSDEDNXQGKEYDGMCFMAHSESDLEXEYNEVNPPREFLEEIILTFSSKIKRCEKMIKKHEFTIESLSFKIAKLKSLIPNVDDCNNYENLMIEISKIRKLKQQNGILNCLTCSLNNMKIKDVLVRVEYMXNIVKSDEVFSCSRWRKNKGVLIDCENCTNLTKEVLYLKSSLERFSDEKNKLNMIFDQSKSLEQSKE

SEQ ID NO: 144188 - protein, 37 aa, Oryza sativa
  Clone ID: PAT_MRT4530_45026C.1.pep
MSLVLDVVVLVVRDRYDLLVEDQVVRDRYDLLVEDQV

SEQ ID NO: 144189 - protein, 79 aa, Oryza sativa
  Clone ID: PAT_MRT4530_45027C.1.pep
IKLPRKRHVNATEGEDLVKGATSNKLVRIERVVLLGFSEDDKQACKQDPTQNKGKGRVEEATEQWDDDTCAHRMAINWA

SEQ ID NO: 144190 - protein, 861 aa, Oryza sativa
  Clone ID: PAT_MRT4530_45028C.1.pep
MPAAPTVTPKAVIHQKYGAKACYSVEEVREAVDGGCPGLALPQQTRSVYRCSLDIPGLTVVTPGTFVRKKDAEQAAAQIALDKLGIQPTANAPSTPEEAWDELIARISGFFTDENFPSSSHPLIGHMCVTFRRTGDRFGMIPMSAIAACDVKVIGLCKLIDPKAEFDPLLVLSLIYNAAKKSPGVSVSDSNFWIWSQKPYSPEAVDLALQHWSGITDPIEVDGIFVPCMMEDEPKTIRLTLSHNEHYMGDIVSKLSASDSSHAVVSRTVGKASSEIRLYFSAPNVQFVSEISHNVVSSLGDGYMESLINKRASFISGQTIYGDAILANVGYTRRDSELHTEDVTLSNYYRILLGKSPDGNYKISRDSILVAELPSVYSRSSWKGLSPRDLLCSFCRLHRLAEPYFAVNRVSASCKVLGSPVSSEEMDVLKNAENQCASDGKNDKENPDMFKCDVKIYSKKQELLLEYSTADTWSKESDAIHNSSLKVLIWFCSYFKQPNKHVLKLSHSKSTDGFTICPDNFLHEFAMFLSIYGNRGGDDSSACSTVGSLSMDTSKQKLENNAVLAHIDGPDSGVFPSHGSLTCISYTASLVVKDKTNRYTLESNNEFEFEIGTGAVKNQIESCVSQLSVNQSACFIAELPPKDLILAAANEFSHDLSKISRDNCFLEFSVKVLQSLHQKLSKKSLMQTSVPTAVLYDGSITDFDSRLYRFDIGTCLEVIEHVEEDQASLCGDVVLSSFCPTVLIVSTPNYEYNPILQRSAMPNKEEEPEENAGPCKFRNHDHKFEWTRSQFQHWATGLAEKHNYSVEFSGVGGSGDEPGFASQIAVFRRMASGQDEVCQEGELHQPYELLWEWPNASLPSH

SEQ ID NO: 144191 - protein, 236 aa, Oryza sativa
  Clone ID: PAT_MRT4530_45029C.1.pep
GGGVGSWATFLQHGLAAAALSLAIRMAPAPAPAVASEFDVLNGGPPEDTYVVDDAGVLSRVTKSDVKRLVRDLESRKNIRINFITVRKLTSKADAFEYADQVLEKWYPTVEEGNNKGIVVLVTSQKEGAITGGPAFVQAVGDEILDSTVSENLPVLATDEKYNEAIYTTAKRLAAAIDGLPDPGGPTFKDNKRESNFKTKEETEEKRGQFTLVVGGLLVIAFVVPMAQYYAYISKK

SEQ ID NO: 144192 - protein, 127 aa, Oryza sativa
  unsure (1)..(127): unsure at all Xaa locations
  Clone ID: PAT_MRT4530_4502C.1.pep
MLRPGGDALPSARSSGRGGGVGGATAEGDAASAGRRCEGRRRWSDGPAVGPSPQXIWWEGRWQRXEGDTTAAGGEAVVVRRPSSGDGGAAATAPFSPSDGGSGGGDVSGGSGDGGEGNMISVLDECV

SEQ ID NO: 144193 - protein, 61 aa, Oryza sativa
  Clone ID: PAT_MRT4530_45030C.1.pep
ASSILLVVFMPFSTNSVQRASLSVNLSPIGMLMQYISPRFPNRDLLPIKFPRHMGSFHGIP

SEQ ID NO: 144194 - protein, 658 aa, Oryza sativa
  Clone ID: PAT_MRT4530_45031C.1.pep
MEGDAAGAGGGDRSSIVIGLIENRAKEVGVAAFDLRSASLHLSQYIETSCSYHNTKTLLHFYDPMVAIVPPNKTAADGMVGVSELVGKHLPTNKKGAVMVKNLSARDPSALGLDTYCKQYYLCLAAASATIKWIESERGVIITNHSLSVTFNGSFDHMNIDSTRTRLLRANLLQPLKDIQTINTRLDCLDELMSNEELFFGLTQGLRKFPKESDKVLCHFCFKPKKDTDEVLKPANGRKSQGLISDIIVLKTALDAIPFLSKVLRGAKSFLLRNIYQTICENPKYASMRKRIGDVIDEDVVHSRAPFVTCTQQCFAIKAGIDGLLDVARRSFCDTSEAIHNLANKYREDFKLPNLKIPYNNRLGFYFIVPQKDITERLPNKFIQVVRHGKNVHCSSLELASPNNLFLSEASNMVLVMGPNMSGKSTYLQQICLIVILAQIGCYVPAQFASLRVVDRVFTRIGTGDNVENNSSTFMTEMKETAFIMQNVSSKSLIVVDELGRATSSSDGLAIAWSCCEYLLSTKAYTVFATHMESLSELATIYPNVKILHFEVDLRNDRLDFKFRLKDGVRKVPHYGLLLAKVAGLPSSVIDTAASITSRITEQEMVRKDDNCEQYRSLQMAYQVTQRLICLKQSNQGDDYIREALQNLKDGYAAGRLT

SEQ ID NO: 144195 - protein, 65 aa, Oryza sativa
  unsure (1)..(65): unsure at all Xaa locations
  Clone ID: PAT_MRT4530_45032C.1.pep
FPPPPPLKLAVIVILKIPAESRELYTEIELPXRLWFLAFXXPPPPPPPERLDVLLPLLFTIIKIN

SEQ ID NO: 144196 - protein, 53 aa, Oryza sativa
  Clone ID: PAT_MRT4530_45033C.1.pep
TMLSFLTILSLLAFASHGHPFFTPSDSHLIRLAGHPLLPRCPGNPEVFPVRPH

SEQ ID NO: 144197 - protein, 158 aa, Oryza sativa
  Clone ID: PAT_MRT4530_45034C.1.pep
DSGSPRNSKPPTTMEKRKTKMVRFTQQQIKNCMAFSADISDDDDEESLPKLSEVLSKDILDRVPPEVLDSLIEFENTRGERKARWEKLRDDLHEERDAILKQYYTKGYAEYEVYDDEDDDEDEDNKVPARVAPPGRRRRFRNGVAVKKNRSGGNIRKI

SEQ ID NO: 144198 - protein, 258 aa, Oryza sativa
  Clone ID: PAT_MRT4530_45035C.1.pep
MAATGAGEGKETAAVAGGGGGGSLHSKTLLKSEPLYQYVLESTVFPREPDCLRELRLATANHPMAVMAASPDQVQLFGLLIELISAKNAIEVGVFTGYSLLATALALPDDGKIVAIDVSRESYDEVGAPVIDKAGVAHKVDFRVGLAMPVLDELVAEEGNKGRFDFAFVDADKVNFLGYHERLLQLVRVGGLIAYDNTLWGGSVAAPPAAADEAVPSGRDRSLAALAREFNAAIAADRRVKPCQLAIADGVMLCRRVA

SEQ ID NO: 144199 - protein, 100 aa, Oryza sativa
  unsure (1)..(100): unsure at all Xaa locations
  Clone ID: PAT_MRT4530_45036C.1.pep
SSYSSIRSISAQYFAKMREVLIERNVPSPLNSGFLTXPCRERLFLALGFELFAVNDDRFMDMFVAPGAVDAIQNERQSLLKRQKILLSCLNEFKNISRTL

SEQ ID NO: 144200 - protein, 840 aa, Oryza sativa
  Clone ID: PAT_MRT4530_45037C.1.pep
MAANAFSSPATGRTPNPKVAPSPSTRRAADSAAAAAAAAAAASDSKARFEAYNRLQAAAVAFGEKLPIPEIVAIGGQSDGKSSLLEALLGFRFNVREVEMGTRRPLVLQMVHDPTALDPRCRFQEEDSEEYGSPMVLATAIADLIKQRTEAHLRKIQAAVSPKPIVMRAEYAYCPNLTIIDTPGFVLKAKKGEPESTPEEILSMVKSLASPPHRLLLFLQQSSVEWCSSLWLDAIRDIDPTFRRTMIVISKFDNRLKEFTESWEVDSYLSASGYLGDNIHPFFVALPKDRGTISNEEFRRQICQVDIDVLRHLRDNVKGGFNEEKYGPYIGFSCLKKYLESELQKRYKEAAPATLALLEQRCSEVSMDLSRLDSKLQATSDVSQLRRSAMLHAANICTHLRSLLDGAADPAPELWGKTTEEEQMHSGIGSWPGINMPVKPPNSSLKLYGGAAFERVMHEFRCATYSMECPQVSREKVANILLAHAGRGGSSGLTEAAAEIARAAARSWLAPLIDTACDRLAFVLQSLFDLAMERCRYQDSKYHQNVEDMDGYVGFLAALRCSYYKFVKELSKQCKQIVRHHLDSVTSPYSHICYENDFLSGVGSVANSMHRFNHFPGVTSFDLSDSGSALEEAQENVPPKDRQHMTPPAKGNESKEVLRESQLTVPETPSPDLPVDMNGGKKKDNGNLNDGGARKRHARMAAYANRNHHNNVIGGDDLGSKSGSSYSSICSISAQYFAKMREVLIERNVPSALNSGFLTPCTREFCPSLICVLQLMQCSRERLFLALGFELFAVNDDRFMDMFVAPGAVDAIQNERQSLLKRQKILLSCLNEFKNISRTL

SEQ ID NO: 144201 - protein, 101 aa, Oryza sativa
  Clone ID: PAT_MRT4530_45038C.1.pep
FLFFFFFFVFFFFFFFFFFFFFFSGPPPIYFKKTAGDISTMAGTTSQKKIDPWGGQKASPWGGRAHCYAKQGPKNPKAKTLNTVYNRNEFNRFGQPKHDCF

SEQ ID NO: 144202 - protein, 76 aa, Oryza sativa
  Clone ID: PAT_MRT4530_45039C.1.pep
KNPQKFPFTQAKISQKIQFTLAQFKFTVKNFYSPKHSSIKKIQAFKPPLPPPRRGRCRAPPCSAAAQSPAADMVSD

SEQ ID NO: 144203 - protein, 139 aa, Oryza sativa
  unsure (1)..(139): unsure at all Xaa locations
  Clone ID: PAT_MRT4530_4503C.1.pep
MAGKKVQVCAVFVVALNMVISMQMGAVVQACEPYCPTPTPPVTPPPSPPSGGGXKCPIDALKLSVCANVLNLLKLKIGVPESEQCCPLLGGLVDLDAAVCLCTAIKANILGINLNIPVDLSLLLNYCHKTCPSDFTCPL

SEQ ID NO: 144204 - protein, 88 aa, Oryza sativa
  unsure (1)..(88): unsure at all Xaa locations
  Clone ID: PAT_MRT4530_45040C.1.pep
SHPLHLHGFNFFVVGQGFGNFDPINDPAKFNLYDPVERNTVGVPAGGWVAIRFHADNPGXVWFMHCHLEVHMSWGLKMAWLVLDGSRP

SEQ ID NO: 144205 - protein, 72 aa, Oryza sativa
  Clone ID: PAT_MRT4530_45041C.1.pep
EAFYIINPYGNGGPELSIYLLKVWPWVILSWSKIGKKKLEKKSSLCLPLIVRNPSLHACIVWPVLITFLGFM

SEQ ID NO: 144206 - protein, 282 aa, Oryza sativa
  Clone ID: PAT_MRT4530_45042C.1.pep
SRAQTAATPPLRPLPFALCGRARPPLAAAAAACSPPDAAPPPASAAAAPFRRLPPATLETQRYLYEEDWADRTTKLVNEQVGLKPKEQTYMYRLPYPEWFDRVPLPHQYKVPDFSKYSGQDDISTMEHICRFLAQCGEASAEEALKVKLFPLSLTGSVFTWFLSLPPNSIRGWVDLEKQFHEYFFARIDELKLSDLLLVKQQEGESAMEYIKRFRNIRSRCYSLSLSDEQLADLAFQGLSTPIKDRLFFHEFNSLAHLMKIVSTHERLNVEARQNEDEARHG

SEQ ID NO: 144207 - protein, 141 aa, Oryza sativa
  unsure (1)..(141): unsure at all Xaa locations
  Clone ID: PAT_MRT4530_45043C.1.pep
MKRRSGGGGRRRGGGATTAAHGRDQRWRRRGADSHRRRLVXGRSGGDGGRGSGSAPVPARQWSGGGGGGARIRASSSSWREGAAAAAEGHGSAPVLARQGKEWRRRDTVVHGSASVPTRGGSGGGSGGAWIHIGAGLRWRE

SEQ ID NO: 144208 - protein, 139 aa, Oryza sativa
  Clone ID: PAT_MRT4530_45044C.1.pep
MGPESSELPYGSMKFWAAHRVTNNDHEEEDAYGDPVDPLEWDDYARRNGTHVSYRGIVADFNRVPIDFNTNAGYSPNLELMGLVVDDYSLPDPGDEEDKDDDWNTDEKAPPLASPDKNAYWNDDDDGSSGYLPPRKKQK

SEQ ID NO: 144209 - protein, 197 aa, Oryza sativa
  Clone ID: PAT_MRT4530_45045C.1.pep
MEGEQQQQQQQSVAAVRPSLGKAPSPSFRLRNGSLNAVRLRRVFDLFDRNGDGEITVDELAQALDALGLEADRAGLAATVGAHVPDGAAGLRFEDFESLHRALGDALFGSLDVPEDGGGGGGGDEEMKEAFKVFDVDGDGFISASELQEVLKKLGMPEAGSLANVREMICNVDRDSDGRVDFGEFKCMMQGITVFGA

SEQ ID NO: 144210 - protein, 128 aa, Oryza sativa
  unsure (1)..(128): unsure at all Xaa locations
  Clone ID: PAT_MRT4530_45046C.1.pep
RRRRLRLNDAQQQQLAAATPWPTMPYDHHHPLLQPLCNAAAATAQSSATSAPPTXAAAHLSATVLLQKAVQMGCSRGRDRRRKGGRSQPLTRREPPAPHPAQHLPRRPRRLQRRVALELGATACRCAL

SEQ ID NO: 144211 - protein, 483 aa, Oryza sativa
  unsure (1)..(483): unsure at all Xaa locations
  Clone ID: PAT_MRT4530_45047C.1.pep
MAKPTVVVLPVWGAGHFMPMIEAGKRLLRGSGGALSVTVLLMPAPTPDAAVDIAAQVKREEASGADDISFRHLPAVDMPTGHTGVEEWISRILRSHAPNVWAAIAGLDCPVAALVTDIFCTPALEVSRELGVPGYVYFPCSASMLALLLRSPGLDEEVAVEFEEMDGAIRIPGLPPVPPSALPSTMLDRKKSTYDWFVATGRGYMNATGVIVNTAAELEQSVLAAIADGRCTRGVPAPTVYPIGPVLSFPPPPEEQPHECVRWLDAQPPASVLFLCFGSKGLLPPPKVREIAAALERSGGHRFLWVLRGPPKDSRQGQRVPTDAMLDELLPEGFLERTKGRGLVWPTRAPQKEILAHAAVGGFVTHCGWNSILESLWFGVPVLPWPLDAEQHFNAFTLVAHLGVAVPLGMDRRRDNFVEAAELERAVRSLMDDASEEGRKARAKAAETRAVCRKAVEEGGSXSSTAFQRLTDDIVRRGAVQIR

SEQ ID NO: 144212 - protein, 147 aa, Oryza sativa
  unsure (1)..(147): unsure at all Xaa locations
  Clone ID: PAT_MRT4530_45048C.1.pep
MECETGYVAAAADGGLCMEVPRADPLNWGKAAEEMAGSHLDEVKRMVAEYRQPVVRIEGASLRIAQVAAVAGAGDGEAAMVELDESARERVKASSDWVMNSMANGTDSYGVTTGFGAXTSHRRTKEGGALQRELIRFLNAGAFGTGA

SEQ ID NO: 144213 - protein, 824 aa, Oryza sativa
  Clone ID: PAT_MRT4530_45049C.1.pep
MPSLPNSGDEGGAPPPTPPPPGARRVVVAHRLPLRADPNPGAPHGFDFSLDPHALPLQLSHGVPRPVVFVGVLPSAVAEAVQASDELAADLLARFSCYLVFLPAKLHADFYDGFCKHYMWPHLHYLLPLAPSYGRGGGLPFNGDLYRAFLTVNTHFAERVFELLNPDEDLVFVHDYHLWAFPTFLRHKSPRARIGFFLHSPFPSSELFRAIPVREDLLRALLNADLVGFHTFDYARHFLSACSRVLGLSNRSRRGYIGIEYFGRTVVVKILSVGIDMGQLRAVLPLPETVAKANEIADKYRGRQLMLGVDDMDLFKGIGLKLLAMERLLESRADLRGQVVLVQINNPARSLGRDVDEVRAEVLAIRDRINARFGWAGYEPVVVIDGAMPMHDKVAFYTSADICIVNAVRDGLNRIPYFYTVCRQEGPVPTAPAGKPRQSAIIVSEFVGCSPSLSGAIRVNPWNVDDVADAMNTALRMSDGEKQLRQEKHYRYVSTHDVVYWAQSFDQDLQKACKDNSSMVILNFGLGMGFRVVALGPSFKKLSPELIDQAYRQTGNRLILLDYDGTVMPQGLINKAPSEEVIRTLNELCSDPMNTVFVVSGRGKDELAEWFAPCDEKLGISAEHGYFTRWSRDSPWESCKLVTHFNWKNIAGPVMKHYSDATDGSYIEVKETSLVWHYEEADPDFGSCQAKELQDHLQNVLANEPVFVKSGHQIVEVNPQGVGKGVAVRRPGSTMGNRGSLPDFILCVGDDRSDEDMFEAMISPSPAFPETAQIFPCTVGNKPSLAKYYLDDPADVVKMLQGLTDSPTQQQPRPPVSFENSLDD

SEQ ID NO: 144214 - protein, 51 aa, Oryza sativa
  unsure (1)..(51): unsure at all Xaa locations
  Clone ID: PAT_MRT4530_4504C.1.pep
HLVXQNKSSXXEGMHGGLMNCYLHTHVRSQXLQTFTVHQAPFFQVNNTXLC

SEQ ID NO: 144215 - protein, 68 aa, Oryza sativa
  Clone ID: PAT_MRT4530_45050C.1.pep
MELGINKFHHYIGSAVWRRPSGDLKKKKEGGNRRDTGSIDDKNPGQSTRTTKTQEEESAQTPWWVGGR

SEQ ID NO: 144216 - protein, 330 aa, Oryza sativa
  unsure (1)..(330): unsure at all Xaa locations
  Clone ID: PAT_MRT4530_45051C.1.pep
MAAGVKNMVIAILVPLPSLLFFFSFVRPTTTPSPVSSWCAAHPLLVANLLFLFNVDLLFWLIGNLLSNHWLIDLYWTVIPVMLLHYYRAHPAAVADTARSAVAVALTWVWSARLTHNYLRRDGWQWGKREDWRFAEMRGQYGKXPWWWMSFFAVYLSQQVFLIGICLPMYAIHSTTQPWGAWDVVATMACLAGIVIAHFADTQLHRFVTTNEKLKKVGEPTVPTMEAGLWRYSRHPNYFGEQLWWWGLYLFAWNIGQPWMVVGPLVNSLCLGYVTVLVERRMVKQEHRAEAYKLYQKRTSVWIPWFRKPVPQPYNHKDSSNQNSLKISHS

SEQ ID NO: 144217 - protein, 554 aa, Oryza sativa
  unsure (1)..(554): unsure at all Xaa locations
  Clone ID: PAT_MRT4530_45052C.1.pep
EIEEVLGPAGIAGGGAAPGIAISLAAVALNPMLPRTSRDPQLRRQTVAALPGTQGDRKFPXWQLLFFATAVCKETERADWXLKKLRTVVKSIETAMRNLTAMCMTANRTLVVAGYVPIATLGMKALFGNSVVGVVQIDHLVKDDEESLKGHEVRLLSRKTLPSLDLPKVRKNKFIEILPINVGCLGACTYCKTKHARGHLGSYTIESLVDRVKIVVSEGVREIWLSSEDTGAYVFAPGPDLFHNYTSQAMNREYTVSEFRRVVDTLCELVPGMQIATDIICGFPGETDEDFSQTVNLVKQYLFPQVHISQFYPRPGTPAARMKKVPSVEVKKRSRELTSVFESFSPYQGMEGKVERIWITEIATDGVHLVGHTKGYIQVLVIAPDSMLGTSADVKITSVGRWSVFGEVIEGSVVAKETQKHNHSELQEEYRPSQVEEATCCGTDSCGACTCSDAAQQCNPGPERSENSTPQSCGDATHQEAVQSKLVRRNVEGAVKSSESDTAKQVGEIQRLNVAARRFPDVDTILWGGLAVSFATTVTLIALLAYKISSTPSY

SEQ ID NO: 144218 - protein, 90 aa, Oryza sativa
  unsure (1)..(90): unsure at all Xaa locations
  Clone ID: PAT_MRT4530_45053C.1.pep
MPADDDRTTTTSHVWAARLEKRRRRGTVSVQHVAKASSDKLMRKFTDPDAHAKQITPPRRSLALRRKQSSSRVAXGSARDLELPAELVAP

SEQ ID NO: 144219 - protein, 87 aa, Oryza sativa
  Clone ID: PAT_MRT4530_45054C.1.pep
ATRHIDRTHDYRGQHNSWGAIRRLRPPETSRTLQTRHSNTLVWLPLVRTDAGHTHLPASETHTLRLQWEPEGNGETHSVCGTQIQSP

SEQ ID NO: 144220 - protein, 93 aa, Oryza sativa
  Clone ID: PAT_MRT4530_45055C.1.pep
LSTPLSSSTSSSPRRRAQGHPPQLPRPSPLSSSTSGGPQVGQICRRAPARRLPPPGAVPARAEELGLPLDRPAARRRPRSTAAELLRHQALRR

SEQ ID NO: 144221 - protein, 93 aa, Oryza sativa
  unsure (1)..(93): unsure at all Xaa locations
  Clone ID: PAT_MRT4530_45056C.1.pep
LSKRRPVTPRALPLARADLTKPYQICAPPWTPXPGXAASRPSACPTATSXTPRWSSXASTAAPPAEAPPRTPTAXTSRGPPPPVTPXPGSCSW

SEQ ID NO: 144222 - protein, 109 aa, Oryza sativa
  unsure (1)..(109): unsure at all Xaa locations
  Clone ID: PAT_MRT4530_45057C.1.pep
MPPRPPLCFPNAMTSPPCLLTLLXRCALRLPNPPNSMPSSSSRGPSSSRIPPSPPPPPPCRRWLHVVVVARSRLAPPLCRCCLIHRAVQDPAIPHTELPHPSGGGDSSR

SEQ ID NO: 144223 - protein, 117 aa, Oryza sativa
  unsure (1)..(117): unsure at all Xaa locations
  Clone ID: PAT_MRT4530_45058C.1.pep
RHKPTAAEPEQTRAQAEPTPADQSKKQQGTKRRPEHPRPNRPRRTAPEASPQDLPRLPAPPTATQFPRTTKDQPSGSLVTPHLPSEPAGTARVLAEMFQVHRLNRPRSXXQRTVGDR

SEQ ID NO: 144224 - protein, 465 aa, Oryza sativa
  Clone ID: PAT_MRT4530_45059C.1.pep
MGRRMSSAAAVVRVVSRRTVKPAAPRPRESIPLTSWDLSMLSADYIQKGLVFPPPPPCLLVVDHLAAALSTTLNTYYPVAGRFVTHNHPEPEGGCSVSIDCDGQGVQIVHAVADAVTVADLLPPDAHVPPLLHSFFPLGDAVNYDGHHLPLFVVQVTHLVDGVFLSFVYNHALSDGTAFWDFLNAWVEIARASCLAAPTSPPPLFNRWSPSPGDGAPVVLPYADLSELIERLQPPLLCERMLHFSSESLVALKERARQELLAAGDTAGAAALTRFQALSSLLWRCITRARRLPAEQQTMCRAAINNRGRLQPALPREYFGNSIYAISTEKVQASELVERGHGWAAAAVGRAVAAHTDADIRARVAAWEVKPIIYTARYFDPSGVMMGSSPRFDMYGCDFGWGKALAARSGKANKMDGKASLYPGREGGGSIDAEVVLTPHHMAALDDDHELWAAVTPLLLNNNKP

SEQ ID NO: 144225 - protein, 141 aa, Oryza sativa
  unsure (1)..(141): unsure at all Xaa locations
  Clone ID: PAT_MRT4530_4505C.1.pep
MGGGKNKVQVCAVFVVALNMVISMQMGAVQACEPYCPTPTPPVTPPXSPPSGGGNKCPIDALKLGVCANVLNLLKLKVGVPASEECCPLLGGLVDLDAAVCLCTAIKANVLGININVPVDLVLLLNYCHKTCPSDFSCPLI

SEQ ID NO: 144226 - protein, 51 aa, Oryza sativa
  Clone ID: PAT_MRT4530_45060C.1.pep
QATSDHLCASGHYGPGAHRLLARSDASSLPASCPPSLWLGGTRLMRDLSSE

SEQ ID NO: 144227 - protein, 89 aa, Oryza sativa
  unsure (1)..(89): unsure at all Xaa locations
  Clone ID: PAT_MRT4530_45061C.1.pep
VEGIKRMKEILIYITKRSIIGYIIIKXNNAVLEEVTVHNLINILFALMMLMIGGXXEEAKPTNIRSEPTGGEVRQEEEKGSGEEGAGGG

SEQ ID NO: 144228 - protein, 144 aa, Oryza sativa
  Clone ID: PAT_MRT4530_45062C.1.pep
MALPLLSSPLTSSIKLWTRPSRARREPLPLAAGALEPANTTPTRHHYSRAYHRGLGEEDKNEGEDVGGVERLEWIRMERIRRENEGVGRIFKVEGGRLDFSQVDLLIGPNEKIGVHLQKCISVYGSFKELDAKTQVDFCRCDQL

SEQ ID NO: 144229 - protein, 477 aa, Oryza sativa
  Clone ID: PAT_MRT4530_45063C.1.pep
MPPLFSAPALHRRRLLRHAAAFALVLLAVALLFLLLVHPRSLGTPSPSPSYGHRLPTLVDLTLVHGAKEKGAVCLDGTPPGYHWLPGFGDGSNKWLLHLEGGSWCRNRTSCDHRKKTSLGSSAYMETRVEFVGILSDDKAQNPDFYNWNKVKIRYCDGASLSGNVQDEHQYGATFFFRGQRIWEAVMAELLPKGLARAKQAFLTGCSAGGLSTYIHCDDFRALLPKDSTVKCLADGGFFLDVEDISGRRYMRGFYNDVARQQDLRKRFPGCSSDMEPGQCFFPQEVAKGITTPMFILNPAYDVWQVEHVLTPDGSDPQNLWQDCRMDITKCNTKQLEILQVLLIHLLLRSMTCHILTSASILVNRLWLKRWATGSLIGERLFNSPKDPNKAILYGYGMPNLAVTRVCLSLLDEAGMERKLSGLSTQFVGRFAHTLVSFPLPPLAKAWLAAAAVSLFDRLINLSGQMMFLCETVKFVQ

SEQ ID NO: 144230 - protein, 46 aa, Oryza sativa
  unsure (1)..(46): unsure at all Xaa locations
  Clone ID: PAT_MRT4530_45064C.1.pep
THSSSHSSSHSSCEEGSHEVLRPHLVAAHSLXLPIHPYRHRRLXTP

SEQ ID NO: 144231 - protein, 89 aa, Oryza sativa
  Clone ID: PAT_MRT4530_45065C.1.pep
YSDTVLPSPRRGRIWEREGRGAASAQPSPASAQPSPASAPPSPRPRRCRRSPPPLRPDLGTERGGAVAAAASPRRGWIWEREGMSAASS

SEQ ID NO: 144232 - protein, 97 aa, Oryza sativa
  Clone ID: PAT_MRT4530_45066C.1.pep
MARRAASVALACAVVAAAMVLPEAEAGQNCICECVKLCMRTRIPSIEAQCSGKCRETACVRSCEEACARKGFPALPGEGIGACELEPLTPDEAHMLH

SEQ ID NO: 144233 - protein, 954 aa, Oryza sativa
  Clone ID: PAT_MRT4530_45067C.1.pep
MSSPSPALCAAASCSTPLRVASPVVRFRRPGAPAPVVSAARASSAAVPAVSDDLVLRIAEQLEDSVAASSPLLDPLRSASALSLLSTRWPTRRSNEAYRFTDISYLRSLPISLPSRDAPAVAPPASPYASHVHFSDGVLTSSSGAHVSALADLPPGHVRDRAAAALAASAGFADKDLFFDFNAVGAKDVVVVHVPEGVSMADDPVHIMFSYSGCGDGSMMMSNPRVLVVAEKGAEVAIIEEHFGQEDGGCYWANPVMEIIVEEDAKVVHSYVQQQSFAAAHTKWTVVQQNTSSNYEFVEVSIGARLNRHNLHVQQLGPETNTQLSTFHFSAQNKQIHDLHSKLILDHPRGRSQQIHRLIASGTGNGIFDGNIKVNSIGLMGQPEDDDPNDDEYTPPDHPLPAPAAGRRRWPVMTSLNLTKYVDSLPRIAKIRGYGIRHGRPVPIKLTIGMYSKTWQFHRDMPPTPVFVYGQSLQTATFPGPTIVARQGVPLAVEWQNHLPDAHILPWDPKVPTAIPKKGGVPTVVHLHGGAHPPEFDGHAFAWFTRDFAENGSTWTRKTYTYPNVQAPGNLWYHDHALGLTRVSLLAGLLAAYVIEKPELEDPMNLPCGDHDLHLVIADREFYTNGSISIDREWKPEYFGLVITVNGKAWPYLSVQRRRYRLRILNASNARYFNVTLSNGALPFTVIGSDSSYLSRPVTVSNLVLSPAEIFDVIVDFSRLPAAMTEIEMLNTAPYPFPNGPNVTDPNLDGKVMLFKVAGKGKVDDMPDKSKVPEHGVPYASVAALPPPTTTRYIVLYENQTAPGNLYINGLRLEDPVTETPKSGTTELWQVINLTGDNHPLHLHIATFQAIKMTKIEGFQVFKDCMIKNNNTATCNLDQHAVGPVVPVPEEEKTWKNAVKIPPEFMTSVVVAFRLVEANQPYPFDATTEPGFVYHCHILDHEDNAMIRPLKLLP

SEQ ID NO: 144234 - protein, 189 aa, Oryza sativa
  Clone ID: PAT_MRT4530_45068C.1.pep
MVPPAAHAPKNLGLRGVRRRLWGRWAAEIRVPRGHRAAARLWIGTFPSPAAAALAYDAALYCFHGGAPPGNRAFNFPHAPRLRIDDRRRHALTPGHVRAIAERYAHDVGSVLFRPLPPPPPPVAAAAVPVFAAPAPPMAPAPANHAADPYYCNEPDTTTDEDVMAAADRLLSMDIEEVAALIAIVQQGE

SEQ ID NO: 144235 - protein, 46 aa, Oryza sativa
  Clone ID: PAT_MRT4530_45069C.1.pep
MEMHEGNRAPARFRRQQVAVEERLGDAEPEKEAGDTARSQPLVTSG

SEQ ID NO: 144236 - protein, 62 aa, Oryza sativa
  Clone ID: PAT_MRT4530_4506C.1.pep
IFVLLLSSYRRVAFEDARGLSLILARTTPSCGARAHTSRRLLGRAARRCSYSILVSKGRGIF

SEQ ID NO: 144237 - protein, 74 aa, Oryza sativa
  Clone ID: PAT_MRT4530_45070C.1.pep
AHQMIVRCVGWRGIQRMNRYNFNLSRIGDCVLFKTTKIFTWVRAKLLTRSCTSRIISNKADTLNLVYLHLSALN

SEQ ID NO: 144238 - protein, 463 aa, Oryza sativa
  Clone ID: PAT_MRT4530_45071C.1.pep
MASSRRQQHKGSWSWTSRVAAAADAASWCLALSLVALLLVCSLGPGGAAGGEQRGGVAAVLRGAALSARACEEIYVVAEGETLHSISDKCGDPYILEQNPHVHDPDDVFPGLVIKITPSKPSTRAVVCRLLPVSKQVKPMEGRFQLLPLYRWREAPVTVETRPLQLPLARRGPRVLDPNVPVGVTGGANIRKDWQEKCSKGPLLNADAAISEHNQGKIWWYIEKVVIIGATKEIGRTAIAAISGMEEALEIPVLNDLTMVLGSIAQTRATGVVVDFSEPSTVYDNVKQAAAFGLNSVVYVPKIELDTVTELSAFCEKASMGCLVTPTLSIGSVLLQQAAIQASFHYNNVEIVESRPNPSDLPSQDAIQIANNITDLGQIYNREDMDSDNPARGQILGEDGVRVHSMVLPGLASSTSIHFSGPGEIYTLRHDVTNVQCLMPGLILAIRKVIRLKNLIYGLEKFL

SEQ ID NO: 144239 - protein, 121 aa, Oryza sativa
  unsure (1)..(121): unsure at all Xaa locations
  Clone ID: PAT_MRT4530_45072C.1.pep
RIYHLSLYQKREGKHAWQDLPSQDAIQIANNISDLGQIYNREDXSDNPARGQILGEDGVRVHSMVLPGLASSTSINFSGPGEIYTLRHDVTNVQCLMPGLILAIRKVVRLKNLIYGLEKFL

SEQ ID NO: 144240 - protein, 72 aa, Oryza sativa
  Clone ID: PAT_MRT4530_45073C.1.pep
LNNITDQTGSETRFLHIKKVGLHTAAYATLTLQCYISKASNYLSLMMNSAIFCEQDDNNKCIMVLLGRKVTD

SEQ ID NO: 144241 - protein, 73 aa, Oryza sativa
  Clone ID: PAT_MRT4530_45074C.1.pep
STDAWADAWADTCNGRGGLHVYTPPFPAKGPHCLTQSSIIAWSKRGCTRTMCEIDIQSLLHTPYNEQVLHVET

SEQ ID NO: 144242 - protein, 69 aa, Oryza sativa
  Clone ID: PAT_MRT4530_45075C.1.pep
MGRQAKPNTQSIGSKNRHIICHVATPKQHHRSAVVTTIGSMPRFVHRLLSNSDRLPFFSGASDTPTPEG

SEQ ID NO: 144243 - protein, 144 aa, Oryza sativa
  Clone ID: PAT_MRT4530_45076C.1.pep
PVIMLLLTIYAIFTLMFGPQSRYQPFVLHKHYYHCLMWTCEVFITYQAVIYGHLASRACDQHSRSCHGIQFVRQPLSCQAFAVNCVLIQIEYFSQPITANLTINSHGQIIYCFLHPPLFLISCSHIMYFHKCINCNINICNEAC

SEQ ID NO: 144244 - protein, 88 aa, Oryza sativa
  unsure (1)..(88): unsure at all Xaa locations
  Clone ID: PAT_MRT4530_45077C.1.pep
SSCTLFSHIGNTFQTYSWRKXTISTSRGEEWIIIFIFVENIIIQVRGYIWYSCAVSKQMCPRDPCGPVEYQQSFVSYXACTVTXSCGQ

SEQ ID NO: 144245 - protein, 83 aa, Oryza sativa
  Clone ID: PAT_MRT4530_45078C.1.pep
HASVDLLEKKNIKKGGEVEEEVARKGKGRKEKKLLLKKRALHHFCNQGRRSLFASFLPAVGPKYFQCRALHLILRNLQFSMGD

SEQ ID NO: 144246 - protein, 56 aa, Oryza sativa
  Clone ID: PAT_MRT4530_45079C.1.pep
NSISNNGSTSKTTSRLQADTCSQVTGNYYLEKSDPLRLKRKKLKLVLQWFPSNARL

SEQ ID NO: 144247 - protein, 163 aa, Oryza sativa
  Clone ID: PAT_MRT4530_4507C.1.pep
AMYPRTAAATSPIQHIYMHTRRQKRERDGSRTLQSERETETELCKVKYGDRDFYDEQRIRRKKKEAVAAMDGGGGGGGEGRGFLENKAAWWRGVGRDRKERIEGEAKRGAAARPQRTASHLISPLLAFASSAFRAKSKRSLTGLTRSQLASSLAKKERKIEIR

SEQ ID NO: 144248 - protein, 53 aa, Oryza sativa
  Clone ID: PAT_MRT4530_45080C.1.pep
MTRTRGEVGVGVGLAVAVAVEAWDWGRKHARTLGIFRPLAATRWQPDTELYGQ

SEQ ID NO: 144249 - protein, 70 aa, Oryza sativa
  Clone ID: PAT_MRT4530_45081C.1.pep
MAMVGHPHCAIVPICLIVSSSPLSTSGAAAGLLASSLFASLAGDEGRHRYSHLLDLPHHGGEERGSVAAA

SEQ ID NO: 144250 - protein, 78 aa, Oryza sativa
  unsure (1)..(78): unsure at all Xaa locations
  Clone ID: PAT_MRT4530_45082C.1.pep
SGXSAQAAVQEQAAGFXGAGXIQAARTTASQTSASPAPAVADYCCCFTMSSLAVACLGLFFFPIISSFLKKNXKGKDL

SEQ ID NO: 144251 - protein, 369 aa, Oryza sativa
  Clone ID: PAT_MRT4530_45083C.1.pep
MEIKGNLRRFFVFLFELWLAATLVLVLLCVLANTGGSPEMPAAAEVCNCSQIGIASSRISEEVTGTSGNSNESSFADLAELLPKVATDDRTVIITSVNEAFARPNSLLVLFRESFAAGEKIAHLLDHVLVVAVDPAAFHHCRAVHPHCYHLKVDTMNLSSANNFMSEAYVELVWTKLSLQQRVLELGYNFLFTDVDILWFRDPFRHIGVYADMTTSCDVFNGDGDDLSNWPNTGFYHVKSTNRTVEMLRRWRAARARYPPNHEQNIFNYIKHELAAGLGVRVRFLDTAVFGGFCQLFRNDMARACTMHANCCVGLGNKLHDLRSALDQWANYTSPAPPEGRKKKSGGGGGDRRAGWSVPAKCGTPDKRG

SEQ ID NO: 144252 - protein, 255 aa, Oryza sativa
  Clone ID: PAT_MRT4530_45084C.1.pep
MDSWGPTASREERGRRLYRFKPPGGFSRNPSSLTVHITPGSGLRLRWLGLRQCVHHVVRGGPDKARPTRNNATVASLPVWLNQVARGMCDACPKRHCPKSLVPKQVVMAKNARRPPNSNVPKCENHRREGYPEVLAGTSGHRLFAKNFLSAARKFLALLLGTSWQLKNSGSFGLLILPESSGVHHQEVPGPVNLTAAIVEKILGKPIHPPSRLHLYTFKGCKLYKDQGEPEAQNKAEPKSNRFQAWQVSSLFFLE

SEQ ID NO: 144253 - protein, 967 aa, Oryza sativa
  unsure (1)..(967): unsure at all Xaa locations
  Clone ID: PAT_MRT4530_45085C.1.pep
VWGLGHLTAGRQGRTLRKSALPPHDDGGTPQGALLRHPXVDPEPETSVRCWLDDVANLVTTAQRQLAAGGRTTAAGISRSTIALSLSSRWRAHRVAAASRHSSSHPSSMPAGSCGRHECIYGEPDARLDIERWLDVHXSRPCAESKEGGNAPIKSLSDTKHPFLKIKGXNKLFLISRXNCHAASFLNXTLLDKFPLVDPTPSRTRLVVIXDSHRLXHNSEADTDSKPMMTLGLPNFVVNTCPPVDIKSWSHRACQKRVDAKNTRPGRSAXLHAVQRKDDESLHSYIXQFCQVRNTIXIPCIPPHAVIYAFXGGVWHNRVLKKVASKEHKTYAELFQLADHVARKEEAWAWNSSSSGAAAAAAPESSSCSKRREKRKKKRSVRSGDKDHVLTAEGTLRPPHKEKAASIKQKDTAAPCESRSLDKWCIIHNTSTHSLADCRTIKSLAKRVKKSHQEKRQGHREGKAPETSADKRREEAKKKAPVDNGDEDLEFXELDTTIATVDCGACAHASDRSFKAMKRELLAAVPTHEATRRARWSEVKLTFDQTDHPPVVSRGGQLALVVSQTICNVKMKRVLINGGVALNIISPAAFDAIKAPGMKLKTSLPIIGVTPGHTWPSGHIVLLVTFGDPTNFRTERLDFDVADLNLPYNAVLGRPALVKFMAVTHYAYLQMKMLSPGGPITISGDVKIALTCTKQRAINLAAGERXAGGXERLSLAMXVQDRRLVVTWTTNXEDALVSFLRANADVFAXKPLDMPGVHREVIEHHLAVRPDARPVRQKVRRXAPERQAFIREEVAHLLEAEFIREVIHLEWLANLVFIPKANGKLWMCIDYTDLNKACPKDPFPLPRIDQIVDSTVGCDFLCFLDAYSGYHXICMARKDEEKTAFITPVGTFCYTTMPFGLKNVLVFLNDITRNIIPSNVGLSQRXWRQDLVTRCKQSTSLDGQLQETMNALKSSRHRTNINRQIRK

SEQ ID NO: 144254 - protein, 235 aa, Oryza sativa
  unsure (1)..(235): unsure at all Xaa locations
  Clone ID: PAT_MRT4530_45086C.1.pep
DVTPAAAARRLGRLGRRTLAGERRREDANEGHQHVEDDAANSPVTKTAAEDQRTATATRRKRRSSSGRRXRGCSGGLRRRRRGGRGRRRNGDHDGGLPERRRRLERRRSTAGAAAATAKLGLAALERFRRREAKAKVATGRGEHGEAFKGARRRRRRPTAXATRKEGSAKTNPRRTRIPRFPNRFSRXFQRRKGRGDPGDCFPXIYSAGEGKERPDLEGXRRRRRARVRAGDGRR

SEQ ID NO: 144255 - protein, 154 aa, Oryza sativa
  Clone ID: PAT_MRT4530_45087C.1.pep
TGPWDSDGDAWRAPLHTALSGILACFPAVSKLILKCDRHPESIADPLGSALRRLKLCSLCLVAALGTSLHKLSASSCIFGAKGIEGVLRACLHLEEQCRQLARLVELEEKRKGRVVRLIVCTRHESTNVSMGRLTLLPALLFSSLSLYPAVGTR

SEQ ID NO: 144256 - protein, 161 aa, Oryza sativa
  unsure (1)..(161): unsure at all Xaa locations
  Clone ID: PAT_MRT4530_45088C.1.pep
MSASSSAPSAPDARTQFLDLLNAALHGNTLVKLVLARHVGADQTLQRIIAKPLQVKGQPCLSLVYRHQTRDITRNLALEQAQALVAELLPDSFRNAHLFDADGEVQLTFSKKGKPSSSATXAQAPREAASSSGHDREKKRYLELSRPFLRDLGVTDAQGAL

SEQ ID NO: 144257 - protein, 207 aa, Oryza sativa
  unsure (1)..(207): unsure at all Xaa locations
  Clone ID: PAT_MRT4530_45089C.1.pep
ITLIPKIPSPTSIKQFRSVYGLNGSLKXSKVLTNRLSVVAPSTVASTQTAFIPGRFILEGCVILHEVMHELRRNKQRGVILKLDFEKAYDRVRWGFVYGVFDREHFHEKWIHWVKSCIEGGKVCININGXDLIFFSTYRGLRQEDPISPLLFNYVSDALIQLFDAAKSANILTGLVPHLFPGGLTHLQXADDTVIFIPYLAVTKFLL

SEQ ID NO: 144258 - protein, 141 aa, Oryza sativa
  Clone ID: PAT_MRT4530_4508C.1.pep
MAVLSSPVPSSPRGASPPTSPTPAATSSPASFRPVPCSPIAPVSPSSRFRSVGRSKHQRWCGLSPLSDDPSPSSYKEALLSTSVSHVSKTPSPVISAAPSPGTSAVVSAVHSPVFSRSPVAFPKSNAGSSNVANLVLCLST

SEQ ID NO: 144259 - protein, 390 aa, Oryza sativa
  Clone ID: PAT_MRT4530_45090C.1.pep
MRCSMAAMAVVMAVMAAAAASPAEGARAFFVFGDSLVDNGNNNYLLTSARADMPPYGIDHPSHRPTGRFSNGLNIPDIISEHLGAEPTLPYLSPDLRGAKLLVGANFASAGVGILNDTGIQFVNIVRMSRQLQYFAEYQERLRALVGAARARRIVNGALVLITLGGNDFVNNYYLVPFSLRSQQFALPDYVRFLISEYKKILQRLYDMGARRVLVTGTGPLGCAPAERALRGRGGGCAPQVMRAAELFNPQLSRALGEMNARVGRPGAFMAANSFRVHFDFISNPAAFGFATARDACCGQGPNNGLGLCTAMSNLCADRDAYVFWDAYHPTEKANRIIVSQFVRGSLDYVSPLNLSAALEIDAAEEAAAAAARRRRQRAVARLVGDKPHA

SEQ ID NO: 144260 - protein, 108 aa, Oryza sativa
  unsure (1)..(108): unsure at all Xaa locations
  Clone ID: PAT_MRT4530_45091C.1.pep
VASPVINALHQEITEKVPDSFPQWLARIKKWVXNEQMPQFVKGIVRFLKENSRMIIDALGYPVNKNVCEFSPEQNQLSTKRWGLASKLTSQHEQHGFTMGLPVPVMQW

SEQ ID NO: 144261 - protein, 50 aa, Oryza sativa
  Clone ID: PAT_MRT4530_45092C.1.pep
QCCRLFRIKFLLLFLLFDILTCLLLLLLPFTLLVGNQVINTIMSKEALFF

SEQ ID NO: 144262 - protein, 327 aa, Oryza sativa
  Clone ID: PAT_MRT4530_45093C.1.pep
MAAPAPAPAPPASRKRAAAPDDEPTATGSTTPAAAAGAKRPRRYALASVDDYEQLDVVGEGASGVVIMARHRRTGSKVALKHLPHGARDFDAVRVEAACQHACTGHPNIVQIKDVVADAKSGDVFLVMEFVGGSLRDELPRARPEKQVRFMMRQLIGAAKKMHASHVIHRDIKPENILNSFGDLKVCDFGSATFVNPAGKPYKECLVGTLPYTSPEQLAGNHCYGPGVDIWALGCIMGELLTGAPLFGGDMTEKELLADLSANLEDQLNELFFDVLPELSPAAREVLSGLLAFDPEKRMTAAEALEHRWFAEEPKKANFAGFAPLFG

SEQ ID NO: 144263 - protein, 104 aa, Oryza sativa
  Clone ID: PAT_MRT4530_45094C.1.pep
PFFFFFVFFFFFCRKEAEALLFLSAPLGGEFIQRSAFLHVFSYKGGGNGFFERLAGGHGLFFGTSYPPHLVFFCPFWRGRPWEKSNLWAGPFFSLYLEPNGRSF

SEQ ID NO: 144264 - protein, 134 aa, Oryza sativa
  Clone ID: PAT_MRT4530_45095C.1.pep
PFLLLLFVLFFLSHSEPREERGEAEWGGGAPVAGRLRRRRRFVFPSDAHPGRVVDGREEEGCGRNARVEELISGGKERGGGGLIQGEKEGEMGKMDSPEWSQHSGAREEEGELRRTTSADGGDGRTWMEGEREK

SEQ ID NO: 144265 - protein, 118 aa, Oryza sativa
  Clone ID: PAT_MRT4530_45096C.1.pep
MAAALTHSDPLAVALPRLDPAAASLPRGSIGGGGGGGEGRMMAAFGYPAELAATPGHRVSTSGSTTPNAYTSRYPADRARRGHRRGRAQLRQAVPLQALEADRETMRRRDPAVHGQVK

SEQ ID NO: 144266 - protein, 87 aa, Oryza sativa
  Clone ID: PAT_MRT4530_45097C.1.pep
MMKSYCRRSNRPPAAGQTANASLVKPPGHLRSDRSYPTSQTARTPMVEILKLVASGDHAAALKVTAAHQGPPAANCRLAGGGIEEPQ

SEQ ID NO: 144267 - protein, 45 aa, Oryza sativa
  unsure (1)..(45): unsure at all Xaa locations
  Clone ID: PAT_MRT4530_45098C.1.pep
MPSPLGXXXFLXAXXXFGMNXXFGGAXWTGPXRRWXFGEKITWAM

SEQ ID NO: 144268 - protein, 117 aa, Oryza sativa
  Clone ID: PAT_MRT4530_45099C.1.pep
MMKSYCRRSNRPPAAGQTANASLVKPPGHLRSDRSYPTSQTARTPMWTTIYHRQHSPKALSNTCTCNNQETIFRAQVEILKLVASGDHAAALKVTAAHQGPPAANCRLAGGGIEEPQ

SEQ ID NO: 144269 - protein, 327 aa, Oryza sativa
  unsure (1)..(327): unsure at all Xaa locations
  Clone ID: PAT_MRT4530_4509C.1.pep
PQQKLNSAIREVVKKXVLKLLHAGIIYFMPYREWVSLVQVVRKKGGMAVIQNSKNELIXMTHCYGXRMCIDYRKLNKATKKDHFPLPFIDEMLDXLGNHQIPIYADDQSKTMFTCPYGMYAYQRMSFGXCNAPVSFQRCMMSIFSDMIEEIMEIIMDDLSIYRKSFDQCLENLDKVLQRCHEEDLVLNXEKCHFMVQKGIVLEHRVSEKAVQEYKVRIVVIQQLRPPXNVKGVRSFLGHAGFYCRFINHFSLVARPLTSLPAKDAPFNFDDXCLKSFSYLKDSGLQLYNVRPPRTSRRFTVWCTTVSLATQSVLGNKKGNKLKFLFE

SEQ ID NO: 144270 - protein, 62 aa, Oryza sativa
  Clone ID: PAT_MRT4530_450C.1.pep
FSDLIVSLGFVFIIFRSPVKRRQCTPLRPIHRILSFLSLGFKKLNIIIVCVLFYFLEVPPKH

SEQ ID NO: 144271 - protein, 235 aa, Oryza sativa
  unsure (1)..(235): unsure at all Xaa locations
  Clone ID: PAT_MRT4530_45100C.1.pep
SCSARFVTCTPRRGEEQWRRGTDAEDDYDYLFKVVLIGDSXAIGKSNXLYRFTRNEFXLDSKSTIGVEFVTRXLQVDGKVVKAQIWDTVVQERYRAITSAYYRGAFCALLVYDMCRRSTFDNVGRWLQELNTHSDTTVAKMLVGNKCDLDNIREAPVEEGKALAEAEGLFFMETSALDSTNVRTAFEIVIKEIYSNVSRKILNSDSYKAELSLNRVSIEGDSKDDQKQSNRFGCC

SEQ ID NO: 144272 - protein, 110 aa, Oryza sativa
  Clone ID: PAT_MRT4530_45101C.1.pep
VRPSAVTRLHSAGSRCNVRARLSHVCPSSYNDFLAMVAMKPGMDLTGTDVPTPGVTTPAPADKRALRRIKCGVARSSNPCRTRSLSSSSSTGVMARGSAPLDGSVLPPSR

SEQ ID NO: 144273 - protein, 55 aa, Oryza sativa
  Clone ID: PAT_MRT4530_45102C.1.pep
DCNSIHEQGQCFNPNTVVAHCSWAANSYFQRNRAMGATCDFTGTATLTTSDPSKK

SEQ ID NO: 144274 - protein, 76 aa, Oryza sativa
  unsure (1)..(76): unsure at all Xaa locations
  Clone ID: PAT_MRT4530_45103C.1.pep
LWIHNPLKMASLKLAREFMKXRVVNATESPNPFTNDEELLLQGVRFAFRIHQLAGGFDEGCRKAFQELKMYASKSD

SEQ ID NO: 144275 - protein, 884 aa, Oryza sativa
  Clone ID: PAT_MRT4530_45104C.1.pep
MKRVSSHVSIASEAEINLDLSRLLIDKPRLTLERKRSFDEQSWSELSHRQNDGFDSIMHSPAFPSGFDSPFSLGTLGDPHPLVNEAWEALRKSVVYFRGQPVGTIAAVDHASEEVLNYDQVFVRDFFPSALAFLMNNETDIVKNFLLKTLHLQSSEKMVDRFKLGAGAMPASFKVDRNRNRNTETLVADFGESAIGRVAPVDSGFWWIILLRAYTKYTADTSLAESPECQNCMRLILNLCLSEGFDTFPTLLCTDGCSMIDRRMGIYGYPIEIQALFYMALRCALQMLKPDGEGKDFIEKIGQRLHALTYHMRNYFWLDFPHLNNIYRYKTEEYSHTAVNKFNVIPDSIPDWVFDFMPCRGGYFLGNVSPAMMDFRWFALGNCIAIISSLATPEQSVAIMDLIEERWEELVGEMPLKICYPAIENHEWRIITGCDPKNTRWSYHNGGSWPVLLWLLTAACIKTGRPQMAKRAIELAESRLLKDGWPEYYDGKLGRFIGKQARKFQTWSIAGYLVARMMLEDPSTLMMISMEEDRPVKPTMRRQDHRGGLPLLVRPSRPRLPPPRVATGGVGAKLPLLTVRRLRIRSSSLPALDVRRRCPRRLRAPRDALPEGRVPTIRDRLLLLQCRRRRRGPTTAAAVVVALPTYQGTNTKPPRLRGGSTGLLVRRCGDDDDDELVVAALLTEEYRRRDTLEGAELVVLRSGEWSATPIAPIVHDDGKGEELSYWETDMAVPVGDRLLCYVDLYRGVILCGDDLFDEIPPRLQYVSLPVEAPAGAFDEEHFDRQGDNYRRCLLNTRTVVCAIDGGGAALKFVDISSRCCCGSLGKHTTCDRSSRAFVIRTWTLRIDGDGDDDMAWTMDAMIDAAELGPSTPTPPSHGAFHYTP

SEQ ID NO: 144276 - protein, 71 aa, Oryza sativa
  Clone ID: PAT_MRT4530_45105C.1.pep
LSCYHDGKSNIGVIAKPYLFFSETYLVSASCFMLPANFFKVCNCPITTSFPKIYYPCSMQHLTEITETSSK

SEQ ID NO: 144277 - protein, 101 aa, Oryza sativa
  Clone ID: PAT_MRT4530_45106C.1.pep
LLFFFLFVFYFLCYFFFVFFFFFLFKSHMLFFFCFTFFMDRKKSLEDEVSQGRVGAADLNTGGIYRGQKSLYVQHTAGGRYGIQNEKAGDILWVNGRIGLP

SEQ ID NO: 144278 - protein, 137 aa, Oryza sativa
  Clone ID: PAT_MRT4530_45107C.1.pep
PLFFFFFCFFFFFFFFFFFFFFFFFFFIRPKGNHPGKQHSKSSPCTGMDDPVHEINLPRGTCWRRAPFSRYITTYRVKQRALGKQQRVLLQHRPLVLWDENIKTGSLPPQEKLDLWYRKVTSTELPYKSARRISPLV

SEQ ID NO: 144279 - protein, 549 aa, Oryza sativa
  Clone ID: PAT_MRT4530_45108C.1.pep
MAGIAALANCQSDERSSSCGAALLEFMGPAAPPSEAAAAADDVVLPYISRILMEEDIDDDMFFCLYPDHPALLEAQQPFAQILSSSSSIAGEVNSAPMEDSAALMMQGSGNGRGRKGSKHGGDELEAEVGRASKLMATPEEEEDDDDGVGEMLEKMMLNGDEDEAFHGETNAPRVPAEKKCGKAARRRRRQAKGEVVDLRELLMSCAQAVASGNRRSAGELLEQIKRHSSPTGDATERLAHYFADGLEARLAGAASLERRLVASAEERASAMELLEAYQVFMAACCFKWVAFTFANMAILRAAEGRNRLHIVDYGGQYHGLQWPSLLQRLAEREGGPPEFRAVAAARWETVTAEDVVGVDPDDEAAVVVNDVLSLGTLMDESGVFDDPSPRDTVLGSIRDMRPAVFVQAVVNGAHGAPFFPTRFREALFFFSALFDMLGATTPEEGSHLRVVLERDVLRRAAVGVIAGEGAERVERPETYRRWQARNRRAGLRQAAVEGDVVEAVRRRVRRRHHEEFVIEEDAGWLLQGWKGRILYAHSAWVVAEDGAH

SEQ ID NO: 144280 - protein, 585 aa, Oryza sativa
  Clone ID: PAT_MRT4530_45109C.1.pep
MGPAAPPSEAAAAADDVVLPYISRILMEEDIDDDMFFCLYPDHPALLEAQQPFAQILSSSSGIAGEVNSAPMEDSAALMMQGSGNGRGRKGSKHGGDELEAEVGRASKLMATPEEEDDDDDGVGEMLEKMMLNGDEEMNAPRVPAEKNGGKAARRKRRQGKGEVVDLRELLMSCAQAVASGNRRSAGELLEQIKRHSSPTGDATERLAHYFADGLEARLAGAASLEHRLLASAEERASAMELLEAYQVFMAACCFKWVAFTFANMAILRAAEGRSKVHIVDYGGQYHGLQWPSLLQRLAEREGGPPEVRMTLVGHPQPGFRPARRLERTGRRLSNCARAFGLPFKFRAVAAARWETVTAEDVVGVDHDEAAVVVNDVLSLGTLMDESGVFDDPSPRDTVLGSIRDMRPAVFVQAVVNGAHGAPFFPTRFREALFFFSALFDMLDATTPEEGSHLRAVLERDVLRRAAVGVIAGEGAERVERPETYRRWQARNRRAGLRQVAVEADVVEAVRRRVRRRHHEEFVIEEDAGWLLQGWKGRILYAHSAWVVAEDATSVGELTVVTTSLVAIILSAASAQDELPLSTNE

SEQ ID NO: 144281 - protein, 379 aa, Oryza sativa
  Clone ID: PAT_MRT4530_4510C.1.pep
MEEAAAASNGGLLYHEVQEGKLCAVHCVNTTLQGPFFSEFDLSALAVDLDQRERQVMSEGAAGAATTAAGDFLAEGEGSHNVSLGGDFSIQLGERAFCKRRQEFSWQVAVFHVTYFTTCHAKIQNINGVDMDIKVLQKALEVWDLQVIPLDSPDVGSCLFDPELETAFICHLQDHWFCIRKVNGEWYNFNSLYPAPEHLSKFYLSAFIDTLKGSGWSIFAVRGNFPKECPMATEGSNGFGQWLTPDDARRITSSCNQVQTPTQQAGVSLVADQSEEMSEMDMIAAQQEEADLNAAIAASLMDTGGPFANYAAHEESRSQDAFAIESTSGEMSKDGNLEEQGANKSETSEPNSDNIESASGSNPKQNTTSLEGKESIKED

SEQ ID NO: 144282 - protein, 56 aa, Oryza sativa
  Clone ID: PAT_MRT4530_45110C.1.pep
GDQGLLLCRSSSQVVVPSVAFNPKYKPSPVKDSTRLGGREGLVSFFFLLCPCLFNG

SEQ ID NO: 144283 - protein, 240 aa, Oryza sativa
  Clone ID: PAT_MRT4530_45111C.1.pep
MAAEGELKLLGTWASPYVSRVKLALHLKGLSYEYVVEEDHFNNKSELLLSSNPVHKKVPVMIHNGKPICESLIIMEYLDEAFPDTAAPLLPADLHDRAVARFWAAYIDDKLVPSWKQAFSGKTGEEKAEGMRHMLAAVDALEAAMEWSYKGKPFFGGDAVGFLDVALGGLLSWLHGTEELCGAKILDAAKTPLLSAWARRFGEMDAAKVALPDVCKLVEFAKMKRVQLEAAMAATTVSRN

SEQ ID NO: 144284 - protein, 46 aa, Oryza sativa
  Clone ID: PAT_MRT4530_45112C.1.pep
MGRSGTVVSSSLLGLHNHLEAALSAVFIAYAFILQQQDRVFSVAAA

SEQ ID NO: 144285 - protein, 66 aa, Oryza sativa
  unsure (1)..(66): unsure at all Xaa locations
  Clone ID: PAT_MRT4530_45113C.1.pep
YACGVCTALYLILEECLQNVIXRHKRLGTGTRLTVKAWXLTNCTQKEEWFTYTVTGVVVPPDIDRA

SEQ ID NO: 144286 - protein, 71 aa, Oryza sativa
  Clone ID: PAT_MRT4530_45114C.1.pep
MAGGLPTAARGGRSMGGHIEGHRLPTAACDGELPTVARREASGRSLCCLDDECVLEMRDVVDATRDDGERL

SEQ ID NO: 144287 - protein, 236 aa, Oryza sativa
  Clone ID: PAT_MRT4530_45115C.1.pep
STKMYQDLKQQFWWASMRREIAEYVALCDVCQRVKAEHEKPAGLLQPLKIPQLKWEEIGMDFITGLPRTSAGHHSIWVVVDRLTKVAHFIPVKTTYSGNKLAELYMARVVCLHGVPRKIVSDRGSQFTSKFWQKLQEEMGTRLNFSTAYHPQTDGIHDVFHVSQLKKYLRVPTEETDPERIELQEDLTYVEKPVRILEFPTFRRRAFTLRKVQKRLKKLKASHIDPKQPFEHVEPF

SEQ ID NO: 144288 - protein, 952 aa, Oryza sativa
  Clone ID: PAT_MRT4530_45116C.1.pep
MPLVVERVIRIQMPLHPPENLIDVLGFVRELRLMAFEVGYDVAPEYRQIPHDPNEERCHVRVTLTSDREDFPSIKFEAGGRKYSHACQEAALVAIGDAMDAVGVEREKAAHDRENWNRGRICKLECKVYRLQKELAELKGEAPPPAPKLRLTARKRTRPPPRIQLASKTRVVGDAVPDHAEPVIHVLSDDEEEEDPEKREPATPEEEDPSLRSDASRDSFACQRMVNTRTGSGSGSGSGNNEGIPFPSTLFLLESKDLDVILGMDWLTHHRGVIDCANRKVTLTSSIGQTVSFFVSPPRSHGLTLNQVALREIPIVQDYPDVFLEDLPGMPPKRDIEFRIDLVPGTNPIHKRPYRMAANELAEVKRQVDDLLQKGYIRPSTLPWGAQVIFVEKKDHTQRMCVDYRALNEVTIKNKYPLSRIDDLFDQLEGATVFSKIDLRSGYHQLRIREEDIPKTDFTTRYGLFECTVMSFGLTNAPAFFMNLMNKVFMDYLDKFVVVFIDDILIYSKTKEEHEEHLRLALEKLREHQLYAKFSKCQFWLPEVKFLGHVISARGVAVDPSNVESVLNWKQPKTVSEIRSFLGLAGYYRRFIENFSKIARPMTRLLQKQLELIKDYDMEIHYHPGKANVVADALSRKSYCNMSEERHLPWELCQELEKLNLGIVNKGFVAALEAQPTLFDQVREAQVNDPDIQGIKKNMRRGKAIGYIEDEQGTVWLGERICVPDNKELKNTIMKEAHETLYSIHPGGTKMYQDLKQQFWWASMRREIAEYVALCDVCQRVKAEHQKPAGLLQPLKIPEWKWEEIGMDFITGLPRTSAGHDSIWVVVDRLTKVAHFIPVKTTYTGNKLAELYMARVVCLHGVPKKIVSDRGIHDMFHVSQLKKCLCVPTEEADPKRIELQEDLTYVEKPVRILEFPTFRRRAFTLRKVQKCLKKLKASHTDPKQPFEHVEPV

SEQ ID NO: 144289 - protein, 844 aa, Oryza sativa
  Clone ID: PAT_MRT4530_45117C.1.pep
MRLLALAVASIVLANLHLLGVHGRDLLLSCGSNATVDAGGRRWIGDMAPGLNFTLSSPGIAASQAGSSNGNEIFGLVYHSARFFSTASWYNFSVLPGNYCLRLHFFPYTFGNFSGNDSLFDVTANDFKLVSKFNVSEEIVWRSTVSNSAINAVVKEYFLLVGSRGLQVEFDPSPGSFAFVNAIEVMLTPDNLFNDTVNKVGSAGNGQLPLGLSNRGLETMYRLNVGGHALNSSSDQYLHRPWYTDEAFMFSANAAQIVSNTSSVSYLSNNDSSISPIDVYETARIMSNNMVVDKRFNVSWRFYVHPNFDYLVRLHFCELFYDKPNQRVFKIYINNKTAAEDYDVYVRAGGINKAYHEDYFDNLPQQVDSLWLQLGPDSLTSASGTDPLLNGLEIFKLSRNGNLAYVLGHIDMGNQRGISKDRNRKILWEEVGIGSASFVTLTSVVLFAWCYVRRKRKADEKEAPPGWHPLVLHEAMKSTTDARAAGKSPLTRNSSSIGHRMGRRFSISEIRAATKNFDEALLIGTGGFGKVYKGEVDEGTTVAIKRANPLCGQGLKEFETEIEMLSKLRHRHLVAMIGYCEEQKEMILVYEYMAKGTLRSHLYGSDLPPLTWKQRVDACIGAARGLHYLHTGADRGIIHRDVKTTNILLDENFVAKIADFGLSKTGPTLDQTHVSTAVKGSFGYLDPEYFRRQQLTQKSDVYSFGVVLFEVACGRPVIDPTLPKDQINLAEWAMRWQRQRSLDAIVDPRLDGDFSSESLKKFGEIAEKCLADDGRSRPSMGEVLWHLEYVLQLHEAYKRNNVDCESFGSSELGFADMSFSLPHIREGEEEHHSKPSSIREDPDT

SEQ ID NO: 144290 - protein, 152 aa, Oryza sativa
  unsure (1)..(152): unsure at all Xaa locations
  Clone ID: PAT_MRT4530_45118C.1.pep
LCRPPAGGEEAGGELLLRDRELRGRTRRRGRRVPPHLLNXHHSFYDGLYVGGVADARIRPALRTLKQNMSLLLSVLIDRVQPVAVQEASEAARRSDGKGAAQRELLEHNGLLGGEEGDRSGSRAGNRWPRQETLALLKIRSEMDVAFREAIL

SEQ ID NO: 144291 - protein, 894 aa, Oryza sativa
  Clone ID: PAT_MRT4530_45119C.1.pep
MMPPHPPKNLIKVLGFVTELRLMAFEVGYEVAPEYRQIPHDPNEDDHEDLPSIKFEAGGRKYSHACQEAALVAIEELRHRFEEELESSVFQYHPHKPHGQDYGTYNCPDGEDSATLTHAVHMLSAMDVVGVEREKAAHDRENWNRGKICKLESKVYRLQNRGKICKLESKVYRLQKELAELKGETPPPAPKLRLTARKRTCPPPRLQLASKTRVHDLELAAVVHALKIWRHYLFGNHTKIYTDHKSLKYIFTQPDLNMRQRKWLELIKDYDMEIHYHPGKANVVADALSRKSYCNMSEGRHLPWELCQEFEKLNLGIVSKGFVAALEAKPTLFDQVREAQVNDPDIQEIKKNMRRGKAIGYIEDEQGTRVKAEHQKPAGLLQPLKIPEWKWKEIGMDFITGLPRTSAGHDSIWVVVDRLTKVAHFIPVKTTYTRNKLAELYMARVVCLHGVPKKIVSDRGSQFTSKFWQKLQVEMGTRLNFSTAYHPQTNGQTERVNQILEDMLRACVLDFGGSWDKNLPYTEFSYNNSYQASLQMAPHEALYGRKCRPPLLWDQTGERQVFGTDILREAEEKVKIIQERLRVAQSRQKSHADNRRRDLAFEEGDYVYLRVTPLRGIHRFQTKGKLAPCFVGPFKIVSRRGEVPYQEADPERIELQEDLTYVEKPVRILEFPTFPRRAFQFKKWYTSDQSKTIRIAVPAVMEQEIYRVIKKMPIDKALGLDGYTENFFKILSKLLALRLRPDYVDSHLSQSEAFIKGRRIHDKKTWPSHKQAKISGSHNQMREHRSGLHSKWCAIGAGTLPYKIHRTATTPWKDGLDGYKTNLSQDCNAGHWLEGEKHGTSKVVNTGQVNTDSAAHLPSHALKETKEALGLLDTKDKEVPMGGDKGHHRGEMHD

SEQ ID NO: 144292 - protein, 175 aa, Oryza sativa
  unsure (1)..(175): unsure at all Xaa locations
  Clone ID: PAT_MRT4530_4511C.1.pep
LLWAIGTLEAGRTDHVSIIKTTWIWHSYVVSSVFFTVCLLLLCHGSLAQLLLRQTTTXCKTPRRGITKEXLDNILQSFEPLQRVRYHAGTADFFDDTDELFRWTXYAVGRGVIAPRRLLLPHYTTAASLXFILRRRGMTGXPLLACCADYYQQLLQLSCQGQLTKRQSQSEQLKE

SEQ ID NO: 144293 - protein, 1223 aa, Oryza sativa
  Clone ID: PAT_MRT4530_45120C.1.pep
MAFKAAHDRENWNGGRICKLESKVYHLQKELAELKGEAPPPAPKLRLTMVNTRTGSGSGSGSGHNEGDPTLAQVLAQQTQLINLLVHQAQNQQANNNNQPPPPQNKLADFQRVRPPTFSSTTNPPPQNKLADFQRVRPPTFSSTTNPVEAGDWLHAIEKKLDLIQCTEQEKVSFASHQLHGPAAEWWDHFRQNRAVGEPITWREFTAAFKKTHIPSGVVALKKREFRALNQGSCSVIEYLHDFNRLARYAPEDVRTDEERQEKFLEGLNDELSYALMAMEYRDFQQLVDKAIRQEDKYNRMEQKKRRAAHFKAQQAPTQNQPVRKEQGSKPGVCFNCGHPGHYADKCPKARRVKNAPVQNNSNATALKARVNHVAAAEAQNSPDVVLGTFPVSSVPATVLFDSVALQEIPIVQDYPDVFPEDLPGATVFSKINLCSGYHQLRIREEDIPKTAFTTRYGLFECIVMSFGLTNAPAFFMNLMNKVFMEYLEKFVVVFIDDILIYSKTKEEHEEHLRLALEKLREHQLYAKFSKCEFWLPEVKFLGHVISAGGVAVDPSNVESVLNWKQPKTVSEILLGLAGYYRRFIENFSKIARPVTRLLQKDVKYKWTEECEQSFQELKKRLVTALVLVLPDPRKGFQVYCDASRLGLGCVLMQDGKVVAYASRQLRSHENNYPTHDLELATVVHASKIWRHYLFGNRTEIYTDHKSLKYIFTQPDLNMRQHRWLELIKDYDMEIHYHPEAKPTLFDQVREAQVNDPDIQEIKKNMRRGKAIGYIEDEQGIVWLGERICLPDNKELNDTIMKEAHETLYSIHPGSTKMYQDLKQQFWWASMRREIAEYVALCDVCQRVKAEHRKPAGLLQPLKIPKWKWEEIGMDFITGLPRTSAGHDSIWVVVDRLTKVAHFIPVKTTYTGNKLAELYMARVVCLHGAPKKIVSDRGSQFTSKFWQKLQEEMGTRLNFSTAYHPQTDGQTERVNQILEDMLRACVLDFGGSWDKNLPYAEFSYNNSYQASLQMAPYEALYGRKCRTPLLWDQIGERQVFGTDILREAEEKVKIIQERLRIAQSRQKSYADNCRRDLTFEEGDYVYLWVTPLRGVHRFQTKGKLAPRFVGPFKRELKKCLRVPTEEADPKHIELQEDLTYVEKPIRILQFPMFRRRAFTFRKVQKRLKKVKVGCEHMVLMVVLMTIKDRFASYYCETFTMPTTSQCGQRLYLLYSMVHYGVPD

SEQ ID NO: 144294 - protein, 1210 aa, Oryza sativa
  unsure (1)..(1210): unsure at all Xaa locations
  Clone ID: PAT_MRT4530_45121C.1.pep
MDAHPPKNLIEVLGFVRELRMMAFEVGYEVAPEYRQIPHDPNEEKCRVRVTLTSDREDLPSIKFEAEGKKYSHVCQETALVAIGELRHRFDEELESSAFQYHPHKPHGQDYRTYNCPEGEGSATVMHAVYMLSAMDAVGVEREKAAHDRENWNRGRICKLESKVYRLQKELAELKGEAPPPAPKLRLTARKRTSLPPRLQLASKTRVMVNTRTGSESGSGNGHNEGDPTLAQVLAQQTQLINLLVQQAQNQQANNNNQPPPPQNKLADFLRVRPPTFSSTTNPVEAGDWLHAVGKKLDLFQYTEQEKLVDKAIRQEDKYNRMEQKKRSSQRPRIALGPQAAPYPQGGSSSVARPQRQFYNNNTSNHSNDNRNMVTRHVAAPTQNHPVRKEQGSKPGVCFNCGDPGHYADKCPMPRRVKNAPVQNNSNAPAPKARVNHVAAAEAQNAPDVVLGTFPINSIPATVFFDSGATHSFLSKSFAGNHGMEVISLGRPLLVNTLGNQVSSTQYCPSVTIEIEEIPFPSSLIFLESNDLDVILGMDWLTHHIGVIDCANRNVTLTSSNGQTVSFFVSSPKSHGLTLNQVALQEIPIVRDYPDVFPEDLPGMPPKRDIEFWIDLVPGTNPIHKRPYRMAANELAEVKRQVDDLLQEGYIRPSTSPWGAPVIFVEKKDHTQRMCVDYRALNEVTIKNKYPLPRIDDLFDQLEGATVFSKIDLRSGYHQLRIREECTVMSFGLTNAPAFFMNLMNQVFMEYLDKFVVVFIDDILIYSKNKEEHEEHLRLALEKLHEHQLYAKFSKCEFWLPEVKFLGHVISTGGVAVDPSNVESVLNWKQPKTVSEIRSFLGLAGYYRRFIENFSKIARPMTRLLQKDVKYKWTEECEQSFQELKKRLAAAPVLVLPDPRKGFQIWRHYLFGNRTEMYTDHKSLKYIFTQPDLNMRQRRWLELIKDYHPEAQPTLFDQVREAQMNDPDIQEIKKNMRRXRVKAEHQKPAGLLQPLKIPEWKWEEIGMDFITGLPRTXDVGGSWDKNLSYAEFSYNNSYQASLQMAPYKALYGRKCRTPLLWDQTGERQVFGTDVLREAEEKVKIIQERLRVAQSRQKSYADNRRRDLTFEEGDYVYLRVTPLRGVHRFQTKEKLAPRFVGPFKILKKCLSVPTEEADPERLEIQEDLTYVEKPVRILEFPTFRRRAFTLRKVQKCLKKLKASHTDPKQRF

SEQ ID NO: 144295 - protein, 97 aa, Oryza sativa
  unsure (1)..(97): unsure at all Xaa locations
  Clone ID: PAT_MRT4530_45122C.1.pep
GWGSAAIDSWDNHKEXNCYVPDSQGWSYGHXKRRTNESSRRNSRGRDRVGPISSKAMKPKYHSEERNGANNGWRHCRVRNNMQYSYENPGCNQSLAM

SEQ ID NO: 144296 - protein, 163 aa, Oryza sativa
  Clone ID: PAT_MRT4530_45123C.1.pep
LFFFTQNHFSRRSKTVFTGGGKDRLDAIACDAGDISSLQAVIYPPAKTHSTNNKKPHTGAAAGLPLQPAALLLPSPPSHRRRPRRIGVIVVAAVVVAAVARLLPLPIGGTVVVVVARHREREEPSRERASEPVAKAEGVRRGTVAAGGGGSKELSRRWIWWWW

SEQ ID NO: 144297 - protein, 976 aa, Oryza sativa
  unsure (1)..(976): unsure at all Xaa locations
  Clone ID: PAT_MRT4530_45124C.1.pep
MVNTRTGGSGSGSGNNEGIPFPSKLILLESXDLDVILGMDGLTCHRGVIDCANHKVTLSSSNGQTVSFFVSSPRSHCLTLNQVALHEIPIVQDYPDVFLEDLPGMPPKRDIEFRIDLVPGTNPIHKRPYRMGANELVEVKRQVDDLLQKGPXTSSWGAPVIFVEKKDHTQRMCVDYRALNEVTIKNKYPLPRIDDLFDQLEGATVFSKIDLRSGYHQLRIREEDIPKTAFTTRYGLFECTVMSFGLTNAPAFFMNLMNKVYMEYLDKFVVVFIDDILIYSKTKEEHEEHLRLALEKLREHQLYAKFSKCKFWLPEVKFLGHVISAGGVVVDPSNVESLLNWKQPKTVKEIRSFLGLAGYXRRFIENFSKIARPMTXLLQKDVKKLRPHENNYPTHDLELAAMVHALKIWRHYVFGNRTKMYTDHKRLKYIFTQPDLNMRQRRWLELIKDYDMEIHYHPGKANAIADALSRKSYCNMSEGRHLPWELCQELXKLSLGIVKNGFVAAXEVQPTLFDQVREXQVNDPDIQEIKXNMRREKAIGYIEDEQGTVWLGERICVPDNKELKDTIMKEAHETLYSIHPGSTKMYQDLKEQFWSACXREIAEYVALCDVCQRVKAEHQKLAGLLQPLKIPEWKWEEIGMDFITGLPRTSTGHDSILVVVDRLTKVVHFIPVKTTYLGNKLAELHMARVVCSHGVPKKIMSDRGSQFTSKFWQKLQEEMGTRFNFSAAYHPQTDGQTERVNQILEDMLRACXLDFGGSWDKNLPYAEFSYNNSYQASLQMAPYEALYGRKCRTPLLRDQTGERQVFGTDMLREAEEIVKIIQERLRVAQSRQKSYADNRRRDLTFEEGDYVYLRVTPLRGVHRFQTKGKLSPQFVGPYKIVSRRGEVAYQLELPSSMAGIHDVFHVSQLKKCLRVPTEEADPERIELQEDLTYVEKPVRISEVNERNTRNRVIRFCKVQWSNHSEEEATWEREDEL

SEQ ID NO: 144298 - protein, 103 aa, Oryza sativa
  Clone ID: PAT_MRT4530_45125C.1.pep
MYGGCSGDSDHGATAFPLWDGKLRFTQGFGFGVEVSSAALALESEKKRAALLRERKSRYGIDEEDKQRFFPFSNPTHAKSTAGWVLVPRGTSTERQGSQFDEN

SEQ ID NO: 144299 - protein, 635 aa, Oryza sativa
  unsure (1)..(635): unsure at all Xaa locations
  Clone ID: PAT_MRT4530_45126C.1.pep
MGVIGESMPLVVEGGDSDPGMVHCGELCFARGTVTVPFQGTVVALRRMETCFGAVSCGYSVVYLLCSLLSMSYAHSCNIHSSEEEYFSEEIPGVTSWYQSHVDLRTSQMMSPHPPERLIDVVGFVRGLRMMAFEVGYDVAPEYRQIPHDPNEEQCRVRVTLTSDREDLPSIKFEAGGKKYSHACQEAALVAIGELRHRFDEELESSAFXYHPHKPHGQDYGVHNYPEDEDSTTLKHAVYMLSAMDAIGVEREKAAHDKENXNHGKIYKLESKVYRLQKELAELKGEAQPPAPKLRLTARKRTRPPRHIQLASKTRVVGDAVPDHAEPVIHMVNTRTESXSGHNEEDPTLAQVLAQQTQXLINLLVQQAQNQQANNNNQPPPPQNKLADFLRVRAPTFSSTTNPVEAGDWLHAVEKKAAGKPITWREFTAAFKKTHIPSGVVALKKREFSALNQGSRSVIEYLHDFNRLARYAPEDVRTDRERQEKFLEGLNDELSYALLAMEXRDFQQLVDKAIRQENMYDRMEQKKLARPQCQFYNNNTGNRSNNNRNVVTRPVATPTQNQPVRKEQGSKLGVCFNCGDPGHYANKCPKPRRVKTAPVQNNSNAPAPKARVNHVTAAEAQIDLQACKNEVLSDS

SEQ ID NO: 144300 - protein, 1169 aa, Oryza sativa
  Clone ID: PAT_MRT4530_45127C.1.pep
MAGDDFPTFRRRAFSLRKVGCEHMVLMVVLVTIKDRFASYCCETLTVPTTSQRGQRLYLLYNMIHYGVSDCKAVRSPWGSLGSLFASGLEGEIMIQERCTVWYISGQSKTIRIAVPAVMDAAHPPKNLIKVLGFVRELRLMMVNTRTGSGSGSGSGHNEGGPTLAQNKLADFLRVRPPTFSSTTNPVEAGDWLHAVEKKLDLIQCTEQEKVSFASHQLHGPAAEWWDHFRQNRAAGEPITWWEFTAAFKKTHIPSEDVHTDEERQEKFLEGLNDELSYALMATDYRDFQQLVDKAIRQEDKYNRMEQKKRRAAQFKAQQGSSQRPHIVLGPQAAPYPQGGSSSVARPQRQFYNNNTGNRSNDNHNVFTRPVAAPTQNQPIRKEQGSKPGCPKPRRVKNAPVQNNSNAPAPKAHVNHVAAAEAQNAPKLVLESKDLDVILGMDWLTRHRGVIDCANRKVTLTSSNGQTVSFFVSSPKPHGLTLNQVALQEIPIVRDYPDVFPEDLPGMPPKRDIEFRIDLVPGTNPIHKRPYRMAANKLAEVKSQVDDLLQKGYTRPSTSPWGAPVIFVENKDHTQRMCVDYHALNEVTIKNKYPLPRIDDLFDQLEGATVFSKIDLRSGYHQLRIREEDIPKTAFTTRYGLFECTVMSFGLTNSPAFFMNLMNKVFMEYLDKFVVVFIDDILIYSKTKEEHEEHLRLALEKLREHQLYAKFSKCEFWLPEVKFLGHVISAGGVAVDPSNVESVLNWKQPKTILEIRSFLGLAGYYRRFIENFSKIARPMTRLLQKDVKYKWTEECEQSFQELKKRLVTAPVFVLPDPRKGFQVYCDASRLGLGCVLMQDGKVVAYASRQLRPHENNYPTHVLELAAVVHVLKIWRHYLFGNRTEMYTDHKSLKYIFTQLDLNMHQRRWLELIKDYDMKIHYHPGKAKVVADALSRKSYCNMLEGRHLPWKLCQEFEKLNLGIVNKGFVAALEAQPTLFDQVREAQVNDPDIQEIKKNMRRGKAIGYIEDEQGTVWLGERICVPDNKELKDTIMKEAHETLYSIHPGSTKMYQDLKQQFWWASMRREIAEYVALCDVCQRVKVEHQKPAGLLQPLKIPEWKWEEIGMDFITGLSRTSAGHDSIWVVVDRLTKFPTFRRRAFSLRKVRKRLRKLKASHTDPKQPFEHVEPV

SEQ ID NO: 144301 - protein, 465 aa, Oryza sativa
  Clone ID: PAT_MRT4530_45128C.1.pep
MRRGKAIGYVEDEQGIVWLGERICVPDNKELKDTIMKEAHETLYSIHPGSTKMYQDLKQQFWWASMRREIAEYVALCDVCQRVKAEHRKPAGLLQPLKIPEWKWEEIGMDFITGLPRTSSGHDSIWVVVDRLTKVAHFIPVKTTYTGNKLAELYMARVVCLHGVPKKIVSDRGSQFTSKFWQKLQVEMGTRLNFSTAYHPQTDGQTERVNQILEDMLRACVLDFGGSWYKNLPYAEFSYNNSYQASLQMVPYEALYGRKCCTPLLWDQTGERQVFGTDILREAEEKVKIIQERLRVAQSRQKSYADNRRRDLAFEEGDYIYLRVTPLRGVHRFQTKGKLAPRFVGPFKIVSRKGEVAYQLELPLSMAGIHDVFHVSQLKKCLRVPMKEADPERIELQEDLTYVEKPVRILEVSERNTRNRVIRFCKVQWSNHSEEEATWEREDELKSDHPHLFASSSKSRGRDSV

SEQ ID NO: 144302 - protein, 98 aa, Oryza sativa
  Clone ID: PAT_MRT4530_45129C.1.pep
MKRARPSTSEEHHPSPPSQPFSVEQGCASPCRHCRRPSRIVGASSRCTIAVAGLSLVEFSLVYAFTKLRQHRSFILAINPSRLSFLLHHRNLLADQRP

SEQ ID NO: 144303 - protein, 187 aa, Oryza sativa
  Clone ID: PAT_MRT4530_4512C.1.pep
MTPANPTPLLSSPRPNPSLPLPRRARRPHPPPAANTTGAASTPDWFRPRAPPDADPSTSGGRVAARDPGVRVRAREGAEEEKKGRGRGRRRWWDWWSGDRESYLVDDVEPLPLPLTVPDTEPMSREELDRRLSCDVEIEDCKTVSYEWTGKCRSCQGTGLVIGNREWGYYMYPDLLARNCYCELERV

SEQ ID NO: 144304 - protein, 50 aa, Oryza sativa
  Clone ID: PAT_MRT4530_45130C.1.pep
ARSGGVRHRRVSCRSAADVVQPSARRASPPLPRRSQHRSTPWGQLDQGYP

SEQ ID NO: 144305 - protein, 380 aa, Oryza sativa
  Clone ID: PAT_MRT4530_45131C.1.pep
MKRFAFEDSDMARVLMLMSTHGQHEQALALPVPEPMEVTDEEKERKERKSSAQKEKEAGNAAYKKKDFETAIQHYTKAMELDDEDISYLTNRAAVYIEMGKYDECIKDCDKAVERGRELRADFKMISRALTRKGTALAKLAKTSKDYDIAIETFQKALTEHRNPDTLKKLNEAERAKKELEQQEYYDPKLADEEREKGNQLFKEQKYPDAVKHYTEAIRRNPKDPKVYSNRAACYTKLGAMPEGLKDAEKCIELDPTFSKGYTRKGAIQFFMKEYDKAMETYQAGLKHDPNNPELLDGVKRCIEQINKANRGDLTQEEIQERQNKAMQDPEIQNILTDPIMRQVLVDLQENPRASQEHLKNPGVMQKIQKLVSAGIVQMR

SEQ ID NO: 144306 - protein, 602 aa, Oryza sativa
  Clone ID: PAT_MRT4530_45132C.1.pep
MADEAKAKGNAAFSAGRYEEAARHFTDAIALAPGNHVLYSNRSAALASVHRYSEALADAEKTVELKPDWAKGYSRLGAAHLGLGDAASAVAAYEKGLALDPTNEGLKAGLADAKKAAAAPPRRPPPSGVDGIGQMFQGPELWTKIASDPTTRAYLEQPDFMQMLRDVQRNPSSLNMYLSDPRMMQVLGLMLNIKIQRPEASESSQPSSSPPSQPQEQPEAKAREVEPEPEPEPMEVTDEEKERKERKSSAQKEKEAGNAAYKKKDFETAIQHYTKAMELDDEDISYLTNRAAVYIEMGKRLLKFIYVDPSSTGSSVILPPFHNYDECIKDCDKAVERGRELRADFKMISRALTRKGTALAKLAKTSKDYDIAIETFQKALTEHRNPDTLKKLNEAERAKKELEQQEYYDPKLADEEREKGNQLFKEQKYPDAVKHYTEAIRRNPKDPKVYSNRAACYTKLGAMPEGLKDAEKCIELDPTFSKGYTRKGAIQFFMKEYDKAMETYQAGLKHDPNNPELLDGVKRCIEQINKANRGDLTQEEIQERQNKAMQDPEIQNILTDPIMRQVLVDLQENPRASQEHLKNPGVMQKIQKLVSAGIVQMR

SEQ ID NO: 144307 - protein, 170 aa, Oryza sativa
  Clone ID: PAT_MRT4530_45133C.1.pep
MATTGSTAPARWSYTEFVVESETSRVPDSMEACLIARSIEPAKTMFTNCPSWVRNSEGGPWVAKPNQREPKPVRKVAKPIWLDETSAQGSLREEPLGLMSWLISSAPLSLTVGFVVSATFSISRCGVEEKLVTAVAPVPADVLASDVYVDIELPLLKMASSRTPVLPSFD

SEQ ID NO: 144308 - protein, 230 aa, Oryza sativa
  unsure (1)..(230): unsure at all Xaa locations
  Clone ID: PAT_MRT4530_45134C.1.pep
GGRKYSFLAFSSNQLRDKSAWFFAEDRKTTVEAIRKWMGRFTSKNVAKHAARMGQCFSSTYATVTMRPDEVDESFDDVVHNEYIFSDGIGKITPDLALEVAERLQLTDNPPSAYQIRFAGFKGVIAVWQGHGDGTRLFLRPSMRKFESNHLVLEVVSWTKFQPGFLNRQIIILLSSLNVPDSIFWQMQETMLSNLNNILSXRDVAFEVLTTSCADDGNTAALMLSAGFEP

SEQ ID NO: 144309 - protein, 97 aa, Oryza sativa
  unsure (1)..(97): unsure at all Xaa locations
  Clone ID: PAT_MRT4530_45135C.1.pep
KTCASQVPRVGAISPVARVLRISTMLLKKGAERGLTPYDIXSILCRQTVKKESEIEAIIEEAEDAILPGTSEETFLETISEIMDFHLDKLAVKLKKF

SEQ ID NO: 144310 - protein, 45 aa, Oryza sativa
  unsure (1)..(45): unsure at all Xaa locations
  Clone ID: PAT_MRT4530_45136C.1.pep
WGVFXXGVLISWINNQIQNLVKLQLLIWDFAIPSQGCPKQKQKWG

SEQ ID NO: 144311 - protein, 79 aa, Oryza sativa
  Clone ID: PAT_MRT4530_45137C.1.pep
ELVPSAARHPQFPVSLAIPISPTSSDVAVRLHRNGVSCCCCGRRRRISSASPRYGILSQCALKKVIGVLDCFPVILARY

SEQ ID NO: 144312 - protein, 224 aa, Oryza sativa
  Clone ID: PAT_MRT4530_45138C.1.pep
GRALVPTLASLVSVPLSPSWSLPLLPSPPLLLFLPCRQQRSRRRWRQPFPQVRSGGGGGISGSRWRIRWRWRQRCFQRADPSAAVFPADGSVGDFFGERIRRFSTPSHQPRAQASPATAAVASAICRADPAEVVAAAFPVVGSSGPLPPPHPPQASPLDWAAAAAASPFDPTTDVGGTRGRIRPRGYAFRRRRPPWLDRPMVIVDVLFELFYKKVVNNFGISWE

SEQ ID NO: 144313 - protein, 255 aa, Oryza sativa
  unsure (1)..(255): unsure at all Xaa locations
  Clone ID: PAT_MRT4530_45139C.1.pep
YPGEWLLDLPLLSQSFKEWSQAQQAVDQGERVTLAKTWLEAVNKIDLFAKADENQLADLSEIYTAYLIKCKAAGMQYTQPGRFVLPAENAKGAPVFQFFPLLHLSEAEWQRLETASDNSTYKILKKRYRYYQQKIIQPFYADYFSQFDRQVILADCLTPLNHGYPAFIEMKIRLQQLFKHFHYGNRSLFHRLFXAKIDKLXIFSHLRAIIFSSRSRSPNLEKFKCDNLVQEXGGRYAEFDGIEIGYQAISAIRAT

SEQ ID NO: 144314 - protein, 32 aa, Oryza sativa
  Clone ID: PAT_MRT4530_4513C.1.pep
DAWVLTLTGLGENYKLSFSLTVLYMEYIFNAF

SEQ ID NO: 144315 - protein, 361 aa, Oryza sativa
  unsure (1)..(361): unsure at all Xaa locations
  Clone ID: PAT_MRT4530_45140C.1.pep
GTRQAGIDYDSSHGKAQPNDTGVKLQRTAPYYKRNRAHVCSFYVRGECTRGAECPYRHEMPETGELSQQNMGDRYYGVNDPVALKLLGKAGEMPSLTPPDDESIRTLYIGGLNNRITEQDLRDQFYAHGEIESIRMVLQRACAFVTYTTREGAEKAAEELANKLVIKGIRLKLMWGKPQXAPKPEEEGAGRQGHVAHGGMLPRAVISQQQSGDQPQPPGTEGQQQAPSGSYYFNIPAPPGAERTLYPSMDPQRMGALVKSQEGDGKPGPQQAGQAQASSSSGQSXYPMPPXYYHGQYPPYYPPYGGYMPPPRMPYPPPPQYPPYQPMLAPPAQSQASSSQQPGPSMQQQAQAPPQQQTTQN

SEQ ID NO: 144316 - protein, 482 aa, Oryza sativa
  Clone ID: PAT_MRT4530_45141C.1.pep
MAHRLLRDAQADGWERSDFPIICESCLGDNPYVRMLRAEYDKECKICARPFTVFRWRPGRDARYKKTEICQTCCKLKNVCQVCLLDLEYGLPVQVRDTALSINSNDAIPRSDVNREYFAEEHDRKARAGIDYDSSHGKARPNDTILKLQRTAPYYKRNRAHVCSFYVRGECTRGAECPYRHEMPETGELSQQNIKDRYYGVNDPVALKLLGKAGEMPSLTPPDDESIRTLYIGGLNNRITEQDLRDQFYAHGEIESIRMVLQRACAFVTYTTREGAEKAAEELANKLVIKGIRLKLMWGKPQAPKPEDDEAGRQGHVAHGGMLPRAVISQQQSGDQPQPPGMEGQQQAPSGSYYFNIPAPPGAERTLYPSMDPQRMGALVKSQEGDGKPGPQQAAQAQASSSSGQSYPMPPQYYHGQYPPYYPPYGGYMPPPRMPYPPPPQYPPYQPMLATPAQSQASSSQQPAPATLHQAQVPPPQQTTQN

SEQ ID NO: 144317 - protein, 53 aa, Oryza sativa
  Clone ID: PAT_MRT4530_45142C.1.pep
FLYLYTSKDLVLVYELIKKSTLKGKMAQSTVVLFIKVKKISFRELKLPNLHMI

SEQ ID NO: 144318 - protein, 115 aa, Oryza sativa
  Clone ID: PAT_MRT4530_45143C.1.pep
SIPSLPPIHLSPPPPTSPCPAPSSSRVSSIASSTTTSYNRALPTTEHDPPPRRRQGCRVAGPRAHHHRHRCWLVVTPPCCLSPTALSCCARGRGRRHGRPRRSPPSRTTPERWPR

SEQ ID NO: 144319 - protein, 280 aa, Oryza sativa
  Clone ID: PAT_MRT4530_45144C.1.pep
MANTGLSIPMVNGATIHLLPGFRFRPTDDELVIKYLYPRAFHVPLPCAIITDVDIHHHNPWDIVPVAEREKGKHFFTRKEVKYPGSRRSNRVAGNGFWRAAGSEVPIYYKPEGAANDMLVGMRRTLVFHYGKSRSAERTEWAMHEFQLAGAGLLPHPMMSSWVICCIYKKRQQNTKNKSEDITDKNNGSPSAAHTHAPLVETMVEPDNSWMICRIYKKRQRAPQVIIPPSIGNAREAVLAVPAIGNAGDRQVTSLTSQGIDVSRRGVMSLPMSSQRTRAV

SEQ ID NO: 144320 - protein, 317 aa, Oryza sativa
  Clone ID: PAT_MRT4530_45145C.1.pep
MSSDAGDDDDVVLDFRPLIVVYKSGRLERPLATPPVPPGTDAATGVASRDVRLSAASFVRLYLPPPCAAVAGGERLPVVVYFHGGGFVIGSAASPAYHRCLNDLAAACPAVAVSVDYRLAPEHPLPAAYEDSAAALAWVLSAADPWLAVHGDLSRVFLAGDSAGGNICHHLAMRHGLTSQHPPHRLKGIVLIHPWFWGKEPIGGEAAAGEQKGLWEFVCPDAADGADDPRMNPTAAGAPGLENLACEKVMVCVAEGDTLRWRGRAYAEAVVRARGGEAAAVELLESEGVGHVFYLFEPGHEKADELLRRIAAFISAK

SEQ ID NO: 144321 - protein, 406 aa, Oryza sativa
  Clone ID: PAT_MRT4530_45146C.1.pep
MAGAAALRRSARRVVLPGAYALSRALQHPERLLSSQASPDRGGVLGSELGLYPPERVRNFSIIAHVDHGKSTLADRLLELTGTIKKGHGQPQYLDKLQVERERGITVKAQTATMFYRHANNQLPASDQPDAPSYLLNLIDTPGHVDFSYEVSRSLAACQGALLVVDAAQGVQAQTIANFYLAFESNLSIIPVINKIDQPTADPDNVKAQLKRLFDIDPSEALLTSAKTGQGLSQVLPAVIERIPSPPGKCDSPVRMLLLDSYYDEYKGVICHVAVVDGALHKGDKIASAATGRTYEVLDVGIMHPELTPTGVLYTGQVGYVISGMRSTKEARIGDTLHQAKSIVEPLPGFKPARHMVFSGLYPADGSDFDALSHAIEKLTCNDASVSVTKETSTALGMGFHCGFLQ

SEQ ID NO: 144322 - protein, 101 aa, Oryza sativa
  Clone ID: PAT_MRT4530_45147C.1.pep
MNRERKTLYGSVKPDAHVQFGQRLASGRLEKEKLSRFTGVKHICDAESHALSDVNESFGAPIRSPTVAIRCSTRFWLRAGEARVCLCLVVKTGDLVTVTPG

SEQ ID NO: 144323 - protein, 412 aa, Oryza sativa
  Clone ID: PAT_MRT4530_45148C.1.pep
MEVDHADRDGARRRCREYLLALEEERRKIQVFQRELPLCFDLVTQTIEGMRSQMDAAGSEETVSDQGPPPVLEEFIPLKPSLSLSSSEEESTHADAAKSGKKEEAETSERHSSPPPPPPEAKKVTPDWLQSVQLWSQEEPQQPSSPSPTPTKDLPCKPVALNARKAGGAFQPFEKEKRAELPASSTTAAASSTVVGDSGDKPTDDDTEKHMETDKDNDKDAKDKDKEGQSQPHRKPRRCWAPELHRRFLQALQQLGGSHVATPKQIRELMKVDGLTNDEVKSHLQKYRLHTRRPSSTGQSSAAAGVPAPPAPQFVVVGSIWVPPPEYAAAAAAQQHVQLAAAGNNASGSANPVYAPVAMLPAGLQPHSHRKQHQQQQQGQRHSGSEGRRSGDAGDGSSSSPAVSSSSQTTSA

SEQ ID NO: 144324 - protein, 47 aa, Oryza sativa
  Clone ID: PAT_MRT4530_45149C.1.pep
MAGAAAKWSSRCSDWASSASIWACSRRSGGAVGAKRVEGDGHSSSRR

SEQ ID NO: 144325 - protein, 89 aa, Oryza sativa
  Clone ID: PAT_MRT4530_4514C.1.pep
MRKRDLGILLLAAFAVFFSLQHDGDLSFREAWYHLSDADYPIKHDADRLPSPLVADLNGDGKPEVLIPTHDAKIQVLQPHPRPSPDDAS

SEQ ID NO: 144326 - protein, 417 aa, Oryza sativa
  Clone ID: PAT_MRT4530_45150C.1.pep
MDLVEAEAEEQPPDEDGDEEGYVEADPAGRFIRYDEIVGSGAVKTVYKAFDKLEGVEVAWSQSRIDDSVMGSSKKMKQLNTEIQLLKTLKHKNIEKMFASWVDGEKKTVNIITELFTSGSLTQYRRKHKKVNMKAMKRWAIQILTGLEYLHSQKPAIIHRDLKCDNIFINGNHGKVKIGDFGLATFMQQQKKSIKGTLEFMAPELLTGHYNELVDIYSFGMCMLEMVTCEYPYSECQGMAHIFKKIDEGKKPAAFYKIKDAEVRSFIENCLAPVENRMSATELLKSSFLQDDDLISVSLVKNMSEDGQQPVSCMLRKGEFLLTGNVDVASHVDLWLRFPDPSGCFKSVEFPFNLTEDTSLSVAVEMVEQFGLTQDSRPIIAQLIDAFLVILIPEWTPCVAIRQVVSEGANGLTIEKR

SEQ ID NO: 144327 - protein, 204 aa, Oryza sativa
  Clone ID: PAT_MRT4530_45151C.1.pep
MRGTVRVKQGRIDVGSARSSRGQLRRLRLQPVMMKHAHKGGWIGFRGGVGVTSRPLPLGSETMGDATLLMRAPVAARLWRGFSVARSAAGPRGVAHGHAQCGARAEKARQLRRHSGASGARARGMLGGGRAQARSWQRWPQMELELEIRGNVDKAPLFKAINSPQLSIPQAGGVVLTCRLDPMSLPKLQTIGSQQHLDVGASSG

SEQ ID NO: 144328 - protein, 176 aa, Oryza sativa
  Clone ID: PAT_MRT4530_45152C.1.pep
MAWHFTAAFMIATCLMLFPRSEQSSQGEVLQQLRKQLEYPRQLDVWNNPNSDPCYTQPTSVVTVACEGNAITELKIIGDRITKPPKFSGYPVSNITLSEAFVLDSFVTTLARLPALHVVILVSLGLWGPLPDKIHRLSSLQVLDLSSNFLYGSIPPKLSAMPKLRTLTLDGNFFNG

SEQ ID NO: 144329 - protein, 65 aa, Oryza sativa
  Clone ID: PAT_MRT4530_45153C.1.pep
NVEEQIKHLFHLEDLIVFVLLACPSHGTVVPRGVDIVVSRIQSLTCHHVPLFLDLPVYGMSIKFS

SEQ ID NO: 144330 - protein, 57 aa, Oryza sativa
  Clone ID: PAT_MRT4530_45154C.1.pep
RHFLIRLRIIGDLSGSLGTYYRVECTCTFHMMSSYSHVIYTRLNKMHLHLVKKKKKK

SEQ ID NO: 144331 - protein, 125 aa, Oryza sativa
  Clone ID: PAT_MRT4530_45155C.1.pep
MDTAIVYSLWFYPFDLIALVDFSLYAANTSEEVSVDGLFEAFSHCAELNPDPNAESDEENGWAHRDEGDEDMTGGSDAECEFSDVNPIGQTDEHDITHAVVELQINDQRFEDAEEAEHETHGNGH

SEQ ID NO: 144332 - protein, 126 aa, Oryza sativa
  unsure (1)..(126): unsure at all Xaa locations
  Clone ID: PAT_MRT4530_45156C.1.pep
WQAGRRLGRRPPGRGGRGGGGSGDGYDAGEGEGSSGDSGYDAGEGEGGGGLXLSFHRSCGSGHMSGLSALGGAPFFKSGIAGSDERQGGQPVVGSAXDXGGFVGGGLPGATGGGGGFCPLGGGEVG

SEQ ID NO: 144333 - protein, 152 aa, Oryza sativa
  Clone ID: PAT_MRT4530_45157C.1.pep
NYVMIHLSYKNKCELPHPLLDQMVTSAIYNGSEINICCSCKSHHLVHVCSFTLYLNHHPLRLPPKAGEKVTTGGVNCRRRERAVAVASESRRAVQPSPPQRPLSLRRCVERIFFLATREAEYFPADDEGKTLGWAGIKSRLDLTERLYLHGL

SEQ ID NO: 144334 - protein, 327 aa, Oryza sativa
  Clone ID: PAT_MRT4530_45158C.1.pep
MASIPQLMAAAAAGADGLLPGLKLDPSDDELVGRCLLRRLQGQPLPLGGDILEADPLSAPPPWNLLADHGRGDEAFFLAKKGNGKRQRSSVEGQRMCVDGGRLRVPDDGRGGGGGLAFLPSIFPSPPPVPRCSTPLSPSSPPFKPSRVIVRWWAPPGGWCKLNFDGSVYDDGSRRASIGGVIRGCDGGVVLAFAEITEHWTVGVVEARAMIRGLRLALACFVERLVVEGDDLVLVQLIRGEETQTRIPAAMHEEILDLLRCFADVEVRHIYREGNSMAHTLCRQAYVHPGLWTDCATLPAAVWEKIDDDLRGVVHERLCNKKKKSSA

SEQ ID NO: 144335 - protein, 299 aa, Oryza sativa
  unsure (1)..(299): unsure at all Xaa locations
  Clone ID: PAT_MRT4530_45159C.1.pep
TVVVVAAFRLLTPTPAAPRPPPPSXPAPPSSPSPPSASPXLTPTAPRMPPPCAASLLPAPPSSPSPPSASPRRLPPPRACRLPAPPPSXPAPPPSPSLLPKPLSPSPPSASPCRLPPPHACSLPAPPPAAQRRLPPPRAASPPFQPDAGQNPPSTSQIWPLYLAGQWRAPHNPSPPSLXPTPQPQGRSTRRRRSPQPPPRSPPPPAPARRGRCPAPTVRPPASARRGRPPXSPRPPSPRVARPAVTRSPRPLAPARRGRGRRPPXPHPPPPLTPSLSAPPASNQREKKEKEGKEGEKEE

SEQ ID NO: 144336 - protein, 534 aa, Oryza sativa
  Clone ID: PAT_MRT4530_4515C.1.pep
MPTSSPVVATVTCASSPRSSLASLRLPLHDHAVTLVCRVHPSVSLKATLRIHGVGRGGAGLGRSYIPRRERGEVERWGKRREGRRKKVELVSSLASLLFSSSTIDHRSLLIVDLSLPLPLSPLEFQFFQGVEQEMLLLSHGGGGAAAAASDDVLAYHVGVLRDKVQQLEPLVGIVVVSPAAPHGQLRRDAAAMAASSACSVLQEITAAGSAVAHRLEQANAASSASFRRGVAFADDAHAAGGVQMFAAGAHGGGQGGDDEAGASLFHHHGPPAVGAPTVFRAGATTTAAASSSGGGDDDGDGDGEVDVVELEASYLLARYTHYCQVCGKGFKRDANLRMHMRAHGDEYKTAAALTSTGAGMRAAARRCSYSCPAEGCRWNRRHPRFQALKSVVCAKNHYRRSHCPKMYVCGRCGGKQFAVLSDLRTHEKHCGELRWLCSCGTFFSRKDKLMGHVALFAAGHAPVPVAPEASPSTTTTGTTTDRSPVAGFAGSTTSCGAAADEKAERAGTRRGGSLSSSTAFLPSRSGRRSTPHA

SEQ ID NO: 144337 - protein, 70 aa, Oryza sativa
  Clone ID: PAT_MRT4530_45160C.1.pep
NPPQSGILAVGRGNKIIEPVVDSDGTEKATVVTKMSLTLSADHRVFDGQVGGKFFTELSQNFGDIRRLLL

SEQ ID NO: 144338 - protein, 484 aa, Oryza sativa
  Clone ID: PAT_MRT4530_45161C.1.pep
MANIRALLIGLVRARGSLVDIGRCVSSSRPSYLASLGRHYKVPMEIRWLSSTGFPPHLVVGMPALSPTMNQGNIAKWRKQEGEKIEVGDVICEIETDKATLEFESLEEGYLAKILAPEGSKDVQVGQPIAVTVEDLEDIKNIPADASFGGEQKEQSIASEAQKVETDAAKESSIITRISPAAKLLIKEHRLDQSVLNASGPRGTLLKGDVLAALKLGASSSSTKQKNAPAAPSSQPTHDFQAQSVTIPQQNDAYEDIPNSQIRKVIAKRLLESKQTTPHLYLSQDVILDPLLAFRNELKEQHGVKVSVNDIVIKAVALALRNVPEANAYWNNDKEQAQKCVSVDISIAVATEKGLMTPIIRNADQKTISAISSEVKQLAEKARAGKLAPNEFQGGTFSISNLGMYPVDHFCAIINPPQSGILAVGRGNKIIEPVVDSDGTEKATVVTKMSLTLSADHRVFDGQVGGKFFTELSQNFGDIRRLLL

SEQ ID NO: 144339 - protein, 112 aa, Oryza sativa
  Clone ID: PAT_MRT4530_45162C.1.pep
RSHNIVSDFIYTCYLIMGTSSNPMSESTGKMTSFDKSRSQNNHPGCLSEHCRVAEDLRVQALYMQNSVYSLSRNRTRSFRNGRVHFVPRNEEIILRPYGVPRPVGRRRRRNQ

SEQ ID NO: 144340 - protein, 73 aa, Oryza sativa
  Clone ID: PAT_MRT4530_45163C.1.pep
MAWGPRAVAGGCVATFLDVLVGLHEKRVDLLSRPSLYNVQKFESNIMLFESNIMLEKSEAIGMFLFEGLTTIG

SEQ ID NO: 144341 - protein, 77 aa, Oryza sativa
  unsure (1)..(77): unsure at all Xaa locations
  Clone ID: PAT_MRT4530_45164C.1.pep
MNGNKQSLIYSFVAKGSVVLAEHTAFSGNFSTIAVQCLQKLPPNTXKSTYSCDGHTFNFLVDRGFVFLVVADEARGR

SEQ ID NO: 144342 - protein, 57 aa, Oryza sativa
  Clone ID: PAT_MRT4530_45165C.1.pep
MAMTGGDGDDDDGWIWEKRGSGRRLIMFGFGEFEGGILTTSNDEWYMMYPSILRHLW

SEQ ID NO: 144343 - protein, 396 aa, Oryza sativa
  unsure (1)..(396): unsure at all Xaa locations
  Clone ID: PAT_MRT4530_45166C.1.pep
MDHHQRWHPTVNEREFIDXALQSDLRVDGRRPFYFRRLKILFGREDGSAEVQLGDTRVMGYATAQLVQPYKDRPNEGTLAIFTEFSPMADPAFEPGRPGESAIELGRVVDRGLRESRAVDMESLCVVAGKHVWSVRVDLHILDNGGNLIDASNIAALAALSTFRRPECTVGGEDDGQQVTVHDPEVRDPLPLTIHHLPIAVTFAYFGEGNIMVIDPTYKEEAVMGGRMTATINSNGDVCSIQKAGGEGVMSSVIMQCLRIASVKAADITSKIKNEVNSYTSAKALQKVKRLPASALKKDNAPDVAMKESSDGALETQSTKPSSDGQQINKEPPSVVEDNKQEDVEPMLSECNPEPQSESRLTAGGSDETQEAISPKSLKDAVKPKHKIKKKQHSKS

SEQ ID NO: 144344 - protein, 220 aa, Oryza sativa
  Clone ID: PAT_MRT4530_45167C.1.pep
MEDRRSYAIHRTPALPRIVSNSSSVATAEDAHRGGNYKQRPICRGDERLPMPPLHSKRRRDEHHRRDYHYDDDDYAYRASKKKKQQAAAEQAARMPNNRTTRPTTRRASSSRSRTKEESHARGGGAAPRRENKDRKDGAGGRRSQRRAPTISGPRVPPPATPPPAALPDSLTAQDALSAAAARAREISLMREEARRELAKMVRTVEFNDPYISPMDALKP

SEQ ID NO: 144345 - protein, 68 aa, Oryza sativa
  Clone ID: PAT_MRT4530_45168C.1.pep
GFFFFFFFFFFFFFWSFTSSVVIITGITGQMGHKPSIFRSSRLFIISESPTGNHPQDGRGTTDQNLLL

SEQ ID NO: 144346 - protein, 45 aa, Oryza sativa
  Clone ID: PAT_MRT4530_45169C.1.pep
MAIGGFPRDVSHGSTRVTRVRADIELPKLYACQMMKREKGKMATV

SEQ ID NO: 144347 - protein, 186 aa, Oryza sativa
  Clone ID: PAT_MRT4530_4516C.1.pep
MFICTPGSFGPLAAPTEGGKGFPAKKPSLRHRPSLPRLPRQLAAPKVGGRLIPTTKSRRLRLAAAAAAATAKRGGSNPQPPRGEMNTDITASVKPEYPVVDRNPPFTKVVGNFSALDYLRLSTISAVSVTVGYLSGIKPGIRGPSMVTGGLIGVMGGFMYAYQNSAGRLMGFFPNDSEVARYKYKL

SEQ ID NO: 144348 - protein, 35 aa, Oryza sativa
  Clone ID: PAT_MRT4530_45170C.1.pep
MARLPWDGSGYHVFHGLRPTRILDPRALQAEHWAG

SEQ ID NO: 144349 - protein, 74 aa, Oryza sativa
  unsure (1)..(74): unsure at all Xaa locations
  Clone ID: PAT_MRT4530_45171C.1.pep
LIEQKPRRHLRRGGCRGSGLGRGECGVACGAEAEATELDAEGRLRLXPAGPRWVWLRPRRGGQCGGTDGADGLA

SEQ ID NO: 144350 - protein, 623 aa, Oryza sativa
  Clone ID: PAT_MRT4530_45172C.1.pep
MFSGVCKPWRSIAQQQQQQHPPCNLPWLLMPSTAATSLFCVVSEDTHRPGLLGDARCARFCGSFPGAWLAAELPESRGRGPVLLDLCTGECVALPRGCEAGESSSADSASSPSTTSGRGWSTATGSSRLTRRSSQSAPLSGRRIFLRRGCYFSVDLCNPCPLHIYFCDAAASFHGACDVQRLDPSIGGGFTGGACQVFGEMPSWLGAAHASFPGNGANVMPTKCSTLGPSYATTTSGAKSIPAATERVFPATKASLASSTSSTTMTTPAPSTETKDVGAGMDKEVLKSEKTTQDLNTKMMAMINKMLETCRNTKEDYTVSVDCNGDATALSVNIDPVPILSEVSNEANSTHLVNTNKLSMVTVKPTKGLTKSKKEKVDGDVGGMVTDNCVKFTKVDTKLIFVFRPFTDGQISQLDRNVSENIVYDVTGTPVMPSKWIHVVAVGRTWLLSAFALINFLDAGTVQLAVKLVHVKIAEMTRIRSWDPGIVNLVTIIACQISTEVKKGGSDTLDLSSVCKKLGTSIKIPNYNSGQMEVQCIHQSASFVTSIGMESSLVVAFYGSAGAYGLALDDHLQLPWDPGGTDLELQLHQLGDKLIFKAGRMLCNWVGLVCILSSGLARPNPLR

SEQ ID NO: 144351 - protein, 271 aa, Oryza sativa
  Clone ID: PAT_MRT4530_45173C.1.pep
MEWVRNNKVSEPTIRGIPYQKARWMTHSGSSDVQRLDPSIGGGFTGGACQVFGEMPSWLGAAHASFPGNGANVMPTKCSTLGPSYATTTSGAKSIPAATERVFPATKASLASSTSSTTMTTPAPSTETKDVGAGMDKEVLKSEKTTQDLNTKMMAMINKMLETCRNTKEDYTVSVDCNGDATALSVNIDPVPILSEVSNEANSTHLVNTNKLSMVTVKPTKGLTKSKKEKVDGDVGGMVTDNCVKFTKVDTKLIFVFRPFTDGQISQLDRK

SEQ ID NO: 144352 - protein, 73 aa, Oryza sativa
  Clone ID: PAT_MRT4530_45174C.1.pep
SSIRPGLILQHGCTNEDRMFIDTHGAVFSRRECMAIYEIPTQELSCLSFKLRWQHQTTVLYGITALDFNDGIN

SEQ ID NO: 144353 - protein, 831 aa, Oryza sativa
  Clone ID: PAT_MRT4530_45175C.1.pep
MDFVFAGKSATAVVIVDLIKKASAYLDTDCMSDRLQPSRDKLYQDLQMVLDVILPNQPQDLDRLIALALRDAFEELKDAIDEHVYYKVREKAKERERLVRADQVSTLKRIGEGIKALERVIAEASGLPLMDRDNMVSEPTIRGIPGQEARWMTHSGSSDVQRLDPSIGGGCTGGSCQVFGEMPSWLGAGAGAALHVQVSQVLYPVTSEVLHQVYNGYGAVAVQVLATSCWGVEALVWFRSSCDTERARSDTNEHNIYDGCCLLDVQHTQSFPGNGANVIPTKCSTLGPSYATTTSGAKSIPAATERVFLATKASLAPSTSSTTMTAPAPSTETKDVGAGMDKAVLKSEETTQDLYTKMMAMIDKLLETCRDTKEDYTMSVDSNGDAAAQCINIDPVPILLEVSNEANSTQLVNTNKLCLVKVKSTKDLKKRKKEKVDGDAGGMVTDDCVAFTNVDTKLISVFRPFRDLDIINQGSEGVVVKLLQPWPPPTQAEVKAKKKVLNLYGQKPEVQIIVTVCSVSKATIKGLQLLGERMLQEEQLKCEVVKSNWYSFSNLLVGDIMDIALPMQSLRQVILSYGLAQSQNENSVIQEAMSYCQFKFSANYVMSPSQWRKDIVDSPTNKGFHFQEMLKQQIDGVDKRLLYYHQISTVFCSVSKDVVYDVTWTPIVPSKWIHGVAIGRIGLLSTFALMHFLEAWTMQLATKLGVIKFGLDKLPNHSVGSIMAMALLLAQSLEDRFIEWEFVHSDKILQEQVQPPLATESPMRVSWDPGVSDASAWGQAEIYGGRNVMDRLVSNQITKQQEFHHEQLFSQQCYFWRWKMGKYRGLEGSGS

SEQ ID NO: 144354 - protein, 174 aa, Oryza sativa
  Clone ID: PAT_MRT4530_45176C.1.pep
MFSGVCKPWRSIAQQQQQQHPPCNLPWLLMPSTAATSLFCVVSEDTHRPGLLGDARCARFCGSFPGAWLAAELPESRGRGPVLLDLCTGECVALPRGCEAGESSSADSASSPSTTSGRGPPCPLCMYFLVLARNLVLMVIRFVSTRETAFDALQAGARRRAAAASLEEARNRRP

SEQ ID NO: 144355 - protein, 64 aa, Oryza sativa
  Clone ID: PAT_MRT4530_45177C.1.pep
MMLSFFSCRPAIPSLILQYELGSNPRRRRRRRSPAAEDEEIEGKPGSRAAYPTLRPQQLLPICT

SEQ ID NO: 144356 - protein, 747 aa, Oryza sativa
  Clone ID: PAT_MRT4530_45178C.1.pep
MEWICNNMVSEPTIRGIPGQETRWMTHGGSSDVQRLDPSIGGGCTGGACQVFEEMPSWLGAGAGIALRVQVSRVLYPVTGEVLHQVYNDYGAVAVQVLATSCWGVEALVWFRSSCDAERARSDTNERNIYDGCCLLDVQHTQSFPGNGANMMPTKCSTLGPSYATTTSGAKSIPAATECVFPATKASLAPSTSSTTMATPAPSTETKVVGAGIDKEVLKSEETTQDLYTKMMAMIDKMLETCRNTKEDYTVSVGSNGDATALSVNIDSVPILSEVSNEAKSTHLVNTNKLSMVKVKPTKGLTKSKKEKVDGDAGGMVTDDCVEFTKVDTKLIYVFRPFTDVSLALCQSNYIGVTNLPVVSSECEVRYDDFVSGADFTARPQVVPPWRLAVPLDFRFLPWPDIFNQGSGGVVVKLLQPWPPPAQAEVKAKVEKLNLHGQKLEIQIISLGQLVPSYSLAQFENENLLIQQAMSWCRFKLSANYFLSKPYQWRKYIVGAPAYQGFHFQGMIKQQIDGVDMMLLYYHQISIVYCSVSEDVVYDVTWTPVMPSKWIHVVAIGRTWLLSAFALINFLEAGTVQLAVKLVYVKIAEMTRIRSWDPVIVNLVTIIACQISTEVKKGGSDTLDLSSVCKYKNAHDSIQVGTVSSISLSLTMFAVLPSKKLVTSIKIPNYNSRQMEVQCIHQSASFVTSIGMESSLVVAFCGSAGAYVLALDDYLQLPWDPRGIDLELQLHQLGDKLIFKAERMPCN

SEQ ID NO: 144357 - protein, 36 aa, Oryza sativa
  Clone ID: PAT_MRT4530_45179C.1.pep
PYFSIRLRALPPVSSLLTNLWPFHIYRAPLRQDAAR

SEQ ID NO: 144358 - protein, 150 aa, Oryza sativa
  Clone ID: PAT_MRT4530_4517C.1.pep
SLCAGTEARFGFVDIHQTVQRCREWLVQGTHVLLAMPTLCTRGARYIHPDDHNIPQIASWTAERAHQEGSAGVPDRLSTTTGNSQCWTQLVDDAHQESSLKETVTKVANYHQCSSATFPRPINHIPGVPFFTRVSPLHWGRQCNFSALAH

SEQ ID NO: 144359 - protein, 43 aa, Oryza sativa
  Clone ID: PAT_MRT4530_45180C.1.pep
RKTPNLDFKNAPKKGHINKHSVTDSKRLQKKPVDISKKANWFL

SEQ ID NO: 144360 - protein, 140 aa, Oryza sativa
  Clone ID: PAT_MRT4530_45181C.1.pep
HFYKDFRVQHTHEHKSNRHTSTQHMYIDDEQRQTRFSNGSADNGVGIDRLIWRLTKGNDTNTAGGEPGTGITYDFVLFGNGAGGAGGVLDPSDLLAALTSFSPPTPSEPAAAIDRNTHVSIDRSHRSGSSDQSIDREMII

SEQ ID NO: 144361 - protein, 113 aa, Oryza sativa
  unsure (1)..(113): unsure at all Xaa locations
  Clone ID: PAT_MRT4530_45182C.1.pep
RRLSILGLLSPSERLDSFTRQPAMXQHRERDVATQESSTEDSASAAENVLPTPPATAPSPPHXHVARRGARHGEXXGRGRTAXPGAAWXQRXWMRRXGRPLLLLLLLLSARER

SEQ ID NO: 144362 - protein, 44 aa, Oryza sativa
  Clone ID: PAT_MRT4530_45183C.1.pep
NGMFRLASVGLKIPSGQQASPSKRAGASGLVKKPVASPLTQVVV

SEQ ID NO: 144363 - protein, 202 aa, Oryza sativa
  Clone ID: PAT_MRT4530_45184C.1.pep
MLCRSRVAGEHEEAEGEVPDRPVRAGSQGRRRRRRRWAGRVAQPRRHARLRRRLQSPLLHHLTTMAQLLSSSAPPRLHLAATPACFSSSSGHGVSRLSVTSACSAAPGSLVSMRRQKARSLTVRCEQGAKGGGGGGGGGLDVWLSRGAMLGFVAAITVELTTGKGVLQNVGLTSPVPTVALALTGVVGVATAFLIFQSASQD

SEQ ID NO: 144364 - protein, 45 aa, Oryza sativa
  Clone ID: PAT_MRT4530_45185C.1.pep
MMGASVAHKPARNTNTTSVLFPAFHAWPCGPLTDNELTAASDSPV

SEQ ID NO: 144365 - protein, 91 aa, Oryza sativa
  Clone ID: PAT_MRT4530_45186C.1.pep
LVARWRPTCYLTNLPTSYHAQAYRAAALTTGSPTGTPPPPPRKDTIPTSRPIPTTRYCPDSRDAWAPLQATPYDRYAPRVLPTYVPPLYPL

SEQ ID NO: 144366 - protein, 37 aa, Oryza sativa
  Clone ID: PAT_MRT4530_45187C.1.pep
TPAVFAWPRTSEVVVSPGPHHPARVKIAPDAWSALNS

SEQ ID NO: 144367 - protein, 147 aa, Oryza sativa
  unsure (1)..(147): unsure at all Xaa locations
  Clone ID: PAT_MRT4530_45188C.1.pep
CHGSMGQVFKRSTSPCHXARHGSHRERRLXDYKQSEPVRKARPEAVQTEVFDENNGVFQCTGTYGIRRXVMRHKGLVAPFIHKMLLDADLHICNGRGSMGLTLGGCPATXTCATWTLSSQGQLPEEKVRHELQHILYLCGDTLYALA

SEQ ID NO: 144368 - protein, 44 aa, Oryza sativa
  unsure (1)..(44): unsure at all Xaa locations
  Clone ID: PAT_MRT4530_45189C.1.pep
MFGWDSEVKALLGLPILAAXALGAVHLLEGIAIGALVQLHIKGF

SEQ ID NO: 144369 - protein, 216 aa, Oryza sativa
  unsure (1)..(216): unsure at all Xaa locations
  Clone ID: PAT_MRT4530_4518C.1.pep
PLSDEAYSEYLQLQEVLDSLNLQSGMGDAWNFIWGSDKYTAKKFYKLNYSALQHPRPMIWLWKIKCVMKIKGFAXLMFCDRLSTRDMLDRRHCAKENDDLTCVLCNANCRETRLHPFSSCPFSIRCWQYLGIEWNHDLEFFQMITLARLKFAQRGFLEIFFLAAWHIWKQRKSLIFQNVQPSFQAWRSXFVKEVLLLMCRMKDPLKQTVFNWLQTL

SEQ ID NO: 144370 - protein, 82 aa, Oryza sativa
  Clone ID: PAT_MRT4530_45190C.1.pep
KKRYVTLNKNFCSPKPGFLEAWSDLPKMPKLIRGAGGPPLTNIQINWWGGGRPKKGIQTTFFVLSDNFNNKDDVGEPPSLGY

SEQ ID NO: 144371 - protein, 116 aa, Oryza sativa
  unsure (1)..(116): unsure at all Xaa locations
  Clone ID: PAT_MRT4530_45191C.1.pep
IAPYMMASAATTVATFEGLMYTVSMPVARRSGNCSFGYICNGGRIRCMHVWPLEGIKKGETLSYMPPFTVEDLLKQIEYLLRSKGVPXLEFSMVGFVDRENHRSNGYYDGRYWTMW

SEQ ID NO: 144372 - protein, 122 aa, Oryza sativa
  Clone ID: PAT_MRT4530_45192C.1.pep
MNSFAAEATAAGSGETSVRGRESVAVKARRERLETSAARAPEGGEVEADEVEEAEGSEGGVVGGGHVDEAEVRERLAVNHAGGALRDAVKHLVRQRAAMSLGRFGSMKVSRITVIEYNLLFL

SEQ ID NO: 144373 - protein, 128 aa, Oryza sativa
  Clone ID: PAT_MRT4530_45193C.1.pep
MPSSAVIIAAKPANTLGSLLLGLCLGRLPRQLVSLLQQTGCSSTAIAGVTPECGARNQILRHYNRVDHDDTASRVCSMDARAPTGGAGGSRASRCRCMLASSPPAHPPCGLEAAASTSAVDPSSSCTW

SEQ ID NO: 144374 - protein, 87 aa, Oryza sativa
  Clone ID: PAT_MRT4530_45194C.1.pep
PTRPIRYRSAYVEFLHKESAETCSFIEWNIIHGTHPQGTMVNDQALSFYFLLPASQNIVTWYWIIGHNLELQIWIEPMSRFVILGCV

SEQ ID NO: 144375 - protein, 70 aa, Oryza sativa
  unsure (1)..(70): unsure at all Xaa locations
  Clone ID: PAT_MRT4530_45195C.1.pep
HTLSSVASGLSATTLSCPADVIKTRMMNQGMDAKVLYRNSYDCLVXTVKHEGLTALWKGFLPTWARLVPW

SEQ ID NO: 144376 - protein, 1081 aa, Oryza sativa
  Clone ID: PAT_MRT4530_45196C.1.pep
MAPHKPALALAIGPDLGKIGRDHTGYLGASLINETELTKLVLARVVAEGQAFAPGKVVVKLGDNQTVILRLFEIELPQLSPCALVRVAIFDWACRTAGFEPTAELFGAIFYVIVNSKTVVTLAGTWRTVFGSTNFNFRPELSDLWPVNASMPKWDRHWMPKRFYNSIPFEAASDAAKAMKWQRRAIILPLSWTWQVEVDKEEEADGLPRLVLPEGVNYDAEPSRKGKRARGKAAPRKHRPASFADSDADEEEAEGEEEGEEDAVDETGASASAEGVVEAAFVAFEPPLPGPRLSPLEPPWGKQAATETLGSDNSLSAPRFVSSNFETRAELVPFVKGVLHLISPVGGLVPFTELNEFDEGCTAAKACSFGSKDLGLSSRGKKRETQGLVDYYNDSESKMKAPRQELESERTATKDVTDEAKTACHTLRLALTDLGAKAEVKRFYDAGFIRPCRYAEWVFNIVPVIKKNSKVRVCIDFRDLNKATQKDEHPMPVANQLVDAASGHKILSFMDGNAGYNQIFMAEEDIHKIAFRCPGAIGLFEWVMMTFGLKSVGATYQRAMNYIYHDLIGWLVEVYIDDVVVKSKEIEDRIADLRKVFERTRKYSLKMKPTKCAFGVSAGQFLGFLVYERGIEITQRNVNAIKKIQPPEDKTELQEMIGKINFVRRLYLSAGEKSIGSVLIQELEGKEKVVFYLSRRLLDVETKYSPVEKLCLCLYFSCTKLRHYLLSNECTVICKADVVKYMLSALNLKGRVGKWIFALTKFDLRHESSKAIKGQAIADFIVDHRDDSIGSVEIVPWTLFFDGSVCTHGCGIGLVIISPRGASFEFAYTVKPYATNNQAEYEAVLKGLQLLKEVEADAVEIMGDSLLVISQLAGEYECKNDTLMVYNEKCRELMGEFLLVTLKHVSREQNVEANDLAQEAWGYRPMIKDVKVEVAAIRADNWRYEVHHYLQNPSQSASRKLRYEALKYTLLDDELYYRTIDWVLLKCLSADQAKVAIGEEFVQFADNMGIKLLNSSPYYAQANGQAEASNKNLIILIKRKISDYPWQWHTRLAEALWSYRMACHSSTQVPPYKLVYGHEAV

SEQ ID NO: 144377 - protein, 127 aa, Oryza sativa
  Clone ID: PAT_MRT4530_45197C.1.pep
SWTWQVEVDKEEEADGLPRLVLLRQCFHCLRPIKVVVIDADDAEPSRKGKRARGKAAPRKHRPASFADSDADEEEAEGEEEGEEDAVDETGEYLFSPRHDPGHEHVEAGAASSSSPLRRRSPTSPAG

SEQ ID NO: 144378 - protein, 266 aa, Oryza sativa
  Clone ID: PAT_MRT4530_45198C.1.pep
MPELSYSYDSVSLNLPEEETFCSALTNSLEGMLLGRFLVGTGMGLGPPVASLYITEVSPPSVRGTYGSFVQIATCLGIVVSLLIGTPVKDIDRWWRVCFWVAAVPATLQALGMEFCAESPQWLYKCGRTTEAEIQFEKLLGPLHVKSAMAELSRSERGDDGENVKYSELFYGRNFNGSIVAMLLMDKLGRKVLLSGSFLGMAFAMGLQAVGANRHHLGSASVYLSVGGMLLPSISHQPKGYHFSYTSLELFHFDSPDFTLSVVVHP

SEQ ID NO: 144379 - protein, 132 aa, Oryza sativa
  unsure (1)..(132): unsure at all Xaa locations
  Clone ID: PAT_MRT4530_45199C.1.pep
FLSVFSXASFFRLLPGLSALXXVPXLLVSPXFPCPWSCSVPGMXAFASXPSFLACAXGARXPFWSAPLLVPFXFCSLLVCRSSPSSWPCLCPPFXGCPSLAFAFFLXCLRPLFALCCPAVAVLPXFFPXAGS

SEQ ID NO: 144380 - protein, 124 aa, Oryza sativa
  Clone ID: PAT_MRT4530_4519C.1.pep
MFKSGVRARTFHCHRRDGDHGYERTPWHEDACMDRTICQDRLDRFRRHQESTRCKNTSLRILPILAVSVDTRPLTVIEAGIRILCGNAEDPDSKKQHITHRRSTGKYLPWAEVVHVTVNMREVY

SEQ ID NO: 144381 - protein, 73 aa, Oryza sativa
  unsure (1)..(73): unsure at all Xaa locations
  Clone ID: PAT_MRT4530_451C.1.pep
KXPSHVCTLCCCMSRISXTYSWHERFPDWKEGSERNAINVSELTQWAPQALHFMFPARTLCGIVSGITICIIR

SEQ ID NO: 144382 - protein, 481 aa, Oryza sativa
  Clone ID: PAT_MRT4530_45200C.1.pep
MRWKLKSSAYKRVPSRDAAMDLDVETPAKMADGGAPSWRMSLPHVCVATLTSFLFGYHSGVVNEPLESISTDLGFAGNTLAEGLVVSICLGGAFVGCLFSGSIADGIGRRRAFQLSALPMIIGAAVSALTNSLEGMLLGRFLVGTGMGLGPPVASLYITEVSPPSVRGTYGSFVQIATCLGIVVSLLIGTPVKDIDRWWRVCFWVAAVPATLQALGMEFCAESPQWLYKCGRTTEAEIQFEKLLGPLHVKSAMAELSRSERGDDGENVKYSELFYGRNFNVVFIGTTLFALQQLSGINSVFYFSSTVFRSVGVPPNLANICMGIANLSGSIVAMLLMDKLGRKVLLSGSFLGMAFAMGLQAVGANRHHLGSASVYLSVGGMLLFVLTFSLGAGPVPGLLLPEIFPNKIRAKAMALCMSVHWVVNFFVSLLFLRLLEQLGPQVLYTMFSSACVVAAIFVRRHVVETKGKTLQEIEVSLLQTQ

SEQ ID NO: 144383 - protein, 93 aa, Oryza sativa
  Clone ID: PAT_MRT4530_45201C.1.pep
ERKKYEIPPELSRSFELPPKPQNRTFLTLNYANRTNYPPRPNPRGVWATWGTPDSPLSILFIKKNVGPIWHTPLPFFHCLSLLCHPRNPPGWR

SEQ ID NO: 144384 - protein, 50 aa, Oryza sativa
  Clone ID: PAT_MRT4530_45202C.1.pep
KSFACPYPQVEMFRGVRMTPLVDQILIKVKRVLCPLVFICVCILPVGMCL

SEQ ID NO: 144385 - protein, 440 aa, Oryza sativa
  Clone ID: PAT_MRT4530_45203C.1.pep
MAPPSCLLRVGWLPAALCALALALAPASDATSASLVGINYGRVGSNLPPPQAVLPLLEGLGIGRVRLYDADPAVLHAFAKTGVELFVGVPDQSLAGLADPGGADSWLRSNVMPFLPDTKIAALTVGNEVLTGNNSAVTRALLPAMQSLHGALAKLGLDKQIAVTTAHNLGVLGTSYPPSSGAFRRDLLPYICPILDYHARTGSPFLVNAYPYFAYSGDPKGIHLEYALLEAGYAGVPDPNSGLRYPNLLVAQVDAVYHAIAAANTAAAQVVEVRISETGWPSSGDPGETAATPQNAARYNSNAMRLVAEGKGTPLKPTVAMRAYVFALFNENLKPGLASERNYGLFKPDGTPVYELSYKLPRDNSTFGGAGNSGWRFPGGGGGNVSGGYDNNGVNSGYYDISAASPDSAVRSTLPPSRLFVPALHGSGIDLPVVLFLKRR

SEQ ID NO: 144386 - protein, 91 aa, Oryza sativa
  Clone ID: PAT_MRT4530_45204C.1.pep
AVGGIDGVLRLICQRTGETIRSFIVNADRPAASSSHQQVEKKSVRQVAPNARLDNIPTRLRPQITCLAVGMKKIVTTHGENYIRVLGAVLR

SEQ ID NO: 144387 - protein, 144 aa, Oryza sativa
  unsure (1)..(144): unsure at all Xaa locations
  Clone ID: PAT_MRT4530_45205C.1.pep
VDAGDAEGSKHPLASLVSFVRSPTPLVVARSPSSLSIPLFFNGSDWRPSAPHRQIQLASSLVLELGQIQEEEEDGTKKGLTRIPGSRHLMEDVAAASIVFPSVLLLPVMCSSLAXHCTSVLHKVRRARSGGHGSKGSGFSGLKL

SEQ ID NO: 144388 - protein, 291 aa, Oryza sativa
  Clone ID: PAT_MRT4530_45206C.1.pep
MWGLVDAKLIRVSTAMHRFASASSLPPPAPATAAAAAAQAAALRFGSAATTRVPRALALTASTCPWHRRHLCSSSSSSSSAAAAAATAAAVEEARQGRKQLGATTQLYEYLLANVREHPVLKELREETAAMRGSQMQVSPAQAQLLAMLAQILGAQRCIEVGVYTGYSSLAVALALPESGRLVACERDERCLEVAKKYYQRSGVAHKVDVKHALAADSLKLLIDGGEVNSYDFAFVDADKRMYEEYYELLLKLVRVGGLIVIDNVLWYGRVADPLVPIGDGMTICRKLVDT

SEQ ID NO: 144389 - protein, 113 aa, Oryza sativa
  unsure (1)..(113): unsure at all Xaa locations
  Clone ID: PAT_MRT4530_45207C.1.pep
KFSCLLTANKGFLGVSADELSGRCIGLQGLHPTGFYWILLLLYYIIISRSPLFISSVRFYIKHITDSSKPYRYRLDQTDXHACTSPRFGPALELSRSPKPAYVFHVNNYTKEK

SEQ ID NO: 144390 - protein, 45 aa, Oryza sativa
  Clone ID: PAT_MRT4530_45208C.1.pep
MAATQPGAGVNTELELNQTVSTPTKIGVKLGAALQQNAKDMEMSL

SEQ ID NO: 144391 - protein, 358 aa, Oryza sativa
  Clone ID: PAT_MRT4530_45209C.1.pep
MDLPLVDLAPYLDRAVAGGGAAGEEAVRALCATVSASLRDTGALLVKDPRCPAADNDRFLDVVEHYFARSADSKCLQERPNLHYQVGVTPEGVEVPRSLVDKEMQDKIKSMPEEFQPATPKGPDPKWRYMWRVGPRPANTRFKELNSEPVIPDGLPEWKETMDSWGSKMISAIEVVAEMAAVGFGLPKDAFTSLMKEGPHLLAPTGSDLERHGSEGTVFAGFHYDLNFLTIHGRSRFPGLNIWLRNGKKMEVKVPVGCLLIQSGKQLEWLTGGECLAGMHEVVVTKRTLEAIALAREQNRSLWRVSSTLFAHIASDATLKPLGHFAEASDAHSYPPICAGDYVEQELSVINLKGKNGF

SEQ ID NO: 144392 - protein, 130 aa, Oryza sativa
  Clone ID: PAT_MRT4530_4520C.1.pep
MSTTTSGSSRARTPRTGNKIPKERVIGRQKFSIMQDDIKLVPAAEKDIAWLTFKDLFDLYSLRAAAMGQGSSGPVSWDAALAVSYIADVAATCKHMEAGGCKLHLLTALRDCVDKPRWDDDDDDSESVET

SEQ ID NO: 144393 - protein, 194 aa, Oryza sativa
  Clone ID: PAT_MRT4530_45210C.1.pep
MFHRNKGLTKKLKQYKIQIGQVMDYNDIYDRELRFYQCVSIPNNTLALLSCVERMRGFLPVGPMSPDFGLTSGIKAKPTISSACAHSGWSKPKAQWTSACAHSGWSKPKTQWTTGVRPETRLFVGRCDKCMFLPWLAAILGKIPTYATVVALPYLPVRHAPVVIGIITCIVVIVVIAATNECHCDHHQPCGSSS

SEQ ID NO: 144394 - protein, 83 aa, Oryza sativa
  Clone ID: PAT_MRT4530_45211C.1.pep
CEGFTGSDILELCKQAGVYPIRKLCEAQKDEGQADKTRSLKQSDLEKALSKTRKGKSPANGTSTGLQSPVWIRPSDSEDDQIS

SEQ ID NO: 144395 - protein, 393 aa, Oryza sativa
  Clone ID: PAT_MRT4530_45212C.1.pep
MRSSESSRFVQELVLYAASAALSCLVLFAGLRQLDPNRAASQKALQHKKEIAKRLGRPLVSTTPYEDVIACDVINPDHIDVEFDSIGGLDHVKQALYELVILPLRRPELFTFGKLLSPQKGVLLYGPPGTGKTMLAKAIAKESGAVFINVRISNLMSKWFGDAQKLVSAVFSLAHKLQPAIIFIDEVDSFLGQRRTTDHEAMTNMKTEFMSLWDGFTTDQNARVMVLAATNRPSELDEAILRRFTQIFEIGIPVQSERSKILRVVLKGENVEPNINYDYIAGLCEGFTGSDILELCKQAAFYPIRELLNNEKDGRKADKPRPLRQSDLEKALSTSRKGKRAANGTSTGLQSPVWIRPSDSEDDQVQSAIFEISKLMSRIVQNSQSEPQEPSSP

SEQ ID NO: 144396 - protein, 35 aa, Oryza sativa
  Clone ID: PAT_MRT4530_45213C.1.pep
VPTTTVSSNEASVLASRSTTAHKSDPYTRSLECAC

SEQ ID NO: 144397 - protein, 307 aa, Oryza sativa
  Clone ID: PAT_MRT4530_45214C.1.pep
MAIVLFVGVLLTCFLLLSSAFGNGSGLQAGKCVGAMGGTAVCKELVNGYYIIHEKGNERTGYITNTYEVRYGFIATMDVYGFSLTPGQLVKPGDERPVFDLYCKTSDLSSPLTDPSHMDEDCPGFRPERGAYIRPGDPIPGISQPNGAKQYITLKVFKDMASGDWLVHYGFNNKHPELVGRIPLSFFKSLSYSAINMWFGGIVVTNVTFQPTPLPPPMGNGYMAVDGGNMAVSTKNLQFIDGQGRAWSAENDLIGFSTNENIYTFTSIVGDQFFYGGPFRQASLGAILRTHVLYSFLQMFFFYYLLS

SEQ ID NO: 144398 - protein, 80 aa, Oryza sativa
  Clone ID: PAT_MRT4530_45215C.1.pep
IPKIGYLNKKLLGNKQKRGPMSFKKRDGGKGAIFENYFLGGVWPPLFAQTNKRGDKTACWTGTAWGPGPGAFRSWPALPP

SEQ ID NO: 144399 - protein, 248 aa, Oryza sativa
  unsure (1)..(248): unsure at all Xaa locations
  Clone ID: PAT_MRT4530_45216C.1.pep
NLQSSESLHKTPSEGKEILDRILENTSFVVQYSESVKKASVSKQDEPSTTKSESNLSTLLVSAKKSSSEPSAPANEEIRAPRCTLDFRDDPHSDYENTLTDIHPDNVPIEEVMAVLLHESPESILEXDDLQPPSQPPIESNPCPSGPQDVVLDDCQETTLFLCDVPLEKENFQARDKFETSTLEXRKHSTNEHESFSFNIPXDSYSLKEFLESYPISTASLCEDHNHHTVLISRVIKIYIVRIMIYEN

SEQ ID NO: 144400 - protein, 72 aa, Oryza sativa
  Clone ID: PAT_MRT4530_45217C.1.pep
NFSYSKELFKLGDIAPASFLHILNTTHFNQEGAYIAINQTPNLSWKCLAGTFCGRRPDRLGLCLHLTRRRPV

SEQ ID NO: 144401 - protein, 66 aa, Oryza sativa
  Clone ID: PAT_MRT4530_45218C.1.pep
HYMSNEGGQAPYKYYDEFGFFDLLLDVGPWGMKGVLELILLHYSNWISEGGLSDSCSLELFVYLNI

SEQ ID NO: 144402 - protein, 108 aa, Oryza sativa
  unsure (1)..(108): unsure at all Xaa locations
  Clone ID: PAT_MRT4530_45219C.1.pep
LPRRTAPTPAPSSRSCRSKLPAPPCFPRGLCSSSPIVTGQGPLCSLRTPLAAPVASVXAFTPPSSRWAREWPSARCXHSLFPSQDVPMLAHIVQXCDASHLIYPPSRN

SEQ ID NO: 144403 - protein, 263 aa, Oryza sativa
  Clone ID: PAT_MRT4530_4521C.1.pep
MSYMCSDVSMSFFFHRAAGLLGEFGKVIMQCGVSEGTQDKAQGFVVAREKVEPEEEEEEEQRVPAAATSGQRASIKREAADRDEEQRQGGGDAAGQPTQRRLQDSAEARAAAAAPLPCPRCRSRDTKFCYFNNYNVNQPRHFCKACHRYWTAGGALRNVPVGAGRRKNRPLGPLAVAHHNHHHRAAAGFVLGFPNPSSPTSPSPGITNTDRLPTAFFLYTDRWPTPESRRVRNLPWGDLEDHLGRDFLLFACSLSAGFLNLKH

SEQ ID NO: 144404 - protein, 377 aa, Oryza sativa
  Clone ID: PAT_MRT4530_45220C.1.pep
LTCRELEARARTARDNLKNAKKDFGKTEDDLKSLQSVGQIIGEVLRPLDSERFIVKASSGPRYVVGCRSKVDKEKLIAGTRVVLDMTTLTIMRTLPREVDPVVYNMLHEDPGNVSYSAVGGLSDQIRELRESIELPLMNPKLFLRVGIKPPKGVLLYGPPGTGKTLLARAIASNIDANFLKIVSSAIIDKYIGESARLIREMFSYAREHQPCIIFMDEIDAIGGRRFSEGTSADREIQRTLMELLNQLDGFDELGKVKMIMATNRPDVLDPALLRPGRLDRKIEIPLPNEQSRMEVLKIHAAGIAKHGEIDYEAVVKLAEGFNGADLRNVCTEAGMAAIRAERDYVIHEDFMKAVRKLNDAKKLESSAHYSADFGKE

SEQ ID NO: 144405 - protein, 231 aa, Oryza sativa
  Clone ID: PAT_MRT4530_45221C.1.pep
MMNDGDVARQLKQMTDFIRQEAVEKAAEIEAAAAEEFQIEKLQLVEAEKKRIRLEFERNEKQGDIKKKIEYSKQLNASRLEVLQAQDDLAMSMLEAAGKELLYITRDHHVYKNLLRIFIVQSLLRLKEPAVILRCRKEDRELVESVLESAKNEYADKANIYPPEIMVDRNVYLPPAPSHYEAHGPSCSGGVVLASRDGKIVCENTLDARLEVVFRKKLPEIRRSLLGQVAA

SEQ ID NO: 144406 - protein, 230 aa, Oryza sativa
  Clone ID: PAT_MRT4530_45222C.1.pep
MMNDGDVARQLKQMTDFIRQEAVEKAAEIEAAAAEEFQIEKLQLVEAEKKRIRLEFERNEKQGDIKKKIEYSKQLNASRLEVLQAQDDLAMSMLEAAGKELLYITRDHHVYKNLLRIFIVQDKLTKKNPEQSLLRLKEPAVILRCRKEDRELVESVLESAKNEYADKANIYPPEIMVDRNVYLPPAPSHYEAHGPSCSGGVVLASRDGKIVCENTLDARLEVVFRKKLPE

SEQ ID NO: 144407 - protein, 57 aa, Oryza sativa
  Clone ID: PAT_MRT4530_45223C.1.pep
SCKLVSSIRCYCPTQVLLYIYVSIQFWHNLFYDDGRLVNLVHSLSALCFAVNCFSLL

SEQ ID NO: 144408 - protein, 369 aa, Oryza sativa
  Clone ID: PAT_MRT4530_45224C.1.pep
MDGVIDSGVLGLDFLSRGVVVSPETTRPAGMEYHYQQHQQPPLFLDFSHGDGDGGNSRKRPREADAAAAMVAAPPPQMLSLQPQAQAQGHKVVSLAQLHNKRPPASTGLRLDFDDGGSEHVSTTTTSSASSLLSDELATQFDRCKNEMARMFQDHTERLRRALGEVRRRHYRSLLGAAEAAAARRMREKEAEASNAARRGAELEERVARLRAEAAAWQAKALADQSTAAALHAQLQQAAAAAAQARGSKSPEDDDNINPNAAAADDAESGFVDPDRVEEQRINSGGVEEALLGRGVRPPSPPRAREDTEEMIQEGAEEEEVLEPDDKEADAQEQGGKPDFKTKKKQVPVQLGPRARRPNPRYKGDQWVQ

SEQ ID NO: 144409 - protein, 822 aa, Oryza sativa
  unsure (1)..(822): unsure at all Xaa locations
  Clone ID: PAT_MRT4530_45225C.1.pep
MTTDNALIAFECFHYLQKNKNPENAACAYKLDLSKAYDRVDWHYLEQAMIRLGFSHRWVGWIMECITVVRYPVKFNGTLLSAFAPTRGLTQGDPLSPFLFLFAADGLSLLLDEKVQSGDITPVRICRQAPGISHLLFAXDDTLLFFSADNHQAEVVQEVLDNYAQSTGEVLCHVQSCYPNSVCNMIRSTLQITQASFDDKYQGFPMPEGRLYKGKFQTMQSRILKRLVQWGENFLSIGGKEVLIKAVIQAIPVYVMGLFKPPDSVCDELTKMTRNFXWELEMFDRKTCWKSWESMIKPKCSSGIGFRDFKLFNQALLARQAWKLLMFPETLCARVLKAKYYPNGSLIGTSFGGNASPGWRAIEYVLDLLKKGIIWRVGNGKSIRAWRDPWIQRDHSRQPITRRGNCRLRWVSDFITEDNVWDVERVQRFFWPIDAEIILNTRISSWAEEDCVAXHPDKLGLFSVRSAYRLGFRLKYEKESSSSSSARLEKAWKSVWQCKIPQKIKIFAWKAVTNCLATRENKFIRKLDVSPICEVCGTEVEDTIHALCRCPLAGSLWQAMQKEGTIPVSLDSLRTEPNWIFDQLDPLSNGQREMFLMIPWRNWFVRNEITHGKAAPPVEVSKRFIQSYIHTLLEIRQNSVINLEKGKHFVNPNLCPPRXWEPPPLGWMNVNVDGSFDDTNXRGGIGMIRRDDGGNPITAACTFLNRCCTALEAELLAIKDGITFALQWTFRPIVLESDCLIAIQMINSKERCLSELAFVVREVRDLMNGDREILLRKIHRSQNHASHSLAXNKARAESSSITWLNPNCDDISQIVKDDFIPE

SEQ ID NO: 144410 - protein, 47 aa, Oryza sativa
  Clone ID: PAT_MRT4530_45226C.1.pep
MASYISEVYSGWFSQQAIAPAASLDRARDLRVLIFNAESCSENGQHV

SEQ ID NO: 144411 - protein, 90 aa, Oryza sativa
  Clone ID: PAT_MRT4530_45227C.1.pep
YCDACPSPCLRLKLVSMVLTRPTRPSPSFPALFLLKQVPRPTIFSISRGSLLSDLPPPHNLSLRFASTTNIGQLSTATLQLPWWGRGLTA

SEQ ID NO: 144412 - protein, 88 aa, Oryza sativa
  Clone ID: PAT_MRT4530_45228C.1.pep
TKRETTTLALTCTAGAHSLIRARLYIAMHVSQFASCTMLSSRDGDGSGRARVEQNHARPHARYRPPKPCPYLCPTGTGISGGYPMDLT

SEQ ID NO: 144413 - protein, 93 aa, Oryza sativa
  unsure (1)..(93): unsure at all Xaa locations
  Clone ID: PAT_MRT4530_45229C.1.pep
HSCKDNAYLVSSLWQVKPGTIFDNILVTDSVQEAKDFAKRDIREDXKGEKASHKEADDKKQEEERKKAEEPASREGYRGRMRRSLSHKDKDEL

SEQ ID NO: 144414 - protein, 514 aa, Oryza sativa
  Clone ID: PAT_MRT4530_4522C.1.pep
MYKNQLQELAQRSCFNLPAYTCLREGPDHAPRFKAAVNFNGEQFESPGFFTTLRQAEHAAAEVALAALARRGPSYSLAARILDETGVYKNLLQEVAQRVGAPLPSYTTERSGLGHLPVFTCTVELAGITFTGDPAKNKKQAEKNAASAAWSSLRQLVRQEASSSNEPESNDEQEQIRIARALLNYRLKEKMAMANNPHASPFPKKFPMQPERRTAFPQSSHSSYSKILPLFRPKSNSRSRPESPAASDAASQTPFRPTESPNPRSRFPAAEAAPYVPVGHFRMPCHSMAPPVTVRTSIPVFSAPPLPPPGARTQQLPPLMSHPPPIRMASPVRIRPAPPLFTPSAVQGPKPMMPVQIKDVQHQQIKETRSPVMPVQVKDAQNQLLKGSLSPVIPVQIKDVQSQPPKEALSPAIPVQIKDVQLQPRNEPVSIGKGVVPLPAIRPPVKVEAPAEVKEASQPVAGSSVVQCKADTSPDSLPKTQLKTANADNADAKDDHLPVDAEEVEDIIRHLELK

SEQ ID NO: 144415 - protein, 886 aa, Oryza sativa
  Clone ID: PAT_MRT4530_45230C.1.pep
MPHHRHLTPSPSHEEHETPNPSLTPPPMQLAALASDEPPPPPPEQSPRRIVVAHRLPLNATPDPGSPFGFAFSLSADAHALQLSHGLGLAHVVFVGTLPAEAARALRRSDELDRHLLGCFSCLPVFLPPRAHDEFYAGFCKHYLWPRLHYLLPHAPAANGYLHFDAGLYRSYASANRSFAARVVEVLSPDDGDLVFVHDYHLWLLPSFLRRGCPRCRVGFFLHSPFPSAEVFRSIPVREDLLRALLNADLVGFHTYDYARHFLSACSRLLGLAYTSRHGRVGINYHGRTVLIKFLSVGVDMGLLRTAMASPEAAAKFREITEVEYKGRVLMVGVDDVDIFKGVRLKLLAMESLLETYPALRGRVVLVQIHNPTRCGGRDVERVRGETAKIQARINARFGGPGYQPVVVVDRAVPMAEKVAYYAAAECCVVSAVRDGLNRIPYFYTVCREEGPVDAKGAAGGQPRHSAIVLSEFVGCSPSLSGAIRVNPWNIEAMAEAMHGALTMNVAEKQARHVKHYTYLKLHDVIVWARSFAADLQLACKDRSTMRTIGMGIGPSYRVVAVDAAFKKLPPELVNLSYRAAAAAAAGGGGGRLILLDYDGTLEPTGAFDNAPSDAVIVILDELCSDPNNVVFIVSGRSKDDLERWLAPCANLGIAAEHGYFIRWSRDAPWETMASKQLAAAMEWKAAAKNVMRHYAEATDGSYIEAKETGMVWRYEDADPRLAPLQAKELLDHLATVLASEPVAVRSGYKIVEVIPQGVSKGVAAECIVSAMAARRGGALGFVLCVGDDRSDEDMFGALASLCGGGKNGGASSSTTTTTALLAAAQVFACTVGNKPSMASYYLNDKEEVVDMLHGLAFSSPSSRLRAAAAPRRPADFDIKSLLRCE

SEQ ID NO: 144416 - protein, 81 aa, Oryza sativa
  unsure (1)..(81): unsure at all Xaa locations
  Clone ID: PAT_MRT4530_45231C.1.pep
TRIPQAHHPPPTATFCSATAMISSSCTTLLLLLPTPPPPPPPANPNLAXPPFPTSPRLASPPIHDVQAAPPPLVGPRRPAL

SEQ ID NO: 144417 - protein, 96 aa, Oryza sativa
  Clone ID: PAT_MRT4530_45232C.1.pep
MVESSHVLYEQQLVPIVALVLLVRSEILGFMPRFGTEVSAISTTGAVDGVMDAWLVGLSLACCRRWVLHACTAVVPFIPPCLCLCSSCAARLPIWA

SEQ ID NO: 144418 - protein, 43 aa, Oryza sativa
  Clone ID: PAT_MRT4530_45233C.1.pep
MALLAYFTVFVLAASVPATGQQGANSYNNWHLQVRCHMYRFLS

SEQ ID NO: 144419 - protein, 46 aa, Oryza sativa
  Clone ID: PAT_MRT4530_45234C.1.pep
LARGLLYLHEESPVKIIHRDIKASNVLLDEQLPDFRHIVSNYTRTH

SEQ ID NO: 144420 - protein, 450 aa, Oryza sativa
  unsure (1)..(450): unsure at all Xaa locations
  Clone ID: PAT_MRT4530_45235C.1.pep
MASSAHVKPNNFFLDGLNLRPILRYCLSVAILVQPILSCDPNSFAHNLAVEKGCAPEHTLRTMCQPSKHATERXAKHGTGRRYARPITTGTTXPPRREDSTTTPSRGSXRRKTPSSSIQRTGXGFHPELLSKEGGXVPQQCPQEAYHARKRGHCWPKEIGLSFRSKSPTAVVRRSIRIHHXNTGGTWLPPHLTYAPPPADFQSCQXQDCHSTGHLRQPPRRIRPMGSDREQPRLGNLSLPKAPYKEGEELLKYSGNLANHKEDDLAAKPTAGLVDATTPPPPCRPPTATRATQRRXRASKPHRGGPGPTPLHAVSSLFLPRRRRLVHPLRHHPYPPPSPSPPCPPPQSPSASPTLAAFSSPSVPVRFPCPLRRRPSPPPSPPPAPLASPPLQRPCLLRRLPVFLNLAISASALHSETGYPEMIPAQAQFCCLRCKAEHREPLRRHVVQSK

SEQ ID NO: 144421 - protein, 55 aa, Oryza sativa
  Clone ID: PAT_MRT4530_45236C.1.pep
RRRCWQCDMTVLLGVGMAAEIGALWGSVRHSRSSECSSGSSRKKHTRTRGSTRNP

SEQ ID NO: 144422 - protein, 162 aa, Oryza sativa
  unsure (1)..(162): unsure at all Xaa locations
  Clone ID: PAT_MRT4530_45237C.1.pep
RRQRGRSQRGAADGSGGRLGARGVGGGDGGRLGARGAADGGRPDWRERRVRWRRPAWRERRGRQCVEELPVGVARSLAHKGWPARVAGAGVPHVGRACVEVEHQCGVVVLSHPSRVIAGRKPSLSSFEPRRTAVAXFPSLLFLKTSFWHPLGGDLVCVLLLV

SEQ ID NO: 144423 - protein, 64 aa, Oryza sativa
  Clone ID: PAT_MRT4530_45238C.1.pep
ELSFELTSPLKKGKLTHGLCYDCFFSFLTGGMDTCISQGRRSMNKRARHADRKTSFGEPTKLCE

SEQ ID NO: 144424 - protein, 133 aa, Oryza sativa
  Clone ID: PAT_MRT4530_45239C.1.pep
MAAVMVSGGGAERFEGLLMNQWMETSFGAAAGYKQCEAILGLLQRQMFYCTHLNFPVMLATCSLKSYFLWFQNSSIHTGSTVRVEHFLLLRSNGRLRGIIVLSPMMPTPKSTAQQLTSNLCHFCGKAFRSVKR

SEQ ID NO: 144425 - protein, 76 aa, Oryza sativa
  unsure (1)..(76): unsure at all Xaa locations
  Clone ID: PAT_MRT4530_4523C.1.pep
RPGXGNFNPXPFRGQHVVXLSAXVXPSLXIGLXMCKCRSHGTFLLFXLQSSHLNICYYHQDLXRXXSGXARAPGFA

SEQ ID NO: 144426 - protein, 45 aa, Oryza sativa
  Clone ID: PAT_MRT4530_45240C.1.pep
GRVVRIGLTDHVEFPICNLSALARKHTARDTPWADLLNVENCDYH

SEQ ID NO: 144427 - protein, 947 aa, Oryza sativa
  Clone ID: PAT_MRT4530_45241C.1.pep
MNTGEKPNPHKDDMSQGKFRLIHTWKKWKKVSHSLFLLKSLIFLRASILPAFCAITSEWLMETLLVVVVGPEAPRNSLDSPLYDHTTITMTSTMRQKPPKGSTPQDRTTAKNVIHKDIFPSQPSVIARLMGIGTIPVSAKRDEVMIHAEEVSNLKLPSKLEMITVTSPRSATFRQSKCSLISYGSSSVDYTYRHCLKKMRPRRSRSRQHHPQEELLEKIREDFQAWQTSKALENARTVFTASGCPTITSSRHRMEEGRYIQILAQENLHKEKMAKFGYGSCTISMAEKDTLKNATDNSSDTEITSAKAAAESNISPGDKVIKVLRVSHCATMPDKFRDLEDEHNNSISTSAKPRSQKRIVLLKPSTCDIVASDQESLFSSSKVKREGNMEEFLEEVKERLKKELKLKSKSEVVRRSWGTTDPKQIARDIAKQIRETVRRQDLGKRLYSRSESFRAFRSDRKRNAAATAARNASPEHVSPTSVTSRTSGTNQGSNDCSPPIIRRSRGRIRSLTDMPLSVSVSESVPASGFDDQSYTGECKFADANVVSPRALVRSFSAPASGISRGRLFAEDNNVDSGRHGNSDAVSEGAAVAASKNSSSFSLRGTVSNLRNSLRSRANKLFGKKTHWSLKPSLGEFHPHKMAIGMLPPSPPEILSPFIVAQASTVLHLSKSNLYFRPDLERIRITFFCTMDSLPLLHLFQENFTELPPSPVSPLEVKGSSSRHFFSDLNCNLPELSPKSWSEFDTTPIASNESSSCKNRTNATETEESYTEMAYIKQVLIAVGLYEDGSSYSSPSMMNNARVDSMARRPICDYVFDEVEETYNTEEDAADHRMLFDLANEALEITMMGSTKTGSSLWRWVVDSTGVSPGRKLLVDVWQQVQSVRNPPVQQETQTVESMVAREAWTSPWIEVLHEDSYVLGRKLERAIFDQLIADIVQELFISQNAAD

SEQ ID NO: 144428 - protein, 84 aa, Oryza sativa
  Clone ID: PAT_MRT4530_45242C.1.pep
FFFFFFLKSKGFSTVSTRIPKKPASVPHHISTPDSHPKFFTPAHQHNYNAVFNTARTPSGATFAQQHIQRCPCQRVPWAGGAKT

SEQ ID NO: 144429 - protein, 151 aa, Oryza sativa
  unsure (1)..(151): unsure at all Xaa locations
  Clone ID: PAT_MRT4530_45243C.1.pep
MTMEGSLRLGFLLVLCILAFLRPAAAIRFVIDREECFSHNVDYEGDTAHVSFVVIKAETPWHYTEDGVDLXEHFSALFEQIAKLDEALYNIQFEQHWLEAQTDRQAILNENMSRRAVHKAFFESAALIAASVVQVYLLHRLFERKLGTSRV

SEQ ID NO: 144430 - protein, 57 aa, Oryza sativa
  Clone ID: PAT_MRT4530_45244C.1.pep
MHPTSRSLLPFFLAESPVARTVAVEGEAAMGKGLGEVATPVGVLCPKIDDMRACQSV

SEQ ID NO: 144431 - protein, 81 aa, Oryza sativa
  Clone ID: PAT_MRT4530_45245C.1.pep
MGPRTLPGVNWGGRNLGPPNSFFLGWEKWFYSPQKITKLVLGPLKKLKKNFFFFKKKKKKKKKKKKKKKKKKKKHKKKKKH

SEQ ID NO: 144432 - protein, 266 aa, Oryza sativa
  Clone ID: PAT_MRT4530_45246C.1.pep
MDPAADGEGGGYEDASEFADAETGGEKGGAGGGGGGEGEEGAARGARQGGGVPRESCDQVKAVIDYLKPQAVFLELCASRVAILTPQNLQVPTMNEMIDMWKKKKMNTFGILYSWFLAKVASQLDVLPGAEFRVAFEEAMSYGGKVILGDRPVQLKDMEDVDMLTLVIQEMSKAFPTLMETLLHERDMYMSSKLLKVAKEHSSVVAVVGKGHVSGIKKNWEQPIEIESLLVLPVTKQGASKMKILASIGALGGVVIATGIYIWSRK

SEQ ID NO: 144433 - protein, 111 aa, Oryza sativa
  Clone ID: PAT_MRT4530_45247C.1.pep
DFWCCSWSIWAVQATRSGAWGALFHKQCFRKISICPCGKGAASKGRKIVALEQAVRDDASRPSTQLIQPSSFSSSSGFFSDIISKARPDKLWKPRNSSPVILMGSLPDTST

SEQ ID NO: 144434 - protein, 105 aa, Oryza sativa
  Clone ID: PAT_MRT4530_45248C.1.pep
NGADQVHSRRRRSPGPARLGGGGRPRGRRDHLRGARAGAQPVPAHLHGQGGDGSSRRVLHRADRPSGWAGPVCLHHTRGPHAGARHRRRQAPSTGRWLWFGTYAG

SEQ ID NO: 144435 - protein, 694 aa, Oryza sativa
  unsure (1)..(694): unsure at all Xaa locations
  Clone ID: PAT_MRT4530_45249C.1.pep
NLEACMIKXLVLMRQNNINAVRNSHYPQHPRWYELCDIFGLYVIXEANIETHGFDESSHFKHPTLEPFWASAMLDRVVGMVERDKNHACIIVWSLGNESSYGPNHSAMSGWIRGKDPTRPIHYEGGGSRTSSTDIVCPMYMRVWDILKIAQDPSENRPLILCEYSHAMGNSNGNIDAYWMAIDNTVGLQGGFIWDWVDQGLLKEDADGSKNWAYGGDFGDTPNDLNFCLNGIVWPDRTIHPAVHEVKYLYQPIKITMMDNMLKIENVHFFETTEALDFSWLLQGDGCALGSGSLNVPSIAPQSTHLINMKSSPWFTIWSTCVVKEIFLSINVKLRYQTQWAKDGHILASAQICLPPKKGLVPHAIALPRSSLVSERVGDHVLISKSNAWQIKVNSISGTIDSWKVNNIELMSKGIHPCFWRTPTDNDKGGFYTKPYVSRWREASLDNISFYSSQFSLKELPDQTVEISTIYYGLPGNQPKPDETSLSDESESVLFRVQMRGRIYDSGDVILDYEVSPKNDLPPLPRVGVVFNADKSLSRAKWYGRGPFECYPDRKAAAHVGVYESGVDELHVPYIVPGECGGRADVRWVALQDADGFGLFASAYGESPPMQVSASYYGAAELDRATHNHKLVKGDDIEVHLDHKHMGLGGDDSWSPCVHEQYLLPPARYAFSVRLCPLLPSSSCHDIYHSQLPC

SEQ ID NO: 144436 - protein, 326 aa, Oryza sativa
  Clone ID: PAT_MRT4530_4524C.1.pep
MGCRDEGGEDIDVGRGQRRSRETIEDFDEVEKLGKGFISADPLEEIDIGDGNIPRPTFVNKNMKADYKVNDYKVKIIELLKEYIDSFAWEYHEMPELSPDLVEQWLSIKPGFRPYKKPPRHFNPLLYDRVKEEIDRLLKVGFIRPCRYAEWVSSIIPVDKKGSGHKVISFLDGNAGYNQIFMAEEDMFCFRPMEGKGKLIEELEKPAAAGRRTLASRVTEGHAPPQLPSRIAGDAEGCAPPQCPLLAAGITAVSFVSPPKLPPSVCSGYLHAHLHQQHEPGRTVPMCTEGSQTVPPPTCAEGLPGYATVAESDDARRESDVAEEYD

SEQ ID NO: 144437 - protein, 463 aa, Oryza sativa
  unsure (1)..(463): unsure at all Xaa locations
  Clone ID: PAT_MRT4530_45250C.1.pep
MAGGDDWSKRTIMEESLQPPAHGAAATTPWVLLDIRAFMANHRNATTAMSETRSGHPIEVSSWTAPPPRVSYXVHCPGLDSKKFATEPTIIAAEADLLLIRVAMGRRNIRFKSSFHDYFVYQATTPTPKLTLLPPPPIDRFIDHELGLLRCCASPDYIVAALCNTFESGYFEYDLHIYCSGADAWTCHPISLHGLVDTSFTHINTKAITIGGKAGTMGWVDLYRGILFCDLLRDTTKLRYFPLPPPLSPNNSLTGSPRPHRDIALVQGRIKFIETRLHVKPGSIINGTFISQGWTAATWTAPDTNPWNQGWRQDCKLTASDISVDDSKMNFELLPKLFDDQGTPQPTLERLHVGHPTLSLHSDDIVCFMAKADQWDDDAWVLAVDMKNKRLKVVAEFGAERTLGIGYAYMSSNISGYLRTAPEGNDRNESYYLVVIEPGFFILLAAVLFTRGYCWYFVPRMTI

SEQ ID NO: 144438 - protein, 516 aa, Oryza sativa
  unsure (1)..(516): unsure at all Xaa locations
  Clone ID: PAT_MRT4530_45251C.1.pep
MAACAASTATIDWELLEAAISGDTRSMKMKYMDSHDPTILLGKNPQGNTCLHISSMCGHLEFCKDVLSLPQDPTVKKKLLTTVNVMNETPLLTAITSGHVTLAAFLLKYCHEQGFSEVILKQDKHKCNALHHAICNGHKDLALELIATQPALSKDVNKYGESPMYIALMMRDSKFTDIFEKLLGIDGSSHSGTYGYNALHAAIRNGNPDIAKRIIVERPNLATEENKDGNTPIQLAMLHIAKKMGGHVFIKLSNQKLVNMRSSKGKTALHYAIQKCDPKIVAALLDKKIDLTILGSDGNAAAWEXRDALDSAKTLNWNEVSMLMIKADPPNAKSVYNLHEEAKEKLINASRKDARSLTQTYTSNTSLVAILIATITFAAAFTLPGGYSSDAGSQGLPIMARNVAFKAFLISDTLAMCASLAVAFICIIARWEDLDFLLYYRSFTKKLMWFAYMATTTAFATGLYTVLAPRLLWLAVGICSVAVLVPILTKVLGEWPVLKLRIRLGQAFKSEFLDMV

SEQ ID NO: 144439 - protein, 418 aa, Oryza sativa
  unsure (1)..(418): unsure at all Xaa locations
  Clone ID: PAT_MRT4530_45252C.1.pep
PRVRFLCGHLEFCKDVLSLPQDPTVKKKLLTTVNVMNETPLLTAITSGHVTLAAFLLKYCHEQGFSEVILKQDKHKCNALHHAICNGHKDLALELIATQPALSKDVNKYGESPMYIALMMRDSKFTDIFEKLLGIDGSSHSGTYGYNALHAAIRNGNPDIAKRIXSLNAQIWPQKKIRDGNTPIQLAVPWGKDRHATSVLLKHDRSQGYVINRKNGYPLLLSAAHRGHVAVAREIIKYCPDAPYCKKDGWTCLHKAVKSGNMEFVEFILGEPRLQKLVNMRSSKGKTALHYAIQKCDPKIVAALLDKKIDLTILGSDGNAAAWELRDALDSAKTLNWNEVSMLMIKADPPNAKSVYNLHEEAKEKLINASRKDARSLTQTYTSNTSLVAILIATITFAAAFTLPGGYSSDAGSQGLPI

SEQ ID NO: 144440 - protein, 39 aa, Oryza sativa
  Clone ID: PAT_MRT4530_45253C.1.pep
QSGGNTPRSKKQAFRRVGSSQEIGLHQTIPEGFVRVRFK

SEQ ID NO: 144441 - protein, 63 aa, Oryza sativa
  unsure (1)..(63): unsure at all Xaa locations
  Clone ID: PAT_MRT4530_45254C.1.pep
EFWHEAPSFAASDGGEALKLNAXDESKLVVTTNHAVVNTESGDSSSSSSXSSAAAEEEEEVAA

SEQ ID NO: 144442 - protein, 48 aa, Oryza sativa
  Clone ID: PAT_MRT4530_45255C.1.pep
QNGAASGAFFDAACRAVQHPSLFKGKLSVYPYQKILGVVCVVIIIYPS

SEQ ID NO: 144443 - protein, 245 aa, Oryza sativa
  Clone ID: PAT_MRT4530_45256C.1.pep
FVMAAPTATAVFLDEMGTHAEWPAGKRADGLKAKPLKPLAAKQGLQEKKALRDVSNIGKPPVSTRKPLQDVSNTAKPRGRNISDGTTLKKTALRSHEATKNPVKKTVIFSDETAKCHEWAKDGVEGTHFTGNDSQKLEKDSQDKRVKKKVEKIMSALHDWPDAVFDHVLFPSEVVAAFFEEVKEMELEPEILPENNRRRSSSGDKMKLAEDPFTEDELDYYPFLENNPVEFQLRDELPLLEPGMN

SEQ ID NO: 144444 - protein, 80 aa, Oryza sativa
  Clone ID: PAT_MRT4530_45257C.1.pep
TVVVLVGETGDSYYEELFGGLHKSGILKVEFNTYANRIHSVRRYALQDDARLDDPNIIENGGSCTDNVRYALKQLDIRVL

SEQ ID NO: 144445 - protein, 99 aa, Oryza sativa
  Clone ID: PAT_MRT4530_45258C.1.pep
MAPWWPGREGLPREGETADFGGRGAVRTKQGRLAVDDSRRCSTPGLPRSAAPGSLQQQLQQREQLLSTPRHPHRLRSPVAAAQPSLTRFGSMHWRGMIA

SEQ ID NO: 144446 - protein, 77 aa, Oryza sativa
  Clone ID: PAT_MRT4530_45259C.1.pep
MRLPAVYAAPPSPIEAVAHRGRRRYRASRPLSPLPLPPPIEAVAPPWRIEAVAMDCELCLLMSTRERGEKTKEKLNG

SEQ ID NO: 144447 - protein, 410 aa, Oryza sativa
  Clone ID: PAT_MRT4530_4525C.1.pep
MDGDDRRTPLLGGEGGSTRPPSLRRRDSARSLRSTFLSRLPDKVRGGGDPERPAADVDLTRAKGLSQGEKEYYEKQLATLKIFEEVEALCMPGEFESDAEVLELEDKEQKQSESAMKISNYANIILLVFKVYATIKTGSMAIAASTLDSLLDFLAGGILYFTHLTMKSVNIYKYPIGKLRVQPVGIIVFAAIMATLGFQVLIQAIEQLVENKAGEKMTPEQLIWLYSIMLSATVVKLALYIYCRSSGNSIVQAYAKDHYFDVVTNVVGLVAAVLGDKFFWWIDPVGAVLLAVYTIVNWSGTVYENAVTLVGQCAPSDMLQKLTYLAMKHDPRVRRVDTVRAYSFGALYFVEVDIELSEDMRLGEAHSIGESLQDKIEKLPEVERAFVHVDFESTHKPEHRVRSRLPSTEP

SEQ ID NO: 144448 - protein, 509 aa, Oryza sativa
  Clone ID: PAT_MRT4530_45260C.1.pep
MRHQITLSVLIIILLALGASVTDASSHSQEDQLIKFMESRALKRLRNRPNKNGPGEDDQWADPGRFSHLATRSVSSPESTKEDDRIAALPGQPCGVNFAQFAGYVTVDRKNGRELFYYFVESPYDASTKPLILWLNGVVLIEFIGPGCSSLGFGAMKELGPFRVNPDGKTLSRNKHAWNNVANVIFLESPAGVGFSYSMNSSDYSDVGDQITAEDTYVFLLNWFNRFPEYKGRDFYIAGESYGGHYVPQIATIVTFINHLFDGNTPFNLRGIFQASKGAKRGGEGCLVVVHDGNNNGRWWLGQVGNPLLDEYKNGEGNLEFLWSHGVISDEVWGKILANCTFTSSDDWPCFVAAHSFQRVNIDRYNIYAPVCLHEQDGTFRSSGYLPGYDPCIDYYIPRYLNNPDVQKALHARADTNWSGCNGDMDSICSLTATRYSVKDLNLTITHKWRPWYTPDNEVGGYVQQYEGGFTLASVRGAGHLVPSFQPKRSLVLLYSFLKGMLPPADIPK

SEQ ID NO: 144449 - protein, 73 aa, Oryza sativa
  Clone ID: PAT_MRT4530_45261C.1.pep
AEALVRGAGVKASSSSQGQSPRTPSPRATSATVEHTRSSLEPWLVVAVVCCTFYDSCVNYLQNFSRTVVSAQF

SEQ ID NO: 144450 - protein, 96 aa, Oryza sativa
  Clone ID: PAT_MRT4530_45262C.1.pep
LWPAPNPSSVRESHHRRIILRGEKESGGCCRGTTPQVGHEPIYGTTIPHTQKSHSLPFFYSKENRGKPLSSPVLSLHPLPAPQVNLPKYNQPLSGG

SEQ ID NO: 144451 - protein, 164 aa, Oryza sativa
  Clone ID: PAT_MRT4530_45263C.1.pep
MAQRDKKDQEPTELRAPEITLCANSCGFPGNPATQNLCQNCFLAATASTSSPSSLSSPVLDKQPPRPAAPLVEPQAPLPPPVEEMASALATAPAPVAKTSAVNRCSRCRKRVGLTGFRCRCGHLFCGEHRYSDRHGCSYDYKSAARDAIARDNPVVRAAKIVRF

SEQ ID NO: 144452 - protein, 339 aa, Oryza sativa
  unsure (1)..(339): unsure at all Xaa locations
  Clone ID: PAT_MRT4530_45264C.1.pep
MLRGGTSLLGIVNFVTFLISIPILGGGIWLASRANSTDCIRFLQWPIIAIGLAVMVVSLMGFAGACYRQTWLLRLYLFAMFFIVVALLFFIVFAFAVTDRGDGQVVMNRRFLEYQLSDYNGWLRDRVADPAYWATISACLRDGRACAAMRRFARDPNTGMLVPETPSMFYARDLSPIQVTLLVQLLRPNNTKTFQSCHYCSGYLFMHSLIFVFVPVDKTWQSKSGCCKPPTSCXYNYVNETFWTANPGVPTVVNDVDCSKWSNDQQTLCFQCDSCKAGVLAGIKKSWRKVAILNIVVLIILVIVYVAGCAAFRNARRIENDEPFGMARMTKTQPSRFQF

SEQ ID NO: 144453 - protein, 1349 aa, Oryza sativa
  unsure (1)..(1349): unsure at all Xaa locations
  Clone ID: PAT_MRT4530_45265C.1.pep
MSLQPPAVEPPEWLRTLPVAPEYHPTLAEFADPIAYILRIEPEASRYGICKIVPPLPRPPEDDTFRRLQAAFAAAASSNGDPSPTFPTRLQQVGLSARNRRAASRRVWESGERYTLEAFRAKAAEFEPPRHAAPPRNPTHLQLEALFWAACASRPFSVEYGNDMPGSGFASPDELPDAANATDVGETEWNMRVAPRARGSLLRAMARDVAGVTTPMLYVAMLYSWFAWHVEDHELHSLNFLHFGKAKTWYGVPRDAMLAFEETVRVHGYADDLNAISEPLCDCNSLXTVLSPEVLLSAGVPCCRLVQKAGEFVITFPGAYHSGFSHGFNCGEASNIATPHWLQVAKEAAIRRASTNCGPMVSHYQLLYELALSLRPREPKNFYSVPRSSRLRDKNKNEGDIMVKENFVGSVTENNNLLSALLDKNSCIIVPNADFFVPSFPVALESEVTVKQRFTAGPCSISQQGAENMAADHVAVDKVTEIQDMSGSLYPCETSLVGCSNRKLYETKYGQRDAAALCLSTSEIQSRGIDTARSHPAGGILDQGRLPCVQCGILSFACVAIIQPREAAVQFIMSKECISSSAKQGGIGASDDTSNWIDQSHEISPPPGPASGTDDNVKHAVSLAHVSDRCRELYASNTDGCTSALGLLASAYDSSDSDDETTEDVSKHSKKNDSVNQSTDPQILETSASCSSTVQCQKTNSHLHEEECEARATSLMKPVSHNSRPISQSNRDTDIDHFIELGKSGTQCSGYLDLVDDLTTSVLKSSSDTCVSAAKASMDPDVLTMLREKKTCVYNYMSNYTKGINCKYPRAESAAKVIAEELGIKHDWKDITFKEATEEDVKKIQLALQDEDAEPTGSDWAVKMGINIYYSAKQSKSPLYSKQIPYNSIIYKAFGQENPDSLTDYGCQKSGSTKKKVAGWWCGKVWMSNQVHPLLAREREEQNSSVVYGKAMFTTISHGKVQDEASTRCNTSNRTPSRRTSRRKKGVSAEKSKPKNKRSTASDEASMLCSGLGMNSGVIHDQTENSDDYDKHGNGDEIEEGTNPQKYQQRKLQNVTRKSSSKKRKDEKRTDSFHELYDEDNGVDYWLNMGSGDDATLGNSRQQSPDPVKVKSGGKLQGKRKSSKYKSNDDLLNEENKLQKMNKKSSSKKQKNDKINRQLQEDQTEDDHMDHLVDVAVADEVTLDNEDKITEDKIDDVKVKSRGKSQNGKRKGSKHQATDGLRAGNKVAKFPCDIEGCDMSFSTQQDLLLHKRDICPVKGCKKKFFCHKYLLQHRKVHIDERPLKCTWKGCKKAFKWPWARTEHMRVHTGVRPYECQEPGCGQTFRFVSDFSRHKRKTGHSSDKRRKNST

SEQ ID NO: 144454 - protein, 82 aa, Oryza sativa
  Clone ID: PAT_MRT4530_45266C.1.pep
IHPCQYICFSYFCRDNVTQNNYNKYLHSVSANNVMQSHRLHHKGIQASYSGLQEPPESSNIHTDTGDPIQHIAHPHHTQLHT

SEQ ID NO: 144455 - protein, 80 aa, Oryza sativa
  Clone ID: PAT_MRT4530_45267C.1.pep
KASCLMLSWKPPGFSPIKPDESSPLLVEATGLLKFSLWRKQFSRFYGEVCANQPRKVFFSSLWGKFIGGLTPFSVQDANK

SEQ ID NO: 144456 - protein, 66 aa, Oryza sativa
  Clone ID: PAT_MRT4530_45268C.1.pep
RHWNYSQSTVCHSSSVAVGCGLPSPTPHHSQRRHRIGLLPLMGVPTSTHVGRSTKSSVNIVVVTDM

SEQ ID NO: 144457 - protein, 261 aa, Oryza sativa
  Clone ID: PAT_MRT4530_45269C.1.pep
MSAAKKLCLWLAGATASVTAVVVASRAAAAMAAFLAFFLWPRTCPPSAWWLPKHLPHMLQTKRLEALSAASAAAAAAAAEAVCKPSLASRSGPLLLLPRTGGCGCGSCSSPPSTNLRRFLFFACTTTAIFLGHTPRGGGGAALSEPSSSAGNNGDLIRSTSRAFLRDTFPTPRPRPPPPASPRGAIASSSSELPSASSSSSAAWPPLPSSNAGWRGEKPSSWSSSSTTRLFRLQQPVPSAPASASASSRSTGGAGWRARNT

SEQ ID NO: 144458 - protein, 212 aa, Oryza sativa
  Clone ID: PAT_MRT4530_4526C.1.pep
ILLKVLDLTHQELTPRSTQIARRNGRRGRQRIQSKREKRKREKSQTKIWRGKESNHTKEQTNPNNNQEPEIRTNPLTFRKGRAPFSQTNTQKSTRTNISQVRARHYLDTTDRPRRRRTNPFPSSRRHHSPRQRQQQQRTKPNQSKPPQIARKKKKKKEEKKTTGAPKIKPNPLILDRKISRILGSRVDWGLEAALEDHKELGFGRRICCCYK

SEQ ID NO: 144459 - protein, 276 aa, Oryza sativa
  Clone ID: PAT_MRT4530_45270C.1.pep
MASAAVAAAAAPLRRSLLPSLNPSCLFSSLASSSHRLSLPRALRPAGPLPSDVEDSDDSNAGDGAGEALRKSRNDLKREARRAVQWGMDLAKFSPPQIKRILRAASLDREVFDALMLVKRFGSDVREGKRRQFNYIGRLLRGAQPELMDTLIQYSKDGDDNRLLALMSENTFLMEDEEIEDLPCNEEEGDKEHIEIADRWFEGLLSKDISVTNEIYAIHNVEFDRQELRKLVRTVHMVQDNIENEHEEESTMKLLGAKKQLLCFLRSIAKEAYVKS

SEQ ID NO: 144460 - protein, 348 aa, Oryza sativa
  Clone ID: PAT_MRT4530_45271C.1.pep
MASAAVAAAAAPLRRSLLPSLNPSCLFSSLASSSHRLSLPRALRPAGPLPSDVEDSDDSNAGDGAGEALRKSRNDLKREARRAVQWGMDLAKFSPLQIKRILRAASLDREVFDALMLVKRFGSDVREGKRRQFNYIGIFTYWTLLVVFPEATYIPTNVISITDGQICLETELFYRGIRPAINVGLSVSRVGSAAQLKAMKQVCGSSKLGRLLRGAQPELMDTLIQYSKDGDDNRLLALMSENTFLMEDEEIEDLPCNEEEGDKEHIEIADRWFEGLLSKDISVTNEIYAIHNVEFDRQELRKLVRTVHMVQDNIENEHEEESTMKLLGAKKQLLCFLRSIAKEAYVKS

SEQ ID NO: 144461 - protein, 199 aa, Oryza sativa
  Clone ID: PAT_MRT4530_45272C.1.pep
MEASLAREAWPMEGSRIGARGASGEGGQLGARGAAGGGRGDLDVKRSCRRWRRRPRCKEELPVGVARSSAHEGWLAGDAGAGVPRVGRACVVVEHRIKSTGTLWTCTGVKQISQASCFLSTESRRTATTVFLSLLFLKTSFWHPQEDDLVCVPLLVQWRSVMLSGGWSGASLFLGLCVDDVGVWVVVYSLFTGYDPPGL

SEQ ID NO: 144462 - protein, 73 aa, Oryza sativa
  Clone ID: PAT_MRT4530_45273C.1.pep
LLLFWANNPIKDSCFYFTQLIWYFALHVYSCAVFYEYIGVKHPARYLEAMFYTILTTNGGLMKVLKFMFLGQE

SEQ ID NO: 144463 - protein, 48 aa, Oryza sativa
  Clone ID: PAT_MRT4530_45274C.1.pep
HQKSCLYESSELSCHLLWHSVIIILIVRFVALARNRMSHDDSPLASIF

SEQ ID NO: 144464 - protein, 69 aa, Oryza sativa
  unsure (1)..(69): unsure at all Xaa locations
  Clone ID: PAT_MRT4530_45275C.1.pep
XVXXXLXXAXXDDSSRXHRXXPRRPPXXVVARXPPXTVTXCAXHHHHCRRKEXRAVXAAGVSRPXEDGR

SEQ ID NO: 144465 - protein, 141 aa, Oryza sativa
  Clone ID: PAT_MRT4530_45276C.1.pep
LILVVLLDSGSMHNFINSTAAVCTGVVLDPRHGLHIRVANGDRLDCGGVARDVPFNNGDTTFCSDFFAIHLDTFDVVEGGRRPQDSGGGTARLDDGDGSLARCSSGEGADGMLLHLVISFCSLLLLLLLPLYNNHQVTKPH

SEQ ID NO: 144466 - protein, 258 aa, Oryza sativa
  Clone ID: PAT_MRT4530_45277C.1.pep
MTVQAGADVNYAYPNTPLVVSTTAGLTDCIKYLLEVHADPNIPDKQSGLTPIEIAASVGRRDHVEILFPFTSPVRAVTNWTVEGIIAHGKSRRLIPKFQILKIKRSLDSSGHDHLNPHYFLQGESCSKVSDRKAELKSQGEKAVKRKDYLAASKIYTKALELDYFDATLYSNRSLCYLQIGKAQKALLDAKKCVKLRPKWMKGHYREGAALMLLKEHKKAFEAFLNALKLDPANAEIEKVMWEAVEAMKKDDAAEDKT

SEQ ID NO: 144467 - protein, 226 aa, Oryza sativa
  Clone ID: PAT_MRT4530_45278C.1.pep
MTVFTGINSHNRHRMRSTTATPKFGYGSYILILHPSTVAAAVAPLQALLRYARRRPPATARLPATAAPDGVVERERKRGKRRGPNLIRIRNIGYLDPQVLKPVQFDFLGGLKGGFANDKIKSTGTLTNLKARFFGPALKLSRSSRPRVFASTARPNTDGLIEAIGSHKLSRVNSPGGKMPLTLATRKVKQDDDVMASLVSVSGERKFRSKYSIRHWKADLKFRSFF

SEQ ID NO: 144468 - protein, 241 aa, Oryza sativa
  Clone ID: PAT_MRT4530_45279C.1.pep
MAASFLRPLLPPKPFLSATPKPHIPAATPSAIVRCTAAPKPATGSIAKPSQEEANNNQEQEPNAAAAATPDEAGANPHRIPDDETPPSATATTSFAVARRVPSAISPDRRRRTALTQGEPPNYEIGWKRTKKLPLEKPKGWAIADFMEKLEGLMARGRYGSGELLGTVAGVVTERAREEAEILVAEGGVEERVATELFRVLRLVEMDVAMVKAAVKEETVKERVEMARARCRQAILVALSL

SEQ ID NO: 144469 - protein, 229 aa, Oryza sativa
  unsure (1)..(229): unsure at all Xaa locations
  Clone ID: PAT_MRT4530_4527C.1.pep
KGLGYLTDLKPLSSPELSEKLHRHTFTSSQSRRVPCARAILEHPSTVXASHLSPTRSRPLGAHRRLCARLARPPSPXFAVIPLACRWREMGSGERDLGARVLPFSPYRCFIWRGEYRSRPLDQTAQIHPASGRRCRLRCAXWAAEVHQTVSTXVGRAQLLGLRAVELTRLTEDGPAQVWAGLGRPGPKVFKVSHYQMVFFPLQRMGTIASIYTYIYIYMRVTFMLSLNS

SEQ ID NO: 144470 - protein, 657 aa, Oryza sativa
  Clone ID: PAT_MRT4530_45280C.1.pep
DLWSGSEGGVIKVWYEEGIEKSLSLQREEKRKTSFLVERSFIDLRAMVSDGGACPLPAVDVKLLLSDNSRSKVWSAGYLSLALWDSCTKELLKVISVDGQVDTRFDILSSQDPFGYETKQNLFSAPRKDKARSPVGFFQRSRNALMGAADAVRRVAAKAGFGDDSQRIEALAMSIDGMIWTGSANGCLARWDGNGNRLQEFQHHLCSVQSIFSFGTRIWAGYMDGSIQLLDLEGNLLGGWIAHSSPVLSMAVGGSYIFTMAGHGGVRGWNLSSPGPIDNIMRSTLIEAEPLYKQFEYMKVLVGSWNVGQEKASYESLRAWLKLPTPEVGLVVVGLQEVDMGAGFLAMSAAKETVGLEGSPNGDWWLDAIGQQLKGYSFERVGSRQMAGLLICVWVRTHLKQFIGDIDNAAVACGLGRAIGNKGAVGLRMRIHDRSICFVNCHFAAHMEAGSRMPELSDTDMIVFLGDFNYRLYDISYDDAMGLVSRRCFDWLKNNDQLRAEMRSGRVFQGLREGDFKFPPTYKFEKHTAGLSGYDSSEKRRIPAWCDRILYRDSRVSSGNECSLDCPVVSSISLYDSCMEATDSDHKPIKSVFNLDIAYVDKQTMRQKYVELMSSNNKVVHLLQELEAFPGVNINNSNIILQDRNPSVVKLSTQYQG

SEQ ID NO: 144471 - protein, 432 aa, Oryza sativa
  Clone ID: PAT_MRT4530_45281C.1.pep
MANGRRWLWRGGSNHRYAFREIEMHAQRAGYLPSCPNFSSLLRPSSECSVSHIQDINTTWFPNLCDLDIRSCPKLSLPPMPHTSTLTRVSVRKGDETLLYFREEELTAYHYDGALALHNLGKVKAMEIVDMLHFPLADLQNLNCLTRHSFEDCDNIDNTVVLHSVQSLYLDDCHLTGKSLTMVLSIFPALTYFNLRMFGENHDIEEIVLQAPITCSLCHMSISSSKNLVLPVEDGGGLQELSSLQSLRISDCGRMFSRWCMVDAGARTSKPLPSSLRELSISDLLSEMTRTKVLSAGSLQLEALKVDNISGVLVPSICSLLAANLHKLIFKSDLQMESFDEEQEHALQLLTSLKQLYFADCPSLLSLPDGLHHISSLQKLHIYNCPKIGFLPKEGFPSSLRDLVLSECSVDLQDQLKKLETSNPDLFVHHMR

SEQ ID NO: 144472 - protein, 46 aa, Oryza sativa
  Clone ID: PAT_MRT4530_45282C.1.pep
HHQHGRWQARIGRVAGNKDLYLGTFGLVARFVDIFYAGQKHLLLTK

SEQ ID NO: 144473 - protein, 101 aa, Oryza sativa
  Clone ID: PAT_MRT4530_45283C.1.pep
MAAHRGRAATRHGGNSSAASLQLGLEAAAMWRGRLPRLGGAPGLGQREDECRASFLADADAHRCAHGQLMRLRLHVSRPIGKASPAWTCCGYRCLPMKNTD

SEQ ID NO: 144474 - protein, 685 aa, Oryza sativa
  Clone ID: PAT_MRT4530_45284C.1.pep
MTVLPLLLVCFTSIKPPLVPRASPPTSARKRRCCDCECEIIKNPIELGFLIKICTVVEDPHVTNIFFLSEMCNIVQVPSSALLAEDGFHLQVIPKKTKCWETIWSRSFIMLHRKNGFFHFFRKRSTDALLVKIHNPVFLWKVYGFSALLQRGALAAKSAAFHCSGYNWYLKVSPMHKTLGDGTPHVALSLVLSRLSFKPDYTMNAVFVLSMYNHSKGNFLVVKEVLFLQKKKFVSVQNLFLQKKDFTKGDYTWTMNNFPELDLKPSVLSPAFEIGRRKWFIRMYPRGDEYSTNSLSMYLFPQSWDKLLPEPGMMIELTLSILNQNNAQLHKVSGRFVFASKNGWGWSNFIALNKLKDLVGSSCIVKADITIIGSSSESQIVYMLRLIYWRRDLKRELEERTMGNVAGRAAGALLFCITADDPDPRFMASLRYFSEEPHQSPLICSTTVGTPGLKEDIVVDTTFELSIYNHSRRTHHGTRASYKFHYPKYYSEYTYLIPLSKLQDGSDFLADDTCVFGLDILRARKFKPTRNAKGVTIQHVFLQTKGFMQGNYTWNIEDSKLDLKSIICSPKFDIGEHKWYLRVDPYGDYRNRDYVSIYLCLDDNSNMPPIESAIMAEFIISILNQKNGKHSQQKARTVFSCKGIAWGWHKFIRRDQMKNTNAGFVVGSSWTVQAEVTVIGSSSHA

SEQ ID NO: 144475 - protein, 111 aa, Oryza sativa
  Clone ID: PAT_MRT4530_45285C.1.pep
MVRMPAAHSRVYYFAQGHANGGGATAELAAATGPCALPALMLCRIEVVQFLVEQESDEILDDLCLLGGGGGDASESLEKHPKRSKLRVALLVRPQTHSIPLPPRPHEGPES

SEQ ID NO: 144476 - protein, 90 aa, Oryza sativa
  unsure (1)..(90): unsure at all Xaa locations
  Clone ID: PAT_MRT4530_45286C.1.pep
FVFFIFKLFYFTFFLISFFYFVFFYFFFFFLFLYLFIYFSIFIXFFFYFLLYNYFFLIFFFFFFYFIYIFLFFFLYFYFINFFFIIFLNF

SEQ ID NO: 144477 - protein, 166 aa, Oryza sativa
  unsure (1)..(166): unsure at all Xaa locations
  Clone ID: PAT_MRT4530_45287C.1.pep
EKSGLFRWLLQFGGFKERLLADDLFLAKVAMECGVGIFTKTAAEYERRRENFVKELDFVIADVVMAIVADFMLVWLPAPTVSLQPPLAVNAGSIAKFFHNCPDNAFQVALAGTSYSLLQRVGAIMRNGAXLFAVGTSASLIGTRVTNALIKARKAVSKDFEGESED

SEQ ID NO: 144478 - protein, 70 aa, Oryza sativa
  Clone ID: PAT_MRT4530_45288C.1.pep
QVISELRFEARNNFHRSHGGGGQVTSLRITWVDVTGEIIEFTHTSVINGGGAQLKRWGQLSSIKLVFWAV

SEQ ID NO: 144479 - protein, 138 aa, Oryza sativa
  Clone ID: PAT_MRT4530_45289C.1.pep
MLVFSRLIQMILFLDGSDISDQALKYLGLGTCPLASLSLRGCRKLTNDCIPLLFAGSVKQSLQVLDLSRIPGITDDGIMLLARSRTPIIELRMRENPKIGDAAVMALASMLVDGGTHGSSLHLLDLYDCGAITPLAIR

SEQ ID NO: 144480 - protein, 84 aa, Oryza sativa
  Clone ID: PAT_MRT4530_4528C.1.pep
SLKHLSKKMTEIQRSYLKQEGGISLSSKKILAAKTTKGIRYYKNVGLGFKTPREAIEGTYIDKKCPFTGNVSIRGRIIKGVVVS

SEQ ID NO: 144481 - protein, 70 aa, Oryza sativa
  Clone ID: PAT_MRT4530_45290C.1.pep
MHTQHRVMTSTDYALCFHLCRGTVKKKMEPATVIIRFSYYGDWRVQNVSQGYLKQLHRTNDWRVPNVSQG

SEQ ID NO: 144482 - protein, 622 aa, Oryza sativa
  Clone ID: PAT_MRT4530_45291C.1.pep
MDSALPSAVLATILSRLDVRSLVAASAACRCLRSCASHALSFLPSFHLSEVALTHELLRPLMPLNPSLRSIRLDCARLEDAAIDCLARPDLHELMLLNCDNISGRLLCELGATCQELRVLSLNALAERRGLPISFSDLQQLLNGCSQLESLRLALDFSMFDDPNFSHVWASASEALTSLEIGYIPMTMLLELLTVAMESQRCMHHVKEPVFFPSLQKLCLTVDFITDHLIGSLSTALPSLTHLDLQDAPIIEPTTSSDLTNAGLQQINPNGKLKHISLMRSQEFLFTSFRRVNDLGILLMAEKCSSLESVCLGGFSRVTDTGFRAIIHSCSGLHKLRVSHGSQFTDLVFHDIIATSLCLTHVSLRWCNLLTDVGIERLSFNKDLNVLDLRDCRSLGDEAVRSLSCLPKLQILFLDGSDISDQALKYLGLGTCPLASLSLRGCRKLTNDCIPLLFAGSVKQSLQVLDLSRIPGITDDGIMLLARSRTPIIELRMRENPKIGDAAVMALASMLVDGGTHGSSLQLLDLYDCGAITPLAIRWFKKPYFPRLRWLGVTGSLNRVMVDALVRSRPFLHMACRGEELGTFNWDRSSDWYRHDDDDLDELEQWILNGEPVSDTETITEE

SEQ ID NO: 144483 - protein, 39 aa, Oryza sativa
  Clone ID: PAT_MRT4530_45292C.1.pep
KKKKKKKKKKKKKKKKKKKKKKKEGVKDKKIKITYMHQK

SEQ ID NO: 144484 - protein, 484 aa, Oryza sativa
  Clone ID: PAT_MRT4530_45293C.1.pep
MVMASAGVNMPGGDGDHPPAAAQECHRLRRRRYVPAAAAASEDGDNSSNGGGEKRSLPASSASPSPSPTSSAASSDCSSDRDDDGCSSTAGAAARRLPLPSGASTAAAVWPVAFGSVSLAGRMRDMEDAVSLRPSFCTWLDGSPMHFFAVFDGHGGPHVSALCREQMHVIVAEEMVAEAAALRQRQPAAMEEEEEERAVAGGAVAELRPGGRAGGGGVRVRARHRAGVPCPLSGQTGAIIGSTAVVALLVRDRLVVSNCGDSRAVLCRAGDPLPLSSDHKGLNPSLSWRGTRVALARGTWGDKTGQSVGPAALLLSGGAHPDRPDEKARIEAVGGRVVYLNGPRVRGILAMSRALAEGSSLLGPKGDKYLKPEVICEPDITITVRTVDDECLILASDGMWDVISNETASDVARQCLEDGSPTSGRRAARSGEAASSSAGAPAAAVGQESEPRCYRAAALLARLALGRESSDNISVVVIDLKGRG

SEQ ID NO: 144485 - protein, 137 aa, Oryza sativa
  Clone ID: PAT_MRT4530_45294C.1.pep
MGGLFNVRNCFCFAAGKSDASRGGDRKKNVGANKKEINQPPATSTGGKRRLATTPAAATTRADVRPKLQPTTSSRPAAGAAAVRADTKPRKHPAAATARAHRGVEHRRRAASRQTTPAKDESANFMLMTFTTLIFLM

SEQ ID NO: 144486 - protein, 394 aa, Oryza sativa
  Clone ID: PAT_MRT4530_45295C.1.pep
MQLILLLSKPRTLQLFPLLLCLLLLPCLSQPLPSPSPSPSPSPSASPAPPPSLPLSPFNERLEAAYVAFQAWKHAITEDPKNLTEDWCGPFVCNYTGVYCAAAPDDPHVLTVAGVDLNHGDIAGCLPDHLGLLADVALLHLNSNRFRGTLPPSMQHMRLLFELDVSNNLLAGAFPAFLTSLPGLKFLDLRFNAFDGELPAAVFGRRLGLDAIFANDNRFNVSLSSASLTNSTASVIVLANTRLAGCLPPSIGDMADTLVELILLNTSISSCIPPEIGKLKKLRVLDLSHNELAGELPASVGDMESLEVLNVGHNMLAGEVPEAICELPRLRNLTIAGNYFCDEPVSCLHVPLRDDRMNCIPDWPHQRSPEECIAFAHRPPPHCAADGCIVIPPP

SEQ ID NO: 144487 - protein, 105 aa, Oryza sativa
  Clone ID: PAT_MRT4530_45296C.1.pep
GPKGFENPPLSVGGAMDPLVNVAPHFYAFKKKKTGEINVLSKRKEGGFGFFVPKGGGFFPKGAIPNFGPPPPPLGAKPLPPRDPPPHLVNIFKPAPGALKIPGFN

SEQ ID NO: 144488 - protein, 399 aa, Oryza sativa
  Clone ID: PAT_MRT4530_45297C.1.pep
MESLLASPSVYRASFPCASSASRSPSRARLAVTPAGAGARARARSLLRCGAKDSILEELAQDDMVNAVELAQWENGKSINDIAASQGIRIRRHCRPNVPLKEIEEELGAPRNILEKIIWDKEVEVAEGHAKKPLKEVIEAAGQAPPARDFYGALASAFKRNGMPALIAEVKKASPSRGVLRENFNPVEIAQAYEKNGAACLSILTDEKYFQVALELDVLMDLELEHGSFENLAKVRKSGVKCPLLCKEFVIDKWQIYYARSQGADAILLIAAVLPDLDIKYFLRICKELGMTALIEVHDEREMERVLNISGVQLIGINNRSLETFVVDTSNTKMLLDMHGDTIREKGILVVGESGLFNPDDVAYVQNAGVSAVLVGESLVKQDDPGRAIAGLFGKELLH

SEQ ID NO: 144489 - protein, 74 aa, Oryza sativa
  Clone ID: PAT_MRT4530_45298C.1.pep
LLLPFCGKWLGYRACSYYRIFSWFMCRSNVTAMFSRSVDWGWVMLYISVVRRVLGKNRVPPSLIAAGFKQTSAR

SEQ ID NO: 144490 - protein, 259 aa, Oryza sativa
  Clone ID: PAT_MRT4530_45299C.1.pep
MMANARFQKQALLPPRSPFPAAVGAAPSPSPHAELGPIARPRDAPHRHGHQRTSSESVLIDEQPSWLDDLLAEPEAPARPHGRPGHRRSSSDSFTLFDGGASAAAAGMYDNVFDGMRGRGGGGQQVGSWGAAPEFFPEQSSFGRPQGQGGRPWDSRLMLRQGGGGGGGMPVPMNGGHHGPPSAFGDHGHGSLPNGVDRKGPGDSAHDQRMGAERKEGAHLRHSQSEADTKRAKQAYLVAITTWLEIELMPKILACTLFK

SEQ ID NO: 144491 - protein, 454 aa, Oryza sativa
  Clone ID: PAT_MRT4530_4529C.1.pep
MASSLASASWVVLPPVQARVAAAVAVGPTCRVLLAYTPLLSGSARRRVVGRPLAPPRCSALEDPGPSDGGEGNGRVVEEGEEEVVRRKEQPRRRQRRRPVWRRILFASKKTRSIIILNALTVIYASDIPVLKEVEALTDPAVFNMVRFVVSAIPFIPFAIRAIGDRHVRNSGLELGLWVSLAYLCQAIGLISSDAGRASFLTAFTVIVVPLIDGIFGATIPKLTWFGAIVSLLGIGLLECGGSPPCVGDVLNFLAAVFFGIHMLRTEQISRSTDKKKFLALLSFEVLVVAFSSVLWFLFKDSYVDVNDTSFESWTFGMFLDTATSFPWIPALYTGVFSTVLCMWAEMVAMGDVSATETAIVYGLEPVWGAAFAWFLLGERWDNAAWVGAALVLCGSLTVQLFGSAPEKSKKVKTRSCNTLETPLKRQDYLSLSAIPVDSRKNIGSRLERKDKTL

SEQ ID NO: 144492 - protein, 124 aa, Oryza sativa
  unsure (1)..(124): unsure at all Xaa locations
  Clone ID: PAT_MRT4530_452C.1.pep
HPSQPPITTHPQLSPPAHRNHPSPVFALLAYSLACSASAQLPHLPRSKSIXQYQLQSPVLLXSNSVLSPHNESVXRQQYGIAASPFLQSAAFSHXTNNQVWQQLALVAQQSHSSPHINISFQRP

SEQ ID NO: 144493 - protein, 441 aa, Oryza sativa
  Clone ID: PAT_MRT4530_45300C.1.pep
MQHQQRMKQAAAAAQQQQMMQQALLMQQQQAAAVAAAAHQQQAPLFPPHHPHPGLLAAPQIEPIVSGNLPPGFDSSTCRSVYVGNIHLQVTDSLLHEVFQSIGPVEGCKLIRKEKSSFGFVDYYDRRSAAIAIVSLNGRQLFGQPIKVNWAYASTQREDTSGHFNIFVGDLCPEVTDAALFAFFAGFTSCSDARVMWDQKTGRSRGFGFVSFRNQQDAQNAINELNGKWLGNRQVRCNWATKGANAGEEKQNTDSKGMIELTNGSSEGGKDNANEDGPENNPQYTTVYVGNLPHDVNSNDVHRFFHSLGVGSIEEVRVTRDKGFGFVRYSTHEEAALAIQTGNGQLIGGRQIKCSWGSKPTPPGTASAPLPPPAPAPFNPGMSATDLLAYERTLALSKMAANPALMSQHAALKQAAAMGMGAGASQAIYDGGYQSANAVFY

SEQ ID NO: 144494 - protein, 162 aa, Oryza sativa
  Clone ID: PAT_MRT4530_45301C.1.pep
MSAFIAFFFLLFLFLFLFLFSHISPSTRGSDGSPRTRGPLAHLLSADFSSKTEQALHLELHLDKPERISIQMPSPILASDKSKGYQLRQNDDVIGRQQGSVQPRCVQLNETFGDAESRMADECEKIGRLLVHQELNKVFVLPIIEVSRSKNTNESLYGNTVL

SEQ ID NO: 144495 - protein, 70 aa, Oryza sativa
  Clone ID: PAT_MRT4530_45302C.1.pep
PTRPIQSPIPIGHRIGVWEAAMAMRCCCCRSRALAGAYPTRRSICCSSPTSASDTTPTRRSTGSVYTNIQ

SEQ ID NO: 144496 - protein, 408 aa, Oryza sativa
  unsure (1)..(408): unsure at all Xaa locations
  Clone ID: PAT_MRT4530_45303C.1.pep
MAPPAAGAAIPRDALLRIAAPLRDSLAAAPYAPPEGSSTSTKSLLSSLLPSSHPQAPAGGGGARSKEAAGLLLFCAAARAASPEYPALHWVPVALSDAAAAAVEEMAAAGGWGDVGEMVVGMMPEVVPPLKDVVKATCVDTEDEEIGKEKPPKEHAVVAAHQFRWLVSQVTYPKLGDLCWLVIPCALTALDHWSPEVKEQGMVSFMHIAKSVKATELNLYEDAILDACCHNIPADDELWYRAVEFFCIGSRYDRMLAEMLGHLERQPLNKKRRVAWLTLIGPVFEAMGLFLLAHFRLLFSLFFQWMHADDDKTVLLVLERIHEVIKLTWIRKSPYTSRLVDELVLLYKESATRSSREVVWNHILEMLATLQKXKGQQFEEAWKKHEVDPDLTMLLSCFNELCTQNHSS

SEQ ID NO: 144497 - protein, 188 aa, Oryza sativa
  Clone ID: PAT_MRT4530_45304C.1.pep
SLLLFFFFRASAGLHGGALAHQFRVHTGALAAPRHQRAHPYTSAARRCPPLPHPRLVVVARCGSARCAVRLLLPLAVFVNLLPRRAQRPLLLCRPELRALAACCWLHRWLTRSHGAGWERGRRPRRRVAGDRRWAAELGLAVTGEEYGSAVSSELVLGGPSRNSEPPFPLTTRHRYARESKNKNPHQN

SEQ ID NO: 144498 - protein, 90 aa, Oryza sativa
  Clone ID: PAT_MRT4530_45305C.1.pep
EFSASSCFHVTPFSPSHWISIKRFSRLIASSHTPSTPPFPFPSCVRAVASPRAARNCDRGTGASPSRSCVASWFPASSWTARLQTETTVH

SEQ ID NO: 144499 - protein, 194 aa, Oryza sativa
  Clone ID: PAT_MRT4530_45306C.1.pep
GLKIGEVFISQEGGHGQPVIFPHGPKNIATRAVFLVGPPLGTGNSAGPAISPLFKKGGPGTNHIFLDFKSAPPGGAVVCQKFSRVKIVASKIGFGLDDDFRVLPGKGGFGNRVFGTNYFPFSPPFFLGEKNWGRVFLTKQRPRSCRGGFPFFGNFFFSFWKAGPPIYGFFSRNFGLGYLSGPPLNWANSHFGFF

SEQ ID NO: 144500 - protein, 336 aa, Oryza sativa
  Clone ID: PAT_MRT4530_45307C.1.pep
MMRSPWMVFAWAAAMVAVAAASPVPTKLKVGFYEHSCPQAEEIVRNAVRRAVARDPGLAAGLIRMHFHDCFVRGCDGSILINSTPGHVAEKDSVANNPSMRGFEVVDDAKAIVEAHCPRTVSCADILAFAARDSAHLAGATVDYPVPSGRRDGRVSVSDEVLADNVPAPTFSLAQLVASFERKGLTADDMVTLSGAHTIGRSHCSSFTARLYNFSGEAGRTDPAIDPAYAAELKRRCPPATDDQMDPTTVPLDPVTPASFDNQYYKNVLKHRVVLNSDQALLDSPWTAGVVKLHSAVEKVFQVKFAAAMVKMGNIDVLTGDEGEIREKCFMVNNHY

SEQ ID NO: 144501 - protein, 255 aa, Oryza sativa
  unsure (1)..(255): unsure at all Xaa locations
  Clone ID: PAT_MRT4530_45308C.1.pep
MRCAHSPAPPPXPRSPHAPRTTRTRSPPRQTTRPPLAPTPARTRSPTRNTAPRPRATAARPGQRLXPHPAPRLHPRPARSTXSPTPRNRSPRPGPRGAGRPPRPSPXNRHARLAQAKPRQRTVARPPSCPPGARPSPPADGXSQPTQAAACPHAPWQHTPGFVCPLPPEATSPRPAPPRLPLXSPHAPXRVPSPPPQXRAPLPARAAXLTLPPAEPRQPRXPPAACTPAPXGPATTPAQXPPHRPGRPSPAPPPK

SEQ ID NO: 144502 - protein, 188 aa, Oryza sativa
  Clone ID: PAT_MRT4530_45309C.1.pep
DMYIKVESTRLDFIRRHQVEIRADLYKGVVDSIHAGESRASQVGKRTVLPASFIGGNRDMKRRYMDAMALVQKYGKPDIFLTMTCNPNWEEIIGNLEPGQTPQDRPDLIVRVFRAKLEDLKKQLLEKHILGKVIAYAYVVEFQKRGLPHAHFLLIMDGKYKLTSPEQYDCIISAELPNKHKYPELYEM

SEQ ID NO: 144503 - protein, 116 aa, Oryza sativa
  unsure (1)..(116): unsure at all Xaa locations
  Clone ID: PAT_MRT4530_4530C.1.pep
FFFFFFEQNCAFPGQHTAAITISSFSNICTGTVXSFTCPGSCNQAPAASKQLQQQLMCHLSSKSPKTLNAMPNCATCTQPAGFHTLQRLIIVVAANTRQSVPHHCTLGFSTPSHPA

SEQ ID NO: 144504 - protein, 531 aa, Oryza sativa
  Clone ID: PAT_MRT4530_45310C.1.pep
MKRCQSSRPTAAVAAVVAAVSMIIVLVSGTAIPSAAAAAAVEHTFVVSQVNMTHLCKEMAFTVVNGQLPGPTIEVTEGDSVTVHVVNKSPYNLTIHWHGVYQLLNCWNDGVPMITQRPIQPNHNFTYRFNVAGQEGEWWEKDLPQVDRNMTNGYFDDYSSGSTINGKLGDLFNCSGVLEDGYVLDVEPGKTYLLRIINAALFSEYFLKIAGHRFTVVASDANYLTPYSTDVVVIAPGETLDAIVVADAPPSGRYYIAAQPIQAPPPDTQTPEYATRGTLQYSSNSRNSSAAAMPEMPHQHDTMRSFYFRGNLTAGARLHRHGRRRVPARADESLFVTLGLGSVCRHGGASCKRGGNLKESIVVANVNNVSFHIPAAAATPILEAHYYHRLHAGAGEEEEELAERPPRAYNYTDQALTPFGPEEMRLEATSRAVVTRRFRHGATVDVVFQSTAMLQGDSNPMHLHGHDVFLLAQGIGIYDAARDEGKFNLVNPPRKNTVLVPNLGWAAVRFVADNPGAYRSIGFSCAHALYT

SEQ ID NO: 144505 - protein, 234 aa, Oryza sativa
  unsure (1)..(234): unsure at all Xaa locations
  Clone ID: PAT_MRT4530_45311C.1.pep
MDLDKSTSTNASLKKLQDDDALPGRGTMERETRGIEPEPVLGRMVAVEDYILYGFLPXLVLNFYGLSLLHLNPNSISFLSIFSYLCEAYIGVESFLDLFRFYYELRWMEPKKISGCVDFLLRDGLKLRYIPFXCPSSRSKWRARWFYLQIKDSDPVFVVPHLNHRGTNPCSDGVVPSNHRNHLAVAAIPFSTALDGGGAIPFSAALDGGGDFVLSSQAAHAGGVRAPSTRVVGV

SEQ ID NO: 144506 - protein, 154 aa, Oryza sativa
  Clone ID: PAT_MRT4530_45312C.1.pep
MRTLKDCNIQISYARFYASQNGSCEVDLFAVQSDGKKIVDQHKQRALCCRLRTELHRPLRVALVNRGPDTELLVANPVEVSGKGRPLVFYDITLALKKLHKRIFLAEIGRHVVGDREWEVYRVHLGEGDHSSLRSKIVDGVTNMLMGWDDTPPS

SEQ ID NO: 144507 - protein, 89 aa, Oryza sativa
  unsure (1)..(89): unsure at all Xaa locations
  Clone ID: PAT_MRT4530_45313C.1.pep
GRVGDKAIETYQAGLKHDPNNPXLLEGVKRCMEHINNANMGDFTQQEIHXPQIKAVQDPHIHNILTDPIILQVLFDLQEIPRALYEHLK

SEQ ID NO: 144508 - protein, 164 aa, Oryza sativa
  Clone ID: PAT_MRT4530_45314C.1.pep
MWGSADGGTPEVTLETSMGAFTIEMYYKHAPKTCRNFLELSRRGYYDNVIFHRIIKDFIVQGGDPTGTGRGGESIYGAKFEDEIRPELKHTGAGILSMANAGPNTNGSQFFITLAPCQSLDGKHTIFGRVSKGMEIVKRLGSVQTDKSDRPIHEVKILRTVVKD

SEQ ID NO: 144509 - protein, 142 aa, Oryza sativa
  unsure (1)..(142): unsure at all Xaa locations
  Clone ID: PAT_MRT4530_45315C.1.pep
MPPKKIAKERVAKRKEGGSEGEMVAEEGAEPSASXEGEARAALPLVLPSALPPSAPDAILSSQAPGAPSTAAFAQPATTSTAITTSQGNANLKAQAEGSAPSSSSTRCASTGVLRQXPAPAVAARPTPQVASAPVRLTAPQA

SEQ ID NO: 144510 - protein, 118 aa, Oryza sativa
  Clone ID: PAT_MRT4530_45316C.1.pep
MWGSADGGTPEVTLETSMGAFTIEMYYKHAPKTCRNFLELSRRGYYDNVIFHRIIKDFIVQGGDPTGTGRGGESIYGSAYFLLSSSFNLAKFEDEIRPELKHTGAGILSMANAGPNTN

SEQ ID NO: 144511 - protein, 90 aa, Oryza sativa
  Clone ID: PAT_MRT4530_45317C.1.pep
VLDNGGSNRHRKVLLDNIQGITKPAIRRLARRGGVKRIFALIYEETRGVLKIFLENVIRDAVTYTEHARRKIVTAMDVAYSFNARPYSLR

SEQ ID NO: 144512 - protein, 286 aa, Oryza sativa
  unsure (1)..(286): unsure at all Xaa locations
  Clone ID: PAT_MRT4530_45318C.1.pep
VAGAALYSSRRPRRPRRPRSGRPELAGQERPAWGGEGDAGGPPSSAQRDDDDTTAVLLSPPSRRRRLELLRVDVGGGRAAAAAAGEASSGRRGRGESKMFGFGHHGHHGQDQPPQHVGGGGAHQPTFKIFCRRPTRATSTRSRPTRATSTISAHGMKAAPLATPVTSGPTAPPLAAXEDQPEDAAATVLPHRRCRRPPAPPPPSFSLRLLVTASGKRESRAWQGRRAPPRAAAVTATTTTAVVLADDGGRGDGGLSGGGEGTGGGGGESRRRWVTREEDQLGIWCR

SEQ ID NO: 144513 - protein, 80 aa, Oryza sativa
  Clone ID: PAT_MRT4530_45319C.1.pep
NHVRGSEGKCNPWGITITTCHIIEPVASGKILGFYFALDDTTCVQGHAEIRHAMVWRHHGASWLVIAVLCGTCTIPSFIF

SEQ ID NO: 144514 - protein, 940 aa, Oryza sativa
  Clone ID: PAT_MRT4530_4531C.1.pep
MRDGEAFRRLPPPLLLLLLLAAGVARGQQTTAPPVVPDALNNLTRDVADYISHRFSFCVADPTEDWNEAFNYTSDLGFVQNCLAETRACPLGSYCPRATVNTTTGLCDPYKYQITPNTTGCGGADTWADFGSTEEMFCPAGTIADWVPPLKTVEHLVQGMLFVFLLIIYNCSGQFLTIREKRKARSRENAIQLARQQLKAHEGWKAAKRLARKHVNDMQSHLSRTFSRRRSFRQHLDSENSGHRLQEAPLFMNQELSDSAAFSAHQSTGEISEVMPSVVVDVSDDGEIVAGKDRSAPKGKHRSTHTQIFKYAYGEIEKEKVRQQENKNLTFTGVLSMVSEQQKEITRPLLKVEFKDLTLSLGKKKLLRSINGELRPGRVTAVMGPSGAGKTTFLNAVTGKVAGYKVSGSVLVNGRHDNIRSYKKIIGFVPQDDVVHGNLTVEENLWFSAKCRLSATTAHRHKVLTVERVIDSLDLQGVRSSLVGTVEKRGISGGQRKRVNVGIEMVMEPSLLILDEPTSGLDSSSSQLLLRALRHEALEGVNVCAVVHQPSYTLYNMFDDLILLAKGGLIVYNGPVKSVEDYFSTLGITVPERVNPPDHYIDILEGIVKPESGINAKHFPLHWMLYNGYEVPNDMKDDLKAIGEQRPHLGSSPSAGSTPHCLPHVRNAFAEERDRIEHHLSKPKDLSSRRTPGVIRQYKYYLGRVTKQRLREARLLAVDFLILGLAGICLGTIAKLSDPNFGMPGYIYTIIAVSLLCKIAALRSFSLERLQYLRERESGMSSLAYFLARDTIDHFSTIVKPIVYLSMFYYFNNPRSTITDNYIILLALVYCVTGIGYTFAICFNPGSAQLVSWSLAYNSLWVVVQKSFRHSSLHALYFGSVYVWSVLQNCCICGLDFSEEEMSRGQLHQLFTFDSFIILYSCKSVLILQMKYREYFTCVS

SEQ ID NO: 144515 - protein, 101 aa, Oryza sativa
  Clone ID: PAT_MRT4530_45320C.1.pep
MVRALGSPHLSPPRREICPCQGFYMRPRYAIECGRFRPLLCCTRVGGGSSSSGRLGEKPGKTRRVMGGGQGAGAQCSARGQNDILARLGSAQRTAASAMRT

SEQ ID NO: 144516 - protein, 122 aa, Oryza sativa
  unsure (1)..(122): unsure at all Xaa locations
  Clone ID: PAT_MRT4530_45321C.1.pep
DEQPYECGRGFDSHTPATVLSLWCGRKGLLPPPKEREIARALERNGGHXLLRVRDGPPKDSRQGQRMPTAAMINELLPEGMVXRTKGRGLTWPNREPEKEILAHAPTGGLETHWRGNSMVKS

SEQ ID NO: 144517 - protein, 41 aa, Oryza sativa
  Clone ID: PAT_MRT4530_45322C.1.pep
KKKKSLFSLTPTRPMILLNHPYMGLYYKPPFKRFFIWLQHT

SEQ ID NO: 144518 - protein, 356 aa, Oryza sativa
  Clone ID: PAT_MRT4530_45323C.1.pep
MAAALTLPPSLATLWPVRPQRGHFGATIGDPPPSSPSPSRCVAVGAYGGGGAGCAPCFAVFSHQHKLFYSQPSPPRAKLRLVGRIDGRKEEAAHHSRRQPSLQKEAAAKPASAVEAPTKKQKLAMERKEIDQERHCQSTESGIAAAKFKLQTCIGHMRRAGGRGSEAEGGDGSSRMETEKDDGVENCAPPSDSGRVKKLERYTPSTGTDAARGAPPEKATQTQPQPPTAPSAFPPSRPVHTKLQGARDKMFNKWFYSFTHGAPGIDLAAWLTPASRSTHQQANPVTDEKSLKGEAEEPAASSRASTDSGERGSSDGGEPVMRRSRQVGSAGMVFGKEGRGEGGGVQIRGKESYTTR

SEQ ID NO: 144519 - protein, 63 aa, Oryza sativa
  Clone ID: PAT_MRT4530_45324C.1.pep
DFPFDSILKLTQLAKVCPQKDPKLRPSIKSVVVALITLSSPSKFWDMNTLFENQGLVTLMSGK

SEQ ID NO: 144520 - protein, 353 aa, Oryza sativa
  Clone ID: PAT_MRT4530_45325C.1.pep
MGRAPCCEKVGLRRGRWTKEEDEKLARYIRENGEGAWRSMPKNAGLLRCGKSCRLRWINYLRADLKRGNISPQEEDIILNLHATLGNRRMEMHTEMLSATGFNLAQRKFPMLLTDDTDGGLSCLWSLIAGHLPGRTDNEIKNYWNSHLSRKGYEFLRGGGGGAVVDVDLSKLPGGGKRRGGRTGRSSSGKEKTRTKEKDKAPAPEAAHNDDGGGGGGGGIDNVSAASHSHREEQAQASASGLTSDGLEEGPLGLSEEMVSGPVGPVSPKPEVGQDGSSAESGCCGPSGSSGPTEAVGQDMGDKSMDWDLVGLDDGFANDDMWGSLSWDYGELVGPDGVHQGEVLSDLFFLGNL

SEQ ID NO: 144521 - protein, 1981 aa, Oryza sativa
  Clone ID: PAT_MRT4530_45326C.1.pep
MAEQAKAPDLSPSVSGDDGEPNPRRRARTPPPPPHQSPKQGEALERVERSAASPIAGDGGERRDGERRLLVYGDGSTPQGALQAAGALLRHPPVVPDPESPAQRWLDDVANLVMTAQQRLGTGGRSSTPRATGAATTGSVSSRRRARRAAAVARHSAATPSSAPPTRENQCGEPDARLDIERRRNDRCTPYATEGASSSRVSPRHGREDQPSVPPAGGVGCRAFVASLRNVRWPPRFRPTITEKYDGSVNPTEFLQVYTTGIEAAGGDDRVMANFFPMALKGQARGWLMNLPPASVHSWEDLCQQFTVNFQGTYPRPGEEADLHAVQRGDDESLRSYIQRFCQVRNTIPCIPAHAVIYAFRGASAAPGSAAQTGRRDRRRKKRSVHSGDEGHVLAVEGAPRATRKGRPASDKKKEAGAPSRERPAGKWCSVHNTSLHDLADCRAVKSLAERTRKWEEERRQERREDKSPAIPSGKRRSEARQKAPAVDIDDGDDDLGFQEPGATIATVDGGACAHVSRRSFKAMKRELLAAAPTHEATRRARWSEVSLTFDQTDHPPCVARGGQIAMVVSPTICNVKLGRVLIDGGAALNILSPAAFDAIKAPGMVLRPSQPIIGVTPGHTWPLGHIDLPVTFGGSANFRTERVNFDVADLSLPYNAVLGRPALVKFMAAVHYAYLQMKMPGPGGPISIHGDLKVALACFEQRADHLAAASKPEGGDERLGTSAPTAPRQRIATCDEVPEDALVSFLRANADVFAWRPADMPGVPREVIEHRLAVRPGARPVRQKVRRQAPERQAFIREEVARLLEAGFIREVIHPEWLANPVVVPKANGKLRMCIDYTDLNKACPKDPYPLPRIDQIVDSTAGCDLLCFLDAYSGYQQIRMAREDEEKTAFITPVGTYCYTSMPFGLKNAGPTFQRTTRISLGSQIGRNVEAYVDDLVVKTRNQETLLSDLAETFESLRSARIKLNPDKCVFGVPAGKLLGFLVSARGIEANPEKIRAIERMRPPSKLRDVQCVTGCMAALSRFISRLGEKALPLFKLLKRSGPFTWTEEAERALTQLKAYLSSPPVLVAPEPNEPLLLYLAATPQVVSAALVVERDEDNPHSARPHPVLIWPGSKQGGEAPEPNGGLRPLTTGVGPLPACQTVLGAPDPQEGPEATAGRPHLTPFDPEANPVRTRPGREQGEEAPEPNGGLRPLTTGVGPLPACPTTPGTPDPQDGPEATEGRPPLSSSDPEAIGTVDECAPRGHLDEERLGDTAPSEEDRPRRKVQRPVYFVSEALRDAKTRYPQAQKLLYAILMASRKLRHYFQAHRVTVVTSYPLGQILHNREGTGRVVKWAIELSEFDLHFEPRHAIKSQALADFVAEWTPAPETVSIPEASTDLSQLPHTAHWVMQFDGSLSLQGAGAGVTLTSPTGDVLRYLVRLDFRATNNMAEYEGLLAGLRVAAGLGIRRLLVLGDSQLVVNQVCKEYRCSDPQMDAYVRQVRRMERHFDGIELRHVPRRDNMIADELSRLASSRAQTPPGAFEERLTQPSARPDPLGETDAPDRPPRPVGVQASGPEGSAPRSLRLIAWISEVQTYLTDKTLPEDREGSERVQRISKRYVLVEGTLYRRAANGILLKCIPQEQGVELLADIHEGECGAHSASRTLVGKAFRQGFYWPTALNDAVDLVRRCKACQFHAKQIHQPAQALQIIPLSWPFAVWGLDILGPFRRAPGGFEYLYVAIDKFTKWPEAYPVVKIDKHSALKFIKGITARFGVPNRIITDNGTQFTSELFGDYCEDMGIKLCFASPAHPRSNGQVERANAEILKGLKTKTFNILKKHGDSWIEELPAVLWANRTTPSRATGETPFFLVYGAEAVLPSELTLRSPRATMYCEADQDQLRRDDLDYLEERRRRAALRAARYQQSLRRYHQRHVRARSLCVGDLVLRRVQTRAGLSKLSPMWEGPYRVIGVPRPGSIRLATGDGTELPNPWNIEHLRRFYP

SEQ ID NO: 144522 - protein, 107 aa, Oryza sativa
  Clone ID: PAT_MRT4530_45327C.1.pep
MKFLLVPYRARAAPAMDVIIHKIMDKLHMIIREHMMVDEHKKEGVHHKKDGEHKEGMVNKIKDKITGDHCDRKEHMVMNGKKTKNDNKHGKEGHNHDRHSSIICDRD

SEQ ID NO: 144523 - protein, 1653 aa, Oryza sativa
  unsure (1)..(1653): unsure at all Xaa locations
  Clone ID: PAT_MRT4530_45328C.1.pep
MAEQAKAPDLSPSVSGDDGEPNPRRRARTPPPPPHQSPKQGEALERVERSAASPIAGDGGERRDGERRLLVYGDGSTPQGALQAAGALLRHPPVVPDPESPAQRWLDDVANLVMTAQQRLGTGGRSSTPRATGAATTGSVSSRRRARRAAAVARHSAATPSSAPPTRENQCGEPDARLDIERRRNDRCTPYATEGASSSRVSPRHGREDQPSVPPAGGVGCRAFVASLRNVRWPPRFRPTITEKYDGSVNPTEFLQVYTTGIEAAGGDDRVMANFFPMALKGQARGWLMNLPPASVHSWEDLCQQFTVNFQGTYPRPASAAPGSAAQTGRRDRRRKKRSVHSGDEGHVLAVEGAPRATRKGRPASDKKKEAGAPSRERPAGKWCSVHNTSLHDLADCRAVKSLAERTRKWEEERRQERREDKSPAIPSGKRRSEARQKAPAVDIDDGDDDLGFQEPGATIATVDGGACAHVSRRSFKAMKRELLAAAPTHEATRRARWSEVSLTFDQTDHPPCVARGGQIAMVVSPTICNVKLGRVLIDGGAALNILSPAAFDAIKAPGMVLRPSQPIIGVTPGHTWPLGHIDLPVTFGGSANFRTERVNFDVADLSLPYNAVLGRPALVKFMAAVHYAYLQMKMPGPGGPISIHGDLKVALACFEQRADHLAAASKPEGGDERLGTSAPTAPRQRIATCDEVPEDALVSFLRANADVFAWRPADMPGVPREVIEHRLAVRPGARPVRQKVRRQAPERQAFIREEVARLLEAGFIREVIHPEWLANPVVVPKANGKLRMCIDYTDLNKACPKDPYPLPRIDQIVDSTAGQIGRNVEAYVDDLVVKTRNQETLLSDLAETFESLRSARIKLNPDKCVFGVPAGKLLGFLVSARGIEANPEKIRAIERMRPPSKLRDVQCVTGCMAALSRFISRLGEKALPLFKLLKRSGPFTWTEEAERALTQLKAYLSSPPVLVAPEPNEPLLLYLAATPQVVSAALVVERDEDNPHSARPHPVLIWPGSKQGGEAPEPNGGLRPLTTGVGPLPACQTVLGAPDPQEGPEATAGRPHLTPFDPEANPVRTRPGREQGEEAPEPNGGLRPLTTGVGPLPACPTTPGTPDPQDGPEATEGRPPLSSSDPEAIGTVDECAPRGHLDEERLGDTAPSEEDRPRRKVQRPVYFVSEALRDAKTRYPQAQKLLYAILMASRKLRHYFQAHRVTVVTSYPLGQILHNREGTGRVVKWAIELSEFDLHFEPRHAIKSQALADFVAEWTPAPETVSIPEASTDLSQLPHTAHWVMQFDGSLSLQGAGAGVTLTSPTGDVLRYLVRLDFRATNNMAEYEGLLAGLRVAAGLGIRRLLVLGDSQLVVNXDKTLPEDREGSERVQRISKRYVLXRAPGGFEYLYVAIDKFTKWPEAYPVVKIDKHSALKFIKGITARFGVPNRIITDNGTQFTSELFGDYCEDMGIKLCFASPAHPRSNGQVERANAEILKGLKTKTFNILKKHGDSWIEELPAVLWANRTTPSRATGETPFFLVYGAEAVLPSELTLRSPRATMYCEADQDQLRRDDLDYLEERRRRAALRAARYQQSLRRYHQRHVRARSLCVGDLVLRRVQTRAGLSKLSPMWEGPYRVIGVPRPGSIRLATGDGTELPNPWNIEHLRRFYP

SEQ ID NO: 144524 - protein, 1782 aa, Oryza sativa
  unsure (1)..(1782): unsure at all Xaa locations
  Clone ID: PAT_MRT4530_45329C.1.pep
MAEQAKAHNLSPSVSGDDGEPNPRRRARTPPPPPRQSPRWEEALERVEGSATSTSTGDGEGRRDGERRLLVYGDGSTPQGALQAAGALLRHPPVVPDPESPAQRWLDDVANLVMTARWRLDAGGRSSATKASGAATTGSASSRRMARRAAAAVRHSAATPSSAPPTREDQRGGPDARISIERRRNGRRTAHATEGASSSGRGDQPSVPPVGGVGCRAFVASLRNIRWPPRFRPTIAEKYDGSVNPAEFLQVYTTGIEAAGGDDRVMANFFPMALKGQARGWLMNLPPASVHSWEDLCQQFTMNFQGIYPRPGEEADLHAVQRRDDESLRSYIQRFCQVRNTIPCIPAHAVIYAFRGGVRHNRMLEKIASKELQTTAELFQLADRVARKEEAWTWNPSGSGVAASAAPGSAAQTGRRDRRRKKRSAHSDDEGHVLAVEGASRATRKGRPASDKKKEAGAPSRERPTGKWCTVHNTSLHDLADCRAVKSLAERTRKWEEERRQERREGKSPAVPSGNRRSEAKQKAPAEDIDDGDDDLGFQEPGATIATVDGGACAHVSRRSLKAMKRELLAAAPTHEATRRARWSEVALTFDQTDHPPCVARGGQIAMVVSPTVCNVKLGCVLIDGGAALNILSPAAFDAIKAPGMVLRPSQPIIGVTPGHTWPLGHIDLPVTFGGSANFRTERVSFDVADLSLPYNAVLGRLALVKFMAAVHYAYLQMKMPGPGGPISVHGDLKVALACMEQRADHLAAASKPEGGDERLGTSVPAAPRQRMITCDEVPRPADMPGVPREVIEHRLAVRPGARPVRQKVRRQAPERQAFIREEVARLLEAGFIREVIHPEWLANPVVVPKANGKLRMCIDYTDLNKACPKDPYPLPRIDQIVDSTAGCDLLCFLDAYSGYHQIRMAREDEEKTAFITPIGTYCYTTMPFGLKNAGPTFQRTTRISLGSQIGRNVEAYVDDLVVKTRNQETLLSDLAETFESLRSARIKLNPDKCVFGVPAGKLLGFLVSARGIEANPEKIRAIERMRPPSKLRDVQCVTGCMAALSRFISRLGEKALPLFKLLKRSGPFTWTEEAERALTQLKVYLSSPPVLVAPEPDEPLLLYLAATPQVVSAALVVERDEDNPHSAHPHPVLAWPGREQGGEAPEPNGGPRPPTTGTGPLPACQTVPGAPDPQDGPAATAGRPHLSPSGPEANPVPTRPGREQGEEAPEPNGGLRPLTTGVGPLPACPTTPGAPDPQDGPEATMGRPPLSSSDPEVVGTEDECVPRGRLDEERPRDAAPSEEDRPHRKVQRPVYFVSEALRDAKTRYPQAQKMLYAILMASRKLRHYFQAHRVTVVTSYPLGQILHNREGTGRVVKWAIELSEFDLHFEPRHAIKSQALADFVAEWTPAPEPVSIPEANSGPSQLPHTAYWVMQFDGSLSLQGAGAGVTLTSPSGDVLKYLVRLDFRATNNMAEYEGLLAGLRVAAGLGIRRLLVLGDSQLVVNXDKTLPEDREGSERVQRISKRYVLXRAPGGFEYLYVAIDKFTKWPDAYPVVKIDKHSALKFIKGITARFGVPNRIITDNDTQFTSELFGDYCEDMGIKLCFASPAHPRSNGQVERANAEILRGLKTKTFNILKKHGDSWIEELPAVLWANRTTPSRATGETPFFLVYGAEAVLPSELTLRSPRATMYCEADQDQLRRDDLDYLKERRRRAALRAARYQQSLRRYHQRHVRARSLCVEDLVLRRVQTRAGLSKLSPMWEGPYRVIGVPRLGSVRLATGDGTELPNPWNIEHLRRFYP

SEQ ID NO: 144525 - protein, 223 aa, Oryza sativa
  Clone ID: PAT_MRT4530_4532C.1.pep
LPQSILDAVNDMSFVTPSPIQQECIPHLLAGSDVLGMAQTGSGIRVVTVYGGQRYDIQLRALKQGSQVVVGTPGRILDHIRRGTLNLSTLKSIVLDEADEMLRMGFIDDVETVMAELPEKHQTALFSATMPEPIRRITRRFMSDPKEVKIQATQRSAPDITQSYWLVNGFRKNEALLRFLEVEEFDAAIIFTRTKTGTIDITELCERNGYRTAALNGDMTQQA

SEQ ID NO: 144526 - protein, 131 aa, Oryza sativa
  unsure (1)..(131): unsure at all Xaa locations
  Clone ID: PAT_MRT4530_45330C.1.pep
GTPTTTSSSILRRPLHCLLLPPLRAPPSPSLPLLPPLQAPPHPPLPPPPTARAPPIAVLCLLRCPLYLPKXTGLAAGGLFVAAHSALTAVLCAGGCVRRLHRRPLRPPSSELLPLSRAPPLQALLAAVLKV

SEQ ID NO: 144527 - protein, 126 aa, Oryza sativa
  Clone ID: PAT_MRT4530_45331C.1.pep
MAMTVEVLAGLAFMFSTSILLQILACALYNNWWPMLAALMYVLVPMPCLFFGGGSTQFLTSRDGGGWFNAAKFLTGASAMGSIAIPAILRHAGLIETGAMFIEFTSFFILVCTVMCFHRATLDEDW

SEQ ID NO: 144528 - protein, 101 aa, Oryza sativa
  Clone ID: PAT_MRT4530_45332C.1.pep
MEERMAAGEAKTVATDTERKPTRTAPTVRRTTSAEEKTPPSVYRSASSALFPRRPLLVLPPFQPPPHGSRRRRRWGGHRWVAALGRRQRDWGGGLEETWVP

SEQ ID NO: 144529 - protein, 56 aa, Oryza sativa
  Clone ID: PAT_MRT4530_45333C.1.pep
VVGLYTVLLGKRIEEEGISSQGGNAEETARSDLEEQETAAPVPASQDVKEKVDATN

SEQ ID NO: 144530 - protein, 94 aa, Oryza sativa
  Clone ID: PAT_MRT4530_45334C.1.pep
LPAVDNSWCRCEAITHMLGGIYREPGAPDVGPPMSKVFRGCRKGDLERAAASLPGFCNVDIPNGGGGVCYWRARSGSKLGYCSKLGMYVAPPPK

SEQ ID NO: 144531 - protein, 60 aa, Oryza sativa
  Clone ID: PAT_MRT4530_45335C.1.pep
LVAMLTSESTNCSNNVICYFIFCAALQNSDQFQIIIHEACKYLIWQNSDSLTNLYNIDIK

SEQ ID NO: 144532 - protein, 423 aa, Oryza sativa
  Clone ID: PAT_MRT4530_45336C.1.pep
MGYWIINNGEQVRFWEDKWLVMVPLNVCFRRALVGASPSGARTAALPASSAHAAAARRVVRPTRPPPPPPQNFSVSTGVATRRVVPSRPPPPPPPQNCSVSTAVAARRVVPTRPPPPPPPPPPPPQINYSVSTAAAARSSGHHVFRIRDYSLLEAITPNGKSIKSTSFAVGGHSWHVEYYPNGYDADHTDYVSVFLVLEDDIAAAGGAGEPVNVQLRFRFVDASSNPGRPWTPPPPPPPSELADMRGEKVRDFDGQGNGWGTVAFKKKEKLEREGLIVEDGLAIRCDIVVITQSCTATTTTEASLAAAAAASSSSEEMVSPTTIEDKVVNPTEQCNDHHHRVIQIDGMKPPSCSTRSASSTILEQLLRNHHRATLATMAMECHWPPQSLSSSNVGAKSCFAAVALERCSIAHCCHPLSAIREL

SEQ ID NO: 144533 - protein, 102 aa, Oryza sativa
  Clone ID: PAT_MRT4530_45337C.1.pep
QGRALPPLWRARLGGNRSLIRWLQRTLISGSSSLRRQFRQEEECSLAHKLQKAIDDDRYKDVDDCSELPSVTNQKQRNDIYQSPDADAKEKRVGRSSSDINH

SEQ ID NO: 144534 - protein, 591 aa, Oryza sativa
  Clone ID: PAT_MRT4530_45338C.1.pep
MAARSELLRPAFGEASPSLGRFVINPHSCSYRWWHMFLIMLVLYSAWASPFELSMEKAASIALVVTDLVVDVFFAIDIALSFFVAYRDTSTGLLITDRRKITMRYLKRPCFALDVASTIPLQIIYQLVTGKRQGLWGLLNLLRLWRLRRVSKLFARVEKDIRFNYLWTRLIKLLCVTLFALHFAACIYLWMAFNYKIKELTWIGSQIHSFEDRSVWFCYTCAVYWSITTLATVGYGDLHATNIGEMLFSIAFMLFNMGLTSYIIGNITNLVVRETSNTFKMRDMVQRVSEFGRMNRLPEAMREQMLASVQLRFRTDEQLQQEMLSELPKAVRSGVMKHMFKSAIESCYLFQGVSDSLIVQLVAEMKAEFFPPKANVILENETSTDCYIIISGEVEALTTLADGTEKHVKRIGPRGMAGEIGVMFSIPQPFTIRSRRLTQVVRISHIHLLQAVRPNTADGYIVFSNFIQYLESLKVQTKDVAFVSDHLWNGNSMVLRRATEVAVDESKEAAHKMLPCKEPKRVVIHEQLPNATSTALHPSPGKLVLLPDSMQELMKLSEKKFGKAVRGILTVEGAEVEDIEVIRDGDHLLFS

SEQ ID NO: 144535 - protein, 368 aa, Oryza sativa
  unsure (1)..(368): unsure at all Xaa locations
  Clone ID: PAT_MRT4530_45339C.1.pep
MAARSELLRSAFGKASPSLGWFIVNPHRYSYRWWHMFLIMLVLYSAWASPFELSMEKAASIALVVIXLVVDVFFAIDIAISFFVXLVTGKRQGLWGLLNLLRLWRLRCASKLFARVEKDVRFSYLWTRLIKLLCVTLFALHFAACIYLWMVFNYKIKELTWIGSQIHSFEDRSVWFCYTCAVYWSITTLATVGYGDLHATNIGEMLFSIAFMLFNMGLTSYIIGNITNLVVRETSNTFKMRDMVQWVSEFGSMNRLPEVMREQMLANGQLRFRTKEQLQHEHVKRIGPRGMVGEIGVMFSIPQPFTIRSRRLTQVVRISHIHLLQAVRPNTADGCIVFSNFILVSDFVEYLESLKVQTKEVAFVSGHL

SEQ ID NO: 144536 - protein, 42 aa, Oryza sativa
  Clone ID: PAT_MRT4530_4533C.1.pep
CFFKKMWYHTHIFNLSKSQYTLIFINPLPQKKPSQSFTLTNY

SEQ ID NO: 144537 - protein, 62 aa, Oryza sativa
  unsure (1)..(62): unsure at all Xaa locations
  Clone ID: PAT_MRT4530_45340C.1.pep
AIVACMQWCXXFDPLSQSYXQYQLQSHLLLQQQXLSXPCSEXVRQQYSIVATWPXWQPRTFN

SEQ ID NO: 144538 - protein, 46 aa, Oryza sativa
  Clone ID: PAT_MRT4530_45341C.1.pep
CRRWSCRSGGCRASRRWSLRPWKGAPANGGAAHRAGGNLCSSPSCV

SEQ ID NO: 144539 - protein, 57 aa, Oryza sativa
  Clone ID: PAT_MRT4530_45343C.1.pep
LARRRTSTAMIRRGRCRRRRRRSCGRRSRSPCHRRTPVRRRSAAAAAAPRRGRPRRR

SEQ ID NO: 144540 - protein, 32 aa, Oryza sativa
  Clone ID: PAT_MRT4530_45344C.1.pep
INNRSYPKKTIKYTHKSNFYKLINTISPFYNT

SEQ ID NO: 144541 - protein, 463 aa, Oryza sativa
  Clone ID: PAT_MRT4530_45345C.1.pep
MASSAGDPLLSGEAGDGRRRFVPSTIRLKTSVWSELGGAVGDLGTYIPIVLALSLASHLDLGTTLIFTALYNFATGLLFGIPMPVQPMKSIAAVALSSAHLTIPQIMSAGLAVAAILLFLGVTGLMTTLYRLLPLPVVRGVQLSQGLSFAFTAVKYIRYVQDFSRSSSASTSVPRPLLGLDGLVLALAALLFIILATGSGDDEDVNRDGTSRRRRSCSRVPAALIVFALGLVLCFVRDPSILQDLRFGPAPLGLVKITWDDFKIGFWEGAVPQLPLSVLNSVIAVCKLSSDLFPERAELSPARVSVSVGLMNFVGCWFGAMPCCHGAGGLAGQYRFGGRTGASVVFLAIGKLALGLVFGNSFVTILGQFPIGILGVMLLFSGIELAMASRDMGSKQESFVMLVCAGVSLTGSSAALGFISGIVLYLLLRLRDLEWDIRGLLGRWAAGRRQSTNEANEDGAGDA

SEQ ID NO: 144542 - protein, 133 aa, Oryza sativa
  unsure (1)..(133): unsure at all Xaa locations
  Clone ID: PAT_MRT4530_45346C.1.pep
MAEKPPPSPGTGVKPPVNKMGAKNPSAEVDPTNIVPITLDRLTAEQRDELEQMMSNVKNKFMDSFRRPAXGTHSFQXSYQSFWKKGWGFSRGPQKGPYRYASYLGDKVLNWLGNKSDIPQDGTXENLGADGNX

SEQ ID NO: 144543 - protein, 55 aa, Oryza sativa
  Clone ID: PAT_MRT4530_45347C.1.pep
TGGKKIKTGAGFETNVTYSYHVCQGLAERPALGVFQFRGQDRRKHFTVTAHSILS

SEQ ID NO: 144544 - protein, 114 aa, Oryza sativa
  unsure (1)..(114): unsure at all Xaa locations
  Clone ID: PAT_MRT4530_45348C.1.pep
APQQLRSLHLFCFFFLSKVHHRSLNLYRCVIPVPKLANRSFRSSNLFDCVIPVPKLADHSFRFSNLFSCVTLVLKFGFEYHLGQIERDRGDTTEQVGGPKXVICKFRDQDDAVE

SEQ ID NO: 144545 - protein, 107 aa, Oryza sativa
  unsure (1)..(107): unsure at all Xaa locations
  Clone ID: PAT_MRT4530_45349C.1.pep
SSSPVHINLYRCVILVPKLANRPFRSLNLFDCVIPVPKLADDSFRFSNLFSCVTQVSKLGFEYHLGQIGRDRGDTTEQVGXPKQVICKFKDRDDTVEQVGPVCHSHK

SEQ ID NO: 144546 - protein, 199 aa, Oryza sativa
  Clone ID: PAT_MRT4530_4534C.1.pep
MDNSMPVVSKIFCSSTLTTLMIRRRPTVVNGGGFVVTDLGNNVVFIVDGCGILGSKGELLVKDGDGEPILFISRKGGIIQALSTWNKWNGYSMDYQGKKKLIFSLSDPKSCIAKGAPIRIHIEPKRHCKNWDFEISGSFADRNCTITDCTGTIVGQMGKTEQIGTNDFYHVVVQSGCDKAFIIGAMAVLDNIHGESTRC

SEQ ID NO: 144547 - protein, 91 aa, Oryza sativa
  unsure (1)..(91): unsure at all Xaa locations
  Clone ID: PAT_MRT4530_45350C.1.pep
ALHHTTSLLGTAPRRDELVRRVGNSGGRITMRRTVXSAPDSIWYGPDAPKYLGPFSDQTPSYLTGQCPEDYXWDTAVLCADPETFARNLEL

SEQ ID NO: 144548 - protein, 136 aa, Oryza sativa
  unsure (1)..(136): unsure at all Xaa locations
  Clone ID: PAT_MRT4530_45351C.1.pep
ERGKREEEENRRKEKSKVHHRSLNLYRCVIPVPKLVNRPFRSLNLFDCVIPVPKLADHSFRSSKLFSCVTPVPKQDTQMIFKSKFRDRGGTTEQVGGPKXAIYKFRDRDDIVEQSWDSSLIYSFFDCGYFRQVQHL

SEQ ID NO: 144549 - protein, 83 aa, Oryza sativa
  unsure (1)..(83): unsure at all Xaa locations
  Clone ID: PAT_MRT4530_45352C.1.pep
MSFVISLTLLPIVNDAITGNNLISSWFGMVYSWFGDRTVQPGWLFRMVGPIQQGMLCSVGLILFXYLTVLLNSKICAKCCFCK

SEQ ID NO: 144550 - protein, 148 aa, Oryza sativa
  Clone ID: PAT_MRT4530_45353C.1.pep
MPSYIETIENVLVVWCKVHHRSLNLNRCIIPVPKLANRPFRSLNLFDCVIPAPKLADHSFRSSNLFSCVTPVPKLGFEYHLGQIGRDRSDTTEQVGGPKRVIYKFRDRDDTVKQTGELCTIYTRLKGSGGSGRESTPPMLLKLLQNAP

SEQ ID NO: 144551 - protein, 93 aa, Oryza sativa
  unsure (1)..(93): unsure at all Xaa locations
  Clone ID: PAT_MRT4530_45354C.1.pep
MSKVHHRSLNLYRCVIPVPKLANXPFRSSNLFDYVIPVPKLADHSFRSSNLFGCVTPVPKLGFEYHLGQIGWDRGDTTEXVGGPKRVIYKFRD

SEQ ID NO: 144552 - protein, 342 aa, Oryza sativa
  Clone ID: PAT_MRT4530_45355C.1.pep
MVEVIVEKKARRIVRGRWHVEASNEAAAAAPAVAAPAPRVVRVLCRDHDATDSSGDDDGEDDAPRRARLLVHEIHVARQPVAMSPAAASSSQRRRVGPMKRTESAVDATMDATAAAPERKFRGVRKRPWGKYGAEIRVSQQSARVWLGTFDTAEEAARVYDHAALRLRGPSATTNFPMTPAAPSPPPSRATYAGAASGYDESSDESQLVGSPVSVLRPMPARATAKKEAKEEDDSAPDILGISAGDGLISPFTCDVLNFPPPDEDMFGGGISFGEPTPPPMVFDDDCMARLGHAPNDDEHPVTSSSFLDGDLGDLPSWTEVDGFFSDVGGDDLFAAEPFPAL

SEQ ID NO: 144553 - protein, 108 aa, Oryza sativa
  Clone ID: PAT_MRT4530_45356C.1.pep
VLLSFFKKSKVHHRSLNLYRCVIPVPKLANRPFRSSNLFDCVIPVPKLADHSFRSSNLFSCVTPVPKHDGLKTLYQKFRDRGDTTEQVGESKRVICNFRDRDDTVEQV

SEQ ID NO: 144554 - protein, 196 aa, Oryza sativa
  unsure (1)..(196): unsure at all Xaa locations
  Clone ID: PAT_MRT4530_45357C.1.pep
EEEGPPRGRGKGGARPGNEPPPREGGKXTRPNPPPTGAGGPRPPPSPRTNRRPAPKXPGKRPAGPGDREKEGEKVRRPXHLLPPSSKSSXPRFAPPHDHAXPGTAPPAPGPPPNLPGTXPRRQPPGPXRRSPTPPGPRRSPSPRPLVSSRLWGPPRLLPRANMKEEGENSDGSGMVLILKVFIDPQLITRKVVLFF

SEQ ID NO: 144555 - protein, 55 aa, Oryza sativa
  Clone ID: PAT_MRT4530_45358C.1.pep
MAFMGHASLMGFLAKPVFHGANPSCFALRLRPEGDQMVQPKALMTCLQHAPHGQG

SEQ ID NO: 144556 - protein, 111 aa, Oryza sativa
  unsure (1)..(111): unsure at all Xaa locations
  Clone ID: PAT_MRT4530_45359C.1.pep
LKKLTNFLGFYCKVHHRSLNLYRCVIPVPKLANRPFRSSNLFDCVIPVPKLTDHSFRSSNLFSCVTPVPKXDGLKTLYQKFRDRGDTTEQVGGSKRVICKFRDRDDTVEQV

SEQ ID NO: 144557 - protein, 108 aa, Oryza sativa
  Clone ID: PAT_MRT4530_4535C.1.pep
MSWHRAGVLLLGAQSCLPVPGVPAVGGVGSVLLSMARMGWKLCHVFRPYTVVGKPSKPPFSPEKEAKFEAVGCLFRGKLISILADNIVDVYIHMHSGNDMWDALEANF

SEQ ID NO: 144558 - protein, 103 aa, Oryza sativa
  Clone ID: PAT_MRT4530_45360C.1.pep
MKTFKIRTMPLPSLFSSSSLMLARGEGEAAPTSARRREDGERASGEDEEALASGERTRRLSARMVAGRLWRGTGAGVAVAGEHGRGGAQIWWKSSSTMAEEDA

SEQ ID NO: 144559 - protein, 1855 aa, Oryza sativa
  Clone ID: PAT_MRT4530_45361C.1.pep
MDSSGDGGDEGAGAAPAGVEEESPAPASAPAPAPASASAPVPAAVGGGAGASGSSGKVKRVMKTPYQLEVLERTYTEDPYPNETMRAELSVKLGLTDRQLQMWFCHRRLKDRKPPPKRQQLEEEVPVPVMAPPPVLPPPLPHSELTMGTGGMYGEPLLSPSSRRGTGRPSAVPRISASEVARRYYEPPQVMLPPLAPMQLTRAEHRVIDSVERLIGEPLREDGPVLGVEFDPLPPGAFGAPIVPEQQRQPFRSYEAKMFSGHDTKHIKASAFLPSIDPFVPSTVSGKRKSMTGSSSHLGSRAVREYQFIPEQSSDIYERTTQSRYYDVLTEASDSRMSTGSRFLHGVEKAPGYTFHGQISGSSHLSLHGRPPVFSSGSTDYEMDPSNINSSSVPNESQYGIPQVAGFENSVAPSDRMVYHDDDAFRMERKRKHSEEVKIAKEVEAHEKRIRKELEKQDMLNRKREEQVRREMERNDRERRKEEERLLREKQKEEERFQREQRREHKRMEKYLLKQSLRAEKMRQKEELRKEKEAARQKAANERATARRIAREYMELMEDERLELMELVSRSKGLPSMLSLDSDTLQQLDSFRGMLRQFPSEIVRLKVPFSIKPWTSSEDNIGNLLMVWKFFITFADVLGIPSFTLDEFVQSLHDYDSRLLGELHVALLKSIIKDIEDVARTPSVASGMTANPGGGHPQIVEGAYDWGFNILAWQRHLNLLTWPEILRQFGLSAGLGPQLRKRNAENVNNHDDNEGRNGEDVISILRSGSAAVNAAAKMKERGYGNRRRSRHRLTPGTVKFAAFHVLSLEGSQGLTILEVAEKIQKSGLRDLTTSKTPEASISAALSRDSKLFERTAPSTYCVKTPYRKDPADSEAVLAAAREKIRVFQNTISECEEVEKDVDDAERDEDSECDDADDDPDGDEVNIEEKDVKTSLVKAQDGGMPTAVGDIKKETNSIVNSLTTPLIHTKSSESSSLRTLDKSVQVRTTSDLPAEISSDNHEGASDSAQDAEIDESNQGESWVQGLAEGDYCDLSVEERLNALVALIGVATEGNSIRAVLEERLEAASALKKQMWAEAQLDKRRSREEFSSKMQYDSGMGLKTDVDQQNTLAESNLTPVHNLVKDSNGNGSLVNNELPVDQQSQPNACSVVHERNGVRQEFSANPENLSGQQYVTSEKTRSQLKSYIGHKAEQLHVYRSLPLGQDRRRNRYWQFSTSASPDDPGSGRIFFESRDGYWRLIDSIETFDALVSSLDTRGIRESHLHSMLQSIEPTFKEAIGRKRCASIEPSAGRVLKNGTSEIISPNHSNEFGSPCSTLSGVATDSAMAYSDSFRIELGRNDVEKTAISERADLFIKWMWKECNNHQPTCAMKHGKKRCSELIQCCDFCYQIYLAEETHCASCHKTFKSIHNISEHSSQCEEKRRTDPNWKMQISDYSVPVGLRLLKLLLATVEASVPAEALEPFWTDVYRKSWGVKLYSTSSTKEVFEMLTILEGAIRRDFLSSDFETTTELLNLSTQDSASRNTVPRSGSADVLPWVPDTVAAVVLRLLDLDSAISYTLRQKVGSNKERGAGEFMKLPPRYTPAKTKQETEPMGTGFDRQETWLTPSNGRGGRGGRGRGSRGGSRGGRSRSRGGKVPRGISSSPKIEFRGYSASAVSSEKAPRKYARRGRNRGRGRGLRTVRPRQPSDIGARSIPKPNLLGSFSMLRNAKHTTAMESPQSSGAEEWGLERRPSYVKDDEDNSASQSEESSEENSEPMNEEYDELLPDYSRDNSGSSPLQMMDDGSDDNEEDAEGDEDGEEDGEDYDAEQHVDEDNDDAEMGEDDVEDNDDGDGGGGGAENGDEDEDGTSYSSEYSE

SEQ ID NO: 144560 - protein, 112 aa, Oryza sativa
  unsure (1)..(112): unsure at all Xaa locations
  Clone ID: PAT_MRT4530_45362C.1.pep
KVYHWSLNLYRCVIPVLKLANRPFRSSNLFDCVIPVPKLADYSFRSSNLFSCVTPVSKQDGLKILYQKFRDRDDTVEQVXGPKRSIYEFRDRDDTAVQGAQLCFIFSLILIS

SEQ ID NO: 144561 - protein, 114 aa, Oryza sativa
  Clone ID: PAT_MRT4530_45363C.1.pep
LITHAITPAIIRAITSPPHMGGYKCGLNSVRIKVADSVRLSVRFTCRITSRTSSRCSSTCSRSCTRRCRPPRSPSSSRSLWLRQSWCLTWCLGSCKGCCRCSTSPRSCKIWLDN

SEQ ID NO: 144562 - protein, 76 aa, Oryza sativa
  Clone ID: PAT_MRT4530_45364C.1.pep
KSKVHHRSLNLYRCVIPVPKLANRLFRSSNLFDCVIPVPKLAEHSFRSSNLFSCVIPVPKLGFEYHLGQIGRMKSF

SEQ ID NO: 144563 - protein, 217 aa, Oryza sativa
  Clone ID: PAT_MRT4530_45365C.1.pep
AGARDALRRRRRRGRPPPPPPRHAFPRRRYSLPRRGRRQVRSRSRRRRPRWRPARVGQAAPPCAAPPRSCTPPAASYNNAITDRRRTTVAAYISIRPLMVCNATGVLSEGPRLLQHGFHDPVANVGLTKFVSDLFFVGLFYHLYNQVATNTLERVAPLTHAVGNVLKRVFVIGFSIIVFGNRITTQTGIGTCIAIAGVAIYSYIKAKIEEEKRAKSA

SEQ ID NO: 144564 - protein, 91 aa, Oryza sativa
  unsure (1)..(91): unsure at all Xaa locations
  Clone ID: PAT_MRT4530_45366C.1.pep
MTPAKNGRTPLGLRQHHRDKTPKTKPPRWSRHPGCRHRPSKXMWFSPREAYRERKRVTLDNAXKEVTTPEDIAAAGPVNYRTRLLPGTLQP

SEQ ID NO: 144565 - protein, 109 aa, Oryza sativa
  unsure (1)..(109): unsure at all Xaa locations
  Clone ID: PAT_MRT4530_45367C.1.pep
LHSGDVFFFSKDHHRSLNLYRCIIAVPKLVNRPFRSSNLFNCVIPVPQIAYHSFRFSNLFSCVTSVPKLRFEYHLGQIGRDRDDTVEQVXGPERSICEFRDRDDTAVQV

SEQ ID NO: 144566 - protein, 308 aa, Oryza sativa
  Clone ID: PAT_MRT4530_45368C.1.pep
MPALGTLSGGAAGVAGLLRLRRATPSPAVATPFPAAAAARCAAAAAAVVPDGGQLVWGRQLRPALLLPAAGGLLQPPTSPSSSQAGRRQALRPPAAATSGEAKPAGFLEKYPALITGFFFFMWYFLNVIFNILNKKIYNYFPYPYFVSVIHLLVGVVYCLVSWTVGLPKRATDMDSTNVYAYISIIALIVCIPPAVIIEGPQLLQHGFNDAIAKVGLTKFVSDLFFVGLFYHLYNQVATNTLERVAPLTHAVGNVLKRVFVIGFSIIVFGNRITTQTGIGTCIAIAGVAIYSYIKAKIEEEKRAMSTS

SEQ ID NO: 144567 - protein, 57 aa, Oryza sativa
  Clone ID: PAT_MRT4530_45369C.1.pep
TKHSLVVFFEFFFWEKVFLCSFQDAVRCLFQCHWHRPQKSSKFLLGAYSNWTYTYSN

SEQ ID NO: 144568 - protein, 60 aa, Oryza sativa
  Clone ID: PAT_MRT4530_4536C.1.pep
MPETRSLSPYPMSWRSSPGSAAHTPSMHFSIAYHQPSPLPRPNGKEAINLFTLKHDELPT

SEQ ID NO: 144569 - protein, 38 aa, Oryza sativa
  Clone ID: PAT_MRT4530_45370C.1.pep
MKPDQPPMDLVLKRERHSTGILDDTDKAYSSEKPPSDT

SEQ ID NO: 144570 - protein, 117 aa, Oryza sativa
  Clone ID: PAT_MRT4530_45371C.1.pep
MVVVVAPIAVASAGLGMLAGVAMASRSSNSSSSSGRTSSPAALLRWGAPEPAPRCAACGGTGREECRLCARWSDARGDCSGCRACAGTRRAPCRSCGGSGTGRRAPVRVSSSAPPSR

SEQ ID NO: 144571 - protein, 82 aa, Oryza sativa
  Clone ID: PAT_MRT4530_45372C.1.pep
MASTPAAGPNGVASPAGQAPSSSLPGFHEAPPSVLISRPSWIVRSEGEPIMPILSCSRRANGHNGEELIASYSKAVCHTYAA

SEQ ID NO: 144572 - protein, 129 aa, Oryza sativa
  unsure (1)..(129): unsure at all Xaa locations
  Clone ID: PAT_MRT4530_45373C.1.pep
RPTGQSQRTETARRRAKGAAAAPAADAXXQGXPXPAAGDAPTXGEHXEGTTXXGGRDDGGXXPAADXRTSTGRXGANRAXDKXTQPTDKGDGRRXGTAADTQGXXGKGRQXPHQHTXQXGQPATGKXAA

SEQ ID NO: 144573 - protein, 58 aa, Oryza sativa
  Clone ID: PAT_MRT4530_45374C.1.pep
LGGEPDHLVAKALGRQDAHLLEHYDVGVEASRQRALLMRDRWRPDIRIGIGEDVTGGW

SEQ ID NO: 144574 - protein, 109 aa, Oryza sativa
  Clone ID: PAT_MRT4530_45375C.1.pep
MVRSAARHAVYVLRRFGCVCESRAAAGRSLSNVRAGEPPAALREEKKKKRLFSFRMTEEERSRVFHASVIWGVVFGQIVIFTMHKPRSCKEIMAELEAKAAVSRQNSPN

SEQ ID NO: 144575 - protein, 1446 aa, Oryza sativa
  Clone ID: PAT_MRT4530_45376C.1.pep
MSQFRPSQHGSDSDAQMWQRQMLYKQLQEFQRQQQQQQLDHGGRMQNSFGQFQAPAKQSLADQFPTMMNEMPMNEPSSYAWSNGISLGGSRLGSNSQILNNGNPHWEQHHGASLGTSSFANGAVYSNIQNLMRPMGSVNNKVNQSSHSLPASMSKGSGNQYSQFPGFPANSHNAMARAGSDQSDMTARFASSINSFQNEHGLCEQVTSNNLQNFCENGSVLSDSSTQSQGGNLKTGSPVLVNHLQHGFHVQHFNGWMNQVECQSAPHVGPASSAASLDPTEEKILYGDDNNFTGLLGEDDSSDGVPGHDNSSGNGNSSIPVSAQGGSWSALMQEALQSTSSKNGLQEEWSSVNFQNRDQAFTNKMTSPDLEQRQHATLNSMNLHSAPPSAQPSPSHDGSSGTMNNLKFTSFQRATKSVYDHQEKFSYGSTSAAINNHTTTGANDGLFQPSLKQSHSGDCGSPEHVNLSIGVWAQQKPMLLKRNLNSGGERFMPQNAQGLGVLQQSSYNHNFNGESSNNQSNWNGRNSNCVNTYSINNFQQSNPDVNTVRVPNDGYSSKNTVLTSSSTGMFSPGQHQMMLGQSGGNFGSNNAPGQRPLPETSCSQGNNAEYGLAGFSQMYTNAISAEGHNSNNGQHLGISFSARGNSFSGMDAHNLGQSDQKTMGPSALLNHLSATSGISTGHFPTNSLCNNKLLSESIQPPNNQENLLGGSCQLAGHVGSTNEKIAMVEEQLTQHSTASKYSNEPPFRGYDGTLLQNPNKIVQTSQHMLQQFLQKVDSTNSVVSSNMPIRSDITPNQLNQPPLQGFGLKLAPPMQQQLTSGNLWTSHTSVDIKPADNSVPGEDQRQLPSTPGSTTSSGYPSRSSPFYSSDADNTGLSSGCLPQTKSLGQQYPVAEPKSAPVNSLPQQSLQGTAATMLKNVWTNISAQRLGGIQHNKITPNILQSMMFPSTIGDSTLRGCPKDDYQRMRVANLSDDATTTTNSGRQEIKRVVENDGSDIPNMDQMGDILLGKKNALQRPLMQHGIINSSQGENMAANIPNMGSSFNKVSTYGGISLHGSLAPSNSQQINYSLLHQIQAIKPVDSDPENTSGKRLKTTDMSCNASQVEWPGAERAPHGENNPLRLCTDKTEVPRISNLLPSDQMLRFAPRNSEDVTSTMPSQVQLRELTSTSNDMATARTDLQNQCSSLGTSSTENLIESGDKLMINPQISPWFQHGSNRNGHNLAMYSVRKTASPYNHPKVPWSMDTSSVSGHGLECSTSVRPEMPSGLKVSSSVRRPKKRKFKAPVLVSWNQIIDGHQKLADMSTLGMDWPEATNRLIEVEDEADIQEDALILYLPRKRLIMTSRLIQQLLPSIPAAILRAQAISMYQSVTYTIAKLTVGDACSMPSNSSLDTGTLISSGDKSYEQIENDKMRDRFTKAVEFFIPRFKKMENDFVRCLHMIPVKFT

SEQ ID NO: 144576 - protein, 90 aa, Oryza sativa
  Clone ID: PAT_MRT4530_45377C.1.pep
MKFRPLLARRRRCQRLPLPAAAADTSPAEHGDGDPTAPGGKSTRKVPQLVSQIQNRPSTAKPDIRRPPTYKTGHNRSLGGFHPGFVPRGG

SEQ ID NO: 144577 - protein, 112 aa, Oryza sativa
  unsure (1)..(112): unsure at all Xaa locations
  Clone ID: PAT_MRT4530_45378C.1.pep
NISKYYRDILNKSKVHHRSLNLYRCVIPVPKLANXPFRSSNLFDCVILVPKLADHLFRSSNLSSYVTPVPKLGFEYHLGQIGRDRGDTTEQVRGPKRVIXKFKDQNDTVEQV

SEQ ID NO: 144578 - protein, 240 aa, Oryza sativa
  Clone ID: PAT_MRT4530_45379C.1.pep
MDGTDKETTVAAAGTNGMEAAPAMAAGSGSCSCTVVEIDVDDEAEAAAAAPRRTRPRPSIYRVPNHIKNMTNPDAYRPRLVSLGPFHHGEAELQPMEKHKHRAVAHLVERSGKPLREFMAAVEEIAEQLRAAYEDLDDERWSGEEFVELMLTDGCFLLEVMRAFQLQREGKKEVEEGGDYEADDPVFSEHGYLYLRCDIISDVLLMENQLPLLLLDKLCHVAYADNLQYDVASSFNISTI

SEQ ID NO: 144579 - protein, 113 aa, Oryza sativa
  Clone ID: PAT_MRT4530_4537C.1.pep
IISYKGNAIISLKTNITGFRSYCDRTVLMSFACQVLYKTQRMFNYDDWQYRDQKLEMGSHPTDWVDGQMMCFRTLGRQLVMLQGEQIYCFLSIWPWQWTRLMVCDRKVHTRCM

SEQ ID NO: 144580 - protein, 56 aa, Oryza sativa
  Clone ID: PAT_MRT4530_45380C.1.pep
NFTTYIIKCLGEAVELATSIVISSGVAIDQSNRATTTFICSTPIYYFDHLYIIFLR

SEQ ID NO: 144581 - protein, 137 aa, Oryza sativa
  unsure (1)..(137): unsure at all Xaa locations
  Clone ID: PAT_MRT4530_45381C.1.pep
KSKDHHRSLNLYHCVIAVPKLTNRSFRFSNLFNCVIPVTKIADHSFRFSNLFSCVTSVPKLRFEYHLGQIGQDRGDTTEQVGGPKRVICKFRDLDDTVEQTNDDFGIVFALNXAGGGGRPATPDSNETKKNCINNIP

SEQ ID NO: 144582 - protein, 45 aa, Oryza sativa
  Clone ID: PAT_MRT4530_45382C.1.pep
GKINSKVNVCQTMQTYIGFKFNHNTIYPCLLYILYLALSYYGTTN

SEQ ID NO: 144583 - protein, 104 aa, Oryza sativa
  unsure (1)..(104): unsure at all Xaa locations
  Clone ID: PAT_MRT4530_45383C.1.pep
DFSKSKVHHRSLNLYRCVIPVPKLANRPFRSSNLFDCVILVPKLADHSFRSSNLFSCVTPVPSYLTQMIFKSKFKYRGDTTEQVGGSKRVICKFXDRDNTVEQV

SEQ ID NO: 144584 - protein, 99 aa, Oryza sativa
  unsure (1)..(99): unsure at all Xaa locations
  Clone ID: PAT_MRT4530_45384C.1.pep
KVHHRSLNLYRCVIPVPKLANRPFRSSNLFDCVIPVPKLADHSFRSSNLFSCVTLISKLGFQYHLGQIGWDRGDTTEQVGGSKXVICKFRDRDDIVKQV

SEQ ID NO: 144585 - protein, 66 aa, Oryza sativa
  unsure (1)..(66): unsure at all Xaa locations
  Clone ID: PAT_MRT4530_45385C.1.pep
MNRARGGRRLYRGIFSGGPYKQRLRRLIFAGGPYKXSLAKIDLRRRRLYGLPAKINLRRRTAPFTP

SEQ ID NO: 144586 - protein, 114 aa, Oryza sativa
  Clone ID: PAT_MRT4530_45386C.1.pep
ETPCLAVRVLYNIRSKVHHRSLNLYHCVIPVPKLTNRPSRSSNLFDCVIPVPKLADHSFRSSNLFSCVTSVPKLGFEYHLGQIGQDRGYTTEQVGGPKRVICKFRDRDDTVEPV

SEQ ID NO: 144587 - protein, 97 aa, Oryza sativa
  unsure (1)..(97): unsure at all Xaa locations
  Clone ID: PAT_MRT4530_45387C.1.pep
VHFVRSKVHHRSLNLYPCVIPVPKLANRPFRSSNLFNCVIMVPKFADHSFRSSNFFSCVTPVPKFXYKVFRPSCXRDRGDTTEQVGGPKRVICKFRD

SEQ ID NO: 144588 - protein, 127 aa, Oryza sativa
  Clone ID: PAT_MRT4530_45388C.1.pep
MPCCTQRAEGCTNRMRSRRPDVGVRLCTIGPWWAGPEMRCVILVPKLANRPFRSSNLFDCVISVPKLTDHSFTYSNLFSCVTPIPKLEYEYHLGQIGWDRGDTTEQVGGTKRVICKFRYRDDTVEQV

SEQ ID NO: 144589 - protein, 46 aa, Oryza sativa
  unsure (1)..(46): unsure at all Xaa locations
  Clone ID: PAT_MRT4530_45389C.1.pep
PWHGRGKAIGXDAGKKAMSRSSKGSLQHPVGRIARFLKAGKYPERV

SEQ ID NO: 144590 - protein, 48 aa, Oryza sativa
  Clone ID: PAT_MRT4530_4538C.1.pep
AQSAQWQPPSSNHTVFQLRNCQVMHTVLQHSDDRPTFSLSHTFQAFTY

SEQ ID NO: 144591 - protein, 144 aa, Oryza sativa
  unsure (1)..(144): unsure at all Xaa locations
  Clone ID: PAT_MRT4530_45390C.1.pep
LKFSTFPSSHYTRSFKKSKVHHRSLNLYRCVIPVPKLLNRPFRSSNLFNCVIPVPKLVDHSFRSSKLFSCVTPVPKLGFEYHIGQIGRDRGDITEQVRXPKRVIXKFRDRDDTIEQAGELPIASSALGSAGSSPPARGAPSPPA

SEQ ID NO: 144592 - protein, 78 aa, Oryza sativa
  Clone ID: PAT_MRT4530_45391C.1.pep
MEGEPRTAAGGGGGGAEEVEHWRENVRLFRDSVDGDRKAAATPQVIAGNPFGIKLLRLLPLRRRSLEQFEGLRPLLPL

SEQ ID NO: 144593 - protein, 148 aa, Oryza sativa
  unsure (1)..(148): unsure at all Xaa locations
  Clone ID: PAT_MRT4530_45392C.1.pep
IFREAAGINLLFSYKSKAHHRSLNLYRCAIPVPKLANRPFRSSNFFDYVIPVPKLADHSFRFSTLFSCVTPVSKLGFEYHLGXIGQDRGDTTEQVEETKRVIYKFRDRDDTIKQVNARSSGEAAPSGSGGSSPKQMAHMSAAQLGFWP

SEQ ID NO: 144594 - protein, 100 aa, Oryza sativa
  unsure (1)..(100): unsure at all Xaa locations
  Clone ID: PAT_MRT4530_45393C.1.pep
DNTGVAQQVLHGEYGAEEIDDLRLNELLLSQGVALNETRRDRECPQDPITKERTRHEPYTVPPPRLTDXXAPPPPPPHPPPRTPPPPHWLPPRPPGAPRR

SEQ ID NO: 144595 - protein, 115 aa, Oryza sativa
  unsure (1)..(115): unsure at all Xaa locations
  Clone ID: PAT_MRT4530_45394C.1.pep
LIVYLFCVENVIIFLRKVHHRSLNLYRWVIPVPKLANRPFSSSNLFDCVIPVPKLTDHSFRSSNLFSSVIPVPKLXFEYHLDQIGRDRGDTTEQVRGPKRVICKFRDWDDTVEQV

SEQ ID NO: 144596 - protein, 52 aa, Oryza sativa
  Clone ID: PAT_MRT4530_45395C.1.pep
GVPGAGAAAAAVSGDGAPGAGAVANVNIDGGSSASQSSGGPFSGRIAFLVCS

SEQ ID NO: 144597 - protein, 82 aa, Oryza sativa
  Clone ID: PAT_MRT4530_45396C.1.pep
RIGIELNRENTKCYCTGAHLSVFLFLFLFFFLLPPVIFLLLFFPCNSREKERRGAGAPMVERPRRRRPSVFPSDVHPGKSVA

SEQ ID NO: 144598 - protein, 91 aa, Oryza sativa
  unsure (1)..(91): unsure at all Xaa locations
  Clone ID: PAT_MRT4530_45397C.1.pep
DDAAAAAVGGGGGGAVRVREGGQGGRRGGAAPAGAVPDPQGAGGVVGGXGGGGGGGGRRRGRSASGSGGSGSPPGASGCASAGDCRGTSGA

SEQ ID NO: 144599 - protein, 53 aa, Oryza sativa
  Clone ID: PAT_MRT4530_45398C.1.pep
PLLPRASMISIDRSICYAARLSFDSSLLASGAGLPGLQSAAPTGAAFNRAWKQ

SEQ ID NO: 144600 - protein, 625 aa, Oryza sativa
  Clone ID: PAT_MRT4530_45399C.1.pep
MESYVGVKGKNVVGGGDVGREMPVAPPSSSSAAVGMVEFPAAAAGLGYAGMTAKEAGGGYQERRVVVGEMDFFKTAEKRGERKEPPPATATAAASGHAGASPDDLSLNKDDLTINMGLLVGRRRNSGSEESIVDDGGVSSNDEEHREAKAALAVTKAEIGRLSEENKRLKNMLSNVTTKYNSLQMQFVTLMQQRRSVLAAPIHQQELLDPEKKEQEGSQQQQQQLIPRQFISLGSASLQPDVEAPHSVVVVGGDVCAPSSSNPDAAVPAMMPLPHFDHHNHHHPIHGGRERGSSPAEADHHRHHQQEQPPPPPQQQQQLPPSWLPADKVPRFLPGKGPEPVPEAATMRKARVSVRARSDAPMISDGCQWRKYGQKMAKGNPCPRAYYRCTMAAGCPVRKQVQRCAEDRTVLITTYEGNHNHPLPPAAMAMASTTAAAASMLLSGSMPSADGSLMAGSNFLARAVLPCSSTVATISASAPFPTVTLDLTQTAPPPPPASSTQPQPPRPEPAQLQAALAEAARPVALPQLFGQKLYDQSKLSAVQAVAGTKGSDGGALADTVNAATAAIASDPNFTAVLAAALTSYIGSRSGSGGAGAGGSSGTVQPLMSGGGDSCSRDDKIGEQNS

SEQ ID NO: 144601 - protein, 54 aa, Oryza sativa
  Clone ID: PAT_MRT4530_4539C.1.pep
MGKHDSGAAGVHGATAHRSREVRLSAVPAPTQEKGRASASRLASDDELMAYMKY

SEQ ID NO: 144602 - protein, 85 aa, Oryza sativa
  Clone ID: PAT_MRT4530_453C.1.pep
MGGAVGGGGGAFDEEYGAELEEWAILEYGVGQHQIDGGGEKAIMVQVRDLQGYYGIGGGDDRGGADGILKVGMVDERGEEENDGG

SEQ ID NO: 144603 - protein, 191 aa, Oryza sativa
  Clone ID: PAT_MRT4530_45400C.1.pep
ARASAHASAHAGRWEFLPPPLPHTKRSATRQRKPRATTMAAAAADYEYRAYGAPADHDRPYHGREVVPYGDRRIDVVVKPPGTTTTTTTRSPPPPLPVTKVGGGGGGMGSAWCFSDPEMKRRRRVASYKAYSVEGKVKSSLRRGFRWIKAKCSELIHGCVNQTIDYHYHQLQLETMAVTAAGEGGPAFAGN

SEQ ID NO: 144604 - protein, 71 aa, Oryza sativa
  Clone ID: PAT_MRT4530_45401C.1.pep
QHVAASNQKKKKKKKKKKKKKKKKKKKKRGGKKKKKKKKKKKKKKKKKKKKKKKGGGPFKRTKVKNREMEN

SEQ ID NO: 144605 - protein, 60 aa, Oryza sativa
  unsure (1)..(60): unsure at all Xaa locations
  Clone ID: PAT_MRT4530_45402C.1.pep
ELEPKEDTNTEHPNGSWSDDXSKVWRFSTYPQQQQRADGLLVQKLGSLLYKKNSMYVNDT

SEQ ID NO: 144606 - protein, 712 aa, Oryza sativa
  Clone ID: PAT_MRT4530_45403C.1.pep
MDGDGEWVWVRRPAEAEAVAAAAGWPTAEEEARPLEVVFASPSRYFTDAAPIGNGSLGALVWGGVASEKLQLNHDTLWTGGPGNYTNPKAPAVLSKVRDLVNRGQYAKATAVAYGLSGDQTQVYQPLGDIDLAFDEHVEDTNYKRNLDLRTATVNVSYTIGEVVHSREHFSSNPHQVIVTKISADKPGNVSFTVSLTTPLNHQIRVTNANEIIMEGYCPGERPTEYGNASDHPVGIKFSAILYLQMSGSNGTVEILNDKMLKLVGADSAVLLLAAATSFEGPFVNPSESKLDPTASALTTLTVARNMSYSQLKAYHVDDYQNLFQRVSLQLSRDSNDALGGNGLVNLPENSLQETSVSDYAVQMVECSRFQGFNNSGKPTVDRILSFRDDEDPSLVELLFQFGRYLLISCSRPGTQISNLQGIWNDETSPPWDAAPHPNINLQMNYWPALPCNLSECQEPLFDFIGSLSVNGAKTAKVNYEASGWVSHQVTDLWAKTSPDAGDPMWALWPMGGPWLATHLWEHYSYTMDKQFLEKTAYPLLEGSASFLLDWLIEGNGDYLETNPSTSPEHYFIAPDGRKACVSYSTTMDMSIIREVFSAVLMSSDILGKSDSDMVQRIKKAIPRLPPIKVARDGTIMEWLFSECLLYVDRHRIFRILKFTTDMYLTCLVFIQDILCHLRKHLTFAKPLQIVSIKEFCAILLAYLLARLFQVN

SEQ ID NO: 144607 - protein, 673 aa, Oryza sativa
  Clone ID: PAT_MRT4530_45404C.1.pep
MVGHLLLLLVVIIICYAPTSSTAAGGEVPFYEDCPSTADGTYAPNSTYQSNLAALAAELIENSTEYGSAAGSFGAAPDAVYGVALCRGDSKGPLCAGYLREAFDAAMNRTTSSRPLCELRRNVTLFYDRFQLRFADADFVSGYGNEPEWPLNNTNVVDAPVAGRFREHVAALLNATARDAAAQPDRYGTGDSWFQEGGSMVYALVQCTRDMDPGRCGACLQRIISEMPRMLDASQIGGRVLGVRCLLRYEMASNSFFHIDNRTLHLQKQPTQQSGSSSGAKTWPIIVAVAGVAVCISCFFLFRELKRRRRRARVRSELRRLSMAVQNVITLWRLEEGNSGFKLYDFSDIKDATNNFSSESLLGKGGFGSVYKGQMPSGPEVAAKRLAACSGQGLLEFKNEIQLVARLQHRNLVRLLGCCIEGDQEKILVYEYMPNKSLDVFIFDNVKRELLDWPKRLHIIHGISQGLLYLHEHSTVCVVHRDLKASNVLLDAEMNAKISDFGIARIFGSNAAQSSTTRIVGTIGYIAPEYALDGVCSSKADVFSFGVLILEIISGKRTGGSYRYNDGKLYCLIAYAWLLWKDGRWHELIDECLGDRYHASIRTCMQVALLCVQEDAEDRKAMDEVVKMLGNEQAASQLPEPKQSAYFNVRPSGGGGDAPPSACNISISMITPR

SEQ ID NO: 144608 - protein, 192 aa, Oryza sativa
  unsure (1)..(192): unsure at all Xaa locations
  Clone ID: PAT_MRT4530_45405C.1.pep
MVAGRGSAWAGKRRGDGGEPRAHPLPDPPATARAPPPLLVVSPPQSDPAVLARAPPPPLLLVVAEPLSPLPRXSNRPSSISTAGPVVTAPPRHRRAIVAPPPSDPAVPAQSPPPSPPPLILLVVVEMSSPLIRRIHRSEPFLPCRIHPPQLALCRAGPATAPFLRASSPLTSLRPLRAEGEPLPVCYCRRRH

SEQ ID NO: 144609 - protein, 243 aa, Oryza sativa
  Clone ID: PAT_MRT4530_45406C.1.pep
MADDAGGGRREYSIIVPTYNERLNVALIVYLIFKHLPDVNFEIIVVDDGSPDGTQDIVKQLQQIYGENRVLLRARPRKLGLGTAYLHGLKHASGDFVVIMDADLSHHPKYLPSFIRKQKETGADVVTGTRYVQNGGVHGWNLMRKLTSRGANVLAQTLLQPGASDLTGSFRLYKRNVLEDLISSCVSKGYVFQMEMIVRATRKGYHIEEVPITFVDRVFGTSKLGGSEIVEYLKGLVYLLLTT

SEQ ID NO: 144610 - protein, 515 aa, Oryza sativa
  Clone ID: PAT_MRT4530_45407C.1.pep
MGNGGRCMVEVVILLVLMAMSQGCDAQNTTGGLTRKSFPNGFVFGTASSAYQYEGAVKEDGRGPTIWDKFAHTFGKIIDFSNADVAVDQYHRFEEDIQLMADMGMDAYRFSIAWSRIFPNGTGEVNQAGIDHYNKLINALLAKGIEPYVTLYHWDLPQALEDKYTGWLDRQIINDYAVYAETCFQAFGDRVKHWITFNEPHTVAVQAYDSGMHAPGRCSVLLHLYCKKGNSGTEPYIVAHNMILSHATVSDIYRKKYKASQNGELGISFDVIWYEPMSNSTADIEAAKRAQEFQLGWFADPFFFGDYPATMRSRVGSRLPKFTEKEAALVNGSLDFMGINHYTTFYTKDDQSTVIEKLLNNTLADTATISVPFRNGQPIGDRANSIWLYIVPRSMRILMNYVKDRYNKPTVYITENGKCTYVICDLFLPFISLKNALKDDKRTKYHNDYLTNLADSIREDGCDVRGYFAWSLLDNWEWAAGYTSRFGLYYVDYKNRKRYPKNSVQWFKNLLASSS

SEQ ID NO: 144611 - protein, 40 aa, Oryza sativa
  Clone ID: PAT_MRT4530_45408C.1.pep
GTNYKKCGDQEPPNAAKPGNIPEGAAIQGQILQGEPKPDT

SEQ ID NO: 144612 - protein, 76 aa, Oryza sativa
  unsure (1)..(76): unsure at all Xaa locations
  Clone ID: PAT_MRT4530_45409C.1.pep
PSIIFFPLLSSPRSPPPPPPPHRGFSLRLPPLPQRGRTEGQEWRRGTXDPASSXFAPTSSRRVQVGFXXQVAKSYR

SEQ ID NO: 144613 - protein, 64 aa, Oryza sativa
  unsure (1)..(64): unsure at all Xaa locations
  Clone ID: PAT_MRT4530_4540C.1.pep
VXGSFFVXXLGXFCLXXXXIXCXSLGXXXRARXFGHXXSXFGLRMLGLFDXIYFKKESMQYDRR

SEQ ID NO: 144614 - protein, 39 aa, Oryza sativa
  Clone ID: PAT_MRT4530_45410C.1.pep
MGPKFAADAETDADDEADVGVAVWWVAQRIQGRGGVHVG

SEQ ID NO: 144615 - protein, 101 aa, Oryza sativa
  Clone ID: PAT_MRT4530_45411C.1.pep
KSKVHHRSLNLYRCVILVPKLVNRPFMSSNLFDYVIPIPKLIDHSFRSSNLFSCATSVPKFGFEYHLGQIGRDRGDTTEQLGGPKRVICEFRDRDDTVEQV

SEQ ID NO: 144616 - protein, 347 aa, Oryza sativa
  Clone ID: PAT_MRT4530_45412C.1.pep
MCEGVRAAGDAAAAADVDVITSSGRRRIPAHSTVLASASPVLESILQRRLKKERDAAAGGGKVRRAVVLIRGVTDDAAAAFVRLLYAGSSGDEEEIDEKSAAQMLVLAHAYRVPWLKRRCEGAIGSRLTAESVVDTMQLAALCDAPQLHLRCTRLLAKEFKAVEKTEAWRFLQENDPWLELDILQRLHDADLRRRKWRRKRAEQGVYVELSEAMDCLSHICTEGCTEVGPVGRAPAAAPCPAYATACRGLQLLIRHFSRCHRTSCPRCQRMWQLLRLHAALCDLPDGHCNTPLCMQFRRKEEEKAAAKAKAKAGDDDDKWGLLVKKVRVARAMSSLGKRRQMSCSQC

SEQ ID NO: 144617 - protein, 101 aa, Oryza sativa
  unsure (1)..(101): unsure at all Xaa locations
  Clone ID: PAT_MRT4530_45413C.1.pep
MASITARKNRSNVDHRFSMDSPAKTRASRSRVQCCDCQRGAVHLERRRAVREQQGGISLYDSMNVXNDQESTWKCHYYTEEKAGASKQRRWNGRTDVPLCI

SEQ ID NO: 144618 - protein, 238 aa, Oryza sativa
  unsure (1)..(238): unsure at all Xaa locations
  Clone ID: PAT_MRT4530_45414C.1.pep
LDEIQIAIPFEWLVLSKVHHRSLNLYRCVIPVSKLANRPFRSSNLFDRVIPVRKLADHLFRSSNLFSCVTPVPKLGFEYYLGQIGRDWGDTTEQVGXLNXVICKFRDRDDTVEQRRRRLTVSARQGGAVRQGGAVESSARVGRRQGGRAGRSQAWTGRLGRVERRHCGGIDRRAGAQGGAASPRPASREARCGGAAVACAGRRGGRCAAERSDGSIGQRAACSEAWWRDGAVKGNPCH

SEQ ID NO: 144619 - protein, 241 aa, Oryza sativa
  Clone ID: PAT_MRT4530_45415C.1.pep
MAPGLQRFTDIAGDGGPRLDAASGEELLRMDRAASVALGRRAPEPPGTLFVTTRRVIWLSETEKGQGYAVDFLAITLHAVSRDLEAYPSPCIYTQIDAEDGSDEEAGGSDFEANGDLQLAKVSEMRIILSDPGQLLDPLQSFSVDALFDVFCHCAELNPDPNAVRNEENGWSGGENMAEGGWIHGDEDMIDGNDLEAHMFFTNLIGQNGLHDLGRSVRELQIDDQRFEDAEEEDEIQENGH

SEQ ID NO: 144620 - protein, 121 aa, Oryza sativa
  unsure (1)..(121): unsure at all Xaa locations
  Clone ID: PAT_MRT4530_45416C.1.pep
GVLFPTVSILAIFKLSKVHHRSLNLYCCVIPVPKLANRPFRSSNLFYCVIPVPKLADHSFRFSNLFSCVTPVSKLGFEYHLGQIGRDRGDTIEXVGGPKRVICKFRDRDDTVEQSGSFSTV

SEQ ID NO: 144621 - protein, 90 aa, Oryza sativa
  Clone ID: PAT_MRT4530_45417C.1.pep
CHRAELNPDPNAVRNEENGWSGGENMAEGGWIHGDEDMIDGNDLEAHMFFTNLIGQNGLHDLGRSVRELQIDDQRFEDAEEEDEIQENGH

SEQ ID NO: 144622 - protein, 114 aa, Oryza sativa
  Clone ID: PAT_MRT4530_45418C.1.pep
WKKNGPYKTNSLYKSKDHHLSLNLYRCVIAVPKLANRPFRSSNLFNYVIPVPKIADHSFRFSNLFSCVTSVPKLRFEYHLGQIGRDRGDTTEQVGGPKRVICKFRDWDDTVEQV

SEQ ID NO: 144623 - protein, 113 aa, Oryza sativa
  unsure (1)..(113): unsure at all Xaa locations
  Clone ID: PAT_MRT4530_45419C.1.pep
IISNDNCSSQNNKSKVHHRSLNLYRCVIPVPKLANRLFRSSNLFNCVIPILKLLDHSFRSSNLFSCVTPVPKLGFEYHLGXIGRDRGDTTEQVGGPKRVICKFKDRDDTVEQV

SEQ ID NO: 144624 - protein, 140 aa, Oryza sativa
  Clone ID: PAT_MRT4530_4541C.1.pep
EVLLEHAADALEPLRPVAADAHHARRRHAHRPRPDLGRAREVAVHHVLHPAAAAAAVHGVRRRRLPLLILLLLEPHERPLPPVDRLRPVPAAAAAKHLTTPPHLLPPLPPPLLMTSIDAIASSCMHCDLRFLLEESRTRG

SEQ ID NO: 144625 - protein, 101 aa, Oryza sativa
  Clone ID: PAT_MRT4530_45420C.1.pep
KKSKVHHRSLNLYRCVIPVPKLANRPFRSSNLFDCVIPVPKLADHSFRSYNLFSCVTPVPKLGFEYHLGQIRQDRGDTTKQVGAKRVICKFRDRDDTVKQV

SEQ ID NO: 144626 - protein, 96 aa, Oryza sativa
  Clone ID: PAT_MRT4530_45421C.1.pep
DGGTQYAELKIKGELTGSTLQATSHVVAPSLLTAIMPRGASASARRRRRAGERAALLVAGPYIRTAGKILDTSRGQEMINGSLFRADRRICMLGRR

SEQ ID NO: 144627 - protein, 491 aa, Oryza sativa
  Clone ID: PAT_MRT4530_45423C.1.pep
MAGAAAAAAATPPEFVCPISGELMADPVIVPSGETFERGCVEACVALGFTPAALPLSVDLAASPPPALIPNANLRKAISSYCDRVGLPRPLAVSPEEARGIVRHLMAMREPGRAGGVNGERFESSSSSSPEFAALGLTLEEAVLVRLLDDEPSRQEGALEALKQTLRGGENGVRRALCTPRLLDGLRRLMGSGHEGVRVSAAACVVNLSLEPANRVQLVRAELVPVLVGLLAAASPELRDHAAGAVYSLSIEERNRIPIGVLGAVPPLLRLLASAADGDRARRDAGMALYYLSLDEMNRSRLARSAGAVAALVGAAGDAALRRPALMVMANLAGCGEGREALIDGGAVAAVAGLMRRATVAPGSTEEEYCLSALHGMSRGNVRFGGLARAAGAGEVLRRVAEGPGGGVRRDVAWRTLRAVGGVAAAATGESLYGGEDAAAAAPWMDDVSVMSEAMAMPQFPRRLVEHAHAHGAPPRSNTTALDRLRQAPNG

SEQ ID NO: 144628 - protein, 65 aa, Oryza sativa
  Clone ID: PAT_MRT4530_45424C.1.pep
FLIYSIITWQMNQIRYNFVLFRSRKRFLIDLCIFLYDIDWMFQMMHIFPVATHGHPTSHSQKAQN

SEQ ID NO: 144629 - protein, 119 aa, Oryza sativa
  Clone ID: PAT_MRT4530_45425C.1.pep
ETYLYWLRRRPALYVTDPELIGEIGRCVSLDMGKPKYLQKGQEPLFGGGVLKANGACWARQRKVIAPEFYMARVRAMVQLMVDAAQPLIASWESRIDAAGGAAAAEVVVDGDLRSFSFD

SEQ ID NO: 144630 - protein, 368 aa, Oryza sativa
  unsure (1)..(368): unsure at all Xaa locations
  Clone ID: PAT_MRT4530_45426C.1.pep
MTIAHTDNLSLAIAPGGGRYLVPEFNPIIGSDAARYSVSRRRGGCAEQDIDYPSQVAHGTATAWSHDSGVLASKASGAVEPSGGRQPRHRRLLVRSGRSRRGARQSDGVEWGGGGARSRWGRAVAICRRRPQLPPISTLTAWATSTALLLSTGRAYRRGEWRRTWEGRQESRPALSAFLRSLSPAPLLTGVEGLDPLRGPTTISSPASNSPSTWTTARTYGDSAGRRXALYYNRVVVGRWGEVPAFCVDKLSAVDLNVAMSREGVSLPQRLREAMAVDMHVGELELAVEMKPARPEDVSRACFHSCAARAFIVGSPPSAVIGASNVRLLAVAPKPSTSPNARAALPLGPHRGSGALGYPVCNAGWGGM

SEQ ID NO: 144631 - protein, 128 aa, Oryza sativa
  Clone ID: PAT_MRT4530_45427C.1.pep
MLQLKQVQPKCAIAIADKGSNCSFWSLGSGWAFFPSSFRFNSDEKRAPSRAELSGLHDLYPPRVAGQYYGGATRVAVYLEILTLKHGKTGPVVLVRKLETFRTYEKSRRLSVALANACGLWLCAVCWC

SEQ ID NO: 144632 - protein, 78 aa, Oryza sativa
  Clone ID: PAT_MRT4530_45428C.1.pep
CTMPPVVSLVVSLVCPPMSRTLSAVQKLGSSDQSAARTSPSFPCSAFSRAYSATLCAVSAVTSLALCATVAPVRTCGR

SEQ ID NO: 144633 - protein, 140 aa, Oryza sativa
  Clone ID: PAT_MRT4530_45429C.1.pep
MDLMKAMGRLLPKLGQMLKDEYDLHTGIRKKIQSLSRELEDVHAVLRMVGEVPPEQLDGTVELWAHDLREASYDMDLASSSNGQKSSVPHGTAPPLSSSIIGGKDETSAFLDSLCNLHKIQTVKILDDRDESKVVFGSRE

SEQ ID NO: 144634 - protein, 157 aa, Oryza sativa
  unsure (1)..(157): unsure at all Xaa locations
  Clone ID: PAT_MRT4530_4542C.1.pep
APPLSPAVHRQLRSPLRCRSCLPLPPSRPPLSPSLRRPPRPPPXPSPRHPPSWLPFSPNPHCPLARPPPXPSPRHPPPRPSLPPSRPPLSPNPRRPPSRPPPPPISAPPSXPRPPLGVVPAPPWPPRALPAASLPHRRKAEICEKRVENEKKRGEGD

SEQ ID NO: 144635 - protein, 437 aa, Oryza sativa
  unsure (1)..(437): unsure at all Xaa locations
  Clone ID: PAT_MRT4530_45430C.1.pep
ISVDHKMSLYPGCDPGHKKLGTTLEFSQWNTKIGVSDKAFGELLKLIKNILPERNELHETTYEAKKVVCPLXLEVXKKHACSNDCILYRGEEYENLEECPFCKALXYKIRQDDPGDVDGQPSKKRVAAKVMCYFPIIPRLKRWFRNKAHARMMRWHAEECRQDGMLRHPTDESHWRNIDGTFGLSMYGMNLFGDXSSRNTWPVTMCISNFPPMNEAEVHQGVDIIEGPKQPGNDIDEYXRPLVEVLKLRERNXGVLVRDEFKQKQFNLRALLFVTINNLSGQSNKGYKACTHYMDETESTYLKHCRKVVYMGHRRFLFASHXVRKKGKYFEQKASHRTKPKHCNGKVMFAMVKDLKVVFGKGASNQPIESXDAHAAIWKKKSIFFXELPYWEVLDVRHAIDVMHLTKNLCVNLLGFLGVYRKSKDTHEARNDLKHME

SEQ ID NO: 144636 - protein, 130 aa, Oryza sativa
  Clone ID: PAT_MRT4530_45431C.1.pep
MAYQRGETSSVVEAFTLSPLPYPVILILLMVMLLLGVSWFFTYEDFMEEAAEQLSWALLLVPVALVLLIRWISSVDTFDGYFSFYPTERRWNRYDPGPAEGSSPWGVAMVVLLLLVLASFHSTFQDMWKP

SEQ ID NO: 144637 - protein, 639 aa, Oryza sativa
  unsure (1)..(639): unsure at all Xaa locations
  Clone ID: PAT_MRT4530_45432C.1.pep
KCFQCSNNSGKNLENTWTLKIFNTKFSDFYGVTISHRELGVPMDKDEVEDESIPDWAQYGGFDENTKGRXDRAVEDNVGANDLGQKLRDVKEDGKSEKEVQKLERISVDHKMSLYPGCDPGHKKLGTTLEFSQWNTKIGVSDKAFGELLKLIKNILPERNELHETTYEAKKVVCPLXLEVXKKHACSNDCILYRGEEYENLEECPFCKALXYKIRQDDPGDVDGQPSKKRVAAKVMCYFPIIPRLKRWFRNKAHARMMRWHAEECRQDGMLRHPTDESHWRNIDGTFQDFGVDARNIRFGLSMYGMNLFGDXSSRNTWPVTMCISNFPPMNEAEVHQGVDIIEGPKQPGNDIDEYXRPLVEVLKLRERNXGVLVRDEFKQKQFNLRALLFVTINNLSGQSNKGYKACTHYMDETESTYLKHCRKVVYMGHRRFLFASHXVRKKGKYFEQKASHRTKPKHCNGKVMFAMVKDLKVVFGKGASNQPIESXDAHAAIWKKKSIFFXELPYWEVLDVRHAIDVMHLTKNLCVNLLGFLGVYRKSKDTHEARNDLKHMEQRGGHHPEQKKKGSHYLSKEENESMFECLESVKVPSRYSSTTMRIISMKEKKFTKLSSSRKKLLYTLLLPLPLPSSLPTTTHHKI

SEQ ID NO: 144638 - protein, 70 aa, Oryza sativa
  Clone ID: PAT_MRT4530_45433C.1.pep
LSSSLNMSLPLVLVLDLAMDVIRFCSSLPFPELWASVCQLVVFTMLCQHLSCSKYACSHGAQSSIVYYFL

SEQ ID NO: 144639 - protein, 51 aa, Oryza sativa
  Clone ID: PAT_MRT4530_45434C.1.pep
FARFFCGLNKKNRLGKVPPPPPPWGMFFTFFPPPFQVLKLSFCKKKKGVCS

SEQ ID NO: 144640 - protein, 59 aa, Oryza sativa
  Clone ID: PAT_MRT4530_45435C.1.pep
MDWEGYAKGQHCLSASLLTSGASSGSFESEHAVTCRLLRQPHLAAHHPVAHTMQRLVLQ

SEQ ID NO: 144641 - protein, 57 aa, Oryza sativa
  Clone ID: PAT_MRT4530_45436C.1.pep
CTKKLRHVVGVQEAWFQVGWRNFNVWEWIITSGGGASNNWILVGLCGFGIDLRSWRN

SEQ ID NO: 144642 - protein, 94 aa, Oryza sativa
  Clone ID: PAT_MRT4530_45437C.1.pep
AGTWPPPCTTRCAARTSPRRTGPPRRRTPRHCRSPSGTPSRRRSPARPAPRRSRTRGGTPPSSSPPARIPRRRRRRRRRSACRGRGRTPRGSGR

SEQ ID NO: 144643 - protein, 67 aa, Oryza sativa
  Clone ID: PAT_MRT4530_45438C.1.pep
MINKLGLGEKHTILSKNKLDKTEHTWGFKELEFKGSRSLEAKYNSRLDPPGIFEVDGTLLKNGNSEP

SEQ ID NO: 144644 - protein, 169 aa, Oryza sativa
  Clone ID: PAT_MRT4530_45439C.1.pep
ILALPGVDPDPLPALVEHNFPTLLAVSPLASLELLSLLRPNPQLGLAVFSSRRTLSPPATLPEFVLAISLAGRARDPAAAARLFAEASTAYCPDQALYNALMSSYMHRGLADRCIEAFHTLERDPRWGPANADSYNILIALFGRSLLVDHMEATLLSLDASGHPRTIGT

SEQ ID NO: 144645 - protein, 63 aa, Oryza sativa
  unsure (1)..(63): unsure at all Xaa locations
  Clone ID: PAT_MRT4530_4543C.1.pep
TAXXGXXFVFCCHINNGQNDRYLLFSLLLSPDTSTQLISYLQANTRNSNSLQYITIRAIYAMR

SEQ ID NO: 144646 - protein, 163 aa, Oryza sativa
  unsure (1)..(163): unsure at all Xaa locations
  Clone ID: PAT_MRT4530_45440C.1.pep
SDNTLSHAGRVVHINAWLSSIPXYAMGFYQLYEXLHHNFDLISGRYYWLGNKQGMKYHMVKWSDLAFPKEFGGLGLTETRILNTALLAKXLFKIESPDKSLCVELLRKKYLHNGGMFQCSPDRASQFWVGVLRARKWMKLGSKWQVGNGTLLTTKFDVFFAST

SEQ ID NO: 144647 - protein, 48 aa, Oryza sativa
  Clone ID: PAT_MRT4530_45441C.1.pep
TACAVSLRGAAHSVGNCGAPANPRTAGATRRSNAYRPRVRPRVRPRVR

SEQ ID NO: 144648 - protein, 505 aa, Oryza sativa
  Clone ID: PAT_MRT4530_45442C.1.pep
MEETRRHLEKDLESWRIIEDVQVKVEAQTNSTSGAIWSPGSVCTKTGAQMRTATAAAGYGHGDGGGSGGRARRRRRGSGLAAAGDSNGGGGVDGARARWQRGIATTAAADGRGGGGGGGNGGGDGGRARQRGDDDDTTWPYILALPPHLANRRSGRGASGCHVMPLGPSCRLAPRPSPNCHVAGGASGEGTQAEPLSMRAAPQLPLAAFNVVGADMRYRPTDARQSGMTGVLRFVFIGFWWSNRRSTGGQTSGKRWSDRWEHGGQTGGGDRSGEQLRWSDRLIYTGQTDGIRALGRGKREDKDGEKTNNNKPNNNKSKGSYQGRKMENLRKAFQQVCAAFEPLSDVDGESGDDDKGKNISNVCFMARGESDTEYEDNEALVARKENVWIVDSGLVKGEDGRIFEDESDNDNDNDEVGSAGQTAGTPPVRPTKEKVDQLQKLLLLCIFNVDIRRNKSLEFFDLCLSGFGGLTVDLPAASGGQTGGSTAVRPAVATGAASSFGGQTG

SEQ ID NO: 144649 - protein, 79 aa, Oryza sativa
  Clone ID: PAT_MRT4530_45443C.1.pep
STAYNMTNPIPDSPMAPKRTSRPHFLFPTSINAPGNPYPTSAGPKITPKLDRNQDQPETCKASSAWHQASQRGGRPPSR

SEQ ID NO: 144650 - protein, 127 aa, Oryza sativa
  Clone ID: PAT_MRT4530_45444C.1.pep
RRRRRRTGAAAAAVAATVEATGDGRGSGGTTTTVSEQESRCGGGAIPLGDGIPSHSIPPHLANRRSGRGASGCHVMPLGPSCRLAPRPSPNCHVAGGASGEGTQAEPLSMRAAPQLPLAAFNVVGAD

SEQ ID NO: 144651 - protein, 70 aa, Oryza sativa
  unsure (1)..(70): unsure at all Xaa locations
  Clone ID: PAT_MRT4530_45445C.1.pep
XPPYSXVSPEDRYLSPPPPPAXQETPXPPPQYXVSPEDRYLSPPPPSPVKWKLPVYEYSSPPPPAAXWKP

SEQ ID NO: 144652 - protein, 55 aa, Oryza sativa
  Clone ID: PAT_MRT4530_45446C.1.pep
LCARLKHSNCIYLLQELVHSTQLVINANLSILHVCVLLVGEFRGHEELLQLCSFA

SEQ ID NO: 144653 - protein, 1297 aa, Oryza sativa
  Clone ID: PAT_MRT4530_45447C.1.pep
MASSSALSPNVAWVLCLCTFFCSISLAICNETDYDRQALLCFKSQLSGPSRALSSWSNTSLNFCSWDGVTCSARRPPRVIAIDLASEGITGTISPCIANLTSLTTLQLSNNSLHGSIPPRLGLLSELSNLNLSMNSLEGNIPSQLSSCSQLEILGLSSNSFQGAIPASLGKCIHLQEINLSRNKLQGSIPSAFGNLPKLQALVLASNRLTGDIPPSLGSSVSLRYVDLGNNALTGSIPESLANSSSLQVLRLMSNSLSGQLPKSLFNTSSLTAICLQQNSFVGSIPAVAAMSSPIKYLSLRDNCISGAIPPSLANLSSLLGLRLSENNLVGSIPESLGHIRTLEMLALSVNNLSGLVPPSLFNMSSLTFLAMANNSLAGRLPSDIGYTLPKIQGLILPANKFVGPIPASLLNAYHLEMLYLGNNSFTGLVPFFGSLPNLDELDVSYNMLEPGDWGFMTSLSNCSRLTQLMLDGNSFQGILPSSIGNLSSNLEALWLRNNKFFGPIPPEIGNLKSLSRLFMDYNLFTGTIPPTIGNLNSLAVLSFAQNKLSGHIPDVFGNLGQLTDLKLDGNNFSGRIPASIGQCTQLQILNLAHNSLDGNIPSIIFEISSLSQEMDLSHNYLSGGMPDEVGNLIHLNRLGISNNMLSGEIPSSLGQCVALEYLEIQSNFFVGGIPQSFVNLVSIKGMDISRNNLSGNIPQFLTSLSSLHALNLSFNNFDGVVPTGGVFDIDAAVSLEGNDHLCTSVPKGGIPSCSVLADRKRKLKILVLVLEILIPAIVAAIIILSYVVRIYRRKEMQANPHCQLISDHVKNITYQDIVKATDRFSSANLIGTGSFGTVYKGNLDPQQDEVAIKVFNLGTCGAQRSFSVECEALRNIRHRNLVKIITLCSSVDSSGADFKALVFHYMANGNLDTWLHPRAHEHSERKTLTFSQRINIALDVAFALDYLHNQCASPLVHCDLKPSNILLDLDMIAYVSDFGLARCLNITANAYEGSSKSLACLKGSIGYIPPEYGMSEVISTKGDVYSFGVLLLEMVTGSSPTDEKFNNGTSLHEHVARAFPKNTCEIVDPTMLQGEINVTTVMQNCIIPLVRIGLCCSAASPKDRWEMGQVSAEILKIKHVFSSIHGVNGLGPASRGPLWAHVGKEGKKKRSVHTCERIQSHNFDFMKIACYEGVFKSYIQVTLLYHNYIYQIKKICQQIDVTVTVLPARPCSLSGMILQILRKPVALQPSSSSKTKKVEYFHEHQANAAARVGGMVPWRREVEEKATVTEELEEVVLPPYLSGGKAAGVREENKGG

SEQ ID NO: 144654 - protein, 115 aa, Oryza sativa
  Clone ID: PAT_MRT4530_45448C.1.pep
WLAFLHSFRSLRSPSQFAISRPPSLTAISCRPPPLSVLPPHLPPAAADSASSAEASVGAASEASNLPNLARAGGGERRRGRRRRGGAAGEGARVVSGSRRRRRIVAALAPGVDEV

SEQ ID NO: 144655 - protein, 130 aa, Oryza sativa
  Clone ID: PAT_MRT4530_45449C.1.pep
MAGGPLPLPTPAARRRCHHPSPVAAAVTHHPSPLPTPVARRCWETPAAAATAHEKGRGGWDRRRGRRGSEEGVRRGSEDIRERESLGGVRSGFREGANVVFSQPNKDDFSSSDITPKAIKRAGYTDGMAL

SEQ ID NO: 144656 - protein, 118 aa, Oryza sativa
  Clone ID: PAT_MRT4530_4544C.1.pep
IEYNSSSIQLNCWLRSESELEQSEADLYRWIGPRLERPFALARSQEAWRRDSHAMMPLQLYGETYRGEGTTDRLGDYGGYPFEPKICVPDAAARAGSCACARQACRMLLQCALSRTRG

SEQ ID NO: 144657 - protein, 38 aa, Oryza sativa
  Clone ID: PAT_MRT4530_45450C.1.pep
MEWGEDLFHEEKFMLCPGTFASSDGDLALNLLDFFLTE

SEQ ID NO: 144658 - protein, 100 aa, Oryza sativa
  Clone ID: PAT_MRT4530_45451C.1.pep
RVCILDKLRPTPSANDRREGCRQCGGCRCGCGRWQRREERAAKLILVTGGAGYIGSHTVVELLDFGYDVVIVDNLVNSTEVSIDRIAQINKRKVRPAFYK

SEQ ID NO: 144659 - protein, 164 aa, Oryza sativa
  Clone ID: PAT_MRT4530_45452C.1.pep
MAARTTPLPLLRGAAAAAAARSCLHRPQVGAAAARRAAVGVRCGGTPPAEPGPSIPSPPMPEVPDVPRNPDVPPPKPPELDPPRPPPEVVPEPTPPDVEPPTFIVRAEVAGEERQRLDDEEEQRWRWLAMRSDKVDVAEAQRCIWGHGGTQAVDLEAMGRRMWQ

SEQ ID NO: 144660 - protein, 195 aa, Oryza sativa
  unsure (1)..(195): unsure at all Xaa locations
  Clone ID: PAT_MRT4530_45453C.1.pep
KTRRTGDRSLFFRGVPTVPTSSTISQPATWQARVTSPSLFFYTIKVGGSTSGGVGSGTTSGGGLGGSNSGGFGGGTSGLRGTSGTSGIGGEGMDGPGCSGPGVGAPGGGIGTSSPGGASNSGGVSMLGSSSSDRSVXGTPPPASRRTGRRRRRAARRQRPPAAGAGKSAPPPPPPRHAAEATASSSLPPPPRSGG

SEQ ID NO: 144661 - protein, 722 aa, Oryza sativa
  unsure (1)..(722): unsure at all Xaa locations
  Clone ID: PAT_MRT4530_45454C.1.pep
MPRPAASSSSRPPPEGEPASSRATSSAESSIASLIDRATSTTSPSVDPALLRAIKSAARASDGAIRDAFRILLSLMSKPHAHVRLLAFIIADELFMRSKLFRSLLTDVLDGFLPLAVGFRRAHPLPPPAASATLLRKAAVQALERWHHLFGAHYRQLRLAVEYLKESARVQFPGLRAAVEARAAREARTQEILTAKVEQLRRNLAAIKAEIRSAIDEIRNGLDIIRIESEKFNNYANDEDEEQEIASLAMRSIRMASLMAGEWVPETQENEAVFDALRESYRLLVSKHLVTVQEWISVLVRVNLADNRFRDSALKEFIDVKNEIRAVRNRCSELGLNLDNVHRRKGVQEEEDDDFWVEGNIEVPSPGRVGTSADVASSSKDTRKGKKPVGGTDTDDGKAPNAGNSPQELDPERAKLHAEAPVLPWSSVLDRWGSNRDALVNQRGLELESHWGRVDNDAVIPAAKIAELNVHSSIYREDPVEILPCLAPLKKGGLCQRRDLKICPFHGPIVPRDAEGNPIHQSDGHCDAEGNPVGQTDGHYDAAVSPIDPNEDSSDVRENMIMPDGSSDGECIYESSPSRTANINNDISDSDVGHDLGKITVEQLARQAVQNVRKRDRDDKKALEKAQRARIRQHNQDVLREAALASTSRSAADYDLPSPAVSRRGRRGKTXPPALASMLKKKVTSKDRIAERLLNARARDATIREVSHTEDMSYREAFPNQW

SEQ ID NO: 144662 - protein, 502 aa, Oryza sativa
  Clone ID: PAT_MRT4530_45455C.1.pep
MEFQQGGGGGCGGGKARDKFSVYRNPSLARALASRSVRPSLPVLVLLALSPIASASSILVLSSWEGQLVKVAGRAGLSMAAAVLVFRLIEAALGLVALFTLPAFFRAVMLYNGKRALAKEDKVVLSERQLGLLGLKMTGSEAGGTSEKTKRPPKAKPSTPSEPIVPIRRSSFSYTPSRSLGQSRIGSSNLSPGGERLTTSVQISPSTPLQKPISSPSTPWSRKSSGSAKGIQTEAMLEQFLAGLDENIDTITDSASKIATPPATITSFGAASPVSVITSTTPSGAARSTPLRAVRMSPGSHQKYSTPPKKGEGELPPPMSLEQAVNAFENLGVYPEIEQWRDNLRQWFSSVLMNPLVQKIKTSHIQVKQTTATVGASVTVSQVGSDLPSTTAPVGLSPLGGTKDWQPTITVDEDGILNQLRTALLHSRDTPVAQTFGSPQQPQQNPLLPSIQACIDAITEHQRLNTLMKGELIKGLLPQSSVRADYTVKRVQELAEGTCLKN

SEQ ID NO: 144663 - protein, 275 aa, Oryza sativa
  unsure (1)..(275): unsure at all Xaa locations
  Clone ID: PAT_MRT4530_45456C.1.pep
TSMDKDPIYQLIFNYGITQIIFFCAHDEIEKMRKKRCLGESKYPSVLLWRQDFPQXASQELSQLTMTLQGISLSEEEDLRFSTLSQQGDLTARGIYHALLPPSEMDPVHTFIWKNASPPKVQFFAWLLSKDRLPTAKNLFTKTILQSPLCAIYXTGDETSNHLFFMCPFASAFWTTIGVIPNVAEVSNIHLLARPPNIPSKHYKTFYLLCLWLWRLWNHRHDVVFRDLQPSVQRLILRCKEELSLWAEHLKVNDRLEADAWCSIFXSNSLSSLHP

SEQ ID NO: 144664 - protein, 567 aa, Oryza sativa
  unsure (1)..(567): unsure at all Xaa locations
  Clone ID: PAT_MRT4530_45457C.1.pep
MMSTSAIPSAAPSTEYAEHLSNLVAIPSLSHEHHYFLGPIGNPDPTKFIIAGTNRIPFRLANPILSHWKNTFKSWPSLEKTSPEKSWSVWYKRVLASKQVHWDELGIGHALALTLANSAKDKPLMASPAYCWSNALNAFLFNQGPMTPTLLDITMITGLDVTLSANPMSLNTKNQFDFRTNSIGGWSGYVAAYMGKGSATPREHTAFLFMWLEKFLFCGSSCGPTTNWQFLAEALESKRQFPLGKILLGYLYQMLSNASAKIATGSVVVNRPPLIDAEFPRLEPTTNDDREEVTHRRCLSYGEATSTPADSGAKLSAQLLKDWFCSFYEGFQRDARVWFPYEDSVNFDLPSDFRFEDINSEXFQKSREVFSAAISPCILPVGIHQGRNIQVSXRPPLGSIDNIELARFRSRNFERWWGEWKQHIFHQLASMYMTDLFPDIVPQTIESSPPRKSNSGRDIEYVLGLLPNGGGLAPPVIGYHAPRTTSLLQEQMREPPDIRKKRKTKASAIDPSALAPKKKTKKNKPKPADDLPTLDPSIEQAWDEEEIEEDVCHTLKFSSQAKNLIYK

SEQ ID NO: 144665 - protein, 190 aa, Oryza sativa
  Clone ID: PAT_MRT4530_45458C.1.pep
MTGAGVETCCGGGGQAAAASASGPPPRGLIVVSAVFLSIFLATFLTLMSLAFCCCRRWRERDAVSGYVDGEGAVVVVAAGESGGGEPFPVEALPPAYAYVVGSSDDGGATAASGVGRECAVCLGAVREGEMVRRLPACEHVYHADCIDRWLAAHRTCPLCRRELDPGKLAAGAPPAPAQQQVDPTDQLPV

SEQ ID NO: 144666 - protein, 115 aa, Oryza sativa
  Clone ID: PAT_MRT4530_45459C.1.pep
SLGTSHCLAGAHRVKRKTLETAESTSPRGTAYNRTLPICPQRATGNPAQSGQIQASIRRSKWRRYSRSGGCITLGRPSRRPIGKRANVGKQQIRHLIVPHTPPRYTHTKNAPVGW

SEQ ID NO: 144667 - protein, 123 aa, Oryza sativa
  Clone ID: PAT_MRT4530_4545C.1.pep
MAWTMDTMIDATNAYATTSASHVSIRRSYQVPTISSTHILARGARSTSSVSIVADGKQHMHNRREASGQCAAADCDEGRTGNGCRRTKTSGGRNLLLLSAGERRTGLGRAPYEFEKEMTVDGN

SEQ ID NO: 144668 - protein, 108 aa, Oryza sativa
  Clone ID: PAT_MRT4530_45460C.1.pep
RVWGYRKLPHQFIEHTKHMGLVIMGKDPPAPLKRNFRLFAEGGIDLPQKGKKPFFQTPFKIFPPGGAVLKKTSPPPFVLLGFNQNLWGRAFSLASKKKNGARIFCRRS

SEQ ID NO: 144669 - protein, 121 aa, Oryza sativa
  Clone ID: PAT_MRT4530_45461C.1.pep
MQCSNKLGRFKSDDKHAVPAAVCAQNGTVSMAGTDSFVGLDAHCRPACTIAVPCVTGTLGSWKSVGKRTVRLVVAGYDVNLTYCYCSCCTLWLSSDSPVKVVYPSNVAAAVLDVPVLKHHK

SEQ ID NO: 144670 - protein, 51 aa, Oryza sativa
  Clone ID: PAT_MRT4530_45462C.1.pep
CYRRHAVWIGASSCKKRVSSTDPCSCKTWMLMSYIYNILPTDYEHGGVMTT

SEQ ID NO: 144671 - protein, 102 aa, Oryza sativa
  Clone ID: PAT_MRT4530_45463C.1.pep
IPFHFLTTPLHKNISHPTIALFLLYIYFHHPLLHHTSSHYIPLHSSLHLSILIPSRRTLSLILLFNFHLLLCHCTNISAILFNFVEFFFNPLIPCEHIPILH

SEQ ID NO: 144672 - protein, 29 aa, Oryza sativa
  Clone ID: PAT_MRT4530_45464C.1.pep
IIGDSTYSVLKVIFTETEMMSYYGSFLSS

SEQ ID NO: 144673 - protein, 150 aa, Oryza sativa
  Clone ID: PAT_MRT4530_45465C.1.pep
VTSSENDYIIRLVVVLRVRSAGDFPLAAAADDLRRHTHPVPRPAAASRRRRRVKPAAVAGRHCRRRREDDDHGEHNEAPYLTHNGGAAVVQRRLLSHYLPETPPRRHRRLPPFPLPSGLCRHRGVRENQQDYAHQRRHTSNQHANLRLRH

SEQ ID NO: 144674 - protein, 80 aa, Oryza sativa
  Clone ID: PAT_MRT4530_45466C.1.pep
ILSHSALATRSCLTSDAAAPAPALHFMTDALEVTDKRSQSVPHTSGHTLDDHNTHIRYLKVHYNTQCLRTATLASATISI

SEQ ID NO: 144675 - protein, 74 aa, Oryza sativa
  Clone ID: PAT_MRT4530_45467C.1.pep
CNILVSSAMTNYSYSASIHPPSTYGRREYFLTRDYHSMEQAMSKVMIARNQKKIKKYECMPFLKCSYSWLDMIL

SEQ ID NO: 144676 - protein, 396 aa, Oryza sativa
  Clone ID: PAT_MRT4530_45468C.1.pep
MAAAASAAPRVLSAEPRRRDPVAVGVPPWRLSPGSRVRAASRARQENVRRGQLISTNIKSRPLLCPPCRCVQMALANTRIAYQPDVQKHSGVLAYELVQGSLVQWNSFMDKSVPDPPTAVLLHGILGSRKNWGSFAKRLAQEFPMWQFLLVDLRCHGDSASIKKRGPHTVASTALDVLKLIVQLRLTPRVLVGHSFGGKGFPVSFVSPYHTFMVWVLDATPGKVRAGGDGEDHPAELIESLRRMPMQVSSKQEVVDALVKEQFSVDVARWVATNLRRSSPLGSLSSSSFSWIFDLNGISDMYKSYEETNLWGIVENVPRGVHINFLKAERSLHRWALDDLQRIHTAEELAADEGGGVEMHVLEDAGHWVHADNPDGLFRILSSTFRIEATIRGMQN

SEQ ID NO: 144677 - protein, 222 aa, Oryza sativa
  Clone ID: PAT_MRT4530_45469C.1.pep
MAAAAAWCSLSRGVRRAALELRQWSERGAASLAPDEDELEAVERQLDVGPTSVRSPVKRKAKLPESYEMLCEFFNCFESSTQLLRMKGSKASFPNICATTQHLSERKPQSIDVALLWPGRFVLCDFPGWHECLEILEVHSREVSLASDASLEDVASLTERFTGADPSLASLVHMPVVFSKNQLLHFTWLVYNSSVRTVRQPLKNLKDSSYTIRMFIPAHVYQ

SEQ ID NO: 144678 - protein, 59 aa, Oryza sativa
  unsure (1)..(59): unsure at all Xaa locations
  Clone ID: PAT_MRT4530_4546C.1.pep
VGQPMELRWPPADPVVSSSSRRRRXRXPHVIHWLRIQSPQRXPTVAGHRRDAKIPNSTL

SEQ ID NO: 144679 - protein, 447 aa, Oryza sativa
  unsure (1)..(447): unsure at all Xaa locations
  Clone ID: PAT_MRT4530_45470C.1.pep
RAIFKNLAVRRGGGGDQVPAVGHALRRRVPWEGPHGGVVVRADAGGDPKIAVLSKGEQPIMVSQFMMELRGLKTVDGEDPPRILHFNPRLRGDWSGKPVIEQNTCYRMQWGTPLRCEGWKSNSDEETVDGFVKCENWILNADERSKESTTTWLNRLIGQKKEMNFDWPYPFVEGRLFVLTISAGLEGYHVNVDGRHVTSFPYRPGFVLEDATGLSLSGDLDVQSVFAGSLPTTHPSFXPQSYLDMSTVWQSSPLPNEPVDIFIGILSSGNHFAERMGVRKTWMSAVRNSPNVVARFFVALHGRKEVNVELKKEAEFFGDIVXVPFLDNYDSVVLKTLAICEYGVHVVSARYVMKCDDDTFVRLDSIITEVNKVQSGRGLYIGNINFHHRSLRHGKWAVTYEEWPEEVYPPYANGPGYVISSDIAGAIVSEFRDRKLRVLSCDSVSSE

SEQ ID NO: 144680 - protein, 677 aa, Oryza sativa
  Clone ID: PAT_MRT4530_45471C.1.pep
MRRPSSASASAAAGASCRRRAIEVLAAVLVLYAVLVFVLESPLVSTSLSGGGGGGGGGGGGARYLRLAGGGVRAAPARPAKEPRLAASASVSGPSARGRRLSGMVSGLDLGLLNSSRAGPLRRPIAGAVETGARVFAELEDLDTAAFESPSAEGEAEAAKCPQSVMRSADEFHGRGRVVELPCGLTLGSHITVVATPRPAHAEGDPKIAVLKEGEQPIMVSQFMMELQGLKTVDGEDPPRILHFNPRLRGDWSGKPVIEQNTCYRMQWGTPLRCEGWKSNSDEETGWGPLQFHFDYVSSVDGFVKCENWILNADERSKESTTTWLNRLIGQKKEMNFDWPYPFVEGRLFVLTISAGLEGYHVNVDGRHVTSFPYRPGFVLEDATGLALSGDLDVQSVFAGSLPTTHPSFSPQSYLDMSTVWQSSPLPNEPVDIFIGILSSGNHFAERMGVRKTWMSAVRNSPNVVARFFVALHGRKEVNVELKKEAEFFGDIVFVPFLDNYDLVVLKTLAICEYGVHVVSARYVMKCDDDTFVRLDSIITEVNKVQSGRSFYIGNINIHHRPLRHGKWAVTYEEWPEEVYPPYANGPGYVISSDIAGAIVSEFRDQKLRLFKMEDVSMGLWVEQFNRTRPVEFVHSTKFCQFGCVDDYYTAHYQSPRLMLCLWQKLLDGKPQCCNMR

SEQ ID NO: 144681 - protein, 108 aa, Oryza sativa
  unsure (1)..(108): unsure at all Xaa locations
  Clone ID: PAT_MRT4530_45472C.1.pep
MALQFLDARIKVRAQFGRQQLKYSNKLSRYARQWSPESRFDCVMRHSPESPSGDNVFWGTGXDWRATHAVKNWAGESSVYVWRGQSCNPGQKCVRFTQIVWIATKLVE

SEQ ID NO: 144682 - protein, 130 aa, Oryza sativa
  Clone ID: PAT_MRT4530_45473C.1.pep
GEKGTNFFPLFWRGGRPALLLASQLTNYLFLHPHSRTAQNPLQTRPTPLPSPKIRFFSFTTRRQHWTSKPEFEIWFSTRHEREPLKRRRRRIYRPPNLFWWRPTRPGPYVQRFLRRTCRGTTQRTWRSSS

SEQ ID NO: 144683 - protein, 28 aa, Oryza sativa
  Clone ID: PAT_MRT4530_45474C.1.pep
DIVRLIIYTRGGAVRIEQSATFADVRIT

SEQ ID NO: 144684 - protein, 159 aa, Oryza sativa
  unsure (1)..(159): unsure at all Xaa locations
  Clone ID: PAT_MRT4530_45475C.1.pep
HPHGISLTLSLDPLSRCRHQPLHGTTVLHAATASRRAGKTTRWRSGSPATAPSNPAFSAADGVASKDLPTPPPHPNSSLSVRIFLPTPPPHPHSLGLRPSRAIVVAWREGKTTRWRSGSPAARPSPQCHLKGPPHRPQXPTFSSANWMVWMGWLASLTS

SEQ ID NO: 144685 - protein, 35 aa, Oryza sativa
  Clone ID: PAT_MRT4530_45476C.1.pep
LVPVVVKLCELTDDYTLYLWAPFTVFINSEGNYLI

SEQ ID NO: 144686 - protein, 67 aa, Oryza sativa
  unsure (1)..(67): unsure at all Xaa locations
  Clone ID: PAT_MRT4530_45477C.1.pep
NMLANDDXAXRFFNHLGDCXAXNHVXHVFVGLYKXVDRYXGTWWRRKTAXLRXDYFAXPWSAISFVV

SEQ ID NO: 144687 - protein, 41 aa, Oryza sativa
  Clone ID: PAT_MRT4530_45478C.1.pep
TSPVHHSPRRSPRRTPTNSAQPRPRSRSRDRTLTRGQARAT

SEQ ID NO: 144688 - protein, 132 aa, Oryza sativa
  unsure (1)..(132): unsure at all Xaa locations
  Clone ID: PAT_MRT4530_45479C.1.pep
LSLALAASSSVGAVHRAVLVVGLLLLAVGAVACHXARAVPGEXEPETYRPXNEYGFSGFYPGPNINWVLPGPNGVTPDVGFNGMPASSSSVFPGAVGASPFTPGGGGIGFHGATNKPRCIGHHEACWPDPPM

SEQ ID NO: 144689 - protein, 1123 aa, Oryza sativa
  Clone ID: PAT_MRT4530_4547C.1.pep
MSDSQTQYAKPQSAGYSNRKTMGIRDAKRITQVGNFMHYISRFLAGFAIGFSQVWQISLVTLAIVPLIAIAGGIYAYVTIGLMARVRKSYVKAGEIAEEVIGNVRTVQAFVGEEKAVRTYREALLRTYKYGKRGGLAKGLGLGSMHSVLFLSWALLIWFTSVVVHKNISNGGESFTTMLNVVIAGLSLGQAAPNISTFLRARTAAYPIFQMIERNTVNKASSKAGRTLPSVDGHIQFRDVRFAYPSRPDVVILDRFSLDFPAGKIVALVGGSGSGKSTVVSLIERFYEPLTGAVLLDGHDIKDLDVKWLRQQIGLVNQEPALFATSIRENILYGKGDASMDEINHAAKLSEAITFINHLPDRYETQVGERGIQLSGGQKQRIAISRAILKNPSILLLDEATSALDAESEKSVQEALDRVMVGRTTVVIAHRLSTIRNADTIAVVDSGRIVETGTHEQLMANPRSAYASLIQLQEAAQLQNKQSFSDSASLSRPLSSKYSRELSRTSMGGSFRSEKDSVSRYGTVEAHDEGGHKSKPVSMKKLYSMIRPDWFFGVSGTVSAFVAGSQMPLFALGVTQALVSYYMGWETTKREVRKIAVLFCCGAVLTVVFHAIEHLSFGIMGERLTLRVRERMFAAILRNEIGWFDDTSHTSSMLSSRLETDATLVRTIVVDRSTILLQNIGMIVTSLIIAFIINWRITLVVLATYPLMVSGHISEKMFMKGYGGNLGKSYLKANMLAAEAVSNIRTVAAFCAEEKVIKLYADELKEPAKQSFRRGQGAGLFYGVSQFFLFSSYALALWYGSELMSKEMASFKSVMKSFMVLIVTALAMGETLAMAPDIIKGNQMVSSVFEILDRKTDVLIDAGNDVKRVEGVIELRGVEFRYPARPEVVVFKGLDLLMKAGKSMALVGMSGSGKSTVLSLILRFYDPIAGKVLIDGKDIRKVKLKSLRKHIGLVQQEPALFATTIYDNILYGKDGATEAEVVDAAKLANAHSFISALPEGYRTRVGERGVQLSGGQRQRIAIARAIVKDPAILLLDEATSALDVESERVVQQALDRVMRNRTTVMVAHRLSTIKNADVISVLQDGKIIEQGAHHQLIENRNGAYHKLVSLQQQQQQQDQMQRH

SEQ ID NO: 144690 - protein, 100 aa, Oryza sativa
  unsure (1)..(100): unsure at all Xaa locations
  Clone ID: PAT_MRT4530_45480C.1.pep
VDLCGPPTVPWGPKMSTRXGEMWLEAKDIWHVSGQGRRSNDNGGSCSYSVMPPGCLATMNSWWSDPILHDGRGWRSCIGITCCKANAXWTRTCLIHCTDM

SEQ ID NO: 144691 - protein, 252 aa, Oryza sativa
  Clone ID: PAT_MRT4530_45481C.1.pep
MAASTASAPFTPLLHRRRASVHGRRGSGRAFVAVVVAAAAGGAPETEPSPATAAGAAAQGKKKTVDTRIHWSDPDEGWVGGNAKKDGGGGRKKEPLGGRFADLINNPSESHYQFLGVEPKADIEEIKAAYRRLSKEYHPDTTSLPLREASERFIRLREAYNVLSREESRRFYDWTLAQEAESRRLQQLRSRLEDPYQQDLDSYQSVPDMVDRLGGRNMDLSDQAMTALTIDIGIIIFCVFCLIYAVFFKEQY

SEQ ID NO: 144692 - protein, 74 aa, Oryza sativa
  Clone ID: PAT_MRT4530_45482C.1.pep
VLRHRTIKYVKILWTHQTEREATWELESQMRKKYPELFTLGLGQNIAQVIGGPLSNLPAEGEAESNVFGFGRTH

SEQ ID NO: 144693 - protein, 102 aa, Oryza sativa
  Clone ID: PAT_MRT4530_45483C.1.pep
VSFIMLFVFLGFPFFYLRLRPSRFLSFCFLIWPPRLFFFCLLFVSFLAFWAYMGFALIPVFSFFMPSFNPPSPFGRWFSFVSWFAFLVATHTSLFKGTPPPN

SEQ ID NO: 144694 - protein, 131 aa, Oryza sativa
  Clone ID: PAT_MRT4530_45484C.1.pep
MALTVWSRMWLLLLRCTCDQRQRKQARWLSAELNGGESGSDWQARPRETARRWEQKEKRREMRESASSSSPTVHGKVAEALHIESATVAQPASCGALRPCPTARRRRRADEVEGERGRANLDDELLLLFGS

SEQ ID NO: 144695 - protein, 338 aa, Oryza sativa
  unsure (1)..(338): unsure at all Xaa locations
  Clone ID: PAT_MRT4530_45485C.1.pep
CSNQHPPPSPPPPPPPXRRRCPPARRPSXHDQKLPLHPLHQPHGVGAPPXDTAPPPPPPPSPPPPLSPLAVEPRPPDXPPSFSSRPTPPYPSARTATASTPSTSPPPPATXARGPPPRXALLPGVRRPPRRPREPPQLPPPSPTAVGQLPPPPSPXPSPPSPTAPILQIQPRGVDLGASLPSPPGIEPPATVAAPPSLPRPPAPAPPSRLTPPPXPPVPAPPSRLPPPXRPPAPTPXDAVPAPPRPDPAASAPDPVVVTPDPPPCASTPAPLRXPPPLRPPAPGAREXPPRAPPPPSSPPAPPVRSGPPPRPLSHARPLPLLPARLPCAAGRRRMKVT

SEQ ID NO: 144696 - protein, 295 aa, Oryza sativa
  Clone ID: PAT_MRT4530_45486C.1.pep
MWAASPAFRRRLFLLRSLSPSPCAALPGNAACSSSPSPSTSIRVNAMSASGPVYEADAEAVDSVLHKGVLIGDEFGDTFAVFVVSPYDLKFLDFCLESCQYHLNVSFHKLRNSTNSSHDVIQGADLSHVFCTRDAATDLIFFSDLQDGLFLITNNLSLVEGNLLAILTPNVYEYKRLVQKVLNCEVNEENASEQLTALCQKIGGITIMRKGKADIISDGKTVTQVSTFGSPRSLLSKEYTTEKSVNPMMLGCIAGSLLLRKAASHAFEKNKRSTVTTDIIELLGKSLEDICPAGH

SEQ ID NO: 144697 - protein, 61 aa, Oryza sativa
  Clone ID: PAT_MRT4530_45487C.1.pep
MYSSLWGKYNNPTPISLCKQVLLIITSLQIEINTRKKEREKQRACENRIYFFQCQGCKNKK

SEQ ID NO: 144698 - protein, 835 aa, Oryza sativa
  unsure (1)..(835): unsure at all Xaa locations
  Clone ID: PAT_MRT4530_45488C.1.pep
MASSSSSTSSNPVFGFTITEKQTKLNHAVWAAQMLAAIRGARLEGHIDSKTAAPSAEVNQEQADKTVKKVPNPVYEEWYAADQQLLGYLFSSLSREILNQLADSRTEAQAWRAIGKLFCSQTRGRSLNNRLALQTTLKGTMSITEYFGNMKALSDDIAATGKPLDEEDLIAYILNSLDGDYDSVVSAIGMKSELISVMEVYSQLLNFENILQLRQEGITAAHAASRGRGGFIPRSGGNGGGSAAXGGSRRGRGAPPANIGGRGRGNMPRSRGQQQQRTDXSRYAKHVAAAAQASSYAIDTNWYIDSEATDHITSELDKLAVREKYKGPEQIHTANGAAENGGDLDVSVTHDGVHTTHGDALSEDLGSMPQESLGSVSQAPLHHVSGSPPTMPTPAPSAPSPRQSPNQPDEAFATNHWREAMDAEYQALMKNQTWHLVPPQQGRNIIDCKWVYKVKRKADGSLDRYKARLVAKGFKQRYGIDYEDTFSPVVKATTIRTILSITVSRGWSLRQLDVQNAFLHGILEEEAPRAWYSRLSTKLQALGFKPSKVDTSLFFYSKGDVTVFVLIYVDDIIVASSTPSATSALLRDLTKEFALKDLRELHYFLGIEVTRTEDGILLTQAKYAYDVLRRVGMQDCKPVNTPLLTSEKLSVNEGDLLGPKDATEYRSIVGALQYLTLTRLDISFSVNKVCQCPTTVHWAAVKRILRYLKHTVSCGLKINKSPTLLVSSFSDADWASCLADRRSTGGFTVFLGSNLVSWSARKQATVSRSSTEAECKALADATTEIMWVQTLLCEIGINAPKVVKMWFDNIGAKYLSANPVFHARTKHIEVDYHFV

SEQ ID NO: 144699 - protein, 134 aa, Oryza sativa
  unsure (1)..(134): unsure at all Xaa locations
  Clone ID: PAT_MRT4530_45489C.1.pep
NFFMKNIYSNYKGIPFTLRYTSRIDMACLRVYGRSLYTLRKSFTEFVDGKSPTRTGLGRQCMVQGPMSPSPTWKPPDLRYKRDPWEDLRIEFHXPTQPPEPTKSEPAGAKSPEDLVGPTRLRSRRFHRVPSFLL

SEQ ID NO: 144700 - protein, 69 aa, Oryza sativa
  Clone ID: PAT_MRT4530_4548C.1.pep
KFYVRGVKPPKLSIKGGNLSSITKKRRGKGGPLPFRGVPSEWDLVCISGSHSWDPKVGLTPPGALLSLF

SEQ ID NO: 144701 - protein, 213 aa, Oryza sativa
  unsure (1)..(213): unsure at all Xaa locations
  Clone ID: PAT_MRT4530_45490C.1.pep
AAAAQRRRSSSASPEFRFWPLDADPAASPSCADELFSGGVLLPLQPLPYPRRDADLSMSLAGGDDDDDEDEEEEEVQPGAAVASRAPPTAAVAASGGGGGGSKRWTDLFAKKQQQPAAEDKEKDQPTRRRRPAGGGGGSELNINIWPFSRSRSAGGGGVGSLNPRPSPRKASIAPCSRIISRGEAAAVASSLPPPPRRWAASPGXSXGGVPVG

SEQ ID NO: 144702 - protein, 114 aa, Oryza sativa
  Clone ID: PAT_MRT4530_45491C.1.pep
ADAAIAAGSTCGCHHRRHRHRRRRVARGVRGTRRRWIRQQPLSTPPPPQDPPAATPDSSLPPLVQSPHAVAASLLLLPPERALGEGGAAGTSRCGGRCHRCSLVGRGRERESHA

SEQ ID NO: 144703 - protein, 189 aa, Oryza sativa
  Clone ID: PAT_MRT4530_45492C.1.pep
MELDMGAGGGGGVVGGGRAEAHYRGVRKRPWGRYAAEIRDPWKKTRVWLGTYDTPVEAALAYDRAAVALRGVKARTNFGSGSSGGGGVGGHGHGHSHAQLPQLHHRMHPPRPPQGPGHFGGLDISHPSPWHYVYFPARVQAMAPAAAGHVAAHVAASLPSTTLELRTGPSAGELPFDLNEPPPALLFGS

SEQ ID NO: 144704 - protein, 37 aa, Oryza sativa
  Clone ID: PAT_MRT4530_45493C.1.pep
CLINDKPATCLCAFNMSGCNKATVKRCYALSNVQVET

SEQ ID NO: 144705 - protein, 574 aa, Oryza sativa
  Clone ID: PAT_MRT4530_45494C.1.pep
MADLAIGISKTMVEALVNKVKSTIKEEEELWQIVQRDTVFMKDEFEMMQSFLKTADWERIKNNVVRTWVSQVRDLSYDAEDCIKSILLLDTNRSFWTMCLRLLASCSCKSEAASPLDQAVAEIELLKARVEEVSNRNIRYSLINDSGSKPAAMPRHLASAASAVGTSAVGVLTEAWCNAKKQPGFVDLTMLVTENSDALRVISLWGTGGGLGGMTSVIKEAYEKPEICQKFRARAWLKLAHPFNPQEFIRSLGHQFYRNTWKEQQGEITGIDVLTGMDAAQGTNLVKEFVKELNKHKYLIVLEDLSNMAEWHAVRTYLPDGKHGSRIVVSTQQLEIARLCAGQHYQVLELKKLSDNDSICVFFHEAFERVEVGMVAGGPSLLEMSNEVHLVGCSSDEEKLSNLISSARHSDRSHVISVWGFPGLGKSVLVRTVRRRQASNPTSPFDWYGWVDVSYPFNFSDFCRRMHSYMFEQSQGEYAYMPMNPKPEENIIQECREFLQNSRCLIVIDGLRSREQWDSIKSLIDGSSKCCILVVTAEENVAKYCAVQDDAAVHRVNALGSEAALEIFKQKKFD

SEQ ID NO: 144706 - protein, 71 aa, Oryza sativa
  Clone ID: PAT_MRT4530_45495C.1.pep
LERLTAGRLEFRPLRRAEAEEGAQEEDAKAVKRGGEEGGTEISAAASVSQICSVELLFHGITMGGNHRHGW

SEQ ID NO: 144707 - protein, 101 aa, Oryza sativa
  unsure (1)..(101): unsure at all Xaa locations
  Clone ID: PAT_MRT4530_45496C.1.pep
XXXRSGPQSTVIMFFQNVTHPFFPGEPVKKTTPKAGGLPTGKNGWHTAINGLNRTHIETDNVLLKTHPLHDEIFQDYPGLLAKGIYLLDTSGERAGGPKNF

SEQ ID NO: 144708 - protein, 94 aa, Oryza sativa
  unsure (1)..(94): unsure at all Xaa locations
  Clone ID: PAT_MRT4530_45497C.1.pep
KISSHNQKKEAPVCSTYTFLEREAAKGVLERDGDVHXDDKWKLTKKGSRRLEEGRASRGPSRSVPGRLASLVKEQRARFYIMRRCVTMLVCWRD

SEQ ID NO: 144709 - protein, 83 aa, Oryza sativa
  Clone ID: PAT_MRT4530_45498C.1.pep
LLEQGPKHKHRTSIYHFTILFTSNIIQPRSNSRFIRLQSPTPPPTDIHRIIAKGYKLPYLSRGKSRRLWRPCIAIPPQEEEVA

SEQ ID NO: 144710 - protein, 438 aa, Oryza sativa
  Clone ID: PAT_MRT4530_45499C.1.pep
MFVLPGSTSVILMDNCRACWEMDEPQSKNGVNSFGGLGATLVDSLDTLYIMGLKDEFQRAREVVGGLLSAYDLSGDKVFLEKAKDITDRLLPAWDTPSGIPYNRINLAHGRAHNPGWTNGDSILADSGTEQLEFIALSQRTGDPKYQQKILNNLVPYPIYLTCYCMDQINCFYEYLLKVWVQGNKTEHVKHYRQMWETSMEGLLSLTKKTTPSNYYYICEKNGGSLSDKMDELACFAPGMLALGASGYEETEKAEEIMNLAKELARTCYNFYQTTPTKLAGENYFFHTGQDMNVGTSWNILRPETVESLMYLWRLTGNKTYQDWGWDIFQAFEKNSRIESGYVGLRDVNTGEKDNMMQSFFLAETLKYLYLLFSPPSVISFDEWVFNTEAHPLRIVPLNDNSKAHSVGIATPTCPYVVGYTGASVELYFHYVARLVTF

SEQ ID NO: 144711 - protein, 120 aa, Oryza sativa
  Clone ID: PAT_MRT4530_454C.1.pep
MAGADNGKRAHSRRHPSDALVSESPTSYKEWLHDSYLFGRVEELAIREEEERQNCEIVQVKGGKIMIAFGACFPQDWLAIPCELQSFPRDKKKGTCHFAKTRAVEGKGKASGKYKGVKTR

SEQ ID NO: 144712 - protein, 355 aa, Oryza sativa
  Clone ID: PAT_MRT4530_45500C.1.pep
MPPKASKKDAAPAERPILGRFSSHLKIGIVGLPNVGKSTFFNIVTKLSIPAENFPFCTIDPNEARVYVPDERFDWLCQLYKPKSEVSAYLEINDIAGLVRGAHAGEGLGNAFLSHIRAVDGIFHVLRAFEDKEVTHIDDSVDPVRDLETIGEELRLKDIEFVQNKIDDLEKSMKRSNDKQLKLEHELCEKVKAHLEDGKDVRFGDWKSADIEILNTFQLLTAKPVVYLVNMSEKDYQRKKNKFLPKIHACVIPKIIKTGFAAIHLIYFFTAGPDEVKCWQIRRQTKAPQAAGTIHTDFERGFICAEVMKFDDLKELGSESAVKAAGKYRQEGKTYVVQDGDIIFFKFNVSGGGKK

SEQ ID NO: 144713 - protein, 99 aa, Oryza sativa
  unsure (1)..(99): unsure at all Xaa locations
  Clone ID: PAT_MRT4530_45501C.1.pep
IFQAFEKNSXRIESGYVGLRDVNTGEKDNMMQSFFLAETLKYLYLLFSPPSVISFDEWVFNTEAHPLRIVPLNDNSKAHSVGIATPTVRPFGRKQGKQE

SEQ ID NO: 144714 - protein, 139 aa, Oryza sativa
  Clone ID: PAT_MRT4530_45502C.1.pep
FPGKKLLRSRSHTQICVVAHQVTGKVGVLKHVVSSQTHVLQEGLDSLICRAQHCDTSLGVCQLIVSTRSSNDLAEEFCLCVFHSVDGMLLDLCGDHAHQQQHNLSLHDVSQARVAQRTCCQVDHKGFRHHYGFSLIRYR

SEQ ID NO: 144715 - protein, 267 aa, Oryza sativa
  Clone ID: PAT_MRT4530_45503C.1.pep
AFEDKEVTHIDDSVDPVRDLETIGEELRLKDIEFVQNKIDDLEKSMKRSNDKQLKLEHELCEKVKAHLEDGKDVRFGDWKSADIEILNTFQLLTAKPVVYLVNMSEKDYQRKKNKFLPKIHAWVQEHGGETIIPFSCAFERLLADMPPDEAAKYCAENQIASVIPKIIKTGFAAIHLIYFFTAGPDEVKCWQIRRQTKAPQAAGTIHTDFERGFICAEVMKFDDLKELGSESAVKAAGKYRQEGKTYVVQDGDIIFFKFNVSGGGKK

SEQ ID NO: 144716 - protein, 507 aa, Oryza sativa
  Clone ID: PAT_MRT4530_45504C.1.pep
MALLIGLLLIDAVFIVSLVGPMATMAISLTRLIQHDYDGSDASSKGKLRAALFIFYSLALLHSLCFYFWLLLHLSLEMLPIPASIEEYGHGDGGYYQMLLRQYLQETKTKCANDPKLPGDWNLVTYAVGLLDSASPDDHLDGLRMLDVLAINKQRSVRLELLSSRHSVQNLIEMLEWDGPDQEMRERAARIVADVAAALRVAQMPAGALHCISSLLEASPRSDTLKKPKGEYDSEWVDILSILLRLVMRLISAPGEAGTVLCHEISASNDAVHNLLGILDGQIKFSLQLQENAMDVLSEISIGLSAAMTENLVKKLYHIFLANSGDEETVSEARESNNSEMHNDEESKPPKPAGLKKSLVEKNDELSEERKHLAALLSLLVVICDNLVDADLFSNVTSVNDELAKKLKKIIEANNENTADCLRIVKLTCQVVIAIIHLKPSSLKDFNESNFNDVVSTAFKNMSDIENCMLFAVKDRQITKPAKTLSSLVKETQGLLHNAQETGNNSI

SEQ ID NO: 144717 - protein, 54 aa, Oryza sativa
  Clone ID: PAT_MRT4530_45505C.1.pep
IINFYRPLNVSLTLGTCPVGGIDFTRTPTSFSEHAYVRTHTCSLCYITEGAVHL

SEQ ID NO: 144718 - protein, 606 aa, Oryza sativa
  unsure (1)..(606): unsure at all Xaa locations
  Clone ID: PAT_MRT4530_45506C.1.pep
KPWDRLKSGRSSTALTLPPPPPSGVXSPGDGHPFFLFSSSSLSSSSWRDRSPRLFFVESSRRQAAATDCISSANLRARRSCIAVRPPVVGFILSVRSAPPASPSGPAVVVTSTGRRSHPDGQTNGAARLHLRHRSPPATPDSSVSSTTVDXGDELPALLLRCRSSPTTSPVLPGPSSAGSPDVRRSGPLGFEAAGASAGARGALAPGYDFCNRSSSSTRLSHQALGCRCXRPPQATVSLPVVHTSTGCCSAERRPPQHFYITGGLLAAASTWSCSCDVLSDRSFAAFVVFIAVRASTTSSSALVIVSRSGYLYMATDVAIQAVGPTTSPSSSSPSSSSSMIHRXIFLDYTSLFSDNCAVLATPLRAFVPSCPRVWQTRRDVSSFTVRLHQLFGVIFLXTIAAIVSPSSSLTRLCAPXWSTTPLPCVHDHSTAPHAXPAARLPRHQLLYFGYINHGYSTHGFIDHGSLAPIALSTSTMAQRAIIRVEHSCRFLLQSKCLRCSRLDCGGMLEYMYSIYIGPLRLNTKCVPRYAVXLYYPTYTTISRVCERVRGXDLGRRWRWHPPEAPRPGTCTPPASPRRRRGAARPRRTPARPPPPPRGGPSLRPA

SEQ ID NO: 144719 - protein, 53 aa, Oryza sativa
  Clone ID: PAT_MRT4530_45507C.1.pep
MADFFKIFATTPFKRLPYPQPDLSTHTPTSSAPRTLNAILQNHRLETLHTTKP

SEQ ID NO: 144720 - protein, 139 aa, Oryza sativa
  unsure (1)..(139): unsure at all Xaa locations
  Clone ID: PAT_MRT4530_45508C.1.pep
RRASWTXAREDVLETKTVTQSRRSWRKMTPKSXCSRTVKDETSHRVYQTRGQLGTNARNGVANTARTRXGTTMNHTPILEETSKEGLRDGRGARTADEKSTDDVAMXERRAPLSTATTSGGVDHRQRHCGPRGXTQRQP

SEQ ID NO: 144721 - protein, 185 aa, Oryza sativa
  unsure (1)..(185): unsure at all Xaa locations
  Clone ID: PAT_MRT4530_45509C.1.pep
AVLATPLRAFIPSCPRVWQTRRDVSSFTVRLHQLFGVIFLXTIAVIVSPSSSLACLRAPLVHDALLCIHDHSTAPHALPAARLPQHQLPDFGYIDHGYYTHGFIDHGSLGSFALATSTMAQRAIIRVEHSCRFLLQSKCPRCSRLDCGGMLEYMIATYSSPGAQNWNLTQQPHSWALQFHWQGPK

SEQ ID NO: 144722 - protein, 505 aa, Oryza sativa
  Clone ID: PAT_MRT4530_45510C.1.pep
MAVAAAAAARRRDVSCLLLLLCFSSSMAATGGGGGEQEADRVARLPGQPASPAVSQFAGYVGVDERHGRALFYWFFEAQASPAPEKKPLLLWLNGGPGCSSIGYGAASELGPLRVARQGAALEFNQYGWNKEANLLFLESPVGVGFSYTNTSSDLSNLNDDFVAEDAYSFLVNWFKRFPQYKDNEFYISGESYAGHYVPQLADLVYERNKDKRASTYINLKGFIVGNPLTDDYYDSKGLAEYAWSHAIVSDQVYERIKKTCNFKNSNWTDDCNAAMNIIFSQYNQIDIYNIYAPKCLLNSTSASSPDRAFFANNQEQFRWRIKMFSGYDPCYSSYAEDYFNKHDVQEAFHANASGLLPGKWQVCSDQILNSYNFSVLSILPIYSKLIKAGLRVWLYSNMHLHKKYATMPYNLPESVSVHQSSGDADGRVPVISSRYCVEALGLPIKTDWQSWYLDKQVAGRFVEYHGMTMVTVRGAGHLVPLNKPAEGLMLINAFLHGEKLPTSR

SEQ ID NO: 144723 - protein, 168 aa, Oryza sativa
  unsure (1)..(168): unsure at all Xaa locations
  Clone ID: PAT_MRT4530_45511C.1.pep
MVVPYITRTVLATPLRAFVPSCPGVWQTLCDVSSFTVRLHRLFGVIFLNXTAIVSPSSSPARSRAPWSTTPLPCVHDHSTAPHARPAARLPRHQLPDFSYIDHGYSTHGFLDHGSLAPFALATSTTXQRAIIRIEHSCRFLLQSKCPRCSRLDCGGMLEYMVVRVILG

SEQ ID NO: 144724 - protein, 54 aa, Oryza sativa
  Clone ID: PAT_MRT4530_45512C.1.pep
MASATFLEVLLAIFLPPVGVFLRYGLGIEFWIDLLLTILGYIPGIIYAVYVLVA

SEQ ID NO: 144725 - protein, 69 aa, Oryza sativa
  Clone ID: PAT_MRT4530_45513C.1.pep
MVLPHTLKFHNIKFTFISSKFSSNLKGWGTPIRTSKPLEPPIKKKLLKNEVCDILREEQLVLLCSFNFA

SEQ ID NO: 144726 - protein, 125 aa, Oryza sativa
  Clone ID: PAT_MRT4530_45514C.1.pep
GCRNSDEDKSLIPILLRSWLFFALRFGSGSSSKALVKISSFQLLGSRLFVEIYPFRLLDCVISLIFLLPNTYLVLFGNESTNLLLRSNMFVQALVYKRTNFTHIFSPLILGPNSCFLTYAKIAMC

SEQ ID NO: 144727 - protein, 40 aa, Oryza sativa
  Clone ID: PAT_MRT4530_45515C.1.pep
VWKVRCGCTYLIVLKAYPLSAVGIANTMVMPHIIGCGSNC

SEQ ID NO: 144728 - protein, 129 aa, Oryza sativa
  Clone ID: PAT_MRT4530_45516C.1.pep
MGLVALTGGGSSEVTVTPDRPVFSGLSETRVSPSLWLAEVAKQSQMRSPVTAPSLAKGADSVELVADPLFSLAKGAGLPSSSATMLLYIEHFETQHEGAEVVDESSNKSLRPNCLLLPPPCAELLLPSA

SEQ ID NO: 144729 - protein, 106 aa, Oryza sativa
  Clone ID: PAT_MRT4530_45517C.1.pep
FLFYSLTRTFFFFQELGSIPPPTNGGALLNLFFCRGHITTLFPPGVWILAPPQPCKGMLNPDMWDAYREGLGGSKGAQPKKAETATNATLLLKGRESLPGRPSLMR

SEQ ID NO: 144730 - protein, 76 aa, Oryza sativa
  unsure (1)..(76): unsure at all Xaa locations
  Clone ID: PAT_MRT4530_45518C.1.pep
MSRALTMEALHAAAAKVEQLQHKVEEATGVTSSSPTSGEEGGHLPHGWSKRTPSRLQXSVEDNLRFRLLMLARSGH

SEQ ID NO: 144731 - protein, 68 aa, Oryza sativa
  Clone ID: PAT_MRT4530_45519C.1.pep
LAKLIALDRRDLREGDNQPTPHCHYGKRCDAGIVQWVYPCMPSIHIVESHTAETNVTVPYRRSCSSWW

SEQ ID NO: 144732 - protein, 120 aa, Oryza sativa
  Clone ID: PAT_MRT4530_4551C.1.pep
MQQQQMYQQQQQLQQQLLQQQLLQQQQYLSQMPQQQQNMTQQQQLFQQQQQQLQQQTNQQGANSQSCELNPQVLISFYPTRASGHCCQLDHSSCTGSRTSMIKNAHGVLWLQQCSKEYSP

SEQ ID NO: 144733 - protein, 62 aa, Oryza sativa
  unsure (1)..(62): unsure at all Xaa locations
  Clone ID: PAT_MRT4530_45520C.1.pep
XHLFHAXIRMPFLXMPLHHSSLPLAHLXSPSSPPTHPISNWAXQAVAATSFRAPHAHCTSNP

SEQ ID NO: 144734 - protein, 123 aa, Oryza sativa
  unsure (1)..(123): unsure at all Xaa locations
  Clone ID: PAT_MRT4530_45521C.1.pep
NVGLREGNRHGRSSRRAGAPASVQSGDDGTGATNLFDCVIPVPKLADHSFRSSNLFSCVTPVLKLGFEYRLGQIGRFKYFIFKNNLXLFHVSVLFRDQGDTTEQIEGPKRVICKFRDRDDTAV

SEQ ID NO: 144735 - protein, 67 aa, Oryza sativa
  Clone ID: PAT_MRT4530_45522C.1.pep
LMQLKKNRKKTTMMMQSAADVLVDDGGKGGLGEGVDDALALFRTRVMIHEVGDHAAEAVVDWHMIYV

SEQ ID NO: 144736 - protein, 486 aa, Oryza sativa
  Clone ID: PAT_MRT4530_45523C.1.pep
MVALMAEASSKPMSPPTSHNALPRVLAFYHYWRKIYGHRFLIWFGPTPRLTVAEPELIREIFLTRADAFDRYEAHPVVRQLEGDGLVSLHGDKWALHRRVLTDAFYPDNLNRLIPHVGKSVAALAAKWGAMAEAGGSGEVEVDVAEWFQAVTEEAITRATFGRSYDDGRVVFAMQGQLMAFASEAFRKVLVPGYRFLPTKKNRLSWRLDREIRRSLMRLIGRRSDEAEQGEKADDGSFRDLLGLMINAGAAAATRGNAGGEKNSPAAAIPVEDMLEECKTFFFAGKQTTTNLLTWATVLLAMHPDWQERARREVFDVCGAGELPSKEHLPKLKTLGMIMNETLRLYPPAVATIRRAKVDVQLSDGCMIPRDMELLVPIMAIHHDTRYWGPDASQFNPARFANGASKAAKHPLAFIPFGLGSRMCVGQNLARLEAKLTMAILLQRFEIRTSPNYVHAPTVLMLLYPQYGAPLIFRPLSSHPPDSTGP

SEQ ID NO: 144737 - protein, 76 aa, Oryza sativa
  unsure (1)..(76): unsure at all Xaa locations
  Clone ID: PAT_MRT4530_45524C.1.pep
LLDIQEKLEYXRLDYEQDLXDCXSLFSAEKSYQFTDGQVITIGAERLRSPAWLCQPWLIVTEAPVIHETTYNCIMK

SEQ ID NO: 144738 - protein, 74 aa, Oryza sativa
  unsure (1)..(74): unsure at all Xaa locations
  Clone ID: PAT_MRT4530_45525C.1.pep
RVEDDLLMYGMSNTYTRWIHHGEPLVIVTGNVEHLNEDIGCNVEHLNEDVSCNVEFETNEPPDDPXDDQMYRVG

SEQ ID NO: 144739 - protein, 392 aa, Oryza sativa
  Clone ID: PAT_MRT4530_45526C.1.pep
MPTLDARLRLPLAGLSPATTSFPGSTPKPGSLSFALRPPSASLSSSASAPAAAAPPIVVVGSANADIYVEVDRLPLVGETVAARAGRSLAGGKGANQAACGGRLAAGPTYLVARVGDDANGRLLEGALADAGGVRLDRVARAPGAPSGHAVVMLMPGGQNSIIIVGGANMEGWASGVGSDDLDLIRRAGVLLLQREIPDWVNVQVAQAAKGAGVPVILDAGGMDAPVPGELLSLVDIFSPNETELARLTGMPTETFEQISRAAGACHKMDNCNMRNCIKGVKEVLVKLGSQGSALFIEGGEPIRQPIIPATEVVDTTGAGDTFTSAFAVALVEGKPKEECMRFAAAAASLCVQVKGAIPSMPDRKSVMDLLESVQPPFILNNGARGQIRRIQ

SEQ ID NO: 144740 - protein, 474 aa, Oryza sativa
  Clone ID: PAT_MRT4530_45527C.1.pep
MKPGVLELQQAGIELLGMGWGLGSSRRCRAPEAALGEGRRRRAPTAGRYVGDRVGLQPAALGSSGSNGKGRRRRVQQARWGKGSGGGVGGRRLRVGEARDEADFARRGIEGGREATGEEGATAGQQPPPPLTDPPADAADTAIAAGSGAGRSREVRREPPRRPDPPGGYRRRRHHRRICRRREARGAWLIGELSNANAFSPILPYPRLQPCSLLVLWASRCYYRDQRRTSLHPNHRCHHLLLALLPLFASAGVALLKFSKAANSHYLFNKTSALEAADVNGNNSAEILAAPLYPVSHSYLLEIAVGSLGKTRLVSFDTAVNMISVTRFSYCLPSWVKNELFSPPYVLFGSNAVLQGDMTPFLPGFPKYYLKLEGISYGIVRLDIFGSNAAAADQYHQQAQFCRGPYLPDAQFYAMNATFMEITSMNGDQEERYVCLIVDKTVDGTAVLGLSPQLDHNIGFDLENKQISIYRKIC

SEQ ID NO: 144741 - protein, 264 aa, Oryza sativa
  Clone ID: PAT_MRT4530_45528C.1.pep
MGFPSSFTAVVFALLLTFLQFSKAANSHYLFNKTSALEAADVNGNNSAEILAAPLYPVSHSYLLEIAVGSLGKTRLVSFDTAVNMVWLQCSDYCRDCNPSQVGTSTTYYNASMSISYNPLSCDHPLCGAGDNHDQQVLAECMDGTCTFKVDSLDNNGGWVQGILGSDRISISDHFFFLFDTNIIFGCATVDHSKYTLDQYGSSGVVGLGLGKYSLPQQISVTRFSYCLPSWVKNELFSPPYVLFGSNAVLQGDMTPFLPRFPKY

SEQ ID NO: 144742 - protein, 1027 aa, Oryza sativa
  Clone ID: PAT_MRT4530_45529C.1.pep
MERTWMNCKLFSKEHREGVTEFMDFVCKNLSGSQKILCPCRRVEDDLLMYGMSNTYTRWIHHGEPLVIVTGNVEHLNEDVSCNVEFETNEPPDDPEDDQMYRMVQDLYPDQNHGPRTKSKFATILEEMKQVLHPGGPYTRFSFVVKLLHIKSFYRISNVAFSAFFDLLSSAFPNCSLPASYAEAKNFIRALGLGYESIHVCPNNCVLFRKELAKKDACPICGASRWKDADSRRKIPEKVLRHFPLIPRLKRMFGSKELSAEAQWHKLKRKPVDNELSHPADGEAWKDFDRKYEWFANDARNVRLGLATDGFNPFGKMSSSYSMWPVFLIPYNFPPWQCMEQSNFMMCLLILGPTCPGKDMDLFLQPLVEELLNLWSGVPTLDALTGKEFDLHAAIIWCIHDYPALSTLSGRVTRGYYACVCCDKNPCYKRLRNKICYIGHRRFLPVDHIWRRKKDFNGQTEERAQPEEFTQDELMQQLARVEHVRPGNHPNNKKRKRVEEGQCWKRRSTLWDLPYWSNLKLRHNLDVMHIEKNICEALLGTFLDIAGKSKDSVTARLDLEDMGIRKNLHLKDDGNSTCTAPHAPYVMTKAQRKAFCAFIKNVKFPDGYASNLARCVSVDECKVQALKTHDCHILLQRILPAGLRGIMHKEIYETIAELGNFFQQICAKKLKLDALNKMRGEIPIILCKLEKIFPPAFFDVMVHLCIHLIDDAILRGPVQYGWMYPVERRLLTLKRFVRNMARPEGSIAEAYVANECLTACSRIYMKDLQTAGSHDVEGNLAKEFPGWFRKHLATRRFVNGEQIDEDLYALASLPLLRVRIFSGCIVDGVRYHTVERESSRRTQNSGVMVEGTHNGEDIDFYGQLKEVIQLQYNSDADSQRTVVLFKCDWFDTCSKKSRMKNDGYFKSISHGSCWYKDDAFILATQATKENDDRQEGGVDLTYQDDEQEISRVETMEGSLVDKQPVNEDGISVPKSLVDQIRRQRDLEVEEDDLYNDDDDDDTLGQYDSENECTIMIPNDDGEYSDVE

SEQ ID NO: 144743 - protein, 1173 aa, Oryza sativa
  Clone ID: PAT_MRT4530_4552C.1.pep
MEEEEQPGAGAPAPEPLPSQLECTGLRVFFYIPDILKNTIQSLRDSNRHDFDAWVSLIKAAEETSMNDIEVIDLVYHSFLLEFPLCYGYWIKYAAHKARLCTNKQVEEVYEQAVQAVPHSIDLWVSYCGFAMCTYEEPAHIRRLFERALSLVGKDYLCYHLWDKYIEFEKSQKQLIQLATIYIDTLKFPTKKLRRYYESFRKLVTLMEHEAAGAERSSENLRTLEVIKAEDSEVDASIKISALLDEHSGHLRADAVKQYLLSGESLYQRSSKIDKEISCFEASIKRPFFHVKPLDDDQLENWHRYLDFVEKKGDFDWAVKLYERCLIPCANYSEFWIRYAEFVDAKGGREIASYALGRASSYFVKGVPTFHMYYAMFKEQIGDAQGARSLFIEGSNNLTSNFCANINRLANMEKRMGNTKAASEIYETAIQDAMQKNVKILPDLYTNFAQFKYAITYVGYTLVQYSSLTTFCIFHYSSSCFSADMLYILQGFMQFMSTHGGPTEIPILDSVISNAVVPGSDISTVLSREDREDISLLFLEFVDLYGDVRDLRKAWARHSKLFPHNTRHMLQQYCNSENSLQENNKRRRTENYIVSQDDSPKDAITLKQLSKSDTSLLVDKVVGLQVDKSTVDSGIGHTVEEQNILGNVDVHHEVGDTAQECIDMTDSQHNLDKSGMQNQVSAHGTHESCEQNDQTTESHPSVCENAPHAESFTCDSPSKSNSFSKISALDKANTIDVSASVDQGAICPRSDSPSVASLPKEETSPDPVRISPELEEKKHDKIQGQLETKDDMSLSNANIEKSSDSPDATQHDREVSALSQEHVQSAQPQQLPDCARPSSSEMATTPATTSSQFSPSTAVTSQAQLQHQIVSSQMHQSDKLSLAEQNTQQQGLAYEIPQNVQASSQSQAQIFAQPNQGDQQSLQTMQGYASQMWQYYQQQMYYLQAQHNQQLQSLQQQQLPTEHLQQNFMQQVQQLNQQMVLWQQQVQQQQQQQQQQQQQQQQLQLQQHALPVQQQPDQKYSQLPSSGDTRHEQNKPQKLESQMDHQSELVQQQQVYFQQQQQMYLMQQQQMYQQQQQLQQQLLQQQLLQQQQYLSQMPQQQQNMTQQQQLFQQQQQQLFQQQQQQMVVLQQQQQQQFIQQQMQQYLQQQTNQQGANSQSCELNPQVLISFYPT

SEQ ID NO: 144744 - protein, 63 aa, Oryza sativa
  Clone ID: PAT_MRT4530_45530C.1.pep
SIFVCEKKNMKFHSLLWLWPMPSTATRWIGSTTTSTTYTPTPQQDPHGGHTHIVHTLPIAQSD

SEQ ID NO: 144745 - protein, 481 aa, Oryza sativa
  Clone ID: PAT_MRT4530_45531C.1.pep
MAASGGTERLAFLVDRHWPAVSRACVSSGRLALAALRQWRGCAARGILEMASLGPASVFVILWSFFVCITSPACALYALLGMGAAGAVIHYMGYTPGLFIVGLFGILIMWMYGYFWITGMLLIAGGCMCSLKHARFVIPVLAMYAVYCVAVRVGSLGVFLTLNLSFLTNDLLNKLLQGYEGSTEERQFEEPKHSDPVMDEFYRSCEFPSAPDSEPETVSSAKPFCSTPVQDVLHVQKEASPSKVVKSDSVSLDEMKRIMDGLTHYEVLGIPRNRSIDQKILKKEYHRMVLLVHPDKNMGNPLACESFKKLQSAYEVLSDFTKKNTYDDQLRKEESRKMTQRSRVVSQQDCSDFHPAKDGDGWVENKFSSSFKEIPRAFVCAESKVFDVSEWATCQGMECKPNTHGPSFMVNMVGADRMSQRSYSSRYPFSLNAEMIPEDEFELWLQQALASGVFSDSPKRRKSWSPFKLPQKGIKSWRRSS

SEQ ID NO: 144746 - protein, 199 aa, Oryza sativa
  Clone ID: PAT_MRT4530_45532C.1.pep
LSCGDCQQLLSNQDSNSSMVASGNNTAAPLANTLPAVINPLLLATACTGSPKGLDLLLNSKVAAGDQRVLPFALGSQRFRDLISAYTSSDRSSLATPTQRIPPHDDPEALLAEMLMLEGVAVDGDTVLHAVATYGENDDFQKCAQTMCSKARQLLFKQNKNGDTPLHCAARAGKIQMVSCLIDLARGGGGDGNSSSSSS

SEQ ID NO: 144747 - protein, 98 aa, Oryza sativa
  Clone ID: PAT_MRT4530_45533C.1.pep
IEIQYELNSDKDPNRSPTGLGGPSDGSYIFVRGVTGGGIASPWEYGEENTRGGEGRAGAIYYFLYIDARYFARVPSTSQRLLPLHSASSGNCCTKKIN

SEQ ID NO: 144748 - protein, 401 aa, Oryza sativa
  unsure (1)..(401): unsure at all Xaa locations
  Clone ID: PAT_MRT4530_45534C.1.pep
QEKESNSLKRCKRSINFFFRSFLSKHHQCQQATXHNFIIKADDRTKPKHRNXKTVFVMIKDLIVVFGKGSSSQPIASEDGHTVMLKKKSIXFWELPYSEVLDIRQAIDVMHLTKEKGSHYLSQTSYTLSKAEKESMXECSNNIKVPSRYSLNMKGIISMKEKKITNLKSHDCHMSMTKLLPVISRGIFPDNVRTIITKQCAFLNATSQNIIDPDRLTTLQNDVVQCLVSFKMIFSPSFFNIMAHLLCHLVKEIGIFGPVYLHKMFTFERSNHRQGYVTKEVIELCVXFIEDLRLIGVPESSHEGRLRGKGTLGRKTLMIXNDLFCKSHFMVLQQFSLVAPYIEEHLAVLHSKNIGMSDVQITRHHIDIFPAXLRQHLMSNETIDQQLPFXARVPSSSISTF

SEQ ID NO: 144749 - protein, 57 aa, Oryza sativa
  Clone ID: PAT_MRT4530_45535C.1.pep
SYNDRTLSRSRSYTYIWQSNSINSGGADFAVSYRDQPLSCLLPTPRFPSSSTLTLLP

SEQ ID NO: 144750 - protein, 296 aa, Oryza sativa
  Clone ID: PAT_MRT4530_45536C.1.pep
MSTAAAAAASTSLRPASQSALRLAGSPRRWCWGAPALSPARRAFHADTRRRKTLLYATDKGPEESLKKTIEVDRLIEMLRDANPREKDYEELAENVMNIVDRLVHKTDEKIEQSTDVLKAIISPVMHEGENATWPPRDPEALKLMEKEISNREKEGQLDEGFLSEVNAQLRQAKQDGDKPGLQAMLQKVLQLYASNFLQKRSYAYKGGEVIVPESFLESVIKAPENEWNKLLLDGLTVGKGNVSPEEFYAVIKKRIERVLIRTEGGSYQQRILVEYLKEIQARAEEVVKVLQGPTI

SEQ ID NO: 144751 - protein, 295 aa, Oryza sativa
  Clone ID: PAT_MRT4530_45537C.1.pep
AEPSRTDLHCSTSYPLLSSPHLIHSPSLSLSLSLSAMTRRQWPLQCAAVGGDAAAAAARWQEGRRQWSDRPGGGGGALPSARSGGRGGGVDSPTAKGDAAAIEDEQNEWEKNTHEEWKKYIGLQIFFESLESSPRLQDCNSWSKTEENRPYGEKPVAHMPYYHSMPPPLCFLPMPTIASARHSDIHLLRWSYFARQLLWQNLKMNRMQKLKRKRSHCHVPSVPSSCCRGFEQSTCVSALDVEHMRMRGGGEAFHHRMRMGREEALVISADQGAPLFLGVLTRTGKALLRHISEGP

SEQ ID NO: 144752 - protein, 69 aa, Oryza sativa
  Clone ID: PAT_MRT4530_45538C.1.pep
SIAIQPNGIDDFGVGYGGAGRFPCSTAEARRAIGRAPGRMRKLRAGDEDPRRWAAALEDPSLRSACMHS

SEQ ID NO: 144753 - protein, 50 aa, Oryza sativa
  Clone ID: PAT_MRT4530_45539C.1.pep
IEKIGATICCNALYSLYCKRKKIKIRHTLQCFMSLACKHQKKKLVMLHRS

SEQ ID NO: 144754 - protein, 24 aa, Oryza sativa
  Clone ID: PAT_MRT4530_4553C.1.pep
SLTRGGHPSNFSPYGWEVAHLADC

SEQ ID NO: 144755 - protein, 73 aa, Oryza sativa
  Clone ID: PAT_MRT4530_45540C.1.pep
MEAKHAAVPRLWKLGGHAVVHRNDNDGRGGSGLHARGPPTVATGGADPASTRPLPLLPGSRRLSADGGDGKGG

SEQ ID NO: 144756 - protein, 968 aa, Oryza sativa
  Clone ID: PAT_MRT4530_45541C.1.pep
MAAAAGKAAMERHQSIDAQLRLLAPGKVSEDDKLVEYDALLVDRFLDILQDLHGPHLREFVQECYELSAEYENDRDEARLDELGRKLTSLPPGDSIVVSSSFSHMLNLANLAEEVQIAHRRRIKLKRGDFADEASAPTESDIEETLKRLVTQLGKSREEVFDALKNQTVDLVFTAHPTQSVRRSLLQKHGRIRNCLRQLYAKDITADDKQELDEALQREIQAAFRTDEIRRTPPTPQDEMRAGMSYFHETIWKGVPKFLRRIDTALKNIGINERLPYNAPLIQFSSWMGGDRDGNPRVTPEVTRDVCLLARMMAANLYFSQIEDLMFELSMWRCSDELRIRADDLHCSSRKAAKHYIEFWKQIPPNEPYRVILGGVRDKLYYTRERTRHLLTTGVSEIPEEATFTNVEEFLEPLELCYRSLCACGDKPIADGSLLDFLRQVSTFGLALVKLDIRQESDRHTDVLDAITTYLGIGSYAEWSEEKRQDWLLSELRGKRPLFGPDLPQTEEIADVLGTFHVLAELPADCFGAYIISMATAPSDVLAVELLQRECHIKQPLRVVPLFEKLADLEAAPAAVARLFSIDWYMNRINGKQEVMIGYSDSGKDAGRLSAAWQMYKAQEELVKVAKHYGVKLTMFHGRGGTVGRGGGPSHLAILSQPPDTIHGSLRVTVQGEVIEHSFGEEHLCFRTLQRFTAATLEHGMHPPISPKPEWRALMDEMAVVATKEYRSIVFKEPRFVEYFRSATPETEYGRMNIGSRPSKRKPSGGIESLRAIPWIFAWTQTRFHLPVWLGFGGAFKHIMQKDIRNIHTLKEMYNEWPFFRVTLDLLEMVFAKGDPGIAALYDKLLVAGDLQSFGEQLRNNFEETKQLLLQVAGHKDILEGDPYLKQRLRLRESYITTLNVCQAYTLKRIRDPSFEVMSQPALSKEFVDSNQPAELVQLNAASEYAPGLEDTLILTMKGIAAGMQNTG

SEQ ID NO: 144757 - protein, 990 aa, Oryza sativa
  Clone ID: PAT_MRT4530_45542C.1.pep
MAAAAGKAAMERHQSIDAQLRLLAPGKVSEDDKLVEYDALLVDRFLDILQDLHGPHLREFVTYLLPRSCCSCPPPVRSIAHTVQECYELSAEYENDRDEARLDELGRKLTSLPPGDSIVVSSSFSHMLNLANLAEEVQIAHRRRIKLKRGDFADEASAPTESDIEETLKRLVTQLGKSREEVFDALKNQTVDLVFTAHPTQSVRRSLLQKHGRIRNCLRQLYAKDITADDKQELDEALQREIQAAFRTDEIRRTPPTPQDEMRAGMSYFHETIWKGVPKFLRRIDTALKNIGINERLPYNAPLIQFSSWMGGDRDGNPRVTPEVTRDVCLLARMMAANLYFSQIEDLMFELSMWRCSDELRIRADDLHCSSRKAAKHYIEFWKQIPPNEPYRVILGGVRDKLYYTRERTRHLLTTGVSEIPEEATFTNVEEFLEPLELCYRSLCACGDKPIADGSLLDFLRQVSTFGLALVKLDIRQESDRHTDVLDAITTYLGIGSYAEWSEEKRQDWLLSELRGKRPLFGPDLPQTEEIADVLGTFHVLAELPADCFGAYIISMATAPSDVLAVELLQRECHIKQPLRVVPLFEKLADLEAAPAAVARLFSIDWYMNRINGKQEVMIGYSDSGKDAGRLSAAWQMYKAQEELVKVAKHYGVKLTMFHGRGGTVGRGGGPSHLAILSQPPDTIHGSLRVTVQGEVIEHSFGEEHLCFRTLQRFTAATLEHGMHPPISPKPEWRALMDEMAVVATKEYRSIVFKEPRFVEYFRSATPETEYGRMNIGSRPSKRKPSGGIESLRAIPWIFAWTQTRFHLPVWLGFGGAFKHIMQKDIRNIHTLKEMYNEWPFFRVTLDLLEMVFAKGDPGIAALYDKLLVAGDLQSFGEQLRNNFEETKQLLLQVAGHKDILEGDPYLKQRLRLRESYITTLNVCQAYTLKRIRDPSFEVMSQPALSKEFVDSNQPAELVQLNAASEYAPGLEDTLILTMKGIAAGMQNTG

SEQ ID NO: 144758 - protein, 971 aa, Oryza sativa
  Clone ID: PAT_MRT4530_45543C.1.pep
MAEEHETRPPSAGRPPSSGRGRADDADEREEGEIADDDSGHAPPQANPAAPHPLEHAWTFWFDNPQGKSKQATWGSSIRPIHTFSTVEDFWSLYNNIHHPSKLVVGADFHCFKNKIEPKWEDPICANGGKWTFSCGRGKSDTMWLHTLLAMIGEQFDYGDEICGAVVSVRGKQERIAIWTKNAANEAAQISIGKQWKEFLDYKDSIGFIVHWDILSKYEDMSELYAESLDRVKLLTSLWGNYSIPKDNPYTDDSDLELEVWALGLRNPWRCSFDSARPSYFYRADVGQFQAFSTWYISEYVYSYVKISEYLLLVVAVQSREFPAFSHPPESSRTVEIARLLRTVTFIYFLPLDAPVQTRTKPPTDSDPTISIARSASLPDRSAPPPRAMADEAKAKGNAAFSAGRFEEAAAHFTDAIALAPDNHVLYSNRSAAYASLHRYPEALADAERTVALRPDWAKGCSRLGAARLGLGDAAGAVAAYEKGLALEPSNGALKDGLAHARQARRPAPASGAGAIGKVFQGPELWSRMAADPTTRPYLDQPDFMRMLRDVQRNPSSLNNYLSDPRMVQVLSLMLNLRLPNNDAPPRPPAQSTPPPPPQQQQHQPETKAREPEPEPEPMEVTEEEKERKERKAAAQEEKEAGNAAYKKDFETAIQHYTKAMELDDEDVSYLTNRAAVYLEMGKYDECINDCDKAVERGRELHADFKIISRALTRKGTALAKIAKCFKDYDVAIETYQKALTEHRNPDTLKKLNDAEIAKKELEQQEYYDPKIADEEREKGGDEDETLILVHSCAGNEFFKQQKYPEAVKHYSEALRRNPKDPRVYSNRAACYTKLGAMPEGLKDAEKCIELDPTFSKGYTRKGAIQFFMKEYDKALETYQAGLKHDPNNQELLDGVRRCVQRINKASRGELSQEELQERQNKAMQDPEIQNILKDPIMQQVLTDFQENPKAAQAHLKNPGVMQKIQKLKNA

SEQ ID NO: 144759 - protein, 185 aa, Oryza sativa
  Clone ID: PAT_MRT4530_45544C.1.pep
MVEARRSALQIRWHRGEAAFDDSVVKRATAWIGRRGQMSSVEGPWWWSPMARLGNLAARSRRHWLDSGLGGWAGPRPMQTRQSPGGHDEEETRERREELQRRRQLGRRHRITQGIAAQAHNIVDSSATQQLGIASHSTSQHLAACLHGVSPPAANRQQPPAWSPGRNHARQQLGKSARLAVQASS

SEQ ID NO: 144760 - protein, 105 aa, Oryza sativa
  Clone ID: PAT_MRT4530_45545C.1.pep
HSQFLSFHVFGENKQPIIIDWMASWCRKCIYLKPRLEKIAGEFPGVRFYFVDVNKVPQTVVKRGNITKMPTIQLWKDGEWAAEVIGGHKAWLVMDEVREMIQKHK

SEQ ID NO: 144761 - protein, 80 aa, Oryza sativa
  Clone ID: PAT_MRT4530_45546C.1.pep
MAVGHRQGKGGLEAGRIEGDGEVLQLWIDLLDLAPTYAICLVTIELVNDTPLLLCVSRNSKSFQFPLRKCCTGYQHFSSN

SEQ ID NO: 144762 - protein, 334 aa, Oryza sativa
  unsure (1)..(334): unsure at all Xaa locations
  Clone ID: PAT_MRT4530_45547C.1.pep
MAASPPRSPPGAPPSPPSSSPTPTGISRMWFLDSTLWSLTCSLTAAAMAAEEILDLSNGXRITAKIAAWGATITSLIVHDARGNLAVVVLGFDTLEPYMKGISPYFGCIVGLVANRIKEGKFTLNGVEYSLAINNGPNSLHGGLKGFDKVVWDVVERKSECPSITFQYHSKDGEEGYPGDVTVRATYSLPDSTTLRLDMEAVAENKATPXGTPFDFTTEHKIGARINDVPGGYDHNYVLDSGEEKNGLKHAAKLKDSSNSRTLDLWTDAPGMQFYTANYVDGVTGKGGAVYGKHSGVCLETQGFPNAINQPNFPSVVVQPGEKYKHTMLFEFSA

SEQ ID NO: 144763 - protein, 58 aa, Oryza sativa
  Clone ID: PAT_MRT4530_45548C.1.pep
MARLGSCLCWPGPIAGPCLGYSLGTASNGHSEGGGSGNAAIGRAGSAARCSCSRGQGR

SEQ ID NO: 144764 - protein, 82 aa, Oryza sativa
  Clone ID: PAT_MRT4530_45549C.1.pep
MEAPQLETRWKRNSRQRGAEMTAQQPAWAAARWKRSSWQRAAETTAQPPTWAAVQGADEAKWPRSVAIACNDSGSADAVATH

SEQ ID NO: 144765 - protein, 108 aa, Oryza sativa
  unsure (1)..(108): unsure at all Xaa locations
  Clone ID: PAT_MRT4530_4554C.1.pep
VFSPNNNLLSPHFGIGPSPFFQXGVFQLKNNQVWHPLPLGGPLFPFQALTFVQAKGQQLQPPQFGVFSFEGNLAQAQLFLAFYVPFKYGFPPGYFGAPRPLPPLGGVL

SEQ ID NO: 144766 - protein, 220 aa, Oryza sativa
  Clone ID: PAT_MRT4530_45550C.1.pep
MASSPFAAAVQGGLALRPVAPRRLSSTSSDVARSGGVAAWRAPRRRRVAPVGDLRPAIDEYPEGILSGEWPENFSLLSYADLRAYLESQIVTTDQMSPTAKLGEVMSRLVQVAMADQRLADIDAFFAAQSGLPVLDEEGRCIGVISKKDKAKASNGLDSTVGEVMSSPAITLTPEKTVLEAAALMLKEKVHRIPVVNEQQQVIGIVTRTDVFKALEASKV

SEQ ID NO: 144767 - protein, 162 aa, Oryza sativa
  unsure (1)..(162): unsure at all Xaa locations
  Clone ID: PAT_MRT4530_45551C.1.pep
MDKFFIRNPSTMNTTRGSSSANASRPIPRENFAVPQPIDLDKLPWDPSKRKRXADYYPNQHEDIRRKYLVWGPYQPHDDFQYLYRLIGNKKRQFNPSNWLEYSEKDDKAYCLCCYLFRDSIKDNHYGYDAFVIEGFYSWNKTKRLVTHVGDRNSFHNKALKS

SEQ ID NO: 144768 - protein, 64 aa, Oryza sativa
  Clone ID: PAT_MRT4530_45552C.1.pep
QELEPEHATVTPVFGSFHRFSNKQGSLHPWGLKDLLRNGSSLNMEADKGGLSSILEAEQGILLP

SEQ ID NO: 144769 - protein, 240 aa, Oryza sativa
  unsure (1)..(240): unsure at all Xaa locations
  Clone ID: PAT_MRT4530_45553C.1.pep
GGPRPCSPSSVQALQLPPPRGASTTNSSTGRPRTLPRPRQAASGPPPSPVAAARPDLQRPSCRCCPATPPPCALHRPRQAAAGASXAPPPQPAQSRPPSPPSAAGASQPPPPPPPQSGPPSLPFAAGASPPPPASRPSSPPCAPRSSGWPWRFDASWWDPKGPTSLWLAWQGSTGAMVPPCRGWPPPPTCPSWRRLHLLLRPRVLTVKASKAVKDGAGDLGVYADNDIIKAMKVLFIQQE

SEQ ID NO: 144770 - protein, 95 aa, Oryza sativa
  Clone ID: PAT_MRT4530_45554C.1.pep
MAHGQSLAQLPPCLAVPLARVREAIVGGGVTQCDIGRSAGAVLGLRGDGRGGGHLCPASTGNLLYVFSRLAHPAATVAFTMKPQYLLRRESSYYA

SEQ ID NO: 144771 - protein, 178 aa, Oryza sativa
  unsure (1)..(178): unsure at all Xaa locations
  Clone ID: PAT_MRT4530_45555C.1.pep
KARAGAGARGQNGDGGGXDAGGEGKRKRGRXKGGLPPCLFGKRRREGKRRGRGRRSSASVPWRLAREWRGRGDDGGAVWSGATTRAAGAAEADGGGDQAVGHHGTRARKTTGGAARARALAAVPSGCMRGRAAGPGGANGAGATRATTTRARARTTRGERQPGSGKEGSARRGRSRAR

SEQ ID NO: 144772 - protein, 211 aa, Oryza sativa
  unsure (1)..(211): unsure at all Xaa locations
  Clone ID: PAT_MRT4530_45556C.1.pep
ADLEPLLETCAALRELDLSEFYCWTEDVVRALTTHPSATAALTHLDLGLAAATDGFKSSELGPIAASCPNLRKLVVPCLFNPRFSDCVGDDALLSLATSCPRLTVLRLSEPFEAAANNHPEEISDTNAFIAARLAGCFPAVTSLAVYCRDPTTLANLTPHWQASLRRVKLVRWHQRPPTLPXARISSRCWRPAPRSGSSTCRSSTAGPRTS

SEQ ID NO: 144773 - protein, 91 aa, Oryza sativa
  Clone ID: PAT_MRT4530_45557C.1.pep
LAPLLRGKVFPESGKETVGVFFSSKLLWGGGCFYWKQNPMVLFRWLKCIFIFQTPMKKLNCFHVKYVENKPVEKKKKKKKKKKKKKRTGRP

SEQ ID NO: 144774 - protein, 187 aa, Oryza sativa
  Clone ID: PAT_MRT4530_45558C.1.pep
MMSTLSLSSPLFLAAPPKVQGVISCRAALASASWNSVMLGRKSKTRETIVPDPDYRLPIVILGIAGAFAYADNLLAAAPVGLLGCLLLFQTTRVRFVFDDEALEVKVGDQLEESGENVFVGGKNRWRYSTFVNWELWWPQFPILVYFKETQTKPEGQIHFFPVIFNGRQLYDAMVERAGPSETSGPK

SEQ ID NO: 144775 - protein, 71 aa, Oryza sativa
  Clone ID: PAT_MRT4530_45559C.1.pep
MDQYTSTPIASIQFGDQSSAAGAIANTGMSVAQGITRSIGPSKAMWICTAPPTGSVVDIAARVCLDVRAVD

SEQ ID NO: 144776 - protein, 886 aa, Oryza sativa
  Clone ID: PAT_MRT4530_4555C.1.pep
MAKDKEVGPPPPPCVDSDHEDLPLAERRRRLLRPPAESKPPAPERREASAAAAAAEDSGGAAQQGWPGLPRGVEFNPTDSDLLWHLAAEVGNGQARRHPFINEFIKSVDETIGFGYTHPQDIPGIRQDGCASYFFHKNFKECANENSKCIRWQKSGNPISITLDGNLQGCKEVFVLYAYETDGNNPQITDWRLHQYHIESTEKDEGELVVSKIFYELEKNQFKWAEKSHAQSAQGASAIDDDSKEELQLDNHSFNMITENSSVQGNENKQKQTQTGTCPNLDKLSYFNVVSNMHIGNQINDHDEIEELDHMSLQERYRILMAENHSSSAVVSSEQCAIDGLENSCKPGTNGMIPKRIHEGTAFRDGMYSMLQEISSAPAIIGSIDNDNNRRLLTEGLSNNQQSHEAGCESGFLSTSSSAAPPQCQVVCSHDLLVNGKTLIYSRDPSSSSTPTFGDKNIQLEGTDDRTLLVDIKLEPALEGDFTEKITSSVQRTDPNHGTEGSNLVGSINSVSSAISKRISEAARSNPENSHVEGLLPSSRIKSEVTGSELPLVVCGLTSISIAELTAKKTNTLNHDGVLAYCSRKRKRRKTLRDPSEKTLEEDSLRNDEGTAYFSRQRRRRKTATDSIETALEEDAPGLLQILLDKGILVKEIKLYGVEEEDDMVPDCTESDFQDLENVITKLFPQRTSLLKSALRHEKGEKAIYCLTCLISLIEQSRYLQFRDCPVEWGWCRDLQSFIFIFKSHNRIVLERPEYGYATYFFEIVKSLPIQWQIQRMVTAMKLSGCGRTALIENRPLLIGEDLTEGEARVLEEYGWVPNSGLGTMLNYRDRVVHDRWNERSGTDWKTKIGKLLMNGYSEGHLVLSHFPTKVGKIEDDTEIKQEDPL

SEQ ID NO: 144777 - protein, 183 aa, Oryza sativa
  Clone ID: PAT_MRT4530_45560C.1.pep
MDSIHEEQRPRRRQQQQQEGGGEETVVEVPEMDGELLVELLEASLAAEEDEEAVAQRKQQLGFFTADVGDGWDGQELMNSIHPHQEEEGCEDCGLDDILSDFDGGGYPPASSPPYLSEFWMEEMDHATAGPFAVAGECPGEEWYMDGMAMEWEDGRSYYSFHYPSYGADASCTDQLYSSPLWE

SEQ ID NO: 144778 - protein, 48 aa, Oryza sativa
  Clone ID: PAT_MRT4530_45561C.1.pep
MMSEDAKPRCARSAKDQGAHMVASAERMDAVTTMRLLPQSLRKMTLKS

SEQ ID NO: 144779 - protein, 45 aa, Oryza sativa
  Clone ID: PAT_MRT4530_45562C.1.pep
MVALGVLSGAGAGPMWVFVGCLPGIACLVFFGVPRWHLARSLGVG

SEQ ID NO: 144780 - protein, 59 aa, Oryza sativa
  Clone ID: PAT_MRT4530_45563C.1.pep
WLHQHLAFPACPPPYDPVVPACIAPKDPAGTSSSHADDETDPPGSLSPWGCFPPPRFGT

SEQ ID NO: 144781 - protein, 88 aa, Oryza sativa
  unsure (1)..(88): unsure at all Xaa locations
  Clone ID: PAT_MRT4530_45564C.1.pep
QAPTAGRRXAPRAAPAAGTRXRWRARRKRRLHHHEDQPERVDADQLRHVRRLPKHAPQAAALHGVALPAQRRRDRNYPMSRRFGRCRL

SEQ ID NO: 144782 - protein, 81 aa, Oryza sativa
  unsure (1)..(81): unsure at all Xaa locations
  Clone ID: PAT_MRT4530_45565C.1.pep
TYHRSPSCPMRKSAGLRAARALRGWTPATSPFAGGRVARKGLDDSSPQRQACPERXLGPVXAGVAAAGAVVVDRAAPNGSR

SEQ ID NO: 144783 - protein, 257 aa, Oryza sativa
  Clone ID: PAT_MRT4530_45566C.1.pep
MADSMVSSFWGPVTSTTELCEENYAHSSYIAEFYNTVSNVPCVLLALVGLVNALRQGFEKRFSVLHISNMILAIGSMIFHATLQHVLQQSDETPMVWEILLYLYVLYSPDWHYRSTMPTFLFLYGAAFAVVHFLVRFQVVFKLHYVGLCLLCIPRMYKYYIQTKDMAAKRLAKLWVLTLSLATLCWLFDRMFCKKLSHWYVNPQGHAWWHILMGFNSYFANTFLMFCRAQQRGWEPKITHLFGFLPYVKIQKPQKRE

SEQ ID NO: 144784 - protein, 104 aa, Oryza sativa
  Clone ID: PAT_MRT4530_45567C.1.pep
MRQQQAEATDGRLAGGGVPSARSNGRGGRVAARRKWPWRHSRPQKVEAVEAAAAAGRRPGGTSSGGGPEAAGWEARRRFRDDFVDDLVNDLWGFGGDDIGARNQ

SEQ ID NO: 144785 - protein, 289 aa, Oryza sativa
  unsure (1)..(289): unsure at all Xaa locations
  Clone ID: PAT_MRT4530_45568C.1.pep
KNKKKEEKXKIKKKRKEKEKKXKXKKKKKKEKRKKKKKEKRRXEDGNKKKKKKKKRNRKKSHQGKXPKNKKEKKNREKKKKKKEKKEKKKKKKKKKKKKKKKKKKKKRQKKKKKKKEKKKKKKKKKKKKKNKKKKKKKKKKKTKKRKKKKKKKKKKKKKKTKQXKKKKKKKKKNGKKQKKKKKTQKKNPKKKKKKKKKKRKKKKKKKKNKKKQKAEKRQTRKQKATPPTKDGAGALTFSNGFRAYIYIFAGGVKEFNLRILLADGIDGFTLPFSPSSRGGFTPRTPRTA

SEQ ID NO: 144786 - protein, 409 aa, Oryza sativa
  Clone ID: PAT_MRT4530_45569C.1.pep
SSGRIFMSSKSNRDLILSFFFPSRFNKVKMVSQVRPSVNQMETSDDAARQVITNTRNEGRMGPTGNTGLKRRKGRGLTINGTLAKLRARGVPLDIQFAAQFGKVYGRHASVFKSEVTVCVRQEVPLKVKKWKVIEKAFPGTMSSIWNLLKAKFPEISMADYQCVMTQVERKYNCPSHVAPEDWQWLIDNLWSDEQFQKRSKHNSINRSKQEMKSHVGTKSIVQIAHELRNLVTGEWPSAIDVWKATYLKNGTWSVPNGEEILNNLQTVAETNQERIAAAQIPMVEHFALVLGRKPNHSHGVGISAINEGAQERYRVNAQAEAAQQQANEAHQQAAALLEEVQKLTVENLQLKGELQSQREELNSQKRTVEEQSGHMECLLAQKLEERMKAMWARMGGTGGASSSSVPNN

SEQ ID NO: 144787 - protein, 42 aa, Oryza sativa
  Clone ID: PAT_MRT4530_4556C.1.pep
WLSYHGPLISAGNVLYVSRLILVYFCPVKNYALSAIIVHRLI

SEQ ID NO: 144788 - protein, 417 aa, Oryza sativa
  Clone ID: PAT_MRT4530_45570C.1.pep
MGGDPGGGSELHLSNTTCSKVKMVSQVRPSVNQMETSDDATRQVIPNTRNEGRMGPTGNTGLKRRKGRGLTINGTLAKLRARGVPLDIQFAAQFGKVCGRHTSVFKSEVTVCVRQEVPLKVKKWKVIEKAFPGTMSSIWNLLKAKFPKISMADYQCVMTQVERQYNVRRHKLYKTYCTTKQCPSHVAPEDWQWLIDNLWSDEQFQKRSKQNSINRSKQEMKSHVGTKSIVQIAHELRNPVTGEWPSAIDVWKATYLKNGTWSVPNGEEILNNLQTTAETNQERIAAAQIPMVEHFALVLGRKPNHSRGVGISAINEGAQERYRVHAQAEASQQQANEAHQQAAALLEEVQKLTVENLQLKGELQSQREELNSQKRTVEEQSGHMERLLDQKLEERMKAMWAHMGGTGGALSSSAPNN

SEQ ID NO: 144789 - protein, 570 aa, Oryza sativa
  Clone ID: PAT_MRT4530_45571C.1.pep
MATAEPGPGPGPRKPACCAVTFGRSTLLGRHLAAALAASGRWSTVAVLDPSPPTTTTTTSPPPGSPLAHHHLAVDLCDPASLARALAGVEAVFHVDPTGDGSSFLQLHRLAVEGTRRLLAACCRSGVRTVVYTGSADVVVAGARDVVDADEDALPYPDKLGNAAIELRAQVEMMVLSADGKNGMRTCVLRPSNMFGPGDSSLVRFVAGYARSSLGKFVVGSGANMCDFTYVENVAHANICAEQALCSNASSVAGKPFFVTNDEPIETWEFMSCLMEAMGCQRPKFNLPAKILSSAALFSNMMYHKLGLQILSSPLLHPDMVYFLSCTRTLSISRARKLLGYHPIVSLEDGIMRTVGSLSELPDKLDLSRKRGSFGSSKAEKLLGSGITADILLWRDEKKTFSYVTVLFLLFYWFLLSDRTFVSSAAKILLVISLALFIHGVLPPQVFGFTVEKVTSDYFEVSQETLKNTLVWMASIWNGGIYKLRVLAEGDDWTTFLKAFAFLYCVKVMLNLQFRMLMGLVLAFMFVVFIVYEQCEEEIDSLVAFASVKVKSLVGKVIGNLPDALKAYIS

SEQ ID NO: 144790 - protein, 72 aa, Oryza sativa
  Clone ID: PAT_MRT4530_45572C.1.pep
MAEPVGERAMPPNPGVTARFLGASTDWKQVSSGTGLYKVSDGLLSNPTPISWSFLAVSFPSISVYHGKTLPS

SEQ ID NO: 144791 - protein, 108 aa, Oryza sativa
  unsure (1)..(108): unsure at all Xaa locations
  Clone ID: PAT_MRT4530_45573C.1.pep
MEATVFAPXPGRHPGTASGGGGGGRRRCTGXDGYEWHEIDIQGRGCNEEVHPWTLPDRCVRWMRARRESRSWSRKDPISLLRRGSTSLNXDSLHQFIPSVEALSGWGF

SEQ ID NO: 144792 - protein, 111 aa, Oryza sativa
  unsure (1)..(111): unsure at all Xaa locations
  Clone ID: PAT_MRT4530_45574C.1.pep
GRPIGRPRASTAWHGHSSGQPSRATARGGAATGGDXRGQRQRSAAGEEEKEVGVLAKCTTVGGAWEGADRHGRELDGEKRTPAVDDEGEEVAEVRYSTAKPTEVMASDDSG

SEQ ID NO: 144793 - protein, 77 aa, Oryza sativa
  Clone ID: PAT_MRT4530_45575C.1.pep
MADTESGPHMHAGMHMFNTHLSVTNGTRHNVRKLQKIDMKASLLNQYRITTHDSLVFIVLENTINNVSHTFDWYAVI

SEQ ID NO: 144794 - protein, 131 aa, Oryza sativa
  Clone ID: PAT_MRT4530_45576C.1.pep
MRGGGGGGGGDGMMDDGPKYAQIPTSFGHELRACLRCRLVKTYDQFMEQGCENCPFLDMERDHDNVVNCTTPNFTGIISVMDPGRSWAARWLRIGKFIPGCYTLAVAEELPEEYQSVCQDNNVQYFPPKRV

SEQ ID NO: 144795 - protein, 228 aa, Oryza sativa
  unsure (1)..(228): unsure at all Xaa locations
  Clone ID: PAT_MRT4530_45577C.1.pep
SLALAVWAAVPGRLRGKRTVSEALHDRRXIRDISSALGMQAILXILQALGAPPIGAAVXRAGQAFLVHKPIWKSFAPPRCRYFLWLVALNRCWTADRLRSRGLSHPDRCXLCDQRDETIDHLLVACPDSRQLWWIALTAIGHSECLPLNEQSFHAWLCDSRKRMIKDHRRGFDTIAALVAWTIWKERNNRVFNQKSRPWMEIARAMXGEADLWRMARSAIPTMTVPSL

SEQ ID NO: 144796 - protein, 52 aa, Oryza sativa
  Clone ID: PAT_MRT4530_45578C.1.pep
GGREALVSTSKPRERTHEIVFIRSSSLTYRKTTYAVRNAVMRSTQQNTMWIV

SEQ ID NO: 144797 - protein, 321 aa, Oryza sativa
  unsure (1)..(321): unsure at all Xaa locations
  Clone ID: PAT_MRT4530_45579C.1.pep
MVNDVLSSIPVYLLMAINAPKWVIKGIDKIRRGFLWAGKASASGGACWVAWPRVCSPKEYGGLGFPDLERMGLALRSRWLWQQRTSPEKPWQGLSIPVSQKERNLVSLSLVCSVGDGNSVLFWEDCWLQGASIRLLAPAVWAAVPGRLRGKRTVSEALHDRRWIRDISLALGMQAILEYFKLWELLRSVQLSDEPDKLSWRWENSGQYSSRSAYRVLFLGRTQFQHKPIWKSFAPPXAATSSGWSLSSDAGRRTAFEAEACHTRIVAPSAINATKXLIISWSHARSPGSFGGLLLVLSVIPNVYLSTSSLFMPGCVTVPKG

SEQ ID NO: 144798 - protein, 89 aa, Oryza sativa
  unsure (1)..(89): unsure at all Xaa locations
  Clone ID: PAT_MRT4530_4557C.1.pep
LVLDRERPPFFFXLXVXXLXTYXRAXDQFXXHAYAYKLLXVHAVLXXLXAITLWXIHDXDSFCWYKKKXNTKXYKKKKKKKKKKKKKKK

SEQ ID NO: 144799 - protein, 105 aa, Oryza sativa
  Clone ID: PAT_MRT4530_45580C.1.pep
SRFLGSANIVNWLSAPTTSCYPGLIPLSSGGKSDGSRRSIGSSSTSSAGKSRRFWRYPMKWVHLQWPPSPPACASPRRVRRRRLCQEILGERLFRLLPRAEFLQP

SEQ ID NO: 144800 - protein, 209 aa, Oryza sativa
  Clone ID: PAT_MRT4530_45581C.1.pep
MMLLVFMHALAGLLPPLALAETVAAARRDGSRTVDEGDRPLQLLRAPQLISIMHLCGCVEHRRSQFVPYGVAATANQRAGLGDEREQVARPSSTTLVVACSGKRQSTVTEGGGILASTLDPLLVVGTTAALSSDEAPSAQPQSQATIHRRGIDVSSCDRLTAVALQLQTLGPFVSEGRRASLVHLSLSDKAERPDRAGQTGFASAKPAH

SEQ ID NO: 144801 - protein, 50 aa, Oryza sativa
  Clone ID: PAT_MRT4530_45582C.1.pep
PPPLFFWFTPQSFFHLNPQQIIFFNHKPVLKKAKLLFLVFGPPHFYFKKK

SEQ ID NO: 144802 - protein, 251 aa, Oryza sativa
  unsure (1)..(251): unsure at all Xaa locations
  Clone ID: PAT_MRT4530_45583C.1.pep
PTRPTDLNSGKVYGSPIKLQVFTFAEAYDFEDLESMIQEVARGFKTKIMLIYVDTAEEKLAKPFLTLYGLEPEKPTXFDTSKGTKYLMEAEINAKNLQDFCLSLLEGTLPPYFRSEPVPEEKGPIEKVVGRTFDSSXVLESPQNVFLEVHAPWCVDCEAISKNVEKLAKHFNDLGQTNLKFARIDASVNEHPKLQINNYPTLLLYPAQDKSNPIKLSKKSNLKDMAKFVKEKLQIADVETVAAGDIVKDEL

SEQ ID NO: 144803 - protein, 49 aa, Oryza sativa
  Clone ID: PAT_MRT4530_45584C.1.pep
AIAPPRCSPLHKDYRSLLQVRFVLILYQTTPKLSTCDGQHCMGNLISGF

SEQ ID NO: 144804 - protein, 147 aa, Oryza sativa
  Clone ID: PAT_MRT4530_45585C.1.pep
VLGDDVSLLSQQTRGCLSCTATGLASSRQDLGHSRSAAEAAECPCRVTGFALRSSWRRIVSIPLSAPPPTSSGRFVSARFSRRPPYRSSVRFQPEGFGSVEGLYSGSQRRPHGRARVSTLSQPRKRARTEPTRPGSARPVRPGACRQ

SEQ ID NO: 144805 - protein, 95 aa, Oryza sativa
  Clone ID: PAT_MRT4530_45586C.1.pep
MADGAKRDRFGLGMRKRKKTSARSPRHASTNAPAPPARSTTDGDDETGQESGNGEGENGGDWFGEGLGFIGGNGAAQAQRGRAQGRTAQARAAGG

SEQ ID NO: 144806 - protein, 43 aa, Oryza sativa
  Clone ID: PAT_MRT4530_45587C.1.pep
MDAGHVGDPRNMSGRDSIVATHGLERSQDGVDYRAMVPMLRKR

SEQ ID NO: 144807 - protein, 47 aa, Oryza sativa
  Clone ID: PAT_MRT4530_45588C.1.pep
RRTEELIIHTPYDYMLSDNRTHYALTSPTESYTQLALVCLVTSYQGP

SEQ ID NO: 144808 - protein, 102 aa, Oryza sativa
  Clone ID: PAT_MRT4530_45589C.1.pep
MAWLGLGWLGIGDGRWGPWVPPVGLRRAETGGQARGGPCGGGLIRLRFGQLGTAVAILQLAAPYDDAIVARVVLCCDDVIVDPTADMPKAQPPPPISSRFGG

SEQ ID NO: 144809 - protein, 137 aa, Oryza sativa
  unsure (1)..(137): unsure at all Xaa locations
  Clone ID: PAT_MRT4530_4558C.1.pep
ALGCTXXGVAEXGXXYRLWWWCXGNXFXSRCXACQASXAGSSCSACRKPKNKPMLRHHGRPGGRGEDPPKMIMENMHVMRVILLGIGGNWWILLRVGRSCNRRQIDFGPFSAGNTVFGLGFCDYAHESPWLLPQQVY

SEQ ID NO: 144810 - protein, 124 aa, Oryza sativa
  Clone ID: PAT_MRT4530_45590C.1.pep
MSSSLFLLPPLFLSLFSPLRLAAGSTGWGGSGRGQERRRELKRRRRRHTLSSLSGKRGAPSAAAAAVGGSDDEDSDDGSRKKLRLSKDQAAVLEDTFNKHNTLNPKQKAALARQLNLKPRQVEV

SEQ ID NO: 144811 - protein, 49 aa, Oryza sativa
  Clone ID: PAT_MRT4530_45591C.1.pep
MHVIGSAIQSAGYRRQRIGQTGGTAAVRLAAGSGDCGIFRWLDRTIYSG

SEQ ID NO: 144812 - protein, 76 aa, Oryza sativa
  Clone ID: PAT_MRT4530_45592C.1.pep
MTEANKATNKRTTNHEQKPERQQKHNPTPNCNEHRMQKPLTCTVLPAKTAAPLGDDDQTNATTPGMGTRGGGRRVN

SEQ ID NO: 144813 - protein, 721 aa, Oryza sativa
  Clone ID: PAT_MRT4530_45593C.1.pep
MASGVCPPAELGFGAEYYSVVNGVCSRAGSYFGGRPVLTQAVGYAVVLGFGAFFALFTSFLVWLEKRYVGSQHTSEWFNTAGRSVKTGLIASVIVSQWTWAATILQSSNVAWQYGVSGPFWYASGATIQVLLFGVMAIEIKRKAPNAHTVCEIVRARWGTPAHLVFLTFCLLTNVIVTAMLLLGGSAVVNALTGVNVYAASFLIPLGVVVYTLAGGLKATFLASYIHSVVVHAVLVVFVFLVYTSSSKLGSPRVVYDRLMAVASAARDCSADLSRNGQACGPVAGNFKGSYLTMLSSGGLVFGIINIVGNFGTVFVDNGYWMSAIAARPSSTHKGYLLGGLVWFAVPFSLATSLGLGALALDLPLTAAEAAKGLVPPATATALMGKSGSVLLLTMLFMAVTSAGSAELVAVSSLCTYDIYRTYLNPGASGKQILRVSRAVVLGFGCFMGVLAVVLNVAGVSLGWMYLAMGVIVGSAVIPIALLLLWSKANAVGAMGGAVSGCALGVAVWLTVAKVQYGRVNLDTTGRNAPMLAGNLVSILVGGAVHAACSLLRPQHYDWGTSREMITTVESVHAALDDELKEERLVHAKRWIVRWGLVFTAVIVVAWPALSLPARRYSLGYFTLWAAVAIAWGTVGSVVIILLPVAESWTTITKVCAGMFTNDAVYDRLDDVNLRLRAIMGAMPEAEKRYRQLHETEMHPAGTHPANDDDDDNNNNQMMHS

SEQ ID NO: 144814 - protein, 179 aa, Oryza sativa
  Clone ID: PAT_MRT4530_45594C.1.pep
SLQIINQINGLFTTRGRRGRPAGRAQLEESSSLSSERPSIPSPGPGAAAGPSGPSAGASAEDDDDDSEEDSEEGDSADDSSAALATGTTTMATKRSAARKSAAVIGYGIQRRYGFGWYPWWKFVKDPDSEVLSYKTGGGSSGGRSILLSSKKISPHIRFPSEANNISCDRKFSTAAGGS

SEQ ID NO: 144815 - protein, 84 aa, Oryza sativa
  Clone ID: PAT_MRT4530_45595C.1.pep
RTIKSGQPYTLKNHENYSTHNTADAYTTCKFSNLPIGPNLSMACPFRKLEKLENYGDLETMKKRASISPVGSIGRRSSLCFLLY

SEQ ID NO: 144816 - protein, 129 aa, Oryza sativa
  unsure (1)..(129): unsure at all Xaa locations
  Clone ID: PAT_MRT4530_45596C.1.pep
LSSCHRLGGIDNQLVDDGRVVFLLEYKLVEIRDDTRSLPCHLGDKAITPTNKFFKHSNENIIEGFGIVQDVPLLTDSLPXNEYAEEVTAVPPNKSPKTLLENEVLDFIKEEAELGATLELPIMEPEDQM

SEQ ID NO: 144817 - protein, 412 aa, Oryza sativa
  unsure (1)..(412): unsure at all Xaa locations
  Clone ID: PAT_MRT4530_45597C.1.pep
DGRVVFLLEYKLVEIRDDTRSLPCHLEGNNVDILYNPTVGVNLISESFAFAYLGDKAITPTNKFFKHSNENIIEGFGIVQDVPLCFEDREAVLDFHVFEIKDFDILIGLPIEQLLINTPRLDSLKITFXGNEFSVSFLRAMFTLTDSLPXNEYAEEVTAVPPNKSPKTLLENEVLDFIKEEAELGATLELPIMELPPRTPLELKPLPEGLHYAFLHNDKEAHVIISDKLYEDETQRLLSVLEKHCAVLGYSLQDLRGINPILCTHRIPIEHESTPSREPQRRLNNVLREVVKKDVLKLLHAGIIYSVPYSEWVSPVQVMPKKRGLTDVANAQNELIPQRTVTGWRMCIDYRKLHKATKKDHFPLPSIDEMLERLANRSFFCFLVGYSGCHQIPIHPEDQMSTVGTHPCNIQT

SEQ ID NO: 144818 - protein, 67 aa, Oryza sativa
  Clone ID: PAT_MRT4530_45598C.1.pep
PTRPPTRPRTHKSPSNLDGNTYFASPNNSKRPKHRSRSSSSSSFTNQFTEKQSRGFSRLFSKSKSEY

SEQ ID NO: 144819 - protein, 1149 aa, Oryza sativa
  Clone ID: PAT_MRT4530_45599C.1.pep
MVPAAGAQGNGSSVQEEASGGRGKRLRKANVGIRCLSVRFRKSSRGSLDLVGWVRGGTSEFILERPRYTTKQAAQIMARDGKLDLLLKMMEDAEKKREETERRREESDALNLAELQSLKAAVESRIPLVEKKFNSVSPFTPENSSYQAFETGMVSIGGNVPPMSCPQFDGENPQMWRDNCEIFFNVYGVHPANWVKTSSVAEYVERKSWKGVRELLIGRLRVLISTKFFLEQLRSMSFPRVLQPPPGEERKFPESVRTNTRDDKISALKSYRRSKGLCFTCGKRWSKDHKCAQSVQLHVVEELLEAFQSEEEENFVIPVPDSSPEETTLMTISLHACNGTISLHACNRTDSNHSLRVKGLLSKPVKVRVVDGGLLQCDKQLPDCSWWLQGRYYKSNFKLLPLNGYDAILGMDWLAGLGVMKIDWMHKWLEYQDKGQLIRIQGVHSDVANCRLISGAQLRGLYKVGALMHMFQITTETSPTVVAIPKPVQQVLSEFTSVFEEPQGLAPRRSCDHSIPLIPGAKPVNIRPYRYNPTQKNEIEHQVHEMLKSGVIQPSISPFSSPALLVKKKDGSWRLCIDYRQLNALTIKRAPATFQGAMNATLSSVLRKCALVFFDDILIYSPDLPTHVQDLRKELNYLGHTIGVAGVATNASKIQDILKWVVPTNLKKLRGFLGIAGYYRKFVKNFGVLSKPLTNLLRKGVEFQWTPEVHTSFESLKHALATAPVLALPDFNKTFVIETDASDSGIGAVLSQDKHPIAYVSKALGPRTKGFPVTYRRIKTLFAWPDMKKQIKLKVKECSICQQAKPDRFRYPGLLQPLLVPSGAWQTVTMDFIEGLPKSRRFNCIMVVVDKLSRYAHFLPLAHPFSAADVAQLYMEGVFKLHGLPLAVVSDHDKIFTSNFWEQLFQSVSTKLHMSTAYHPQTDGQTERVNQCLETYLRCFTHSCPSKWSTWLYLAEYWYNTTYHSTLEQTPFEVLYGHTPNQLGISVNSCELPDVQQWLSERRLMMQLLQQHLHQAQQYMKTPADKKRSFRSFAVGDWVYLKLQPYVQSSVAARANHKLSFKYFGPYEVLRKVGEVAYQLALSEGSVVHPVFHVSQLKSAQGFKGVSSPMIPAQMETKKVPVAVLDTRVRKSGTSAIPQVLIQWSDSAV

SEQ ID NO: 144820 - protein, 96 aa, Oryza sativa
  unsure (1)..(96): unsure at all Xaa locations
  Clone ID: PAT_MRT4530_4559C.1.pep
INIHGQHTWNNRSHNIQTNIRQDKTPDIDFRDKHGXSPTVSPDTVRRDESAISDLAGHGFEEEDYLVIDYESDLQTTMSTTVRXLPQILYWCDYDV

SEQ ID NO: 144821 - protein, 70 aa, Oryza sativa
  Clone ID: PAT_MRT4530_455C.1.pep
GQKEYISAHIREAHLVRWVGYARVPYDLQWLVGLGVCFAVRQAGLLFSWARLMHGVRHLGAQLLCDTLGG

SEQ ID NO: 144822 - protein, 104 aa, Oryza sativa
  Clone ID: PAT_MRT4530_45600C.1.pep
MAREGHGAGGGSTYGLVACGLGGGHCGFGQRWRSTTTGGGLLAGVAVLALPNGPGQLGLGLSLGPRLVLMMRTAWVGGRADELRWRRRAWSASPPDRSAVDSEA

SEQ ID NO: 144823 - protein, 155 aa, Oryza sativa
  unsure (1)..(155): unsure at all Xaa locations
  Clone ID: PAT_MRT4530_45601C.1.pep
MGGILGRHDTMKRSSHGSKLETKMVESMQQRASHGTSLKSFDSIIMKFPKIDESLRKCKIIFEQFDEDSNGEIDKQELKHCFQKLEISFTEEEINDLFEACDINEDMGMKFNEXIVFLSLIYLLNEPAVSESKIKMGLGNLEATFETLGDAFXFF

SEQ ID NO: 144824 - protein, 64 aa, Oryza sativa
  unsure (1)..(64): unsure at all Xaa locations
  Clone ID: PAT_MRT4530_45602C.1.pep
TCRRCNTKKFSAIADSKTHEKHCGRYTWLCWCATTFXXKDMLSGHVALLQGHTPALPMDDVKVT

SEQ ID NO: 144825 - protein, 54 aa, Oryza sativa
  Clone ID: PAT_MRT4530_45603C.1.pep
SSPHHIHIQSVPPTLYITTLIRTPSDIHFTSPNNFYTYNTPQAIRELLMGVADS

SEQ ID NO: 144826 - protein, 257 aa, Oryza sativa
  unsure (1)..(257): unsure at all Xaa locations
  Clone ID: PAT_MRT4530_45604C.1.pep
RYASFCRTLASHAVGASSGSGNSRNMVTSPTNSSPSPSTNQGNQGGVASTTGSSQMQEWVQGAIAKISNNTDGAANAAPNPISGRSSFMPISINTGTFPGTPAVRLIGDCHFLHRLCQLLLFCLLFRRRQSPRIPANAQKSSDSSMQKQHLMNSKTEDNTLAVRSGLGAAKLEDGTTSRGQMVGAKGAEENPVGNKSARIGSGNAGQGYTSDEXVGSSNIIIRXLHYIDGNYTVLPEVVEASLGPICRYASSTGADA

SEQ ID NO: 144827 - protein, 47 aa, Oryza sativa
  Clone ID: PAT_MRT4530_45605C.1.pep
PRVRLIVRGLFIRCVVCYYESVSMYVYTGICVIDQGSMYTHMISMHR

SEQ ID NO: 144828 - protein, 1218 aa, Oryza sativa
  Clone ID: PAT_MRT4530_45606C.1.pep
MEVDVCARGGGGVLVHVQFPGGGGGAGGGGGGGGGGQQASPATVFRIRLKQPPSSLRHKMRVPELCRNFSAVAWCGKLNAIACASETCARIPSSNSSPPFWIPIHILNPERPTECSVFNVKADSPRDFVQFIEWSPRSCPRALLVANFHGRITIWTQPTKGPTNLVRDASSWQCEHEWRQDLSVVTKWLSGISPYRWLPANSSTSSNLKTFEEKFLTQQPQSSVFSSGSVQLHWSQWPSQNSAQPRWFSTSKGLLGAGPSGIMAADAIITETGALHVAGVPLVNPSTVVVWEVMPGLGNGIQATAKINATSSLPPSLNPPLWAGFAPLASYLFSLQDYLVSEGAQTKKQAQVDNETTEVASIHCCPVSNFSAYVSPEAAAQSATTTTWGSGVTSVAFDPTRGGSVITVVIVEGQYMSPYDPDEGPSITGWRVQCWESSVQPVVLHPIFGSPANFGGQPPTQTVWSTRVNKSIPPSEDLKNPQSYVPMPTTSDERSSSECSVDRANRLSFDPYDLPNDVRQLAQIVYSAHGGEVAVAFLRGGVHIFSGPNFEQVDSYHVNVGSAIAPPAFSSSGCCLASVWHDTLKDRTILKIIRVLPPAILNAQTKVSSAVWERAIADRFWWSLLAGVDWWDAVGCTQSAAEDGIVSLNSVIALLDADFHCLPTIQQRQQHCPNLDRIKCRLLEGTNAQDVRALVLDMQARLLLDMLGKGIESALINPSTLLPEPWQASSDMLSSIGPDKMTVDPALLLSIQGYVDAVLDLASHFITRLRRYASFCRTLASHAVGASSGSGNSRNMVTSPTNSSPSPSTNQGNQGGVASTTGSSQMQEWVQGAIAKISNNTDGAANAAPNPISGRSSFMPISINTGTFPGTPAVRLIGDCHFLHRLCQLLLFCLLFRRRQSPRIPANAQKSSDSSMQKQHLMNSKTEDNTLAVRSGLGAAKLEDGTTSRGQMVGAKGAEENPVGNKSARIGSGNAGQGYTSDEVKVLFLILVDLCKRTATLQHPLPSSQVGSSNIIIRLHYIDGNYTVLPEVVEASLGPHMQNMPRPRGADAAGLLLRELELQPPAEEWHRRNMFGGPWSEPDDLGPLDNTRQLKINGSTNRHLSDMEEDGDSSFGIQNLWPRKRRLSERDAAFGLKTSVGLGSFLGVMGSRRDVITAVWKTGLEGEWYKCIRCLRQTCAFAQPGALAPNTSNELEAWWISRWTHACPMCGGTWVKVV

SEQ ID NO: 144829 - protein, 79 aa, Oryza sativa
  Clone ID: PAT_MRT4530_45607C.1.pep
LDQCAWMPKTISLLLLYLLCIREREVNRSTNSTIAFIVYPLSIREGEVNKTANELVCWRMLPEVEHPRVRSVQGGELES

SEQ ID NO: 144830 - protein, 179 aa, Oryza sativa
  unsure (1)..(179): unsure at all Xaa locations
  Clone ID: PAT_MRT4530_45608C.1.pep
DLRSGYHQLKIRQEDISKTAFVTRSSCILGXIITKNGVVVDPEKIKAVMEWKVSTSVPEIRSFLGLAGYYRRFIKDFSTIAKPITKLLRKDKKFECTLECQSSFQRLKHKLTTTPVLLLLDIQKDFEIYCDASRQGLGCVLMQESKIVAYASRQLRLLEENYPTHDLELAAVVHAVKIW

SEQ ID NO: 144831 - protein, 163 aa, Oryza sativa
  unsure (1)..(163): unsure at all Xaa locations
  Clone ID: PAT_MRT4530_45609C.1.pep
RIVVIVLLLLFLSLVSAFNGQATFSSQFSIXLSCGAGWNVVVKSDSPXRTFIPNDGNLLGKFSHNVTRFSNPDASHLYTLXATMRVGTSNFSYWLGYXATVVPDDNTTLVLRLHFLPYASQSGDLSTALFNVSIMGRYVLHSSFLSSRTGAVREFILASDGSG

SEQ ID NO: 144832 - protein, 41 aa, Oryza sativa
  Clone ID: PAT_MRT4530_4560C.1.pep
MFSYTRNQATTFLPYNSMKELLIQYFSWLKMGARLMLFFPC

SEQ ID NO: 144833 - protein, 81 aa, Oryza sativa
  Clone ID: PAT_MRT4530_45610C.1.pep
SSFVYRNSTLHYCKAQGGKKKDWEKKQLCWFADHLILFPGKFCYTPKQPEIPSPEKSQIRRPLDGGKCDISVYSLYSIPLC

SEQ ID NO: 144834 - protein, 318 aa, Oryza sativa
  Clone ID: PAT_MRT4530_45611C.1.pep
MELITNVSEYEQLAKQKLPKMIYDYYASGAEDQWTLKENREAFSRILFRPRILIDVSRINMATNVLGFNISMPIMIAPSAMQKMAHPEGELATARAASAAGTIMTLSSWSTSSVEEVYKDRNIVRQLVRRAELAGFKAIALTVDTPRLGRREADIKNRFNLPPHLVLKNFEALDLGKMDKTNDSGLASYVASQVDRSLSWTDVKWLQTITSLPILVKGVMTAEDTRLAVESGAAGIIVSNHGARQLDYVPATISCLEEIGRPVLFSLAVDGEAGVRKVLQMLRDELELTMALSGCTSLAEITRNHVITDSDRIRRSRL

SEQ ID NO: 144835 - protein, 367 aa, Oryza sativa
  Clone ID: PAT_MRT4530_45612C.1.pep
MELITNVSEYEQLAKQKLPKMIYDYYASGAEDQWTLKENREAFSRILFRPRILIDVSRINMATNVLGFNISMPIMIAPSAMQKMAHPEGELATARAASAAGTIMTLSSWSTSSVEEVNSAAPGIRFFQLYVYKDRNIVRQLVRRAELAGFKAIALTVDTPRLGRREADIKNRFNLPPHLVLKNFEALDLGKMDKTNDSGLASYVASQVDRSLSWTDVKWLQTITSLPILVKGVMTAEDTRLAVESGAAGIIVSNHGARQLDYVPATISCLEEVVREAKGRLPVFLDGGVRRGTDVFKALALGASGVFIGRPVLFSLAVDGEAGVRKVLQMLRDELELTMALSGCTSLAEITRNHVITDSDRIRRSRL

SEQ ID NO: 144836 - protein, 48 aa, Oryza sativa
  Clone ID: PAT_MRT4530_45613C.1.pep
LEAKLLVLEVGEERLGGMEEAGDEDASGGRNAHRQRWARTRRPKPERG

SEQ ID NO: 144837 - protein, 280 aa, Oryza sativa
  Clone ID: PAT_MRT4530_45614C.1.pep
MAAAIEGNLMRALGEAPSPQMQKIAPPPFHPGLPPAPANFSSAGVHGFHYMGPAQLSPAQIQRVQAQLHMQRQAQSGLGPRAQPMKPASAAAPAAAAARAQKLYRGVRQRHWGKWVAEIRLPRNRTRLWLGTFDTAEEAALTYDQAAYRLRGDAARLNFPDNAASRGPLDAAVDAKLQAICDTIAASKNASSRSRGGAGRAMPINAPLVAAASSSSGSDHSGGGDDGGSETSSSSAAASPLAEMEQLDFSEVPWDEAEGFALTKYPSYEIDWDSLLNNNN

SEQ ID NO: 144838 - protein, 83 aa, Oryza sativa
  Clone ID: PAT_MRT4530_45615C.1.pep
MSCCPLVFLRCFTTAADTYILPHAATSPLLPIGMNRACYVGQIEWSDMLFDHPIYSPKCYTDSILSKSPSALTLLSFPFSLQA

SEQ ID NO: 144839 - protein, 651 aa, Oryza sativa
  Clone ID: PAT_MRT4530_45616C.1.pep
MATASDAPASSTITTATDDAEVERDQGNGNGAVSAAPAAVGKEAAAEEEEMIGPAPVPPRPRKKRPLQFEQAFLDALPSAAMYEKSYMHRDVVTHVAVSPADYFITGSADGHLKFWKKKPAGIEFAKHFRSHLSPIEGLAVSVDGLLCCTISSDWSVKIYDVVNYDMMFMMRLPFVPGAIEWVYRQGDVKPKLAVSDRNTPFVHIYDTHSGSNDPIISKEIHAGPVKVMKYNHVHDVVISADAKGLLEYWSPSTLKFPEDAVNFRLKTDTNLFEIAKCKTSVSAIEMSNDGTQFVVTSPDRRIRVFWFKTGKLRRVYDESLEVAQDLQKSDIPMYRLDAIDFGRRMAVEKEIEKTENVPQPNAVFDESSNFLIYATLLGIKIINLHTNKVSRILGKVENNERFLRIALYQGDKGNKKVRKIPSVAANVNDSKEPLSDPTLLCCAFKKHRIYLFSRREPEEPEDATKGRDVFNEKPPPEELLAVSDLGKTATTSLPDNLVMHTSMGDIHLRLYPEECPKTVENFTTHCRNGYYDNLIFHRVIKGFMIQTGDPLGDGTGGQSIWGREFEDEFHKSLRHDRPFTLSMANAGPNTNGSQFFITTVATPWLDNKHTVFGRVVKGMDVVQQIEKVKTDKNDKPYQDVKILNVTVPKT

SEQ ID NO: 144840 - protein, 70 aa, Oryza sativa
  Clone ID: PAT_MRT4530_45617C.1.pep
MANEVKAHTKAQMTRGRCEWRRRSSPLYSVPYFSEEIHDKCRCLGVRSSPGDWYINKAMVGRLRDDGVQR

SEQ ID NO: 144841 - protein, 108 aa, Oryza sativa
  Clone ID: PAT_MRT4530_45618C.1.pep
GFFSNFSTILLLAGVGTLITMFVIGGMLLWLGQIWSHHQAHGLRGVHVLGALISAVDPVATLSVFKKNGVPPLLFNLVFGESMLHDGVAIVAFTLFQRIIKQKIEEVT

SEQ ID NO: 144842 - protein, 120 aa, Oryza sativa
  unsure (1)..(120): unsure at all Xaa locations
  Clone ID: PAT_MRT4530_45619C.1.pep
XXVXDXRXYXTSLIAYMGXXRSXXRXXXHSXEXXPXPXFCXXXXXXXPVXVGXXNRFLHVLSSLQXXXXFLIXAPYXIPXPXXSFXXXLPNPHIFPPFFXLRXKXPLXNXFXXFXXXXPX

SEQ ID NO: 144843 - protein, 58 aa, Oryza sativa
  Clone ID: PAT_MRT4530_4561C.1.pep
WRRLWSKNGARRRVVQAPGQRRLRRRVQGEDYLLKEDDFALTSSPPRGPRKPFRPIKP

SEQ ID NO: 144844 - protein, 242 aa, Oryza sativa
  Clone ID: PAT_MRT4530_45620C.1.pep
MAMAALRREGRRVLLSSTPSPAAAMAARSPAAAHQEIAPLGARSVSTQVVRTRMKSVRNIQKITKAMKMVAASKLRAVQIRTENSRGLWQPFTALLGDVPSVDVKKNVIVAITSDKGLCGGINSTSVKVSKALHKLTSGPEKESKYVILGEKGKVQLIRDSKDNIEMTVSELQKNPINYTQIAVLADDILKNVEYDALRVVFNKFHSVISFKPTMTTILSPEVMEKESESGKVGDLDSYEIE

SEQ ID NO: 144845 - protein, 368 aa, Oryza sativa
  Clone ID: PAT_MRT4530_45621C.1.pep
MAARSPAAAHHGFITLGFEAHLGRIGVGACGCEMYVWPRIAGYFCCKQYDIILLIAHFYRALRTRMKSVRNIQKITKAMKMVAASKLRAVQIRTENSRGLWQPFTALLGDVPSVDVKKNVIVAITSDKGLCGGINSTSVKVSKALHKLTSGPEKESKYVILGEKGKVQLIRDSKDNIEMTVSELQKNPINYTQDKEWHWWWRKVVQLAELVSAVLITLQQKFTDVIAVLADDILKNVEYDALRVVFNKFHSVISFKPTMTTILSPEVMEKESESGKVGDLDSYEIEGGETKSEILQNLTEFQFSCVMYNAALENACSELGARMSAMDSSSRNAGEMLDRLTLTYNRTRQASITTELIEIISGASALEG

SEQ ID NO: 144846 - protein, 53 aa, Oryza sativa
  Clone ID: PAT_MRT4530_45622C.1.pep
MAFTVSFSSDNVQMLQGRSCHRHAAFGGCFAVPRTGPRMRSVGRLGHHSSLVA

SEQ ID NO: 144847 - protein, 114 aa, Oryza sativa
  Clone ID: PAT_MRT4530_45623C.1.pep
NLLRNDPMAAVLLPNFICTRDSFRLGGQGRPPLATIDRSNTAKWSTCSSRSPNGSSSASACPSTIKHYASLFQSAGSLQGTPVYRPYLWYPVDPSREHHSINSVRECNTKAQRS

SEQ ID NO: 144848 - protein, 518 aa, Oryza sativa
  Clone ID: PAT_MRT4530_45624C.1.pep
MAAAKMAGLTPGFKFEPSDEQLVQFFLLPYLRELPVPLGGLVIRDDPRSVPPWKLFARNGRGDEEDAYFLAPADGEGRQARTCDGGRGRWITQRLERTGNLRLAGGGGSGEAVVFEKHRLNYHAGEGRCGSTGWVMHEYAVVKPAALGARHRACHIAFTGHGQKRKRVPDGYVDVEDDGSKASTNAAAAVPPSSTAAMSACPSNVTYNQGCHISPEQSIEQHFPAEHNNIQIQQQAYYQSQDHEQCQYSDEEKYLLQQIKQEQYYYNQQNCFLPGQGNQELYYNDEQQQIFSLPEHQCSQEQYCHHDDQQDCVLPEQHSQELHGYNNEDQGSLLPPEPIDQEEQALFVGGEPQHEQQPLTSTPRQALLDYDDGKLLPPVGVNGAIAIPPQDAAVASNDDDGGQATEAPAAKMTAEEKKWFMEELLTEGCWSGPLLFDQPYYAAAPTGRYRATLRVALAASATPAPRQAAAARAAAAAPAPLRYCLFATTAVSARKEWIRARKEERIRARREIRRKTLR

SEQ ID NO: 144849 - protein, 58 aa, Oryza sativa
  Clone ID: PAT_MRT4530_45625C.1.pep
MGYPAASAPGPPSPFPVPHGLSPTAFLGGSPGLFSPTVSTMMIVLDPPIQICVLLLKL

SEQ ID NO: 144850 - protein, 167 aa, Oryza sativa
  Clone ID: PAT_MRT4530_45626C.1.pep
MDMGGHDMGGMSPPAAGAAAQGGMGAMKSMRYTHMTFFWGKNSEVLFTMWPGTRGGMYALALIFVFALAVIVEFLGSRRADACLAALARRAPAAGGLARAAVHTVRVGVAYLLMLALMSFNGGVFLVAVAGHAAGFLAFRAGLCGGPAQVEEDRKNDPACCYTGSKM

SEQ ID NO: 144851 - protein, 105 aa, Oryza sativa
  Clone ID: PAT_MRT4530_45627C.1.pep
GVTRRSKSSSGGSGGCALPRWDPQVVRLAMAPSPRLSPPLYPFPSCREALKAAELGGHLDVIQTQRKVKGRMVNLFQFVETAEQLRLWPSFRPKLYPRPAQQEGF

SEQ ID NO: 144852 - protein, 68 aa, Oryza sativa
  Clone ID: PAT_MRT4530_45628C.1.pep
LFFYFLGFFFFFFFLTQDKFILLQGIHKIGRSTSKNILGPINRSFKEPSLGTSNDGIQSLISLTCLAK

SEQ ID NO: 144853 - protein, 103 aa, Oryza sativa
  unsure (1)..(103): unsure at all Xaa locations
  Clone ID: PAT_MRT4530_45629C.1.pep
MTGDDHEGPLEDALEAXVLKKVCKITRNXGEGGDGSKXXEEXXGEGVIKSMAAAARVQAATATNLFVPLLFLMLPRCGLWWRRRTWWACRISPLTPKWLGLSG

SEQ ID NO: 144854 - protein, 118 aa, Oryza sativa
  Clone ID: PAT_MRT4530_4562C.1.pep
VVVGRDLLPSRRYRHLLRRAALLRGRALAIAATRCEACSAGHTSICAPHARCSQNAAGLRLLRLPSPARAAAGYGSSGYGAKRQPDCGDRPQAERGEHTLLRLWIWIRWWTTEATGRG

SEQ ID NO: 144855 - protein, 43 aa, Oryza sativa
  Clone ID: PAT_MRT4530_45630C.1.pep
VLLLISPSGLSACSADIAVRLSTWSKIYSSEYELIPVLHASVL

SEQ ID NO: 144856 - protein, 85 aa, Oryza sativa
  Clone ID: PAT_MRT4530_45631C.1.pep
YRIESPPRCHTGWVVLFYSTPILVLKLQLLVKSRAFGGTSKIIPGKTFKIAVGIALCGCGVQNSSEQVENKKGGGGPKPPGGWGP

SEQ ID NO: 144857 - protein, 87 aa, Oryza sativa
  Clone ID: PAT_MRT4530_45632C.1.pep
MDIDGQPGQGQDGYGCGHGRVSGLHSTIEPTNVAAASRGHGSPLSLNGMPSGRSIIGKRFRNKDLGTFLTKRSASTCSPHPSPSAHG

SEQ ID NO: 144858 - protein, 79 aa, Oryza sativa
  Clone ID: PAT_MRT4530_45633C.1.pep
CAEPRRVPSLMQRDRALSQVAIEGASSVSKPARVKAYLLLRHLVGARLGFNPIKLCNATVLSSQFRCTPSDQYIVCRLP

SEQ ID NO: 144859 - protein, 93 aa, Oryza sativa
  Clone ID: PAT_MRT4530_45634C.1.pep
MDKSMLGDLDGLPEEDKMRMAAMVDQLQIRDSLRMYNSLVERCFTDCVDTFRRKTLDKQEESCVRRCAEKFLKHSMRVGMRFAELNQGVATPD

SEQ ID NO: 144860 - protein, 833 aa, Oryza sativa
  Clone ID: PAT_MRT4530_45635C.1.pep
MRRRRKRTLCRGKAYITTLSGKRVGNVVMATSGSLDEVQEINVHLETVENALVKTVVNEDDFVDEESGSDTDEQATEDDLEIMEPKEGMAFASVNDAFVFYERYAQKKGFSITRRISSTFQSFTFACRRQDNAQCSSNNAWKHHQNECPAKIIVDLDGPDDKFFLSSVTLEHNHDLSPSETSRMEFKNPSFFYALDFGKDSCLRNVFWADARSRASSMSNKPPEVIITDQCDAIQDAIEKVFPQTCHIWRLQSVMKKMPENLSGFSGFQSIENAFSTVVHNSLTQTVFENNWSKIIDKFGLHGRSAWLNMLFCNRHKWVPTYVKNNFCAGMFCTQNSESIGSLFHGYINSTTTLDEFLDQYNKTIVGIDCKETDANWKSSHEVVPCVTHYGIEKKFQKVYTNKMFEEFQEQLKGKMYCYPTLLKQEGSVYIFKVTQDVKIREQQCSLDFTVWWDRDDCDGRCKCTCRHFEFRGILCSHIITVLALLKVKKVPSKYVLQRWRKDMIRRHGTITNWSYNEMVDSPVARRFDLLCKSFYEVAEKAVVSNELLMLVLDSVEELKRKLVLGLDSHISARILHFGLANPSVCRLWNSKGKVTMRSLFYVTFLAILSINVHSSACLRLLAETPLPVIPNGQPGAPAPPPPANIPVNLPANVPPEMPANLPANVPPEMLASLPANLPANVPPEMVASLPANVPPETLSKIPANVSPDVLANLPPDVLAKLPANVSPEMLADMPPEVLVNLPPDVQKQLPANVPPEKLVAELAAAGKNQPAVAAAAGIPQMPKMPDFSGLTDLSFPPMPSAKMPSMPHNITLFGFDVQIPEFINKMVDEETT

SEQ ID NO: 144861 - protein, 99 aa, Oryza sativa
  unsure (1)..(99): unsure at all Xaa locations
  Clone ID: PAT_MRT4530_45636C.1.pep
FFRFPFSPLLDPRRNRTRKREREECSRCPVPSPRRADMELFYELLLXAAASLLVAFLLARLLASAATASDPRRRAPDXXAVXAEEEAVVVEEEKXIEVD

SEQ ID NO: 144862 - protein, 74 aa, Oryza sativa
  unsure (1)..(74): unsure at all Xaa locations
  Clone ID: PAT_MRT4530_45637C.1.pep
MAAAVAANGGGDGEASNAPPTRLXSVYSXVQTSRLKHALPLPSVLRSXLALADGPASXXAGXPGEIAKXFPNLF

SEQ ID NO: 144863 - protein, 105 aa, Oryza sativa
  Clone ID: PAT_MRT4530_45638C.1.pep
LLLNFRSLNLSLHQPAADGDSPEIRRRHCGLLLSPPRAAVSSSSGHRPSPPSDRRSRATTRRPRARAGGFGAAPSSPPSSPRCASILRSHRHASTSTPHFPCRVE

SEQ ID NO: 144864 - protein, 100 aa, Oryza sativa
  Clone ID: PAT_MRT4530_45639C.1.pep
MVNCCEGSCKSGISGRIARASGTCDNQAAAREDLAEVQDIIQQLELSSGMDQRIYSPNGHSETFSSSSLYQFLSSSNLPNCANWDFVWNNAALPRVQFFA

SEQ ID NO: 144865 - protein, 665 aa, Oryza sativa
  Clone ID: PAT_MRT4530_4563C.1.pep
MVRALSRARSLLDGIPHRRGRAASSSVSGHGAEEAVAGYVRMLAGGARPDAYTFPSLLKAAAAARGAAVAAASVGGAIHAHVVKFGMESNAHAASSLIVMYAARGDGAAARAVLEAACLATGGGAPVMWNALISGHNRSGRFELSCCSFVDMVRASAMATAVTYVSVLSACGKGKDLLLGMQVHKRVLESGVLPDQRVENALVDMYAECGDMDAAWVLFEGMQMRSMASWTSVISGLVRSGQVDRARDLFDHMPERDTIAWTAMIDGYVQVGRFRDALETFRYMQICKVRADEFTMVSVVTACAQLGALETGEWARIYMGRLGIKMDVFVGNALIDMYSKCGSIERALDVFKDMHNRDKFTWTAIILGLAVNGRGEEAIDMFYRMLRALQTPDEVTFVGVLTACTHAGLVDKGREFFLSMTEAYNISPTVVHYGCLIDVLGRAGKLKEALDTIDKMPMKPNSTIWGTLLASCRVYGNSEIGELAAERLLELDPDNSTAYILLSNMYAKSNRWKDVRRIRQIIMEKGIKKEPGCSMMGILGIIHEFVAADRSHPMNKEIYSKLENVLTDLRNAGYVPDVTEVLVEVTEEEKQKVLYWHSEKLAVTFALLTSESNVIIRIVKNLRMCLDCHNAIKLISKLYGREVIVRDRTRFHHFRHGSCSCKDYW

SEQ ID NO: 144866 - protein, 68 aa, Oryza sativa
  Clone ID: PAT_MRT4530_45640C.1.pep
TSSTGKQPTETANDGPKLTKTGEEQLKFLHLSHYHLMLVWKSSLPSKVYLTLNTGITSVLKKSIFTKE

SEQ ID NO: 144867 - protein, 886 aa, Oryza sativa
  Clone ID: PAT_MRT4530_45641C.1.pep
MAANGGGGGAGGCSNGGGGGAVNGAAANGGGGGGGGSKGATTRRAKVSPMDRYWVPTDEKEMAAAVADGGEDGRRPLLFRTFTVRGILLHPYRLLTLVRLVAIVLFFIWRIRHPYADGMFFWWISVIGDFWFGVSWLLNQVAKLKPIRRVPDLNLLQQQFDLPDGNSNLPGLDVFINTVDPINEPMIYTMNAILSILAADYPVDKHACYLSDDGGSIIHYDGLLETAKFAALWVPFCRKHSIEPRAPESYFAVKSRPYAGSAPEDFLSDHRYMRREYDEFKVRLDALFTVIPKRSDAYNQAHAEEGVKATWMADGTEWPGTWIDPSENHKKGNHAGIVQVMLNHPSNQPQLGLPASTDSPVDFSNVDVRLPMLVYIAREKRPGYDHQKKAGAMNVQLRVSALLTNAPFIINFDGDHYVNNSKAFRAGICFMLDRREGDNTAFVQFPQRFDDVDPTDRYCNHNRVFFDATLLGLNGIQGPSYVGTGCMFRRVALYGVDPPRWRPDDGNIVDSSKKFGNLDSFISSIPIAANQERSIISPPALEESILQELSDAMACAYEDGTDWGKDVGWVYNIATEDVVTGFRLHRTGWRSMYCRMEPDAFRGTAPINLTERLYQILRWSGGSLEMFFSHNCPLLAGRRLNFMQRIAYINMTGYPVTSVFLLFYLLFPVIWIFRGIFYIQKPFPTYVLYLVIVIFMSEMIGMVEIKWAGLTLLDWIRNEQFYIIGATAVYPLAVLHIVLKCFGLKGVSFKLTAKQVASSTSEKFAELYDVQWAPLLFPTIVVIAVNICAIGAAIGKALFGGWSLMQMGDASLGLVFNVWILLLIYPFALGIMGRWSKRPYILFVLIVISFVIIALADIAIQAMRSGSVRLHFRRSGGANFPTSWGF

SEQ ID NO: 144868 - protein, 329 aa, Oryza sativa
  Clone ID: PAT_MRT4530_45642C.1.pep
MDIVGAGTSPAARWKAPASMVLVQLFNSGMILLSKVSINGGMFVFALLSYRSVFGAIFILPFALIFERGKWRDIDWSATGWIFFNAFIGYAVPMSLYYYGLKDTTPSYSVIFTNIIPLFTFVLSLVFRLETFKLRSKAGLLKIVGVLVSVGGTMLVSLYKGKSLHLWNSILQHQKEQQTKSATNQLRGTIFLAGSSLTFACWYLVQSKVLKVYPYKYWSSMVTCLVGGFQTAFVGIILRRDKNAWMLGWDLNLVTVVYSGALATAGKYSLNSWAVAKRGPAYPPMFNPLSVIFTVVFDSILMGDDLTVGSLIGTAMVIVGLYLFLSVKA

SEQ ID NO: 144869 - protein, 366 aa, Oryza sativa
  Clone ID: PAT_MRT4530_45643C.1.pep
MAAAEVRHRTVEVASGVRLHVAEAGPEDGPAVLLVHGFPELWYSWRHQMRALAARGFRAVAPDLRGYGDSDAPPGRDSYTVLHLVGDLVALIADVGQPRVFVAAHDWGAAVAWQLCLLRPDLVTAFVALSVEYHPRNPTRSPVQTLRAVCGDGHYICFFQRPSGDDHYIAVCSGLPPMLPFWSSGLPRAALLQSAQGSEGVLSRKPGVAEAEFGRGDIKCLLKKFYGMRKAAPLIIPPGKTLFDSIDSDGTCPAWLSEEDISYYAEKFEKTGFTGGLNYYRCIDLNWELTAPWTGVPIKVPTKFIVGDQDLTYNIPGVKDYIHKGGLKACVPNLEDVVIMEGVAHFINQEKPDEVSDHICGFFSKF

SEQ ID NO: 144870 - protein, 495 aa, Oryza sativa
  unsure (1)..(495): unsure at all Xaa locations
  Clone ID: PAT_MRT4530_45644C.1.pep
MASVHSGAASSSSISPSSGEAKQPDWGFEAVEVAKSAIADIQQPPEQDVGTGDGEEKEKEKAAEGGGEEDEQRKAALDKLENASEDSLLGQASCTTTFAVPFXRQCRRWGPMGLGIVVGLKVFDSSVETITTGTWQALGNWRLLLQXLAETIQQGELPAKASVIAPTILETGKSFTAKGMEVLERVGKETMEFIIEETGMDVDKGTGEGDPQTEEEQFEEVSFDRCFYIYGGPDQLEELEALSSHYALLFNRKKGKLVAGQKTYYDGKLKEIQQIFSLSTKIDEDGPDSNKGKKIEAADSDSDAEMKKLCDSSVSKAAKMAAGFTTALGGLSPNEIVKRTTNRLETIHSEGVHRLSEMCCLAVSQLLLLGKSVISASSKPKNEDDENDVKIEWPEDPISKAKIIRWKAQSISVDIEKVSASFATGISDVAEAYMAAIQNALADKKDDLSNQNSVQEKAKYISNHLNTDQTSAVSKLQDALQYLAYVVVCSSMPNV

SEQ ID NO: 144871 - protein, 124 aa, Oryza sativa
  Clone ID: PAT_MRT4530_45645C.1.pep
METNMKILASEIANGIDEETNSLVTNMDGETVVSEAVNTETMRGTTQAGLQSNSHRFDSQAEIETNEIHIQDERRRTKVGREVNRATVEIRDLSSERLAVIEIPASRQGGSDQSLLDPKKAGRR

SEQ ID NO: 144872 - protein, 80 aa, Oryza sativa
  Clone ID: PAT_MRT4530_45646C.1.pep
WVPRGRPGSSLLSPPVSDFLISTTIIEPALPSISGKLFPLFISNALDAKEKTVSPLTTFHERNNVMRTSGHLQVLQYEFV

SEQ ID NO: 144873 - protein, 906 aa, Oryza sativa
  Clone ID: PAT_MRT4530_45647C.1.pep
MAGLCKGIREHRLLDHQQDMTTSPRNAYEVHDYNFVRVESKLPFYDVVDNEFDKYDFSNAQMIKAASSNKPETWDEFKTMMRKRFVTSYYKCTIQEKLEHPKQGDRTVREYIHEFKEALVTPSLPGGWNFDYGKSFAAQISDLYGCPVHFSPYFGSSPFILDVDFVRFNFRLTVKSVAIALQACLGGTPHGFSVNCLRDNCFSIHVCNKRVGLFVNSIRDFTCKDFHVRFHLWGNGGPNWRREFDLWQKEEDNLWTVVTSKKNAHHPTSFVTRKSVSNQRNSRLLGKRQVDKPSVFKRLFLSNGDPFPVHQCSSSAPEHLIGQLIQEVANIITHQHHIHVVRVQRYTLALCLVQLPSVLERDVLVGSGPVLLGNWFHGTFVKHDQLANWRNSPYTREGWLMILGIPLNLKTRGIIERITNLCGEFVDWHYRDRVLGRVLVKARYKSANDVPSCIVFGDAMAYGGNGQTWTFHVYVLNGEPTDILPANEDLLPIWQMLPPPNQHHNNNQPHQHFEDEFNDNMNQNEEHDDNQMILDQNQNDQPQDSISVHDFTLNVMQPSPVKRHRDSFIDSKVARALPFSVSGVDATDKMIQPKAKKVKSKVPISTENLRRSLRFVGQEKVNLAYDTPRKRSKVQPISKVLSLGPAVISSKELPPPIPVQQLQKIGTENSIVSGNMISRLPYVITIEFTSTATLSEKWLLSNIYGPCAGILRDEFVQWMNDLDIEADQCWILMGDFNFIRSVENRNIPGGDINDILIFNEIISNAGLVEIPLIGRNFTWSNMQEQPLLQQLDWVFTSTAWTLKFPHTMVTATSKYISDHAPCQISIETSVPKSSIFRFENFWVEVPGFFDIIQHCWSIPVRGSNQAIILNARLKKLRRGLKAWSKRLSNLNSLISNSNEVLSLLTS

SEQ ID NO: 144874 - protein, 232 aa, Oryza sativa
  Clone ID: PAT_MRT4530_45648C.1.pep
VLPTRLQKGGWHLPGSARLQAGRPATASGGGARSPATATNGSEWRGRRWRRPKARTRVRWMAADTGGRERGRRGRNTMGGIRGRKVVHGERKTKPKAAAMVEAHRNARRCGLRRRVWPGGQRTRRLAGWRTRRRRCGGDGCSGAGESGGKRKKVEGSAGELYWGSGVADVARVLLISLATWESGERELGGIQNSNPPLVGTRRGREGEGGVATTWARVRRTAEWARDAEWRR

SEQ ID NO: 144875 - protein, 1104 aa, Oryza sativa
  Clone ID: PAT_MRT4530_45649C.1.pep
MWRRPIGVCQSALTGLWPVTGGWDGWQRTHVPPYVKRSGGRLSLDPTLYTWQSRLLLDPTLYMQHRCLNHTSLPQQEMHDHIHIFGMSSTYTRWIYHGELVDTEDVEYLEQVHETNHNEGTDVGGYEPEDDNGVPELIGELYTAAGEDGQPPRFARILEDAKQVLCPGSNHSRFSFLVRLLHIKSYYRISNTAFTELLKLLSSAFPQCQLPKSYDEAKKYLRELGLGYVSIHVCKNNCVLFRKEYANMDLCPICGESRWEDGVGDRKVPRKVLRHFPLIPRLKRIFASKRTAEDTQWHKIKRKPVDNEMSHAADGEAWKDFDRKYRTFAEDARNMRLAIATDGFNPFGKVSNSYSMWPALVMPLNLPPWESVDPSNCIMSLLIPGPTSPGKDFDLFLEPLIEELLELWIGVSTYDAFSARKFNLRAAMLWCIHDYPALSTLSGRTTKGYYACIHCDKNSLSRALRNKIGYFGHRCFLPRTHAWRRSHAFDGHHENQVEPGKFSTDEVLEQLEKVKDVRPGKHDTSKKRKRGEDEGPLIYSRKVSLCKLPYWKDLLLPQNLDVMHIEKNICDNILGTLLKIEGKTKDTVNSRIDLHDMNIRHNLHLQQDGNSVRIPQARYVLKKEQRIEFCNFLKGVKYPHGYAANLARCISSDGSKVQGLKTHDCHVLLQRIIPAGIRGFVDKDIYEAIAELGNFFRELCSRNLRIDVLKRLKKDIPLILCKLEKIFPLAFFDVMVHLAVHLPDEALLRGPVQYGWMARPEGSIAEAYVASDTLTFCSRYMEDVDTRFNRDARHGDGPLDGNSSVFMHDVKLIGSTRIQYMEDEIMDKLVCMHREELEKEDAHDVDRRLEKGFARWFKTHIRKLRKENPGVVSEALFALSCGPDLRVKSCASCIVNGVRYSTVDREKYLQTQNSGVMVDGTHEGDNIEFYGVLREILELQYNSDLDIYRSVVLFRCDWFNQVGKTRGVRDDGHFKSINIQSFWYKDDPFILATQSKKIFYLQDTSLGNEWRIVQKFEHRNMYNVSEKDDHIFDVHQDDNCSDTEHEEDGEVTIIEANLEDLNNQANLTEDSRDDADEDDTILQYCSDIGNGNAEDDMPEDTDDD

SEQ ID NO: 144876 - protein, 88 aa, Oryza sativa
  unsure (1)..(88): unsure at all Xaa locations
  Clone ID: PAT_MRT4530_4564C.1.pep
KXXXXVHCLDWIGXGLVDVVLDEHVPPLASAASXVAGVLVRXAPASWPWRGGAARPAXAFTFXRXXXXHXLXARCXLXCRNXXXXVPN

SEQ ID NO: 144877 - protein, 1296 aa, Oryza sativa
  Clone ID: PAT_MRT4530_45650C.1.pep
MAREDEEKTSFITPFGVFFYVKMPFGLITAGNTFQRTVQGALSDQLGNNVEAYVDDIVVKTKKSDSLIDDLRETFDNLRRYHLMLNPEKCTCGVPSGKLLGFLISGRGIEANPEKIKAIENMKSPTRLKEVQKLIRCTAALSRFVARMGERGQPFFALLKKQDKFVWTQEAEEAFIALKRYLSDPPVLVAPQPNEELFIYIAATPYSVNTVVTGPHIVYVAIQIVIGPHIVYAAQPKFVQSLDPTLYMQHRCLNHTSLPQQEMHDHIHIFGMSSTYTRWIYHGELVDTEDVEYLEQVHETNHNEGTDVGGYEPEDDNGVPELIGELYTAAEEDGQPPRFARILEDAKQALCPGSNHSRFSFLVRLLHIKSYYRISNTAFTELLKLLSSAFPQCQLPKSYDEAKKYLRELGLGYVSIHVCKNNCVLFRKEYANMDLCPICGESRWEDGVGDRKVPRKVLRHFPLIPRLKRIFASKRTAEDTQWHKIKRKPVDNEMSHAADGEAWKDFDRKYRTFAEDARNMRLAIATDGFNPFGKVSNSYSMWPVLVMPLNLPPWESVDPSNCIMSLLIPGPTSPGKDFDLFLEPLIEELLELWIGVSTYDAFSARKFNLRAAVLWCIHDYPALSTLSGRTTKGYYACIHCDKNPLSRAPRNKIGYFGHRRFLPRTHAWRRSHAFDGHHENQVEPGKFSTDEVLEQLEKVKDVRPGKHDTSKKRKRGEDEGPLIYSRKKNICDNILGTLLKIEGKTKDTVNSRIDLHDMNIRHNLHLQQDGNSVRIPQARYVLKKEQRIEFCNFLKGVKYPHGYAANLARCISSDGSKVQGLKTHDCHVLLQRIIPAGIRGFVDKDIYEAIAELGNFFRELCSRNLRIDVLKRLKKDIPLILCKLEKIFPPAFFDVMVHLAVHLPDEALLRGPVQYGWMYPIERRLGTFKNSMRNRARPEGSIAETYVASDTLTFCSRYMEDVDTRFNRDARHGDGPLDGNSSVFMHGVKLIGSTRIQYMEDEIMDKLVCMHREELEKEDAHDVDRRLEKGFARWFKTHIWKLRKENPGVVSEALFALSCGPDLRVKSCASCIVNGVRYSTVDREKYLQTQNSGVMVDGTHEGDNIEFYGVLREILELQYNSDLDIYRSVVLFRCDWFNQVGKTKGVRDDGHFKSINIQSFWYKDDPFILATQSKKIFYLQDTSLGNEWRIVQKFEHRNMYNVSEKDDHIFDVHQNDNCSDTEHEVHEGNADEDLDHLQEDGEVTIIEANLEDLNNQANLTEDSRDDADEDDTILQYCSDSGNGNAEDDMPEDTDDD

SEQ ID NO: 144878 - protein, 344 aa, Oryza sativa
  Clone ID: PAT_MRT4530_45651C.1.pep
MAGVGRGRGRGGFFRPVVAAAAACGGGGGGGGGDEEQKRQILPLPSMAAMPPSLRAIQAKRKLEAVRRGVVPRAAGTSAVAALVAAVEAVQGAAAGGAAEAARGAGDAMAWVIRKVHLESPDLAVGLLGLVASCLGTVMEAEMDRIKRKNVEPSASVAAAASNAAPDNDGGDTDQIEDADAEMPELVELDMETELWSRIGIMHSDDDTPVFVDDEDGLQEIIDIARVHRRKAAYERIIATAADVNSLILSNYAQLLYQFDKDLDRAEDYFKQAVAAEPVDGEAMRRYALFMWHARGDLAGAEDMFTRAIDEEPQSSQHRSSYAWFLWMTGGVETCLIDSGNDTE

SEQ ID NO: 144879 - protein, 937 aa, Oryza sativa
  Clone ID: PAT_MRT4530_45652C.1.pep
MVVTGPHIVYVAIQIVIGPHIVYAAQVHETNHNEGTDVGGYEPEDDNGVPELIGELYTAAEEDGQPPRKVPRKVLRHFPLIPRLKRIFASKRTAEDTQWHKIKRKPVDNEMSHAADGEAWKDFDRKYRTFAEDARNMRLAIATDGFNPFGKVSNSYSMWPVLVMPLNLPPWESVDPSNCIMSLLIPGPTSPGKDFDLFLEPLIEELLELWIGVSTYDAFSARKFNLRAAVLWCIHDYPALSTLSGRTTKGYYACIHCDKNPLSRALRNKIGYFGHRRFLPRTHAWRRSHAFDGHHENQVEPGKFSTDEVLEQLEKVKDVRPGKHDTSKKRKRGEDEGPLIYSRKVSLWKLPYWKDLLLPHNLDVMHIEKNICDNILGTLLKIEGKTKDTVNSRIDLHDMNIRHNLHLQQDGNSVRIPQARYVLKKEQRIEFCNFLKGVKYPHGYAANLARCISSDGSKVQGLKTHDCHVLLQRIIPAGIRGFVDKDIYEAIAELGNFFRELCSRNLRIDVLKRLKKDIPLILCKLEKIFPPPFFDVMVHLAVHLPDEALLRGPVQYGWMYPIERRLGTFKNSMRNRAKPEGSIAEAYVASDTLTFCSRYMEDVDTRFNRDARHGDGPLDGNSSVFMHGVKLIGSTRIQYMEDEIMDKLVCMHREELEKEDAHDVDRRLEKGFARWFKTHIWKLRKENPGVVSEALFALSCGPDLRVKSCASCIVNGVRYSTVDREKYLQTQNSGVMVDGTHEGDNIEFYGVLREILELQYNSDLDIYRSVVLFRCDWFNQVGKTRGVRDDGHFKSINIQSFWYKDDPFILATQSKKIFYLQDTSLGNEWRIVQKFEHRNMYNVSEKDDHIFDVHQDDNCSDTEHEVHEGNADEDLDHLQEDGEVTIIEANLEDLNNQANLTEDSRDDADEDDTILQYCSDSGNGNAEDDMPEDTDDD

SEQ ID NO: 144880 - protein, 1468 aa, Oryza sativa
  Clone ID: PAT_MRT4530_45653C.1.pep
MVYLHVYGRSLYTLRKFITKSTDGKIPTRIGLGRHYTVQDPRTSVPQYPLYLVYGYPLSTVARQVGGLGAQGSTAMTSSFVDNSVNTGPIQGVSTSTMLVWTQVGEIVFSVYTTVLISAGPSMTGNENAVAITPDDSMSKDPPAVAKNGTSTSYEPEKDPSAAKPCPFDKNHEPTRTTSEVTKPWCPIHKTRKHTLQACWVFLNVQAEIRACKERGIQRTSPTRDVYCPIHKTKNHDFSSCKVLLRAMKTPLSKVVTGPHIVYVAIQIVIGPHIVYAAQMDRTWIHGRQFTPAYMEGVKQFMEFVGQRFDEHVDIPCPCCRCLNHTSLPQQEMHDHIHIFGMSSTYTQWIYHGELVDTEDVEYLEQVHETNHNEGTDVGGYESEDDNGVPELIGELYTAAEEDGQPPRFARILEDAKQALCPGSNHSRFSFLVRLLHIKSYYRISNTAFTELLKLLSSAFPQCQLPKSYDEAKKYLRELGLGYVSIHVCKNNCVLFRKEYANMDLCPICGESRWEDGVGDRKVPRKVLRQFPLIPRLKRIFASKRTAEDTQWHKIKRKPVDNEMSHAADGEAWKDFDRKYRTFAEDARNMRLAIATDGFNPFGKVSNSYSMWPVLVMPLNLPPWESVDPSNCIMSLLIPGPTSPGKDFDLFLEPLIEELLELWIGVSTYDAFSARKFNLRAAVLWCIHDYPALSTLSGRTTKGYYACIHCDKNPLSRALRNKIGYFGHRRFLPRTHAWRRSHAFDGHHENQVEPGKFSTDEVLEQLEKVKDVRPGKHDTSKKRKRGEDEGPLIYSRKVSLWKLPYWKDLLLPHNLDVMHVEKNICDNILGTLLKIEGKTKDTVNSRIDLHDMNIRHNLHLQQDGNSVRIPQARYVLKKEQRIEFCNFLKGVKYPHGYAANLARCISSDGSKVQGLKTHDCHVLLLRIIPAGIRGFVDKDIYEAIAELGNFFRELCSRNLRIDVLKRLKKDIPLILCKLEKIFPPAFFDVMVHLAVHLPDEALLRGPVQFGWMYPIERRLGTFKNSMRNRARPEGSITEAYVASDTLTFCSRYMEDVDTRFNRDARHGDGPLDGNSSVFMHGVKLIGSTRIQYMEDEIMDKLVCMHREELEKEDAHDVDRRLEKGFARWFKTHIWKLRKENPGVVSEALFALSCGPDLRVKSWIVNGVRYSTVDREKYLQTQNSGVMVDGTHEGDNIEFYGVLREILDLQYNSDLDIYRSVVLFRCDWFNQVGKTRGVRDDGHFKSINIQSFWYKDDPFILATQSKKIFYLQDTSLGNEWRIVQKFEHRNMYNVSEKDDHIFDVHQDDNCSDTEHEVHEVGSKISGEEKIFYFCFLGNPEASSISTRSLLLDHGQHQVLFTSSAGSISLGDAAPGPAATAAMQSESETGCGRRCGDAAAALHRQQMAWRRKNVSGGRRARTRSSTPSWRSPAHASAGSCASGDATEAGTRFLHSTVTMVNGEVSNHEDD

SEQ ID NO: 144881 - protein, 72 aa, Oryza sativa
  Clone ID: PAT_MRT4530_45654C.1.pep
MKRGSREPVGAPQGVLRKSQSALAHTIADRSDGLAVQVPLKACSANHKTWKPNKGFVVEEVQEEELAMADGI

SEQ ID NO: 144882 - protein, 65 aa, Oryza sativa
  Clone ID: PAT_MRT4530_45655C.1.pep
MVSQLFAVGGGDGAGAGRAAAAKSNTQVENAMPTKSALVLKFGSVVWSGARCQEDVIFFGSNKQK

SEQ ID NO: 144883 - protein, 54 aa, Oryza sativa
  Clone ID: PAT_MRT4530_45656C.1.pep
MGQIVRALTALANREKRHHRVPGRNKPARIYTTGIEAAGGDDRVMANFFPIALK

SEQ ID NO: 144884 - protein, 71 aa, Oryza sativa
  Clone ID: PAT_MRT4530_45657C.1.pep
LIVSRCCTAAVTEELRPISVQWLRAFFGLFFWRMRLSTGVTHVSNLSCCCRGFENMRGVNYITLYNLWAKL

SEQ ID NO: 144885 - protein, 74 aa, Oryza sativa
  Clone ID: PAT_MRT4530_45658C.1.pep
SFVRTIAIVRSSAKNTMDAYVLSSFLFFFLRTQIEQSLLHAWNSPLMGTTHTAKLAVSYVGLRSWNMDSHRMSS

SEQ ID NO: 144886 - protein, 223 aa, Oryza sativa
  Clone ID: PAT_MRT4530_45659C.1.pep
MEEDNDTVVVDGGGWRAVASGGSGEGTASEPPHRRQSLNPPGTPSPAAVPQPSRNPLTGGGMVALFPDPYLHGGTDEVNTACWENDPVVRRFLAEGGTHNHLLEVFINTTRPFVAQELNQLPWHSVPQPLGQPVCRPPSHRIESAAATVASSFRRIAAATIAELPMNGSCNHRRTPTDSAPTSHRDHRPPSLMNRHRNHHQAPVADESPPQPSLIWATIGSPI

SEQ ID NO: 144887 - protein, 186 aa, Oryza sativa
  Clone ID: PAT_MRT4530_4565C.1.pep
MSVCSSLSPLSLSPSSLARGNDSGERRRRSEAVAMAAGTAVGSGGGGAAVAVGTTVGGGGGGGGVGGRERRSRRRRWSGAAVGTAVAVGTAEAADSAYGGHGVETVAAAVWKQQQQQAAPVSSLHSAQPPCELSPNTRPTDELLPRAQPADELPYLARPPGDILSPWAAAVAREASAGDGGGRSEG

SEQ ID NO: 144888 - protein, 139 aa, Oryza sativa
  Clone ID: PAT_MRT4530_45660C.1.pep
MCPVLPALMCPVVNGSALLPLHDAAVDLHPIVLLPGNGCSQLDAELTEHYEPSPWAPASCGGAAAAGKGKGRRRWFRLWKNSTALGDPAVALCYADQLRVVYDRAVADYRNVARVWTRVVSFGTTRGFGSDDDPSDPER

SEQ ID NO: 144889 - protein, 51 aa, Oryza sativa
  unsure (1)..(51): unsure at all Xaa locations
  Clone ID: PAT_MRT4530_45661C.1.pep
TKIKMXXNACVGGNTFCAQRKTWTRTCQQLAHQPAITAGDRPCRTGRSAND

SEQ ID NO: 144890 - protein, 120 aa, Oryza sativa
  unsure (1)..(120): unsure at all Xaa locations
  Clone ID: PAT_MRT4530_45662C.1.pep
PPPNRSPAAPSRGPCCPKPGARGGPPLPXPGGAGPPGQKGRRGKKSQRGFPSFAGAPIKICSSNSGFRGGVFSFPICPPPLFWGGNRPNPPRGFCFLTRFHGLPLPPLFLMENCLGPPPG

SEQ ID NO: 144891 - protein, 161 aa, Oryza sativa
  Clone ID: PAT_MRT4530_45663C.1.pep
MHPAAKLPLLFLLLVGATATTSTANHAPAPAAGSCVPREREALLAFKRGITGDPAGRLASWKRGNHDCCRWRGVRCSDNLIGHVFGLHLQNNFSWYNEATALVGHISTSLLALEQLEHLDLSNNNLVGPAGRFPGFVSYLRNLVYLNFSGMPLKGKVPVET

SEQ ID NO: 144892 - protein, 163 aa, Oryza sativa
  Clone ID: PAT_MRT4530_45664C.1.pep
RRRGPPRRRAPRWRRPPRPARARLRRAPRRPPAAPLPRRPPPPPSPLPSPPPHPPPRPPPPPPPPPAPHSAAALLRPLQLLPDAEEPDASGVGAGGGRHRRRRTRRRGQEQERRGAPVEPHSGGGNAAAAGGGGGWRGAEDEVAAGGGDGNGGGWQFCSAQLG

SEQ ID NO: 144893 - protein, 119 aa, Oryza sativa
  unsure (1)..(119): unsure at all Xaa locations
  Clone ID: PAT_MRT4530_45665C.1.pep
YYYTFIENRAEKSHEFLQVAVVGIFPVHRLLDAADGRRTADAXXTRYVLGARSAKRCAHAARCXKTCDAVRGXDARSAVSRARAXPRGDSIRACSFFLLSFLGRCALSGVVPSGRALPS

SEQ ID NO: 144894 - protein, 638 aa, Oryza sativa
  Clone ID: PAT_MRT4530_45666C.1.pep
MAASRVALSVPVAAAVALLLLALPRAAVSYPWGLCNDTAGEFPARRSSYLASINLIAATLPGNASASPDLFATAEGVGAPPDQVSALALCRGDANASTCLACLTQAFLDLPNACAYHKVAAIFYDSCLLAYSNATIAAGDFSSEKIPIYGFYSNANATTEQARFNRLVAALVNATADYAARNSTRRRYASGEADFNAEFPKVYSWAQCTPDLTPASCRSCLAQIIGTYIGFFENRVGGFVRAVWCSFQYSTTPFLDGPMLVRLQGTSGASPAPSPAAVVPAVNQTPPAATPTLEGDANYSTEAEDIENLDSMLIDISILRSATGDFAESNKLGEGGFGAVYKGVLPDGYEIAVKRLSKSSTQGVEELKNELALVAKLKHKNLVSLVGVCLEQQERLLVYEFVPNRSLDLILFDTEKSEQLDWEKRYKIINGIARGLQYLHEDSQLKVVHRDLKASNILLDVNMNPKISDFGLARIFGRDQTQAVTKNVIGTYGYMAPEYLTRGNYSVKSDVFSFGVMVLEIVTGRKNNHSYNSQQSEDLLTMIWEQWVAGTVLEMVDPSMNSFFSESDVMRCIHIGLLCVQGDPANRPVMSSVVLMLGTDTVELHAPAKPTLFARKGGGDESGVASGGMSIVSLEEQS

SEQ ID NO: 144895 - protein, 189 aa, Oryza sativa
  unsure (1)..(189): unsure at all Xaa locations
  Clone ID: PAT_MRT4530_45667C.1.pep
RGGVSRSRPGGAPPTPPSPRPIPPKSPVLGRAPPGKRGGFRPPFFGNPWFCPSGGGPGSLFPRGGXPGPFGPGPRAPLSLFWVGPPGFFRAQILAPPKLLGPLLGGGGFPPVFPPPRGPPPFXGSPPIFPPPPFPFLKSPPPALKNPPFFFXPVPPPPPFSPGFFPPEGFPPPFFFFGPPLNKKPFGGG

SEQ ID NO: 144896 - protein, 44 aa, Oryza sativa
  Clone ID: PAT_MRT4530_45668C.1.pep
RAYNMKTQRRALHKFHLDNDAQKSSVMCRLYDYNELTCCTNTRS

SEQ ID NO: 144897 - protein, 979 aa, Oryza sativa
  Clone ID: PAT_MRT4530_45669C.1.pep
MRKAFLFLLLLIGVQMAGMAAAAAALVAAKRCMNAACGAPAPSPAGGEWRKGWPLRSGGFAVLCDKCGLAYEQLVFCDIFHQKESGWRDCSFCGKRLHCGCIASKNSFDLLDSGGVQCVTCIKNSAVQSVPSPVVPKLFSSQNNQRLFGKSDDLLSGRPLETSSLMVDARNDDLTIIAKNNLPFMVKNVEAGQSSNILRQKELENGARQIKWELPTLSIGDMGRIPFLTRSQSALESRRDENKDPTTESTTSESLSEACLNMSLGIASNGNKLEATSTVERPMLSPTTGFPEGRELTTALSPFQHAQRARHFLTRPPRVGEGAVFDPTKDMLPHLRVARPPAEGRGRNQLLPRYWPRITDQELQQISGEYPYYIYQLLGDIMHNSNSTIVPLFEKVLSASDAGRIGRLVLPKACAEAYFPPISQPEGRPLTIQDAKGKEWHFQFRFWPNNNSRMYVLEGVTPCIQSLQLQAGDTVTFSRIEPGGKLVMGFRKATNTVSLPDSQISAIANGSILGDTLFSSTNENLAIVSGYSGFLQSIKGAADLHTSSIYDHHVNSADGDVSWLKTDKFGSRPDEGSLQFLKRGRNIGSKSRRLSMDAEEAWELKLYWDEVQELLRPAPTAKPTVVMIEDYEIEEYDEPPVFAKRSIFTIRSTGEQDQWIQCDDCSKWRRLPLNVIVASKWTCADNTIDSKSCSCSAPEELTPKELHIVLQQYEDMRRRRNSFGFKQNIPEMDAVSLDAFATAAVYGDVGNQGSPSVATTTKHPRHRPGCTCIVCIQPPSGKGPKHNPACTCNVCMTVRRRFKTLMMRKKQRQSEREEAEASKKIAWMNRDEPEGSSLSRSPQTVDTTRDGDVTMFDKVDINKGHIDLNFHPTAVRDEERHGGQPRVSMVSLLEVANRPLENYMKQNGLTSLAGEQGSSSTCTGAATVPQPALVESEERTSNNDGGRVATAEQPESMAVDEAGDNQPDKAAGDSAAALA

SEQ ID NO: 144898 - protein, 145 aa, Oryza sativa
  Clone ID: PAT_MRT4530_4566C.1.pep
MAAGTAVGSGGGGGGDDGRKQRRRQRRWRLGRRSGAAAVAVASAVGSGEVGGGGDSAYGGHGVETVAAAVWKQQQQQAAPVSSLHSAQPPCELSPNTRPTDELLPRAQPADELPYLARPPGDILSPWAAAVAREASAGDGGGRSE

SEQ ID NO: 144899 - protein, 172 aa, Oryza sativa
  Clone ID: PAT_MRT4530_45670C.1.pep
MTAGEEGGGSGGTRPIPSFPLQNRGRRRRIRLCAAASEGGGGGSGGGDAQRQRRRRLAAATTSSKGRAFDGDGDGFISTTKLARSMADINTDLFDLSLSACAMASPFPLTWRSRWPPFSLSSAAGRRMPSGEEARKDKKRKRKGKGSNKALSALRVPNRSPLRFLGGLVKTV

SEQ ID NO: 144900 - protein, 73 aa, Oryza sativa
  unsure (1)..(73): unsure at all Xaa locations
  Clone ID: PAT_MRT4530_45671C.1.pep
MHVVDGDSIWHTMKLLCTYRMRSXIWKEFKFGTIGYVKFLSCTRGFPKVFRTPSISLVRGFRLPTSCINRGGA

SEQ ID NO: 144901 - protein, 196 aa, Oryza sativa
  Clone ID: PAT_MRT4530_45672C.1.pep
GELLLMDVGCEYHGYLSDLTRTWPPCGRFSPAQEELYSLILETNKECIKLCKPGASINEIHNHSVKMLIKGFQELGILEKGKSIQYNYLNPTAIGHSLGMDIHDSVKLSKDKPLEPGVIITIEPGVYIPPVPILKENAPDRYRGIGIRIEDEVLITESGHEVLTASVPKEISHITTLMNMGSNSMMDAHELRAACS

SEQ ID NO: 144902 - protein, 759 aa, Oryza sativa
  Clone ID: PAT_MRT4530_45673C.1.pep
CHGFCLMSTAHGGGSHRPSTRGEEPAGRPTSSPAIRAQGEELAGVRVRGRSSSTVRLPSARWGGARRRSRAGVDSPAVRAPGEKIAGVRARGWNSPAVRAPGEELADGGGGDEVVGSSDGRKRWRWRWGAVEAVGSGSGRGGGEQRGAVETACCLMSRELELLLFLLALRVGFYHAKCPVAEDVVLGEMRRIPRSRRLCTGCITTTASSSELLGLRLFSLVLRPLLVLFGKPTNLPPAPPHPPSGPLPRAKLARPVVVLPPADRMSSPSRRSSVPLPLPDPSSSRSETSAVRSEGDAAEEKSEEQRPGRRRRKRKQRGPTRPTIALLTEEAKQRLLRAEGQTSPGTTVSPFAPAPRRPQYPPFPEDGNVEDVRKWNDECHEVSKIIKKIEKERDKDIPIKTEPKDPYTTEAIQSSRDKVVVLQAARAIVSISHIMDDGQRRPQCTGIIIKQWSDDTGHHHATIVTYSRIVCEAGRKRDPLPKLSVCLPNKKTVLDAELIYFNDHYDIALLHINLEVTMELPSFGRGPEYGQEVFVLARDGEASLRARRGDIQWLEESDILGRDHYMFLSCDIPEGGNEGMVIDNDGVVRGMAIYCSPYPAVTSISTIVKCIDMFMQFNQVARPLFGIGVRTIALLDVQLQEDISDFGIKGGFLVDRVYNPVAEDLGIKRGNVITSINGKGALTLPELEDYLLLLGWGYLEDKLNCIKDIKLRVCDLKSGVEIDVTLPVRFYDKSERSSLDVLLVFCHAADTSCKVGRLL

SEQ ID NO: 144903 - protein, 888 aa, Oryza sativa
  unsure (1)..(888): unsure at all Xaa locations
  Clone ID: PAT_MRT4530_45674C.1.pep
MSAGWRTLLLRIGDRCPEYGGSADHKEHIFLLQCADQLPHKIPFFGVLIGLINLENEDFSKGIVDTTHANLQDALHNENRDRIRILLRFLCGLMCSKVVLPNSIIETFEALLSSAATILDEETGNPSWQPRADFYVYCILASLPWGGSELFEQVPDEFERVLVGIQSYISIRRHFDDIAFSVFETDEGNSPNKKDFIEDLWERIQVLSRNGWKVKSVPKPHLSFEAQLVAGVSHRFSPISCPPPTISQSSSEIVKGQEKHEADLKYPQRLRRLHIFPTNKAENMQPVDRFVVEECILDVLLFFNGCRKECAFYLVSLPVPFRYEYLMAETIFSQLLLLPNPPFRPIYYTLVIIDLCKALPGAFPSVVVGAVHALFDRISNMDMECRTRLILWFSHHLSNFQFIWPWQEWAYVKDLPKWAPQRVFVQEVLEREIRLSYFDKIKQSIEDAVELEELLPPKAGPNFRYHSDEGKESTDGHRLSKELVAMVRGRKTQGDIISWVDEKIIPVNGAKFALDVVSQTLLDIGSKSFTHLITVLERYGQIISKLCPNEEMQLLLMDEVSAYWKNSTQMIAIAIDRMMGYRLLSNLAIVKWVFSPANVDQFHVSDRPWEILRNAVSKTYNRIFDLRKEIQTLRKGLQAAKEASEKAARELEEAKSIIEIVDGQPVPSENPGRLRRLQARADKAKEGEVTTEESLEAKEALLARGLEESKELLRLLFKSFVEVLTERLPPISADGDLADLRCGNPXAQSTLKHPDVEIINENGGDDGGQVNGQNKKICGGRIRHEQWCLCTLGYLKSFSRQYATEIWSHIAMLDQEIFVGNIHPLIRKAAXSPVCADLPVKGLTFDFDPSSELEFTCIIRDKFFIMLXLTGHAQKYSDVYSGTPSILL

SEQ ID NO: 144904 - protein, 391 aa, Oryza sativa
  Clone ID: PAT_MRT4530_45675C.1.pep
MAAAQQLGGGGGALVAARWLGGGGGGSLRLFELLLLPFLILFLRLSSSSPGASGGNGRALPSVGSDVNECENNSICGAGSTCKNTEGSYRCDCNFGQRRDNSSDNMGNCEPIFSRAAIAVIATVFIIALLVVLLMFILLERKKRKLRAYFNRNGGQLLKSIKIDIYTKEKLDQITKNYSTIIGKGGFGKVYMGTINGNVRVAVKRCITVNALAYMHSYASQKILHGDVKSGNILLDDNFVPKVSDFGTSRLMTIGKDHTTFVVGDMSYIDPVYMKTGLLTEKSDVYSFGIVLLELMTGKKARYNGNNSLPMNFMEAYMTESRAYEMYDKEIITTEEDIKCTANVGTIAVNCLKNSVDERMTEVVKDLQIVPSEWLQILGHREHDSTEPMGI

SEQ ID NO: 144905 - protein, 308 aa, Oryza sativa
  Clone ID: PAT_MRT4530_45676C.1.pep
MAALPLATAELCDANAHLIMNGELRALQPVFQVYGRRQVFAGPIVTLKVYEDNVLVREFLEEKGQGRVLVVDGGGSLRCAILGGNPVQQAQNNGWAGIVVNGCIRDVDEINGCDIGVRALNSHPMKANKKGIGEKHVPVTIAGTRICDGEWLYADTDAGGGHGEGAAGWSDVTCVDGGGGRVEHRRGRVELGGEKAASRAPRVVSARRSGGGSARGAAAAATAGRGTGDAAALPESRGERPAGAARNHRLPQLERKEREIHGFPVHPFPGGGGGGGGGGGRRRGAAAMAAEEEEEEGGARWLTVAPNG

SEQ ID NO: 144906 - protein, 72 aa, Oryza sativa
  Clone ID: PAT_MRT4530_45677C.1.pep
MSRNQWARSPSRLIDHNVKRNRIAVRCAQTTEPPLLAASESQNTQQYNITVAVWHNGRAMTKEAVPLDPKCF

SEQ ID NO: 144907 - protein, 373 aa, Oryza sativa
  Clone ID: PAT_MRT4530_45678C.1.pep
MAGPRRRRMLLLMANYAALLVGSVASSLLSRFYFTHGGRNRWVVTLVQSAGFPLLVAGALAGGRPASAPRPFTWLSRRFLAVCLVIGALMGANNLLFAYSTSLLPVSTSSLLLSTQLAFTLVLAVVIVRHPVTFVNLNAVVLLTLSSVLLALRSGDSGETAEGGVGGGGRKSYLVGFVVTLGAAGLFSAYLPVMELVYREAVSGGFVLAVEVQAVMQAMASLIAAVGLAASGGVADDVSGWVDGGSSPAVYWAVVATLVLTWQACFMGTAGVIYLTSSLHSGVCMAAVLTLNVLGGVAVFGDPFGAEKALATALCAWGFSSYLYGEYAKAKKVAAAAAVAAAEEEESASDGEGSVHKSLTGGGAAGGHVETAV

SEQ ID NO: 144908 - protein, 362 aa, Oryza sativa
  Clone ID: PAT_MRT4530_45679C.1.pep
MGVYLSTPKTEKYSGEGGNDRLRYGLASMQGWRTTMEDAHTALPRLDECTSFFGVYDGHGGKAVSKFCAKHLHLQVLKNEAYSSGDLATSVLKSFFRMDEMMKGQRGWRELAELGDKGQKFTGMLEGIIWSPKPGESDKPEDTWTEEGPHSHFPGPTSGSTACVAIIRNDELIVANAGDSRCVLSRKGRAYDLSKDHKPDLDAEKERILNAGGFIVAGRVNGSLNLARAIGDMELKQNEFLPAERQIVTAEPELNTVKLSEDDEFIVLACDGIWDCMSSQEVVDFVHKEMNTEDSLSAVCEKLLDHCLAPVSGGDGCDNMTVIIVKFKKPSKSAATSSTNQSVSSEEMRPNELDDGPSDPNK

SEQ ID NO: 144909 - protein, 329 aa, Oryza sativa
  Clone ID: PAT_MRT4530_4567C.1.pep
MLIWLLVLTAGAGAMAMAAATPVLLLLRRSATILLPRSRSPRASACVLAPQRRRGRRWRLLRSSPPPEGVPGELMEEEEDSKFVPLNAEDPMYGPPALLLIGFEEGETNKVQEFLRELDGEFLKVIHCTEEMTKQTLWDAMHTEQPSIEAVKIAKSMPRICIFSGLTGEEMMMFINSYPETGLEPAAFAALVPNSADKILGEVIEEIMGDHEMLWMFDDSRAQPLEIYKFVMQNIEHEGWSLVRRIAREPSERDSHRFVVNPRRIEYERMYMFGDAPNKGLVWLICGPSGRLEIRVYKRPVRLAGTAIVRSRCCCSCKLNLLFVLTAQQ

SEQ ID NO: 144910 - protein, 414 aa, Oryza sativa
  Clone ID: PAT_MRT4530_45680C.1.pep
VPTAAAAAALSGSCVCVLDRAAASAAAAAAEAYGLPFPPERAAHHRELAAAAAAVERACRLCVDVKRTLLSGDKKILEKNDQTPVTVADFGVQALISLELQRLFPSIPLVAEEDSASLRSSNTDDNSSNVLVESISSAVAEKVSNANSLLTHDDVLRAIDRGGKNAVSFDSNPASYWVLDPIDGTKGFLGGDDALYVVGLALVVNEKVVAGVMGCPNWSNATIASRKEDSAAAQPDHGILMIAHVGCGTWSRHLSVDIGQFTTAQSTWNRCLVDSCSVVNMARFCIPDSQTWNMIPLSVLFNSTMDESNPRDENEILLLSVYCGSLCKYLTVASGRASVFVLRARTKNLKSWDHAVGVICVQEAGGQISDWSGKPLDLAADLTGRRDIYPSGGVLVTNGALHGKLVEMISANHK

SEQ ID NO: 144911 - protein, 97 aa, Oryza sativa
  Clone ID: PAT_MRT4530_45681C.1.pep
MASSRAIACKTPKYLFKVGHGLEDTGKPFLWVVKKSEVMASPSDTLAGVYDGHGGPDASRFLRSRLFPFVHEFAALCSGVVDADVIRKAFLAADEEY

SEQ ID NO: 144912 - protein, 265 aa, Oryza sativa
  unsure (1)..(265): unsure at all Xaa locations
  Clone ID: PAT_MRT4530_45682C.1.pep
MVENEEKDNNIPDXAQFGEFEENTTGATGGPVAENDSADDFCRMLYDAKKDYESEKEVTKFERMLTDHKMFLYPGCEXGHKKLGNTLEFLQWKAXKNGVTDKAFCELLKLIKNILPEGNKWPETTYEANRXVCPLGLEVQXQIHAYSNDYILYCGEDYENLETCPVCMALQYKIRRDDSGDVDGXPSKTRVSAKVMRYFPIISRLRHFFRYKAQVKMMRWHVKEHMGKNSADGSHRRSIDITFQDFEKSVXNIRFGFSMDCMNPF

SEQ ID NO: 144913 - protein, 62 aa, Oryza sativa
  unsure (1)..(62): unsure at all Xaa locations
  Clone ID: PAT_MRT4530_45683C.1.pep
XTKAGRGKTFYXQTHKGTTGQEPPGITHYSRPCAKRGQNASRAPGHQGYXCASCAYLWGNHM

SEQ ID NO: 144914 - protein, 282 aa, Oryza sativa
  unsure (1)..(282): unsure at all Xaa locations
  Clone ID: PAT_MRT4530_45684C.1.pep
FDCFVSCKTTIDDIESKLRQIEEDPEGAGTAHLYSVTQKISGVANRAFEPLFERQAQAEKIRSVQGMLXIFRTLFNLPSAIRGNIRKGEYDLAVREYQKAKSIVLPSHVGILKRVLEEVEKVMQEFRGMLYKSMEDPHLDLAELENIVRLLLELEPETDPVWHYLNIQNSRIHGLFEKCTLDHEARMEVLQNKIREKILSDAKWRQLQQDSNKSLEVDSATGDSFQDDQLSTNIMADEADSLRAAYIRRLTAVLIQHVPAFWRLALSVFSGKFARQLAGITF

SEQ ID NO: 144915 - protein, 63 aa, Oryza sativa
  Clone ID: PAT_MRT4530_45685C.1.pep
MSTAGGGYKEAKQEQQDEGIRRELSVAVATEVSRNGCGDNACSNFGWRRGGEEPAWPAAAAEC

SEQ ID NO: 144916 - protein, 1084 aa, Oryza sativa
  Clone ID: PAT_MRT4530_45686C.1.pep
MASDSDVDEDELLQMALQEQAARDLSHQRPAGAGKPVVNLVRPPANSSRGGGGGGRGGGGPAKARQPSRGGGDDDDDDSEVEMLSISSGDEDGAPSSRDRGPPPPRGGGRAGARRAASRDDGDFDDDEPRSWKRVDEAELARRVREMREGGAAPTVDQKAAAAATRKALTNVQTLPRGVEVLDPLGLGVIDNKSLRLITDASVSSPVSREKAQGLDPSMREKVIYSSPNFDPKVFLSWVHKDTSAADLESGALTLKTDLKGRTQQKKQLVKENFDCFVSCKTTIDDIESKLRQIEEDPEGAGTAHLYSVTQKISGVANRAFEPLFERQAQAEKIRSVQGMLQRFRTLFNLPSAIRGNIRKGEYDLAVREYQKAKSIVLPSHVGILKRVLEEVEKVMQEFRGMLYKSMEDPHLDLAEFYLPPDFLANCQLENIVRLLLELEPETDPVWHYLNIQNSRIHGLFEKCTLDHEARMEVLQNKIREKILSDAKWRQLQQDSNKSLEVDSATGDSFQDDQLSTNIMADEADSLRAAYIRRLTAVLIQHVPAFWRLALSVFSGKFAKAAAGNVLSDSDMNTKQSVNKTDDKGGEAKYTNHTLDEVASMVRATVSAFDTKVQNTFRDFEECNILRPFMGDTIKEIAKACLTLEGKDSSPTAVKMLRALHYEITKLYILRLCSWMRATTKEISKYETWFTLTTLERNKSLYAISSMPLEFRDIIVSAMDRIDFCVSASGYLERFGGELAQNRSNKENNHTQNGYVNGTNSETSAGMDGDLYKKLLVVLSNIGYCKAELSDELYTKYRHIWSPVRDNDERSADMRDLMTSFSALEEKVLEQYTFAKSNLIRNAARNYLLDYGIHWGAAPAVKVYSGARPLLEKAMTILVEGLIDIFLSIFHENKTKELRMLDANGFCQLMLELEYFETILRTYLSTEAEQALRSLQENLLEKACESVTEALENPGHHRRPTRGSEDAASDDRQSVSPDDLLALAQQCSSDLLQGELEKTRLNIACFMESTLQSTPAPAGSKPAAYQSYKAPATHQPVQVSSPSFRRQQTNKRGVQGLLYGAIYLYNFHEPGIIVAIFSKDTIST

SEQ ID NO: 144917 - protein, 1117 aa, Oryza sativa
  Clone ID: PAT_MRT4530_45687C.1.pep
MASDSDVDEDELLQMALQEQAARDLSHQRPAGAGKPVVNLVRPPANSSRGGGGGGRGGGGPAKARQPSRGGGDDDDDDSEVEMLSISSGDEDGAPSSRDRGPPPPRGGGRAGARRAASRDDGDFDDDEPRSWKRVDEAELARRVREMREGGAAPTVDQKAAAAATRKALTNVQTLPRGVEVLDPLGLGVIDNKSLRLITDASVSSPVSREKAQGLDPSMREKVIYSSPNFDPKVFLSWVHKDTSAADLESGALTLKTDLKGRTQQKKQLVKENFDCFVSCKTTIDDIESKLRQIEEDPEGAGTAHLYSVTQKISGVANRAFEPLFERQAQAEKIRSVQGMLQRFRTLFNLPSAIRGNIRKGEYDLAVREYQKAKSIVLPSHVGILKRVLEEVEKVMQEFRGMLYKSMEDPHLDLAEFYLPPDFLANCQLENIVRLLLELEPETDPVWHYLNIQNSRIHGLFEKCTLDHEARMEVLQNKIREKILSDAKWRQLQQDSNKSLEVDSATGDSFQDDQLSTNIMADEADSLRAAYIRRLTAVLIQHVPAFWRLALSVFSGKFAKAAAGNVLSDSDMNTKQSVNKTDDKGGEAKYTNHTLDEVASMVRATVSAFDTKVQNTFRDFEECNILRPFMGDTIKEIAKACLTLEGKDSSPTAVKMLRALHYEITKLYILRLCSWMRATTKEISKYETWFTLTTLERNKSLYAISSMPLEFRDIIVSAMDRIDFMVLNLRSETAKSYDISQHLHEIHESVRLAFLNSFLDFAGYLERFGGELAQNRSNKENNHTQNGYVNGTNSETSAGMDGDLYKKLLVVLSNIGYCKAELSDELYTKYRHIWSPVRDNDERSADMRDLMTSFSALEEKVLEQYTFAKSNLIRNAARNYLLDYGIHWGAAPAVKVYSGARPLLEKAMTILVEGLIDIFLSIFHENKTKELRMLDANGFCQLMLELEYFETILRTYLSTEAEQALRSLQENLLEKACESVTEALENPGHHRRPTRGSEDAASDDRQSVSPDDLLALAQQCSSDLLQGELEKTRLNIACFMESTLQSTPAPAGSKPAAYQSYKAPATHQPVQVSSPSFRRQQTNKRGVQGLLYGAIYLYNFHEPGIIVAIFSKDTIST

SEQ ID NO: 144918 - protein, 90 aa, Oryza sativa
  Clone ID: PAT_MRT4530_45688C.1.pep
MGAAAPASILTPEGSGGVHHHFFLQDLDHDRRGRRNTWGGRKRLLFEAPPGAPAVEKTLWSVIPYSCVWDLWLSVTKVPELRRALLIFSF

SEQ ID NO: 144919 - protein, 48 aa, Oryza sativa
  Clone ID: PAT_MRT4530_45689C.1.pep
WPFNACPHLVLYRLCGKLCYGFTFLPSFNTPKGTFCGLLSPPSCPLPP

SEQ ID NO: 144920 - protein, 80 aa, Oryza sativa
  Clone ID: PAT_MRT4530_4568C.1.pep
MVGCEHMVLMVVLMTVKDRFTIFGYETLTVPTTSQRGQRLYFLYSMVHCRAPDCEVAEISPRGSLGSPCLVCKGVIMIQK

SEQ ID NO: 144921 - protein, 142 aa, Oryza sativa
  unsure (1)..(142): unsure at all Xaa locations
  Clone ID: PAT_MRT4530_45690C.1.pep
ELGRTHLGGTGDLDQKKRWERINPIPDRENPAGQKGAELPKPLFDGREGGRDAKGGPMNGGANNXRTHLPPDPQGLNSRMETKGNKKYRGTEYRSAGCTENHKVRRRNLEQPGEEESARWEGDMGGAQVLQRHISIWKDNPK

SEQ ID NO: 144922 - protein, 158 aa, Oryza sativa
  Clone ID: PAT_MRT4530_45691C.1.pep
GGDRPRGHTRPAAAATGNKAAAAHGPGGHRRRRRDARKHGRRPAKGRRRREAAHREPRRQRERPAKGGGDAPRVDNTEGLPAMEGVDRAAAEKERDAAREAMQPARRGGSRGDGERRPEEEKGGRGGEGKRSRGRGVAWSGDDGGGDGAARRRRERRL

SEQ ID NO: 144923 - protein, 40 aa, Oryza sativa
  Clone ID: PAT_MRT4530_45692C.1.pep
LIQSEYDAKSYILIFLQGCYSTSCLFIKHCICGIEKPISF

SEQ ID NO: 144924 - protein, 415 aa, Oryza sativa
  Clone ID: PAT_MRT4530_45693C.1.pep
MAMRLSSAAVALALLLAATALEDVARGQDTERIEGSAGDVLEDDPVGRLKVYVYELPTKYNKKMVAKDSRCLSHMFAAEIFMHRFLLSSAIRTLNPEEADWFYTPVYTTCDLTPWGHPLPFKSPRIMRSAIQFISSHWPYWNRTDGADHFFVVPHDFGACFHYQEEKAIERGILPLLRRATLVQTFGQKDHVCLKEGSITIPPYAPPQKMKTHLVPPETPRSIFVYFRGLFYDTANDPEGGYYARGARASVWENFKNNPLFDISTDHPPTYYEDMQRSIFCLCPLGWAPWSPRLVEAVVFGCIPVIIADDIVLPFADAIPWDEIGVFVAEDDVPKLDTILTSIPMDVILRKQRLLANPSMKQAMLFPQPAQPGDAFHQILNGLGRKLPHPKSVYLDPGQKVLNWTQGPVGDLKPW

SEQ ID NO: 144925 - protein, 233 aa, Oryza sativa
  unsure (1)..(233): unsure at all Xaa locations
  Clone ID: PAT_MRT4530_45694C.1.pep
MALLLSYPRRHPSIHLLILSAYALFLLPILDGLELGGDGLYREILRDETVLRLKELGKISDGEGYLERTFLSPASIRASAVIISWMKDAGLTTWIDQMGNIHGRFEPTNSTKEALLIGSHMDTVIDAGMYDGALGIISAISALKVLKVTGRLQRLTRPVEVIAFSDEEGVRFQTTFLGSAAVAXGTTVQDVLKLNSLEGTANALGEVRYSPESVGXYXEVHIEQGPVLEALRY

SEQ ID NO: 144926 - protein, 500 aa, Oryza sativa
  Clone ID: PAT_MRT4530_45695C.1.pep
MALLLSYPRRHPSIHLLILSAYALFLLPILDGLELGGDGLYREILRDETVLRLKELGKISDGEGYLERTFLSPASIRASAVIISWMKDAGLTTWIDQMGNIHGRFEPTNSTKEALLIGSHMDTVIDAGMYDGALGIISAISALKVLKVTGRLQRLTRPVEVIAFSDEEGVRFQTTFLGSAAVAGTLPESILQVSDKSIYFAFNFFSGTTVQDVLKLNSLEGTANALGEVRYSPESVGSYVEVHIEQGPVLEALRYPLGVVKGIAGQTRLKVIINGSQGHAGTVPMKLRRDPMVAAAELVLTLETLCKEPNKFLTYDEECGCFTEESLAGLVCTVGELLTWPSASNVIPGQVNFTVDIRAMDDKVRETIVTSFSRLVLQRCDDRLVDCAVEQKHAAAATPCDAELTSRLERATRSTISSMAAGVRRAGGETPVLMSGAGHDAMAMARLTKVGMLFVRCRGGVSHSPEESVMDDDVWAAGLALVNFIDQNAVDAAAATAAES

SEQ ID NO: 144927 - protein, 692 aa, Oryza sativa
  Clone ID: PAT_MRT4530_45696C.1.pep
MGVGGRRGRCGRRRSGRHARHGGRQAFGAVVRKGATAVRDTEAATAWDTEVATARDTEAAAANSTSASSRCLRHRPPPPSRAPPPAASTIARHPYPEPRFQPPSPPATAPIPSTISTAKKTGPSPLRPAPPFLPPRGDEPTTRRRRCPGATARGTGGSTSSRPSPATSSASSPVQPPRDAAVGVADIETADSKISEEEVDGGEVPTVDRYFAALEGPELDTLRVLITLDFVKIDTNDPVFNQHNLNLAITAPYLWLSIVCCSIDLVEKGVHNGKEIAVKKLNLLPGLNDTVFKNESLNLMSVQHQNIVKLIGYCYETKNKVVEYNGKLTYAEISERVICFEYLKRGNLANFISDESGGGLDWTTRYRIIKGACEGLNYLHNGQEKPIYHLDLKPENILLDENMAPKIADFGLSRLFESTKTHITKTVNGTRGYMPPEFIDQGKITKKFDVFSLGVIIIQIIAGIDGYRQCCDMSSTQEFVDYVYAKWNKRVQGISRYASREADMLAVRQCIELSLRCVEANRDKRPAINDIIHQLNELDAEIENMFMRQPKSLLGQKSSESKYVGLDPVRELRFPFEVKKDISCCLQLTNQTDYFIAFNTKANQKKYSTQPNKGTIAPWSSCYVTVTMKAQETAPPYLQCHDMFVVQSTRVNEDLEPETEDITEELFKKTMGKVVDEEKLPIVYVALPQAES

SEQ ID NO: 144928 - protein, 103 aa, Oryza sativa
  unsure (1)..(103): unsure at all Xaa locations
  Clone ID: PAT_MRT4530_45697C.1.pep
NGLVRQQYGKRASPFLEXRGFXMRNNQVWEQLGGGGQQFPFRGIKIVQGKGQEVKLQQFGGFSFDGKWGQGKALVGFKGPFRKGIPPGGXGGPRTISPLGGVL

SEQ ID NO: 144929 - protein, 105 aa, Oryza sativa
  unsure (1)..(105): unsure at all Xaa locations
  Clone ID: PAT_MRT4530_45698C.1.pep
MSTSPGRDRRCSEPCYFTFVMLIMMVQEKIPHITTFLMPIDIMLSTFNHPGDXVMVFLSRHSIPAPLMFDDLIKLPNATIVPTAHSSQTITITNVKHQKIYFNNI

SEQ ID NO: 144930 - protein, 73 aa, Oryza sativa
  unsure (1)..(73): unsure at all Xaa locations
  Clone ID: PAT_MRT4530_45699C.1.pep
CHSQPEEALHLMSLLQDSARNDKLLDMIDHRMDDMQLHSXDVMHMMHLAMWCLQLHSNRRPSMSTVRSEGSGG

SEQ ID NO: 144931 - protein, 141 aa, Oryza sativa
  unsure (1)..(141): unsure at all Xaa locations
  Clone ID: PAT_MRT4530_4569C.1.pep
KYENEHSXFKKDLEIEVKGLRRTLDNMTIVTTDLEQEVEGMRKEIILMKKHHEQEMEKHHVXSDFNVNVKVDTGPREDLIKVLEDMRQEYELIIKKKHRDLDTWYKEQSAAMSQEAVSTATVQSREGAIPYLTRAASRLGD

SEQ ID NO: 144932 - protein, 498 aa, Oryza sativa
  Clone ID: PAT_MRT4530_456C.1.pep
MATLLFSLAPSPRLLLPLRRLDPKPLLRPKPLLLLSTAMGSPARAQPSSWRSAGRPPPQQQWSCATCTLDNPGHSRACDACGNSRPVEVDGDAVAKAQTPTLPTMSTPPARASTSSGCGAGRPPTERKWSCAACTLDNPGHSRACEACGNSRPMEVVAVDDDDEDALDLGALAGASFLPLQRHSMKRERAASPEVVGVCADEGDGAKGGEDKPAKKKACAEIILDKKTFKIMTYNVWFHEDLELCRRMDALGDLIKNHNPDLICFQEVTPNIYLLLQKSDWWQEYRCSLSNSMAMQRKYYCMQMSKLPVESFDCTPFSNSIMGRELCVAHVKTGGAVKLVLATSHLESPMPGPPTWDQMYSTERVAQANKSLKILGSFRNVIFCGDMNWDDKGDGPFPLPAGWTDAWIELKPGEDGWTYDTKANSMLSANRKLQKRLDRFVCKLADFKINNIQMIGKNAIPGLSYVKEKKVRKEVRKLELPVLPSDHFGLVLSITLES

SEQ ID NO: 144933 - protein, 918 aa, Oryza sativa
  Clone ID: PAT_MRT4530_45700C.1.pep
MAAEPRRVSFRDGRLASRKAEEAALRRHQAATWLESVIGPFGLSRCPSEQEFVAAVRNGIVLCKAINKIQPGAVPKVVANASCDSQPSTAFQYFENIRNFLVAVQELKLPCFEASDLEKDNIDAGSVGKIVDCVISLKSYHEWRQRGGSYGHLKHLKSPLATRSASHVQSEYVCSGSSSTPKRLDLVETDTERQPNQNVGPNCQEAMERLQKVILDCMISCKENLDNDSLKKDPYKLVGTILSRQLEKEQFEPLLQLFSPEGVTVKNESCPPIESSNSQVENRRRLLQAQESELLLHYEFYSVFLKSTLPYKELKSMFQEVKIDFRTLKTQFQDDIIKLGDNVQGLSKAALGYNQAVKENKSLYNLLQELRGNIRVFCRIRPLINSESISSIEHIGNDGSIMVCDPLKPQTTRKIFQFNKIFGPTTTQDEVYKETQYLIRSVMDGYNVCIFAYGQTGSGKTHTMCGPSGGLSSQDLGISYMALNDLFKTSTSREDVNILTVHVNGKDMSGNVTRSSLHLVDLAGSERVDRSEATGDRLKEAQHINKSLSCLGDVITALAQKNSHIPYRNSKLTQLLQSSLGGNAKTLMFAHISPEADSYVETLSTLKFAQRASCVELGTAHANKESNEIRELKEQVENLKRALAAKELEKSSFKLKENTVVRERAKQVPERTPPRPRRLSLENTGIGKGSIPDRKGPKSPLSVTKLNRDHATIHDSIDGFNHHIMHQGSVMQMSATSSEDPVREETEKIITTVDTVPFCGLHPDAYISSKQSGLDTLLRTPCRSRNLNLEVGQTDEPSSSAKLEKMTSSNATKKGSHLRKSIQSSIGKLIHGSERRNVQHLGQATPAKIANSTNNDVPSSITPDLRLRRRQSLTGLPPPPSTMSRRSSLGGKSDIGSDKRGAKTPPPVNSAAKAKRWL

SEQ ID NO: 144934 - protein, 50 aa, Oryza sativa
  Clone ID: PAT_MRT4530_45701C.1.pep
VSTSGHIEKHLISTSLETCYTKRLSPGTVGWGFKNPPREHFTLCNPGVPL

SEQ ID NO: 144935 - protein, 87 aa, Oryza sativa
  Clone ID: PAT_MRT4530_45702C.1.pep
DSSSSSPTQSTHTNTPRTHTRPFKRWITGALNASRPLERPCSVQQGTGIKEQLLLLSVSTSARCTHALSQSQRTRCDAMPREGRTRR

SEQ ID NO: 144936 - protein, 83 aa, Oryza sativa
  unsure (1)..(83): unsure at all Xaa locations
  Clone ID: PAT_MRT4530_45703C.1.pep
LASTELTSKCFILKPDKISGTNKRKSSLYARTLGVQXQGVAELPLLLQHEEAVSQQHRQQAXAENENVNLIKXKKLVHVMSFI

SEQ ID NO: 144937 - protein, 1219 aa, Oryza sativa
  Clone ID: PAT_MRT4530_45704C.1.pep
MEPRRDDVRSAAQSTIHGSSSSAPTSSPVPDYPISGSVKPVLNYSIQTGEEFALEFMRDRAIPKKHLVSGMSHDQNVASGAGLKDPRGLLGAHRTGAESRFDAAIFLTTDIQQTEGIERKSFAENENRSRHVSTSSVPRIPSRSGSSQRLSHGYASSESSDSSRRIKILCSFGGKILPRPSDGKLRYVGGETHIIRISRNISWQELKQKTTAIYNQPHVIKYQLPGEDLDALISVSNDEDLRNMMEECGFLDNGEGSQKLRIFLVSSIDFDDMSFSLGSMDSDSGIQYVVAINGMDVGTTKPSSGHGLGNTSINELDQFINLNNDSNQPNSSRDGSNLYSMSASTAVPPALISVPLPVTLSSDSTANLYPYHSHGMQHVQGSDYSLPASSERFYDIEGQTSIPLSVPSGYRYTSQCTPYSGTTSLQSFDQQSYHDSMMEGSMKEEKQPSVRVPLQKNDLDYFQSLENMSVPVIHHDSSSTNYMNSDVPVTTSIQEGLKSSLQPSDSAKSLETYTASKAMSAAQDSECNEDDRHSSGAFASGCSDFQVDMMDHSNKNPPPHSGRVFHSERIPREQAGSLNRLSKSDDSLNSQFLILQSQSGVAKESIAEASDPAIEGTEKSNLDARAINLNDPATVDSVTPEKECANTVQQTSTFSEQLLGEKRSSTDMSTRNVEKNMHAAENAVAKCNLNDATSDGTKIVNQQADHSAVPHHVSWDTPNPAIPTDVGCDPFVPSTSSLDDSHKEPIIPKKDNKDIVGGMSERTSPDILSDFFANTAAQSLSPFNEPVLSLNMHNYEPQRWSFFRNLAQNEFEHKNKEQDLAKIEEGVYPLVHAEHDAVNVKNVAPQNDVHLETYPVSSGINLDSSILPPGFISSQDNPPMTKNVEGFQVDNPYTNMHEMMPSVPEFEEPKFEEGKAVGPVMDASFKDNNFEYLQIIKNEDLEELRELGSGTFGTVYHGKWRGSDVAIKRIKKSCFTGRSSELERLANEFWREAEILSKLHHPNVVAFYGVVKDGPGGTLATVTEFMVNGSLRHVLQRKDKYLDRRKRLIIAMDAAFGLEYLHSKNIVHFDLKCDNLLVNLKDQSRPICKVGDFGLSKIKRNTLVSGGVRGTLPWMAPELLNGSSNKVSEKVDVFSFGIVMWEILTGEEPYANMHYGAIIGGIVNNTLRPPVPASCDPEWRRLMEQCWAPDPSQRPAFTEIAGRLRAMSVAANQAKAASK

SEQ ID NO: 144938 - protein, 225 aa, Oryza sativa
  unsure (1)..(225): unsure at all Xaa locations
  Clone ID: PAT_MRT4530_45705C.1.pep
WRLAFEVVFAMPGSSPXVDRMVMIVATKFAEAVLVMNFEEVLPLPYECFWSMPPPPPPYQQLVIPVECSQAMLASLLRARPLCGERLREARATAEHALADAKAEGDDLAAVDVNLVLTFLAARDGDLDDALRRYKAAVQKDPSDSRPYELVVAAALGSGTLTTLGLERGGRGRLVLVAPWREVDARLTAAVLDDDLDLTLPERVQLRLLHHRRPDGLWRSSTGVG

SEQ ID NO: 144939 - protein, 868 aa, Oryza sativa
  Clone ID: PAT_MRT4530_45706C.1.pep
MASPASVAGGGEDSNGCSSLIDPLLVSRTSSIGGAERKAAGGGGGGAKGKHWAAADKGERRAAKECGGEDGRRPLLFRSYRVKGSLLHPYRALIFARLIAVLLFFGWRIRHNNSDIMWFWTMSVAGDVWFGFSWLLNQLPKFNPVKTIPDLTALRQYCDLADGSYRLPGIDVFVTTADPIDEPVLYTMNCVLSILAADYPVDRSACYLSDDSGALILYEALVETAKFATLWVPFCRKHCIEPRSPESYFELEAPSYTGSAPEEFKNDSRIVHLEYDEFKVRLEALPETIRKRSDVYNSMKTDQGAPNATWMANGTQWPGTWIEPIENHRKGHHAGIVKVVLDHPIRGHNLSLKDSTGNNLNFNATDVRIPMLVYVSRGKNPNYDHNKKAGALNAQLRASALLSNAQFIINFDCDHYINNSQAFRAAICFMLDQREGDNTAFVQFPQRFDNVDPKDRYGNHNRVFFDGTMLALNGLQGPSYLGTGCMFRRLALYGIDPPHWRQDNITPEASKFGNSILLLESVLEALNQDRFATPSPVNDIFVNELEMVVSASFDKETDWGKGVGYIYDIATEDIVTGFRIHGQGWRSMYCTMEHDAFCGTAPINLTERLHQIVRWSGGSLEMFFSHNNPLIGGRRLQPLQRVSYLNMTIYPVTSLFILLYAISPVMWLIPDEVYIQRPFTRYVVYLLVIILMIHMIGWLEIKWAGITWLDYWRNEQFFMIGSTSAYPTAVLHMVVNLLTKKGIHFRVTSKQTTADTNDKFADLYEMRWVPMLIPTMVVLVANIGAIGVAIGKTAVYMGVWTIAQKRHAAMGLLFNMWVMFLLYPFALAIMGRWAKRSIILVVLLPIIFVIVALVYVATHILLANIIPF

SEQ ID NO: 144940 - protein, 374 aa, Oryza sativa
  Clone ID: PAT_MRT4530_45707C.1.pep
MVRYATYIRQLGFTPSASDTSLFILRDGDRLAYLLLYVDDIILTASSAELLRHITARLHTEFAMTDLGDLHFFLGISVCRTPDGLFLSQLQYAVDLLQRAGMSECHPTATPVDTRAKLSASEGAPVADPTEYKSLAGALQYLTLTRPKIAYAVQQGSLSAGLHIGTGPVGSLTAYSDADWAGCPDSRRSTSGYCIFLGDNLELHAPISTTTIVFCNNVSAIYMTANPVRHRRTKHIEIDIHFVREKVALGQVRVLHVPSTHQFADIMTKGLPVQLFTDFRSSLCIRDPPAVTAGGDFDPILSNVTAEPDGEWRGGRGVRRESRRVSTADDGRPAVAATREKGRRQLRRRASAANDRRRGGGDCHHGLALLDEFP

SEQ ID NO: 144941 - protein, 479 aa, Oryza sativa
  Clone ID: PAT_MRT4530_45708C.1.pep
MVTRSKTGSLKPVDRLVLSASHSAISPLPANYRSALADPNWRAAMAEEFKALIDNGTWRLVPRPPGANVVTGKWIFKHKFHSNGSLARHKARWVVRGYSQQHGIDYDETFSPVVKPSTIRVVLSIATSRSWPIHQLDVKNAFLHGTLDETVYCQQPSGFIDPAAPNAVCLLQRSLYGLKQAPRAWYQRFATYICQLGFTPSASDTSLFILQDGDRLAYLLLYVDDIILTASSTELLRHITARLHTEFAMKDLGDLHFFLGISLSASEGAPVADPTEYRSLAGALQYLTLTRPEIAYAVQQGSLSASLHIGTGPVGSLTAYSDADWAGCPDSHRSTSGYYIFLGDNLVSWSSKRQTTVSRSSAEAEYRAVAHMVAECCWLCQLLQELHAPISTATVVFCDNVSAVYMTANPVHHRRTKHIEIDILFVREKVALGQVRVLHVPSTHQFADIMTKGLPVQIFTDFRSSLYVRDPPAATAGGY

SEQ ID NO: 144942 - protein, 485 aa, Oryza sativa
  Clone ID: PAT_MRT4530_45709C.1.pep
MGGALVRDYCPYTSPQNGKAESMIRTLNNSVCTLSYKPSCHPPIGPKGATAPSVVAPPLAGVEQPHAPFPVNVEQRLPTAGCRVSIFLKEGAVVTSCPAATSFSRPAGTLEPFPYHYQRRLALTPPPQVVAPAAPAPSSQVHTMVTRSKTGSLKPVDRLVLSVSHNAISPLSANYRSALADPNWRAAMAEEFKALIDNGTWRLVPRPPGANVVTGKWIFKHKFHSDGSLARHKARWVVRGYSQQHDIDYNETFSPVVKPSTIRVVLSITTSRSWPINQLDVKNAFLHGTLDETLGFMPSAFDTSLFIFRDGDRLAYLLLYVDDIILTASSADLLRHITARLHNEFAMTDLGDLHFFLGISIRRTPNGLFLSQRYLHIGTGPVGSLIAYSDADWAGCPDSSLHLRLLHLPRRQPGVLELHAPISTATVVFCDNVSAVYMTANPIHHPTPTFASVSLPLRLRAGIRNTLPYMYRLYCIVSFLVFSSN

SEQ ID NO: 144943 - protein, 128 aa, Oryza sativa
  unsure (1)..(128): unsure at all Xaa locations
  Clone ID: PAT_MRT4530_4570C.1.pep
GPVKGGSTAIASAQDPDDYMXDLIHIHSTPDTIXKLCFVVYDINRSIKLYYMDLVMKLVMKTEAXTITYTIAKEGYSDEDNTTGTEWTXNYRPTYYTNNYTYSQVFIASEEAIKTSEDAEPLTYYVTP

SEQ ID NO: 144944 - protein, 93 aa, Oryza sativa
  Clone ID: PAT_MRT4530_45710C.1.pep
THSYAAINKNSGESKAVQMTRQDGILKKQGKESWHKLWRAHPTISSMLAPGDCELTNHHSLCPERYKRETNHTRMILILHHAPRLHLHVVYVE

SEQ ID NO: 144945 - protein, 1643 aa, Oryza sativa
  unsure (1)..(1643): unsure at all Xaa locations
  Clone ID: PAT_MRT4530_45711C.1.pep
GARCPLQYRAPAQXSPCCQRIGGRFLVRSATSVRARGPAPRVPGWRCRLSSLCGEPSERPLAPKVPAHHHRKXYDGSVNPAEFLQIYTTGIEAAGGDDRVMANFFPMALKGQARGWLMNLPPASVHSWEDLCQQFTMNFQGTYPRPGEEADLHVVQRGDDESLRSYIQRFCQVRNTILCIPAHAVIYAFRGGVRHNRMLEKIASKEPQTTAELFQLADRVARKEEAWTWNSSGSGVAAPAAPGPAARSGRRDRRRKKRSAHSDDEGHVLAVEGASRATRKGRPASDKKKEAGAPSRERPTGKWCTVHNTSLHDLVDCRAVKSLAERTRKWEEERRQERREGNTPAAPAGNRRGEAKQKAPAEDINDGDDDLGFQEPEATVATVDGGACAHASRRSLKAMKRELLAVAPTHEATRRARWSEVALTFDQTDHPPCVARGGQIAMVVSPTVCNVKLGRVLIDGGAALNILSPAAFDAIKAPGMVLRSSQPIIGVTPGHTWPLGHIDLPVTFGGSANFRTERVNFDVADLSLPYNAVLGRPALVKFMVAVHYAYLQMKMPGPGGPITVHGDLKVALACMEQRADHLATASKPTGGDEKLSTSVPAAPRQRMITCDEVQIKQEDALVSFLRANADVFAWRPADMPGVPKEVIEHRLAVRPGARPVLQKVRRQAPERQAFIREEVARLLEAGFIREVIHPEWLANPVVVPKANGKLRMCIDYTDLNKACPKDPYPLPRIDQIVDSTAGWSARRWSWSATRTTLAPRIPTLCRLDPGESREERPPTTEAGPLPACPTVPGAPDPQDGPGATAGRPRLSPSDPEVVGTEAECAPRGLSDEEHPVSTRPGREQGGEAPEPNGGPRPPTTGAGPLPACPTVPEAPDPQDGPRATAGRPRLSPSDPEVVDTEAECAPRGLSDEKRPGDAAPSEEDRPRQKVQRPVYFVSEALRDAKTRYPQAQKMLYAILMASRKLRHYFQARQVTVVTSYPLGQILHNREGTGRVVKWAIELSEFDLHFEPRHAIKSQALADFVAEWTPAPEPVSIPEASSGPSQLPHTAYWVMQFDGSLSLQGAGAGVTLTSPSGDVLKYLVRLDFRATNNMAEYEGLLAGLRVAAGLGIRRLLVLGDSQLVVNQVSKEYQCSNPQMDAYVRQVRRMERHFDGIELWHVPRRDNAVADELSRLASSRAQTPPSAFEERLAQPSARPDPLGETDAPERPPRPVGVQASGPEGSAPSSLRLIAWIAEIQAYLADKTLPEDHEGSERVQRISKRYVLVEGTLYRHAANGVLLKCIPREQGVELLADIHEGECGAHSASRTLVGKAFRQGFYWPTALNDAVDLVRRCRACQFHAKQTHQPAQALQTIPLSWPFAVWGLDILGPFRRAPGGFEYLYVAIDKFTKWPEAYPVIKIDKHSALKFIRGITARFGVPNRIITDNGTQFTSELFGDYCEDMGIKLCFASPAHPRSNGQVERANAEILKGLKTKTFNILKKHGDSWIEELPAVLWANRTTPSRATGETPFFLVYGAEAVLPSELTLRSPRATMYCEADQDQLRRDDLDYLEERRRRAALRAARYQQSLRRYHQRHVRAQSLCVDDLVLRRVQTRAGLSKLSPMWEGPYRVIGVSRPGSVRLATGDGTELPNPWNIEHLRRFYP

SEQ ID NO: 144946 - protein, 287 aa, Oryza sativa
  unsure (1)..(287): unsure at all Xaa locations
  Clone ID: PAT_MRT4530_45712C.1.pep
HINNKLQIKYSPDGLFLSQRQYAIDLLQRAGMFECHPTANPVDARAKLSAXEGAPVADPTEYRSLAGALQYLTLTRPEIAYVVQQXLFMHDPREPHLALVKRILRYIKGSLSAGLHIGTXPVGSLTDYSDADWASCPDSRRSTSGYYIFLGDNLVSXSSKRQTTVSCSSAEAKYRAVAHAVAEXCWLHQLLQELHAPISTATVVFCDNVSAVYMTTNPVHHCRTKHIEIDILFVREKVALGXVRVLHVPSTHQFADIMTKGLPVQLFTDFRSSLCIREPLAATAGGY

SEQ ID NO: 144947 - protein, 212 aa, Oryza sativa
  unsure (1)..(212): unsure at all Xaa locations
  Clone ID: PAT_MRT4530_45713C.1.pep
KGASIWILSNRRASNEMGKWLXDHQKQSELLASAGSLLSNKNEHYLNQTVLDLQFSHSQRSGYELGSTVLSTFXKVTPLAKKTPQHASLSVLRSPDITSILVETGFLSNAIEEKQLASSIYRRKIAQAIYKGLNTYFKPSPKKDSAQKSTSTTQSTATANKENGKLNNGYHIVQKNETLYSCARLYNTTPDKLSKLNKIQNNHIVVGKKLKI

SEQ ID NO: 144948 - protein, 1872 aa, Oryza sativa
  Clone ID: PAT_MRT4530_45714C.1.pep
MAERAVAHNLSPSASGDDSEQNPRRRARTPPPPSRRSLRREEALEGDERSATSPPTSDGEGRRDGERRLLVYGDGSTPQGALQAAGALLRHPPVVPDPETPTRRWLDDVANLVMTAQQRLGAGGRSSATKATSAATAGSVSSRRRARRAAAVTHRSSAIPLSMPPTQEDVREGPDARLNIERRRNDRRAAHASEGASSSGAPLRSGRGGQPPVSPVGGAGCRAFVASLRNVRWPPRFRPTITEKYDGSVNPAEFLQIYTTGIEAAGGDDRVMANFFPIALKGQARGWLMNLPPASVHSCEDLCQQFTMNFQGTYPRPGKEADLHAVQRGDDESLRSYIQRFCQVRNTIPCIPAHAVIYAFRGGVRHNRMLEKIASKEPQTTAELFQLADRVARKEEAWTWNSSGSGVEAPAAPGPAARSGRRDRRRKKRSAHSDDEGHVLAVEGASRATRKGRPASDKKKEAGAPSRERPTGKWCTVHNTSLHDLADCRAVKSLAERTRKWEEERRQERRESKAPAAPSGNRRSEAKQKAPAEDIDDGDDDLGFQEPGATIATVDGGACAHASRRSLKAMKRELLAAAPTHEAMRRARWSEVALTFDQTDHPPCVARGGQIAMVVSRTVCNVKLGRVLIDGGAALNILSPVAFDAIKAPGMVLRPSQPIIGVTPGHTWPLGHIDLPVTFGGSANFRTERVNFDVADLSLPYNAVLGRPALVKFMVAVHYAYLQMKMLGPGGPITVHGDLKVALACMEQHADHLAAASKPAGGDERLSTSVPAAPRQRMITCDEVPIKQEDTLVSFLRANADVFAWRPADMPGVPREVIEHRLAVRPGARPVRQKVRRQAPERQAFIREEVARLLEAGFIREVIHPEWLANPVIVPKANGKLRMCIDYTDLNKACPKDPYPLPRIDQIVDSTAGQIGRNVEAYVDDLVVKTRNQETLLSDLAETFESLRTARIKLNPDKCVFGVPAGKLLGFLVSARGIEANPEKIRAIERMRPPSKLRDVQCVIGCMAALSRFISRLGEKALPLFKLLKRSVPFIWTKEAERALTQVKAYLSFPPVLVAPEPDEPLLLYLAATPQVVSTALVVERDEDDPRSAHPHPVSTRPGREQGGEAPEPNGGLRPPTAGAGPPPACPTVPGAPDPQDGPGATAGRPRLSPSDPEVVGTEAECAPRGLSDEERPGDAAPSEEDRPHRKVQRPVYFVSEALRDAKTRYPQAQKMLYAILMASRKLRHYFQAHRVTVVTSYPLGQILHNREGTGRVVKWAIELSEFDLHFEPRHAVKSQALADFVAEWTPAPEPISVPEASSGPSQLPHTAYWVMQFDGSLSLHGAGAGVTLTSPSGDVLKYLVRLDFRATNNMAEYEGLLAGLRVATGLGIRRLLVLGDSQLVVNQVSKEYQCSDPQMDAYVRQVRRMERHFDGIELRHVPRRDNAVADELSRLTSSRAQTPPGAFEERLAQPSARPDPLGETDAPERPPRPVGVQASGPEVSAHSSLRLIAWIAEIQAYLADKTLPEDREGSERVQRISKRYVLVEGTLYRRATNGVLLKCIPREQGVELLADIHEGECGAHSASRTLVGKAFRQGFYWPTALNDAVDLGLDILGPFRRAPGGFEYLYVAIDKFTKWPEAYPVIKIDKHSALKFIRGITARFGVPNRIITDNGTQFTSELFGDYCEDMGIKLCFASPAHPRSNGQVERANAEILKGLKTKTFNILKKHGDSWIEELPAVLWANRTTPSRATGETPFFLVYGAEAVLPSELTLRSPRATMYCEADQDQLRRDDLDYFEERRRRAALRAARYQQNLRRYHQRHVRARSLCVDDLVLRRVQTRAGLSKLSPMWEGPYRVIGVPRPGSVRLATGDGTELPNPWNIEHLRRFYP

SEQ ID NO: 144949 - protein, 1930 aa, Oryza sativa
  unsure (1)..(1930): unsure at all Xaa locations
  Clone ID: PAT_MRT4530_45715C.1.pep
MAERAVAHNLSPSASGDDSEQNPRRRARTPPPPSHRSLRREEALEGVERSATSPPTSDGEGRRDGERRLLVYGDGSTPQGALQAAGVLLRHPPVVPDPETPTRRWLDDVANLVMTAQQRLGAGGRSSATKATGAATAGSVSSRRRARFRPTITEKYDGSVNPAEFLQIYTTGIEAAGGDDRVMANFFPMALKGQARGWLMNLPPASVHSWEDLCQQFTMNFQGTYPRPGEEADLHAVQRGDDESLRSYIQRFCQVRNTIPCIPAHAVIYAFRGGVRHNRMLEKIASKEPQTTAELFQLADRVARKEEAWTWNSTGSGVAASAAPGSAARSGRRDRRRKKRSAHSDDEGHVLAVEGASRATRKGRPTSDKKKEAGAPSRERPTGKWCTVHNTSLHDLADCRAVKSLAERTRTWEEERRQERLEGKAPAAPSGNRRSEAKQKAPAEDIDDGDDDLGFQEPGATIATVDGGACAHASRRSLKAMKRELLAAAPTHEATRRARWSEVALTFDQTDHPPPRGCVLRPSQPIIGVTPGHTWPLGHIDLPVTFSGSANFRTERVNFDVADLSLPYNAVLGRPALVKFMVAVHYTYLQMKMPGPGGPITVHGDLKVALACIEQRADHLAAACKPAGGDERLSASVPAAPRQRMITCDEVPIKQEDALVSFLRANADVFAWRPADMPGVPREKVRRQAPERQAFIREEVARLLEAGFIREVIHPEWLANPVVVPKANGKLRMCIDYTDLNKACPKDPYPLPRIDQIVDSTAGCDLLCFLDAYSGYHQIRMAREDEEKTAFITPIGTYCYTTMPFGLKNAGPTFQRTTRISLGSQIGRNVEAYVDDLVVKTRNQETLLSDLAETFESLRTARIKLNPDKCVFGVPAGKLIGFLVSARGIEANPEKLRAIERMRPPSKLRDVQCVTGCMAALSRFISRLGEKALPLFKLLKRSGPFIWTEEAERALTQLKAYLSSRPVLVAPEPDEPLLLYLAATPQAAXTAAPPEPPPKESDHPGPLREGRACRLTDPEVIGTEAECAPRGLSERDEDDPRSARHHPRSHTTRHHNQGTRSHXRQTTEGKEGETPEPNGGQRPPTAGVATPXPACPTVPGAPDPQDGTGATAGSPCLSPSDPEVVGTEAECASRGLSDEKRTGDAAPSEEDRPRRRVQRPVYFVSEALRDAKTRYPQAQKMLYAILMASKKLRHYFQAHRVTVVTSYPLGQILHNREGTGRVVKWAIELSEFDLRFEPRHAVKSQALADFVAEWTPAPEPISVPEASSGPSQLPHTVYWVMQFDGSLSLQGAGAGVTLTSPSGDVLKYLVRLDFRATNNTAEYEGLLAGLRVAAGLGIRRLLVLGDSQLVVNQVSKEYQCSDPQMDAYVRQVRRMERHFDGIELRHVPRRDNAVADELSRLASSRAQTPPGAFEERLAQPSARPDPLGETDAPERPPRPVEVQASGPEGSAPSSLRLIAWIAEIQAYLVDKTLPEDREGSERVQRISKRYVLVEGTLYRRAANGVLLKCIPREQGVELLADIHEGECGAHSASRTLVGKAFRQGFYWPMALNDAVDLVRRCRACQFHAKQTHQPAQALQTIPLSWPFAVWGLDILGPFRRAPGGFEYLYVAIDKFTKWPEAYPVIKIDKHSALKFIRGITARFGVPNRIITDNGTQFTSELFGDYCEDMGIKLCFASPAHSRSNGQVERANAEILKGLKTKTFNILKKHGDSWIEELPAVLWANRTTPSRATGETPFFLVYGAEAVLPSELTLRSPRATMYCEADQDQLRRDDLDYLEERRRRAALRAARYQQSLRRYHQRHVRARSLCVDDLVLRRVQTRAGLSKLSPMWEGPYRVIGVPRPGSVRLATGDGTELPNPWNIEHLRRFYPYLDTWISPDTSPDPRHLRLGPGHEPSFKPRHRRTAAQTILVSYTQRTELTQKFLLYLIAD

SEQ ID NO: 144950 - protein, 1928 aa, Oryza sativa
  unsure (1)..(1928): unsure at all Xaa locations
  Clone ID: PAT_MRT4530_45716C.1.pep
MAERAVAHNLSPSASGDDSEQNPRRRARTPPPPSRRSLRREEALEGVERSATSPPTSDGEGRRDGERRLLVYGDGSTPQGALQAAGALLRHPPVVPDPETPTRRWLDDVANLVMTAQQRLGAGGRSSATKATGAATAGSVSSRRRAWRAAAVTRRSSAIPSSTPPTQENVREGPDARLNIERRRNDRRAAHASEGASSSGAPLRSGHGGQPPVSPVGGAGCRAFVASLRNVRWPPRFRPTITEKYDGSVNPAEFLQIYTTGIEAAGGDDRVMANFFPMALKGQARGWLMNLPPASVHSWEDLCQQFTMNFQGTYPRPGKEADLHAVQRGDDESLRSYIQRFCQVRNTIPCIPAHAVIYAFRGGVRHNRMLEKIASKEPQTTAELFQLADRVARKEEAWTWNSIGSGVAASAAPGSAARSGRRDRRRKKRSAHSDDEGHVLAVEGASRATRKGRPASDKKKEAGAPSRERPTGKWCTVHNTSLHDLADCRAVKSLAERTRKWEEERRQERREGKAPAAPSGNRRSEAKQKAPAEDVDDGDDDLRFQEPRATIATVDGGACAHASRRSLKAMKRELLAAAPTHEATRRARWSEVALTFDQTDHPPCVARGGQIAMVVSPTVCNVKLGRVLIDGGAALNILSPAAFDAIKAPGMVLRPSQPIIGVTPGHTWPLGHIDLLVTFGGSANFRTERVNFDVADLSLPYNAVLGRPALVKFMVAVHYAYLQMKMPGPGGPITVHGDLKVALACMEQRAEHLAAASKPAGGDERLSTSVPAAPRQRMITCDEVPIKQEDALVSFLRANADVFAWRPADMPGVPREVIEHCLVVRPGARPVRQKVRRQAPERQAFIREEVARLLEAGFIREVIHPEWLANPVVVPKANGKLRMCIDYTDLNKACPKDPYPLPRIDQIVDSTAGCDLLCFLDAYSGYHQIRMAREDEEKTAFITPIGTYCYTTMPFGLKNAGPTFQRTTRISLGSQIGRNVEAYVDDLVVKTRNQETLLSDLAKTFESLRTARIKLNPDKCVFGVPAGKLLGFLVSARGIEANPEKLRAIERMRPPSKLRDVQCVTGCMAALSRFISRLGEKALPLFKLLKCSGPFIWTEEAERALTQLKAYLSSPPVLVASEPDEPLLLYLAATPQVVSAALVVERDEDDPRSAHPHPVSTRPGREQGGEAPEPNGGPRPPTAGAGPPPACPKVPGAPDPQDGHGATAGRPRLSPSDPEVIGTEAECAPRGLSERDEDDPRSARPHPVSIRPGREQGGEAPEPNGGQRPPTAGVGPPPACPTVPGAPDPQDGPGATAGRPCLSPSDPEVVGTEAECASRGLSDEKRPGDAAPSEEDRPRRRVQRPIYFVSEALRDAKTRYPQAQKMLYAILMASRKLRHYFQAHRVTVVTSYPLGQILHNREGTGRVVKWAIELSEFDLRFEPRHAVKSQAFADFVAEWTPAPEPISVPKASSGPSQLPHTAYWVMQFDGSLSLQGAGAGVTLTSPSGDVLKYLGGKRGRRRTFRLVLREPRPTRGLEERLAQPSARPDPLGETDAPERPPRPVGVQASGPEGSDPSSLRLIAWIAEIQAYLADKTLPEDREGSERVQRISKRYVMVEGTLYRRAANGVLLKCIPREQGVELLADIYEGECGAHSASRTLVGKTFRQGFYWPTALNDAVDLVRRCRACQFHAKQTHQPAQALQTIPFSWPFAVWGLDILGPFRRAPGGFEYLYVAIDKFTKWPEAYPVIKIDKHSALKFIRGITARFGVPNRIITDNGTQFTSELFGDYCEDMGIKLCFASPTHPRSNGQVERANAEILKGLKTKTFNILKKHGDSWIEELPAVLWANRTTPSRATGETPFFLVYGVEAVLPSELTLRSPRATMYCEADQDQLRRDDLDXLEERRRRAALRAARYLQSLRRYHQRHIRARSLCVDDLVLRRVQTRAGL

SEQ ID NO: 144951 - protein, 68 aa, Oryza sativa
  Clone ID: PAT_MRT4530_45717C.1.pep
KSRAQQTPISSVLGKAVTCTGYYLGIGWMPCQFFELTWHWMSGWAMQSVISQSVRKLCFFFLKKSVTD

SEQ ID NO: 144952 - protein, 1538 aa, Oryza sativa
  unsure (1)..(1538): unsure at all Xaa locations
  Clone ID: PAT_MRT4530_45718C.1.pep
MAHNLSPSASGDDGEQNPRRRARTPLSPSRRSLGREEALEEVERSATSPHAGDGEGRRDRERRLLVYGEFLPHGPERIGAGLANELATRVGPLLGGFVPAVHHELPGHISAPSPQHHTVHPCTRGDLRVQGGVRHNRMLEKIASKEPQTTAELFQLADRVARKEEAWTWNSSGSGVAAPAAPGPTARSGRRDRRRKKRSAHSDDEGHVLAVEGASRATRKGRPASDKKKEAGAPSRERPTGKWCTVHNTSLHDLVDCRAVKSLAERTRKWEEERRQERREGNTPAAPAGNRRGEAKQKAPAEDINDGDDDLGFQEPEATVATVDGGACAHASRRSLKAMKRELLAVAPTHEATRRARWSEVALTFDQTDHPPCVARGGQIAMVVSPTVCNVKLGRVLIDGGAALNILSSAAFDAIKAPGMVLRPSQPIIGVTPGHTWPLGHIDLPVTFGGSANFRTERVNFDVADLSLPYNAVLGRPALVKYMVAVHYAYLQMKMSGPGGPITVHGDLKVALACMEQRADHLAAASKPAGGDERLSTSVPAAPRQRMITCDEVPIKQEDALVSFLRANADVFAWRLADMPGVPREVIEHRLAVRPGARPVRQKVRRQAPERQAFIREEVARLLEAGFIREVIHPEWLANPVVVPKANGKLRMCIDYTDLNKACPKDPYPLPHIDQIVDSTAGCDLLCFLDAYSGPTFQRTTRISLGSQIGRNVEAYVDDLVVKTRNQETLLSDLAETFESLRTARIKLNPDKCVFGVPVGKLLGFLISARGIEANPEKIRAIERMRPPXKLRDVQCVTGCXVSAALVVERDEDDPRSAHPHPMSTRPGREQGGEAPEPNGGPRPPTTGAGPLPACPTVPGAPDPQDGLGATAGRPRLSPSDPEVVGTEAECAPRGLSDEEHPVSTRPGREQGGEAPEPNGCPRPPTTGAGPLPACPTVPGAPDPQDGPGATAGRPRLSPSDPEVVDTEAECAPRGLSDEKRPGDAAPGEEDRPRQKVQRPVYFVSEALRDAKTRYPQAQKMLYAILMASRKLRHYFQTHRVTVVTSYPLGQILHNREGTGRVVKWAIELSEFDLHFEPRHAIKSQALADFVAEWTPAPEPVSIPEASSGPSQLPHTAYWVMQFDGSLSLQGAGDSQLVVNQVSKEYQCSDPQMDAYVRQAYLADKTLPEDREGSERVQRISKRYVLVEGTLYRHAANGVLLECIPREQGVELLAAIHEGECGAHSASRTLGVPVPRQANPSAGPGPADHTSVMAVCXWGLDILRPFIRAPGGFEYLYVAIDKFTKWPEAYPVIKIDKHSALKFIRGITARFGVPNRIITDNGTQFTSELFGDYCEDMGIKLCFASPAHPRSNGQVERANAEILKGLKTKTFNILKKHGDSWIEELPAVLWANRTTPSRATGETPFFLVYGAEAVLPSEVTLRSPRATMYCEADQDQLRRDDLDYLEERRRRAAIRAARYQQSLRRYHQRHVRARSLCVDDLVLRRVQTRAGLSKLSPMWEGPYRVIGVPRPGSVRLATGDGTELPNPWNIEHLRRFYP

SEQ ID NO: 144953 - protein, 2012 aa, Oryza sativa
  unsure (1)..(2012): unsure at all Xaa locations
  Clone ID: PAT_MRT4530_45719C.1.pep
MAERAVAHNLSPSASGDDGEQNLRRRARTPLSPSRRSLGREEALEEVERSATSPHAGDGEGRRDGERRLLVYGDGSTPQGALQAAGALLRHPPVIPDPETSTRRWLDDVANLLMTAQQRLGADWRSSATKATGVATAGSVSSRRRARRAAAVTRRSSAIPSSTPPTQEDVRRGPDARFNIERRRNDRRAANASEGASSSGAPLRSGHGGQPPVSPVGGAGCRAFVASLRNVRWPPRFRPTITEKYDGSVNPAEFLQIYTTGIEAAGGDDRVMANFFPMALKGQARGWLMNLPPASVHSWEDLCQQFTMNFQGTYPRPGEEADLHVVQRGDDESLRSYIQRFCQVRNTILCIPAHAVIYAFRGGVRHNRMLEKIASKEPQTTAELFQLADRVARKEEAWTWNSSGSGVAAPAAPGPAARSGRRDRRRKKRSAHSDDEGHVLAVEGASRATRKGRPASDKKKEAGAPSRERPTGKWCTVHNTSLHDLVDCRAVKSLAERTRKWEEERRQERREGNTPAAPAGNRRGEAKQKAPAEDINDGDDDLGFQEPEATVATVDGGACAHASRRSLKAMKRELLAVAPTHEATRRARWSEVALTFDQTDHPPCVARGGQIAMVVSPTVCNVKLGRVLIDGGAALNILSPAAFDAIKAPGMVLRSSQPIIGVTPGHTWPLGHIDLPVTFGGSANFRTERVNFDVADLSLPYNAVLGRPALVKFMVAVHYAYLQMKMPGPGGPITVHGDLKVALACMEQRADHLATASKPTGGDEKLSTSVPAAPRQRMITCDEVQIKQEDALVSFLRANADVFAWRPADMPGVPKEVIEHRLAVRPGARPVLQKVRRQAPERQAFIREEVARLLEAGFIREVIHPEWLANPVVVPKANGKLRMCIDYTDLNKACPKDPYPLPRIDQIVDSTAGCDLLCFLDAYSGYHQIRMAREDEEKTAFITPVGTYCYTTMPFGLKNAGPTFQRTTRISLGSQIGRNVEAYVDDLVVKTRNQETLLSNLAETFESLRTTCIKLNPDKCMFGVPAGKLLGFLISARGIEANPEKIRAIERMRPPRKLRDVQCVTGCMAALSRFISRLGEKALPLFKLLKRSGPFIWTEEAERALTQLKXVVSAALVVERDEDDPRSAHPHPVSTRPGREQGGEXPPTTEAGPLPACPTVPGAPDPQDGPGATAGRPRLSPSDPEVVGTEAECAPRGLSDEEHPVSTRPGREQGGEAPEPNGGPRPPTTGAGPLPACPTVPGAPDPQDGPRATAGRPRLSPSDPEVVDTEAECAPRGLSDEKRPGDAAPSEEDRPRQKVQRPVYFVSEALRDAKTRYPQAQKMLYAILMASRKLRHYFQARQVTVVTSYPLGQILHNREGTGRVVKWAIELSEFDLHFEPRHAIKSQALADFVAEWTPAPEPVSIPEASSGPSQLPHTAYWVMQFDGSLSLQGAGAGVTLTSPSGDVLKYLVRLDFRATNNMAEYEGLLAGLRVAAGLGIRRLLVLGDSQLVVNQVSKEYQCSNPQMDAYVRQVRRMERHFDGIELWHVPRRDNAVADELSRLASSRAQTPPSAFEERLAQPSARPDPLGETDAPERPPRPVGVQASGPEGSAPSSLRLIAWIAEIQAYLADKTLPEDHEGSERVQRISKRYVLVEGTLYRHAANGVLLKCIPREQGVELLADIHEGECGAHSASRTLVGKAFRQGFYWPTALNDAVDLVRRCRACQFHAKQTHQPAQALQTIPLSWPFAVWGLDILGPFRRAPGGFEYLYVAIDKFTKWPEAYPVIKIDKHSALKFIRGITARFGVPNRIITDNGTQFTSELFGDYCEDMGIKLCFASPAHPRSNGQVERANAEILKGLKTKTFNILKKHGDSWIEELPAVLWANRTTPSRATGETPFFLVYGAEAVLPSELTLRSPRATMYCEADQDQLRRDDLDYLEERRRRAALRAARYQQSLRRYHQRHVRAQSLCVDDLVLRRVQTRAGLSKLSPMWEGPYRVIGVSRPGSVRLATGDGTELPNPWNIEHLRRFYP

SEQ ID NO: 144954 - protein, 159 aa, Oryza sativa
  Clone ID: PAT_MRT4530_4571C.1.pep
MPPYPINRMQGGKDNQQHYKKFELGPTKNSSHAHVHSREADAVASTKSSLHFPEVEDPWKSLVTMEQIYSSFSRALLVPVVVGGRCHHHRHRSIQEKPVCHLSSTKIRQNAIVAIFPNLPSLRAHHQPSVVAARRCHCFAKDHHVLLFLPMPLHFAVVP

SEQ ID NO: 144955 - protein, 70 aa, Oryza sativa
  Clone ID: PAT_MRT4530_45720C.1.pep
MDRDAARLEKARTRGSRCPPTSEIDSLKAQLQVHGDQFQQTSSLELGSLTALSPSPKASVRGVGGAERNS

SEQ ID NO: 144956 - protein, 123 aa, Oryza sativa
  Clone ID: PAT_MRT4530_45721C.1.pep
RCGQGLYGAAQGGGGAESGDRSIRIGITHPGRGGGAAARQAARSSGEGGGGRRGCGRAAQRRGVRLPVASREREGTGAGPGTDLHPHVHSRPGPGGEFGGRGRGRSSPTHTRPAPLPSLSTTC

SEQ ID NO: 144957 - protein, 91 aa, Oryza sativa
  Clone ID: PAT_MRT4530_45722C.1.pep
MGTVLVPMGPMGLSTMTLSPTIGKRTGYKEAMKKTNIFGKAEYQPCEWRDEFWSRRNDRGGQYLGNPSGMLENLGIENWPITQAAFRCQWF

SEQ ID NO: 144958 - protein, 81 aa, Oryza sativa
  Clone ID: PAT_MRT4530_45723C.1.pep
DSVILLNHNCTFEMLVSAVLPRCLNEVGRKLHPLENFYASWRAASPCSFRRSLPVQIFAALIRFTLLNRVVVRLVTVKIYA

SEQ ID NO: 144959 - protein, 177 aa, Oryza sativa
  unsure (1)..(177): unsure at all Xaa locations
  Clone ID: PAT_MRT4530_45724C.1.pep
MRKASKNQKTPIIPAPNKIKRGNCAIFDLPTLQIATDNFSDSNKLGEGGFGTVYRGKLGNGQKVAVKKLSQAQYTREGLNQLHNELQLLAELQHKNFVRLLGFCSHQDEMMLVYEHIKNGSLDIFLFDTSRGKTLNWEQRHNIILGIAKGILYLHEDSSXRIIHRDLKANNILLDEN

SEQ ID NO: 144960 - protein, 143 aa, Oryza sativa
  Clone ID: PAT_MRT4530_45725C.1.pep
MARRRMGEERKGGRLGLRGGKVGLETDFGRRRGAGASRQGEEGLCLRPLAACARSGGAEAMTTAMTAGRFGAARRHGRQARAGVAEGDGGGDQAARQESGAGRRRRRRRDAGDDHAGARARNYSITYLIYFNTKKEMKFSQVL

SEQ ID NO: 144961 - protein, 384 aa, Oryza sativa
  Clone ID: PAT_MRT4530_45726C.1.pep
MEEHLLPVVHRDQVYSSRQDRRKSSDVPNRFVTSFHPSTNSKGNPNTPNHPLHTSGNGNIVTAQNFQRVHSSPSMFTSIKETPCADEFNEQSHAAQHVPSFARQAIVSVILYISIGVLVYITNVEGFKGRSTLKLVDGLYFTIISLCTIGYGDIVPCTTFTKVFTCLFLLIGVRFVDIVLNELLTNVLDKQRTVLLSTMDDNKLNRVFDTYMIDAEKKRSRGRMKVLLALGVVVGTISICTIIVHEVEGLNWIDSFYLSVISVTTVGYGDYGFSTPAGRLSATVCLLVSTLAVAKAFLFLTDLRMDRRNRKTTKWILQKKMDNEPLAADLDHDASVSKSDFLIYKLKEIGKIDDKDIAMISDQFDQLGLAKCGKITLADIIGKL

SEQ ID NO: 144962 - protein, 291 aa, Oryza sativa
  Clone ID: PAT_MRT4530_45727C.1.pep
MAGSGGGDRGSPEAELRRGFKTLAVTRPDPSAAVYEVRLNRPTRLNALSPDAFAEIPRAMALLDRAPAARAVVLSAAGPHFCAGIELGSPGSPATAPSGDPAPAAAEGLRRAILEMQAALTAIERCRKPVVAAVHGACVGGGVEVVAACDIRCCSKDATFVLREVDMAIVADLGALQRLPRIVGYGNAADLALTGRKITAMEAKEMGLVTRVFNSKQELDAGVAKIAKEISEKSAWAVMGTKAVLLRSRDITVEQGLEHVATWNAAMLRSNDLEEAIQAFLEKRKPVFSKL

SEQ ID NO: 144963 - protein, 110 aa, Oryza sativa
  Clone ID: PAT_MRT4530_45728C.1.pep
IMQPFLFSSMERKAKGKVVLGTAEKMPGFPLYAALQRRPSTENPPPPSPSPKLPSIFLRLYIDPPYILSWIQLTGRPSQCRRRLLRSQRWHWAVAAAAAAPPPHPPHPCS

SEQ ID NO: 144964 - protein, 35 aa, Oryza sativa
  Clone ID: PAT_MRT4530_45729C.1.pep
LVATYYLNYLALLFFELSSISLYFAWIYFYFYLKL

SEQ ID NO: 144965 - protein, 515 aa, Oryza sativa
  Clone ID: PAT_MRT4530_4572C.1.pep
MTPEQRLRAADLDAKAASLRRSIHDLRLRVPPPHVAQRLPHLHAHSLASSAALALQLNAHSSTKEQQSSSCNYSSRAGCYLHPYLKLKTSAATCFGSLPPFRIAADLRFPAISAMTTNMRPNDTFNTISHKALQREITLQEENAAYEKAISNCRQKIQEKQMEVTLLRSNLKEMEISEQDLKAQLDNAQNEQYASQNKASAAASDNTGNALMEAESLINLKSNDLKEKNEELAQAEGLIVDVHAKEKELERLNNLHKNLQSRNNDGSVARNPFRAVHEDSDAKAVRRPYQFGLRTEGLKRLMILRSAFVLYILVLHIVVFIKLSVSKQGDTGGGHCRRANSASPPQGRRQQGLLLPQGRGFGAHDPGQLLGRRQALGEERDGLAAGVEGDGIGSWVDRVAMARRRHWSDALPARSDTLSSGSGLPGAGGQPPVLAATARRRGTAAWWRWHRDAGSGTPRQISPTLSGSGLPGAGGQPRGPAARAWRMRRKRGGSGATVEVGETAGRGYGGDGADI

SEQ ID NO: 144966 - protein, 128 aa, Oryza sativa
  Clone ID: PAT_MRT4530_45730C.1.pep
PPDPVIAGEPLLFTSRLQVEAVFFHRLSSFSSVKAAAIAFSLPRPSVVPHRVLSSRQSAPSSSSSPRFPSPVAAATGSAHLHHRRRQPRPPIVPRASLHQGRCRFHLSIPAAAALANDHILSCCYVQT

SEQ ID NO: 144967 - protein, 132 aa, Oryza sativa
  Clone ID: PAT_MRT4530_45731C.1.pep
MAAETVVLKVGMSCQGCAGAVRRVLTKMEGVETFDIDMEQQKVTVKGNVKPEDVFQTVSKTGKKTSFWEAAEAASDSAAAAAPAPAPATAEAEAEAEAAPPTTTAAEAPAIAAAAAPPAPAAPEAAPAKADA

SEQ ID NO: 144968 - protein, 61 aa, Oryza sativa
  Clone ID: PAT_MRT4530_45732C.1.pep
MWDAAATHKDYGIAYMLILTSKEDPVGQAPKQDANLVIDDGFPLFLVYGAGASKHRLRPDP

SEQ ID NO: 144969 - protein, 85 aa, Oryza sativa
  Clone ID: PAT_MRT4530_45733C.1.pep
RPTMASLRATTLLVLMQIIMVFYTVILSCSFSDARTFPGGEGGLDPNHPVCVGGACPTPGLPYTNPRDPCIYRNRCNPPGRMGDP

SEQ ID NO: 144970 - protein, 101 aa, Oryza sativa
  Clone ID: PAT_MRT4530_45734C.1.pep
ARSPHVVLFPFLAHGHTSRPSSASPATSRCSARASPSSSSPPRASSAPSPSRPPPLRSNSTRSPLADFFGVICGDLRRTPSAEVEAAASVHGDGGRGGGRG

SEQ ID NO: 144971 - protein, 61 aa, Oryza sativa
  Clone ID: PAT_MRT4530_45735C.1.pep
GDVMAPLRADYSIIIPATILSAMHWGKILRSIAGGRWSLARVLTAPNQLAMVSDGATEIEI

SEQ ID NO: 144972 - protein, 72 aa, Oryza sativa
  Clone ID: PAT_MRT4530_45736C.1.pep
SQDNTRCGYTSLQKICFNWVCHHFGLNHLFITTNKYLFAIPEVSCSDCGKNIGATASLPPTTLYRKIDLSLG

SEQ ID NO: 144973 - protein, 240 aa, Oryza sativa
  unsure (1)..(240): unsure at all Xaa locations
  Clone ID: PAT_MRT4530_45737C.1.pep
NLLFSSPSPPPPXPPPHPSAAPPLLLPLESAPPTNSPLRRQPQIWAARLLSTSPLPPSSPSSTSPSPPLPXSTAPSPPSSPSSTSPSPPSPLLHLAPFRRLFSTSPVPPPSSLVHTDRPPSPTPPPRSPPTLPLPPPAPTPPLPPPPLARSGPPPASXSTPSRPMPASRAPSSRRPPRPPPLGVKSTVKPLASATKDAAIVLPKPAPSSSPSSRRPPPPQASSIQVPLSSPPLLFWMMQW

SEQ ID NO: 144974 - protein, 477 aa, Oryza sativa
  Clone ID: PAT_MRT4530_45738C.1.pep
MAAARRVVLFPSLGVGHLAPMLELAAVCIRHGLAVTVAVPDPATTAPAFSAALRKYASRLPSLSVHPLPPPPHPPASSGADAAAHPLLRMLAVLRAHAPALGDLLRGPHAARALVADMFSVYALDVAAELGVPGYLLFCTGATNLAVFLRLPRFCAGSSGSLRELGDAPVSFPGVRPLPASHLPEEVLDRGTDISAAMLDAFDRMADARGILVNTFDALEGPGVAALRDGRCLSNRATPPVYCVGPLITDGGAEEERHPCLAWLDAQPERSVVFLCFGSRGALSPEQVSEMATGLERSEQRFLWALRAPAGTKPDAAMSLLPDGFLARTADRGVVVTASWVPQVAVLQHASTGAFVTHCGWNSTLEAVAAGVPMVCWPLDAEQWMNKVFIVEEMKIGIEVRGYKPGALVQADIVDAILRRIMESDAQQGVLERVMAMKESAAAAWKEGGSSCTAFAEFLKDMEEGNVAMAHSNQVET

SEQ ID NO: 144975 - protein, 93 aa, Oryza sativa
  Clone ID: PAT_MRT4530_45739C.1.pep
VSIRTAPRRNRKVLPDNIQGITKPDILMLTRRGCVNRICRLIYKETRGVLKILLENVIRNAGNYTKHARHKTVTDMDVDYALKRAGRTLYSFS

SEQ ID NO: 144976 - protein, 132 aa, Oryza sativa
  Clone ID: PAT_MRT4530_4573C.1.pep
FSAAPPQRVVYPRRRRPDAAPRPALPAISANESESSSTSHLAPLVPLGLRLSPHRGDCVSDRRPCCHPALSRHSDFHGQREPHPRTLSAADRRSLHDQRCLLATGPMMGRAPAPRRTTSTPTGSRPRTASGR

SEQ ID NO: 144977 - protein, 138 aa, Oryza sativa
  Clone ID: PAT_MRT4530_45740C.1.pep
KPNAQFLCAIHHSLSCQKVDRPDCGYDHNCRQLELIKLLFSVLCIRCKRGRVFCSAVFFWVCACDRYVNCNSCPIWVIASDHVQSESSLSCDICWLVQCRAAAVLPWCGENVCLLCIWKYGTIWGFCKKEAMQLHFIL

SEQ ID NO: 144978 - protein, 102 aa, Oryza sativa
  unsure (1)..(102): unsure at all Xaa locations
  Clone ID: PAT_MRT4530_45741C.1.pep
IRTTLTLHRPQTLNKARDPKYPILSAPXXNKLDQYQILKYPLTTESALKNIEDINTAGSIDDLMAYTTKITAPGTKMYLVQTMNGNTLSRPYGRKNAYRTLT

SEQ ID NO: 144979 - protein, 61 aa, Oryza sativa
  unsure (1)..(61): unsure at all Xaa locations
  Clone ID: PAT_MRT4530_45742C.1.pep
GHAFQCDFLFSVAYNKLFDFKKLYSGLQVEVREQKYTFPFIVIRGIRATLIQSSPPPEIXN

SEQ ID NO: 144980 - protein, 677 aa, Oryza sativa
  unsure (1)..(677): unsure at all Xaa locations
  Clone ID: PAT_MRT4530_45743C.1.pep
WLNNTCPKTPVILLLLAGTRRRDAPAMLRFLLWLAYLLADSTAIYALGHLSLGSVASDHWLASFWAPFLLLHLSGPDNITAYALQDSELWLRHLQILLLQLLGASYVLYKHIIIGDVTTRGHEPFLLANVLMFVVGLSKYGERIHALRCNKLSNIWSSPKEVYRNNQLLHYLQDRDHRIREEEELSLQYAHSLHHICKRGIVNFVIEEPLDVEKSEGSRTKILIKKMLNEKDRKTHIKMWKVIEMELSLMYDILYTKAGVIHSWFGYSIRVLSPVTIFSSFILFIVSGRGGSSCCSKAGXQHGIDIAVTYVLLVGAFLMETTSLINALASSWALGFLYGMPWSWLENMAFHVRWWHRLRRSVLALRRSVEAKTRGSWGRSRKWSGSIGQFNLLYFRAAQVNQTNYWLSKCAMKLGFGIGNWWNNTCYSWTIMIPDKVKTRSVSLVSKSDLNTMGLLRYKWGELALNNDKKRIWPELLQKLGDLHGVDFHESIIIWHIATDLILLERKNNYSGDSKNAKEVERVRSIRALSNYLMFLVVTRPDMVPGLPQNWLYQQTCNNLDEICEDRRYQLLSSAGKASNIIFRVLRELFRGHNDNTASVRLNQTNELAKILLEKYNPTEKFDRSVPRLTYARNVAHIVLNWEYPDDLKDTGPVKVLHDLWMDFLIYARHISHTNSH

SEQ ID NO: 144981 - protein, 300 aa, Oryza sativa
  unsure (1)..(300): unsure at all Xaa locations
  Clone ID: PAT_MRT4530_45744C.1.pep
ATPLEEWEGRMNVGMSNSVTTAIRDSIRETAIGKTWNTEKADRATVEQAIDPRTRMVLFKMLNRGVFNTINGCISTGKEANVYHASKADGQELAIKVYKTSVLVFKDRDRYVHGDYRFRHGYCKHNPRKMVKTWAEKEMRNLLRVGAAGIRCPKPLLLRLHVLVMEXIGKGGWAAPRLKDAALSDDKLRESYFELITTMRTLYQKCKLVHGDLSEYNILYFEGHLYIIDVSQSVDLDHPSALEFLKEDCLHVTDFFKKRGVAVMSVTELFNFVIDQNIADEDVDHYLXKVFSQCHLSVFL

SEQ ID NO: 144982 - protein, 863 aa, Oryza sativa
  Clone ID: PAT_MRT4530_45745C.1.pep
MVSKSYTNLLDMSGEDVFDFQQPFRSLPRFVTSPSITSNPDWDTSNADDSVGPASCCVRKIIVSNFLPLNCTKDEATGQWSFSMDDNQLLVQLKDGFPMESEVVYVGSLNAEVDPGEQDQLSQKLFREYKCIPTFLPADLQQQFYHGFCKQQLWPLFHYMLPICLDKGELFDRSLFQAYVRANKIFGDKVMEAINSDDDCVWVHDYHLMLLPTFLRKKLHRIKIGFFLHSPFPSSEIYRTLPVRDEILKSLLNADLIGFQTFDYARHFLSCCSRLLGLNYESKRGHIGIEYFGRTVSLKILAVGVHVGRLESVLRLPATISKVQEIEQRYKGKMVMLGVDDMDIFKGISLKLLGLEFLLERTPKLRGKVVLVQIINPARSTGKDVEEAINEAVSVAERINIKYGSAEYKPVILIDYPIPSYEKIAYYAASDCCIVNAVRDGMNLIPYEYTVCRQGNEEIDKLRGVDKSSHHTSTLIVSEFVGCSPSLSGAFRVNPWSIEDVADALYKAMDLTQSERKLRHDKHYRYVKTHDVAYWARSFSQDLDRACKDHYSRRCWTTGFGLNFRVIALSPGFRRLSLEHFASSYKKTNRRLIFMDYDGTLVPQSSVNKVPSAEVISILTSLCNDPKNCVFIVSGRDRTTLSEWFASCDKLGIAAEHGYFIRWNKEGEWETSSSAQDCEWKNIAEPIMEVYKETTDGSAIETKESGLVWHYQDADHDFGSCQAKELVSHLERVLANEPVVVKRGHQIVEVKPQGVSKGIAVDTVIRTVINNENAPDFLMCIGNDRSDEDMFESINEAVSRSVFPTAPDVFACSVGQKASKAKYYVDGCSEVIRLLKGVTAITPRREVISQSQVTFRDILEVVS

SEQ ID NO: 144983 - protein, 609 aa, Oryza sativa
  unsure (1)..(609): unsure at all Xaa locations
  Clone ID: PAT_MRT4530_45746C.1.pep
MATAAAAAAVYLPEVDSRFADADEEEEEEATVRPVEVAESKDQEEVEEEEDEEEWSDSDVADALDWLDAAEGPDGSGRPAAAFTAAGGAAAARRPNAHGGVLSRPFQPISNRTQKLASHIRATPLEEWEGRMNVGMSNSVTTAIRDSIRETAIGKTRNTEKADRATVEQLYRMDNNLDCIIQENRSSAIDCFGRKFLRCIFFMACCVHKAIDPRTRMVLFKMLNRGVFNTINGCISTGKEANVYHASKADGQELAIKVYKTSVLVFKDRDRYVHGDYRFRHGYCKHNPRKMVKTWAEKEMRNLLRVGAAGIRCPKPLLLRLHVLVMEFIGKGGWAAPRLKDAALSDDKLRESYFELITTMRTLYQKCKLVHGDLSEYNILYFEGHLYIIDVSQSVDLDHPSALEFLKEDCLHVTDFFKKRAEHSESCTEFXEVGSWHEIXEGGAYHYLDKIQQKMLENGDMVANDDEITPTVLFQTLDYVKQCEADIVNMSLMQRPSFANEPTADKLYNQPLLGFVRNKNEPTKNQQVQSEEPLDLQNKCSSEHSESCTSSDEDGSWHEILKVGPEERKAARKENKKKVKAEKREARKDKIPKAEKKKRKKMAKAKCKR

SEQ ID NO: 144984 - protein, 166 aa, Oryza sativa
  unsure (1)..(166): unsure at all Xaa locations
  Clone ID: PAT_MRT4530_45747C.1.pep
TATPEKDQQDSKVLDHSRKECFVIRIXGRGIWRRGAETPIAVKWEDRIIEIREGSWSYIANASSVGYAPGXGTATPEKDQQDSKVVWRFSTGDVLTVKLGDDLNFHIRNESSGEEARLLXGRRLNYRINKESTLNDRNDEEEYLTLVRTSPDHLGDRATMLLNWKL

SEQ ID NO: 144985 - protein, 484 aa, Oryza sativa
  Clone ID: PAT_MRT4530_45748C.1.pep
MGVHSALSVQCISFPTCRLCRRLNHTDQRHIQQAKSVRVGVADTTTQAQAQALHRLVSRGSPRPAVPCRGEPSISAAPSKHHPKAVQFARPVSHLLCLPLTPYYECPVATTAHKHTRTRRGCLLSLPAFPLLCSPLPARALGSCIAPPSTEMVAAAEWWEATIAAYTGLSPAAFFTAVAVAAALYVAVSGLLTRRPPPLPRRQEEARASQPLPPPVQLGEVTEEELRVYDGSDPNKPLLMAIKGQIYDVTQSRMFYGPGGPYALFAGRDASRALAKMSFELDDLTGDVSGLGPIELEALHEWEGKFMSKYVKVGTIKKIIPVSEGDAATHGGTSDRGIDVGTIESNRVPEPEENGATSHADAVEKSDADVSTHNHEDVVEKSDELLESGVDTRSTHEDAVGKPKEETEDADVQKTISTEVAGEGKGAPDEDDRNTCSLEDAIEKPKETAYIDVKDTSGHEVAGEPKEAPDVDGNNTSSNQDGSG

SEQ ID NO: 144986 - protein, 750 aa, Oryza sativa
  Clone ID: PAT_MRT4530_45749C.1.pep
MSGPGGREREAAGPAFSFSVDLVAAARRLLALLRSGDGERGGAGVVGPRSVRRYEELWMPLVAAEGAGGEAPMLVPPPDVRLVWLCHCFHHESYAAYCASRFGRLINRPSILDADNEEYAADHCRDVWAAHYPSEPFDLEDNETEGNSSNDKSASEIIEMVQRYTGLAARFASPFISEGVYHVAARRRYMRFLELIKKIVSTTQGNTRLVPSLDILLMWLAHQSFPVSYYADMAAMAVKDNVAKIVVGYGEVVSEEMVERTRVLWEEAYDEPYDMAGSEIDKAEVDAAREAFYWETAASEEDANRLYKGLQPRFIMEVYVFLKGEFDSEHTSKEFLRLRTQRCYRSLKLNIPLFNLSCKNWQKTWHLYCEFSTRGLIIEVRRSTSGCFRNSKLIKNISFSWSDMLHEKSLMLTEELDVRMKAMASITPPVQAPYLLKCVPDRVTDDGGAMISDVILRTKGYRPQEGRWLTRTVLDHSRKECFVIRIRIGRGIWRRGAETPIAVKWEDRIIEIREGSWSYIANASSVGYAPGKFSVQNNCYAPEKVVGTATPEKDQQDSKVVWRFSTGDVLTVKLGDDLNFHIRNESSGEEARLLVGRRLNYRINKESTLNDRNDEEEYLTLVRTSPDHLGDRATMLLNWKLLAVEFLPEEDAVFVLLLCMAIARTMTEIRREDVSGLLVRRRICEAKVGQRDWGSVMLPNSPSLDPHLQPWYRNAAHVLSSAETASNRVMLMKYSPADGKDELYRKALIP

SEQ ID NO: 144987 - protein, 1238 aa, Oryza sativa
  unsure (1)..(1238): unsure at all Xaa locations
  Clone ID: PAT_MRT4530_4574C.1.pep
MAKPLRSTVLVCASAAMAPTSAPRLPTSAPPISPASSRKPKPNRARAGTLCRSSSRAERHRGGRTSTRWAAVAAEGGGEAMRRWVDRRLRDSFPVDTVEEMTTLALQCVAKDAAAQPEMSWPRGSPPRCPSSSCPEPQRQEFGGGNPLRRLPLVSPPPRPADFPPRPGGAVLDSAVRGLPRAQGVDVQPEESHIRRGVEIRVSLYSPPMKGGRLHRLERPPAAHITTAAAATTPAPAPADDWGDGSWTVDCSCGITYDDGEEMVSCDECNVWVHTRXKRAPSSADEAEVAELLAELXPTHRPRPLYRRWAEVPLPSRVHVHGLPGGTDTALFRSAAPSPVFSSALWRCAGYVPKRFGFRYCEFPYWADDKDGANALFALAREKRKEKAETRFPLRLGAIHKDKNYVRTLSICGDKVDGVEHSVDDDAKRTSPPSDAKKRGTSISIVEPDTWDNGCEKKRDFDVPASEDQHAKTNMVNSDLHVLVEAKKKRASSSERSGDKKCSASKEITGMLKKYEPKESKRLVISSGVATTAAVAEQEVHSRFVKLYPPHLSAPGGGEMHGSELHLPMGGGAEWQSHQQTLAWRRCKPGVHQGSVYEGLDGNQNVGLQTGVRSNGVVKRDDAKRSNGDVQSDAAPEKMNEGLDLQKQSNQTSNLLVVGGVPDLQTNQSESLTIKKEASTDDHERTEAIQFVSDEHKSGKQDTAMLSTLQRHSSKLASDLVYQHPKSETQNPMHTIPEHPNSSLGNVKVCTASSGPNSTTFDLSCSLLSTEPSSEETTVRLVKKDQTRLVSSADSENDFAKKSESSQDRTRSSDKVQLKGFVPSAPKSSQGSRTYVSSAKNRFIVPKEQLQKTSTEGNAPPGSLQGEVAPLHSRNKAMPLSFYQRKDKIHHRSIHITQDTSNSSASAELQSTETTASLSDEQLALLLHQQLNSSPRVPRVPRCHQASTMQMLHPTGASVFSKRSSAHGGRDQALVLKKRNKDDAWRDNDETKKTGKVSSVERRHRDSSTERVLAAKDSCKFTENIESEQRNRGICSTGATSGVGNDAPIDRGVSHDLPGLIEEIISKNTNITYGELCNAIRQHWGDLSKPNVENNAYPNYLHAVNDCLRNRNDWAHLVDQAAMMNPNKRRKVEESDSLSADVLATEKTNKEAKRGPEDTNAESHHEILPRGKRKARKCRRLELKGRRVNDTRKRSSFDSASDDDDTTLSDSSSDRNDTPMDKSLEDSFVIAKNADSSS

SEQ ID NO: 144988 - protein, 172 aa, Oryza sativa
  Clone ID: PAT_MRT4530_45750C.1.pep
GRRRRQWWKLAGVRGDAGSGDGIGRGSGGRGGRRSGKGGGGWCSGAGAMESSGAADGKRKKEEENAGMVYMGSGGTDEAGRRPDFSPTWGSGEREFGGGGLKPNPALAGLARAGEEGEAGGEPATWVWGGAQMRSGGGGAPAVGATAPTARGGRRPTGGPHLSAPEGEREGG

SEQ ID NO: 144989 - protein, 1428 aa, Oryza sativa
  unsure (1)..(1428): unsure at all Xaa locations
  Clone ID: PAT_MRT4530_45751C.1.pep
MIDEQSLRTDESEYVEGFTGNQADEKITLGDALSLNRATEASPASVEELQSLAGGADIKGLEAVLDKAVELEDGKKVSGGIDLDTVNIIQRDALLLFRTLCKMSMKEESDEVATKTRLLSLELLQGLLEGVSDSFTKNFHFIDSVKAYLSYAILRAAVSSSAVVFQYACGIFAVLLLRFRESLKGEIGVFFPLIVLRSLDSSDSPLSQRASVLRMLEKVCKDSQMLADMFVKGNHWRGFYQQLISSARMLWWGSSTLLDLDCSASNHCSASGLSXQVYMYFRGSGKAAEMKRDATREKIIGPTHISDGMDRLWYKRTYMFSLFADYNFKLLVGYSDVRMCSCYLLNTTTVNQILKSNSSLDKAMIGEYLGQHEEFPLAVMHAYVDSMKFSGLKFDAAIREFLKGFRLPGEAQKIDRIMEKFAERYCADNPGLFKNADTAYVLAYAVIMLNTDAHNPMVWPKMSKSDFVRMNTASDAEECAPKELLEEIYDSIVQEEIKMKDDFPDSAKTNKPRRETEERGVVNILNLALPRLKSASDTKAESEKIIKQTQALFKNQGQKRGVFHVAQQVELVRPMLEAVGWPLLATFSVTMEEGDSKPRVVLCMEGFRAGIHLTRVLGMDTMRYAFLTSLVRFTFLHAPKEMRSKNVEALRTLLGLADTDMDALQDTWNAVLECVSRLEYITSNPSIAATVMQGSNQISRESVVQSLKELSGKPAEQVFVNSVKLPSDSIVEFFTALCGVSAEELKQTPARVFSLQKLVEISYYNMARIRLVWARIWSVLSQHFIAAGSHHEEKVAMYAIDSLRQLGMKYLERAELNKFTFQNDILKPFVILMRNSHSEKIPDDENEHIVESAFENVEQVILEHFDQVVGDCFMDCVNCLIGFANNKCTPRISLKAIALLRICEDRLAEGCIPGGAVKPVDDVPEAHFDVTEHYWFPMLAGLSDLTLDPRPEVRHCALEVLFDLLNERGHKFSSPFWESIFHRVLFPIFDHVRHAGRDGLSSGDDWLRDTSIHSLQLICNLFNTFYKEVSFMLPPLLGLLLECAKKTDQTVVSIALGALVHLIEVGGHQFSDSDWETLLKSIRDASYTTQPLELLNSVGFQKPNNQQSLSREAETNGLGSSYHDSREGGASISHIDEQDGHQETNAQTSLDNSEGLPSPSGRAQPAVSPRGQTFGQRIMGNMMDNLLVRSLTSKSKGRTDDIVPPSPVKAPDADGADKTDDEENPMMETVRSXYKRYWSRLKTTQQTAIMDILLSLLEFASSYNSTSNLRTRMHHIPPERPPLNLLRQELAGTAIYLEILQKSTVEHDGNDPSEDTNGHVIESDEHEKLKSLAEGKLVSFCGQILKDASDLQPSTGEAASADIHRVLDLRAPVIVKVLNGMCIMDAQIFKKHIREFYPLITKLICCDQMDVRGALGDLFSKQLTPLMP

SEQ ID NO: 144990 - protein, 172 aa, Oryza sativa
  Clone ID: PAT_MRT4530_45752C.1.pep
VRSLTSKSKGRTDDIVPPSPVKAPDADGADKTDDEENPMMETVRSKCITQLLLLGAIDSIQKRYWSRLKTTQQTAIMDILLSLLEFASSYNSTSNLRTRMHHIPPERPPLNLLRQELAGTAIYLEILQKSTVEHDGNDPSEDTNGHVIESDEHEKLKSLAEGKLVSFCGQIL

SEQ ID NO: 144991 - protein, 36 aa, Oryza sativa
  Clone ID: PAT_MRT4530_45753C.1.pep
HDGSAIHIPARSYVPMSKTETLLFDKTEFGSPPSFR

SEQ ID NO: 144992 - protein, 505 aa, Oryza sativa
  Clone ID: PAT_MRT4530_45754C.1.pep
MCIMDAQIFKKHIREFYPLITKLICCDQMDVRGALERVGPASGYKLQKCRGHSVPRVCASTRLPLPFFTESRRGHSSVSASVGAAVRACVRGRCIWQDSSSRRLPLPRENPTPLLLSTAIIVGASESPSPSRPPREGEDGAEMAGRYDSNPFEEDDVNPFSEQARGKAGGQPSYGGGAFYMPNPRNVPSVSSNSRLSPLPPEPAAFGATVDIPLDSSKDLKNREKELQAREAELNKREKELKRREEAAARAGIVIEEKNWPPFLPLIHHDITNEIPSHLQRMQYVAFASFLGLACCLFWNVIAVTSAWVKGEGVKIWLLAIIYFISGVPGAYVLWYRPLYNAMRTDSALKFGLFFLVYLFHILFCVFSAVAPPVVFEGKSLAGILPAIDLISKNALVGIFYFVGFGLFCVESLLSIWVIQQVYMYFRGSGKAAEMKRDATRAALHHVTGVTLVHTSPAAVEDAANPTYVFAAEVAVVIDVGPRANRNKRLELEHKRGAEANLIGE

SEQ ID NO: 144993 - protein, 335 aa, Oryza sativa
  Clone ID: PAT_MRT4530_45755C.1.pep
MKQVLAPIIALVIGIGTLAFMAISPQVCHAAAGGSATVARSIFVSKKGSGADFTRIQDAINSVPFANRRWIRIHIAAGVYKEKVSIPANKSFILLEGEGRQQTSIEWADHAGGGGGDSGTADSPTFASYAADFMARDITFKNTYGRMAPAVAALVAGDRSAFYRCGFVGLQDTLSDLLGRHYYERCYVEGAVDFIFGEAQSIFHRCHISTAAAAAPGFITAQGRSSASDASGFVFTSCTVGGAAPAYLGRAWRAYARVVFYRTAMSAAVVGLGWDAWDYKGKEETLEMVESGCTGPGSNRTGRVPWEKTLSGEELAKLVDISYVSRDGWLAAQPR

SEQ ID NO: 144994 - protein, 557 aa, Oryza sativa
  Clone ID: PAT_MRT4530_45756C.1.pep
MDRERRRLRGRGGNNNHPRRVLADVVIRFDPTWLVTILLLSLLLLGKATGTTATVVVSGSMEPGIRRGDMLIVRERRNDGDGDDNIRAGDIVLFSTELHPVPIVHRVIELHERHDGGARQMLTKGANILHSLSTLHRSKCAQFTNLEISNNLSIGSTVSLIKSAPKGGGRQQRRAKGMEKVAVGLLPPLRFIAVLAVVSWTSFIYCHFSLLSGGLLLGHGGGDDGADPCRGRYIYVHDLPRRFNDDILRDCRKTRDHWPDMCGFVSNAGLGRPLVDRADGVLTGEAGWYGTHQFALDAIFHNRMKQYECLTNQSAVADAVFVPFYAGFDFVRYHWGYDNATRDAASVDLTQWLMRRPEWRRMGGRDHFLVAGRTGWDFRRDTNIKADKGARHAGSQCHSPGNIMRLFQKATFCLQPPGDSYTRRSVFDSMVAGCIPVFFHNATAYLQYAWHLPREHAKYSVFISEHDVRAGNVSIEATLRAIPAATVERMREEVIRLIPSVIYADPRSKLETVRDAFDVAVEGIIDRIAMTRGGYARSWLRPKQSRQALDARRRRLS

SEQ ID NO: 144995 - protein, 38 aa, Oryza sativa
  Clone ID: PAT_MRT4530_45757C.1.pep
TNLCRLDAVDKLPSVVCAGTVVFVSITLIVVSMRSCVY

SEQ ID NO: 144996 - protein, 185 aa, Oryza sativa
  Clone ID: PAT_MRT4530_45758C.1.pep
MAGPPHGHVAASRRPPLRRRAPRAANTSGYLPLLTGGAKRPVIKNQVFGGVRFSLAAARGNGGLHGEGSDELGRRRRLALEHMGAGGGSRERAAALRRGREGRIHRRRTMGRVALTSTPSTVLSAPSSLTVLPCAPISLLPDYDTVLIAAAAVPGDRGLVTEDTGGASRRPDSASPEGLAPTTPD

SEQ ID NO: 144997 - protein, 49 aa, Oryza sativa
  Clone ID: PAT_MRT4530_45759C.1.pep
GFGRIEVGICVIYIDLIDGLVLRLFCQMGIVSIYYPNDVSDGDCFDILP

SEQ ID NO: 144998 - protein, 54 aa, Oryza sativa
  Clone ID: PAT_MRT4530_4575C.1.pep
GGVLSADAYSWVCHYFDLPFYIVRIMNEFILYTSFLLSALFFFFQVFSYILYFY

SEQ ID NO: 144999 - protein, 55 aa, Oryza sativa
  Clone ID: PAT_MRT4530_45760C.1.pep
RFLRGVGFVRAVEDAVLGSNHIVDDVREMPIVEGTGAFRFARGYVQAHTEDVLPV

SEQ ID NO: 145000 - protein, 91 aa, Oryza sativa
  Clone ID: PAT_MRT4530_45761C.1.pep
SGAAVVRRSNTPALESDDRSLSGGGGSLGVGRIWLPRCWEQQWCTDPAPLITTILAEAADLVVLPVVAGLHPLPCRRDAGVLLRLRPQEKT

SEQ ID NO: 145001 - protein, 53 aa, Oryza sativa
  unsure (1)..(53): unsure at all Xaa locations
  Clone ID: PAT_MRT4530_45762C.1.pep
MLHQKMASSTLNASYKGFLEIVFQNNDTGVQTYHLDGXDNGDWTPDCRSRYNK

SEQ ID NO: 145002 - protein, 177 aa, Oryza sativa
  unsure (1)..(177): unsure at all Xaa locations
  Clone ID: PAT_MRT4530_45763C.1.pep
GRCARRRRRSPRARTGAGSDPRPSSTGTSSSPSPTPPPRTPSGAATASSRCSFTRTRTRTQRRRSHSRSSPRRCGRCXTGSGTSAASSTAASRPTPAVAPGGASRSRSSTPPTGCGSPATRTPARPRRRRSPRSSAGSRRTSPPIGTRDGAAAAPASRRCIRSEPRRSAPQEQSVIG

SEQ ID NO: 145003 - protein, 189 aa, Oryza sativa
  Clone ID: PAT_MRT4530_45764C.1.pep
MAGINCSIVPCSALMEGKEFNFSNLYLHHTYGGPKPNQSTIINNNGSTGLGMTAVNNWAVLKGSTLQVMGVPVECGEWAIVGGTGEFIMASGVIYKKCLPTKVGPWGGNGGTPQDITETPKRLESITIRSGEVVDSISFSYFDQAGQKRVAGPWGGPGGNLNTNNSSVVGFFGRGGKYLDAVGVYVHPL

SEQ ID NO: 145004 - protein, 245 aa, Oryza sativa
  Clone ID: PAT_MRT4530_45765C.1.pep
GRCARRRRRSPRARTGAGSDPRPSSTGTSSSPSPTPPPRTPSGAATASSRCSFTRTRTRTQRRRSHSRSSPRRTRASLTGLAGEPSTTSGRRATAPRATTGSGTARRGGRRRRRRPPAARSTGSTAAAAAGGGGCPSRRRRCGRCRTGSGTSAASSTAASRPTAAVARGGGSRSRSSTPPTGCGSPATRTPARPRRRRSPRSSAGSRRTSPPIGTRDGAAAAPASRRCIRSEPRRSAPQEQSVIG

SEQ ID NO: 145005 - protein, 81 aa, Oryza sativa
  Clone ID: PAT_MRT4530_45766C.1.pep
ASCVVQSGSHSLLIQHIVNSCYHRSLTRALSILPISLPSIIGAGPCSASELDSNADLASLSEQMLTMRQIQCHKTRTCSSM

SEQ ID NO: 145006 - protein, 365 aa, Oryza sativa
  Clone ID: PAT_MRT4530_45767C.1.pep
MRALSLARASSPPPLLLHLRRALAPASSSSPAPVLLLRPAVSCSSLFVSDRAAAARRSSGSSRRSMASQQFPPQNQETQPGKEHAMDPRPEAIIQSYKPANKLKDKVAIVTGGDSGIGRAVCLCFALEGATVAFTYVKGQEEKDAEETLRALRDIRARTGAKDPMAIPADLGYDDNCRKVVDEVAGAYGGAIDILVNNAAEQYERPSITDITEDDLERVFRTNIFSYFFMSKHAVKRMRDRRGGAGAGGCSIINTSSINAYKGNKTLLDYTATKGAIVAFTRALALQLAEEGIRVNGVAPGPIWTPLIPASFAEEKVRQFGSQVPMGRAGQPSEVAPSFVFLASDDASYMSGQMLHVNGGVIVNG

SEQ ID NO: 145007 - protein, 65 aa, Oryza sativa
  Clone ID: PAT_MRT4530_45768C.1.pep
SYSFPYLAPALVLCPLFWFGVLHWFPGSFVSYLVLRVFCEFVILLKFSHVDCFVSRFSPFCYFLL

SEQ ID NO: 145008 - protein, 243 aa, Oryza sativa
  Clone ID: PAT_MRT4530_45769C.1.pep
GEFELGTRGSSRVDLQACKLPQLPQLVHDHAAATGTNHGVMFSSDHGCLYPLLPGIPFCLDSGCGAAACDDDKPAGFAHLGSAEADTSAAAARVDSEIAAAATATTCHGPNSWWKGTEKGKMKVRRKMREPRFCFQTRSDVDVLDDGYKWRKYGQKVVKNSLHPRLQYFSSEILSTRKKGKPLSYYRCTHNNCRVKKRVERLSEDCRMVITTYEGRHTHTPCSDDATTGAAGDHTASCAFTSF

SEQ ID NO: 145009 - protein, 209 aa, Oryza sativa
  Clone ID: PAT_MRT4530_4576C.1.pep
PAGHMVFSSGGQAFWANLAQGVLYCSCHDVLTGGYDVPFRYIPLPPECHLDPMKNQLRLCRTMNCVKDSIKFASIDMVPPDEAMMTTWTLTLATTQWHKDGELRVASLWELEGFKKAGLPKVKPTSPVLSMEENGVICFMLNAAEEGVYMVSLNMHTKNIMSSTRLSSCPTQPLGVEFPKHIQNPVPPKRDRDDLEECSTAIKRRLSRT

SEQ ID NO: 145010 - protein, 83 aa, Oryza sativa
  Clone ID: PAT_MRT4530_45770C.1.pep
KNFTHYFSNKHHRGASLIAPPKSHIVRGETRKEGKRPGPGKRQSPFFPGKSPRCFDTGPSGSTLSKLARTPGTWIGVGGHNSL

SEQ ID NO: 145011 - protein, 211 aa, Oryza sativa
  Clone ID: PAT_MRT4530_45771C.1.pep
MATEIEAYYDDGSGTYLLSFDEDFFDATLTKSGGKVESWLGETYRIHRSCGHPLVVGLDVEWRPAAPVPGPVAVLQLCVDRRCLVFQILHADYVPDALSRFLADPRFTFVGVGVRDDAARLRVGYGLEVPRAVDLRALAADTLGRPDLRRAGLRALVREVMGVQMDKPHHVRVSAWDKRNLSEDQFKYACADAFASREVGRRLYTCNCDGA

SEQ ID NO: 145012 - protein, 365 aa, Oryza sativa
  Clone ID: PAT_MRT4530_45772C.1.pep
MGTGSKKKKTVSWCTTEVSEGTHAFKIVGYSLNKGIGVGTFIRSGTFAVGGHDWAIRLYPDGVTEDSMDYVSVYLELMTENAKAMAFYTLGLVDPVTGGIRCNWSRSSPRLFDSSDSSRFGPRSPLFIPRSDLEMEESGYIVNDRLTVECEVTVTKGPQVSRTIGCSEIGVPPSELSEHFGKLLEEEEDVGRDVVFSVEGESFAAHKLVLAARSPVFKAEFYGEMIERGTFSIDIKDMQPSVFRALLHFIYTDVLPADIGDLEGDDYVEFIRHLVVAADRYAMDRLKLMCQSILGKYVDVKNVATTLALADQHNCDKLKDVCIQYICSLDEVDAMVRTKGYANLKRSCPSVLADLFEKTSKFRAS

SEQ ID NO: 145013 - protein, 121 aa, Oryza sativa
  Clone ID: PAT_MRT4530_45773C.1.pep
MSLRHAVLMQSRMLLRSRRPFSTISATDEANILKELDELKTKTKKAIIEDVEKVKRLENEDRNALNRLLTSCGMPRGAFRDKLVFGCHVVELFAAFSAVGIWKAGRDAPHKDAKFATDASI

SEQ ID NO: 145014 - protein, 87 aa, Oryza sativa
  Clone ID: PAT_MRT4530_45774C.1.pep
AAAQEARAACEEAEARLQAATRAARLVAADAEAARTAEAARQAAAAAATLRAEEERRDLELANAACVRRDADRDRHVGRRDRDFSPH

SEQ ID NO: 145015 - protein, 92 aa, Oryza sativa
  Clone ID: PAT_MRT4530_45775C.1.pep
MMPELGTVDFAIDNSGTQNFGPVFGHNRSNRMLLRKGPEHGLVEDGRQRREIASVDDDLSKMKGAGLDLLRIREGARGRRPVGLGAASGTDP

SEQ ID NO: 145016 - protein, 172 aa, Oryza sativa
  unsure (1)..(172): unsure at all Xaa locations
  Clone ID: PAT_MRT4530_45776C.1.pep
RGKTNFLMVGXKNKAADLVSXRAAIRARCHYVNKKWLAGMLTNWSTTEXRLHKFRDLRTEQKTEGFNRLPKRDAAVLKRQLSRLETYLGGIKYMTGLPDIVIILDQQEEYTALRECITLGIPTISLIDTNCNPDLADISIPANDDAIASIRFILNKLVFAICEGRSSYIQNS

SEQ ID NO: 145017 - protein, 51 aa, Oryza sativa
  Clone ID: PAT_MRT4530_45777C.1.pep
LDAGIWSLLISLGPVWHSSSSSFTPSGAGAQPNSFGSTKTGSGAGWSSLTK

SEQ ID NO: 145018 - protein, 41 aa, Oryza sativa
  unsure (1)..(41): unsure at all Xaa locations
  Clone ID: PAT_MRT4530_45778C.1.pep
DNATYRKALNKSILVQAERAFTYIHSMLTNYACFITTXFNS

SEQ ID NO: 145019 - protein, 95 aa, Oryza sativa
  unsure (1)..(95): unsure at all Xaa locations
  Clone ID: PAT_MRT4530_45779C.1.pep
RLSGGGGKGGSKGWGEKIGFLNGXRDPGGGPTPGNPVVKAPRDSGLAKKIVFNHREAFLGKISRGNSALFNGPHESMPNVGQVFSGEGNFRSPRL

SEQ ID NO: 145020 - protein, 159 aa, Oryza sativa
  unsure (1)..(159): unsure at all Xaa locations
  Clone ID: PAT_MRT4530_4577C.1.pep
MKSTYSSNVPENVAAGMAMGTVIVLLFCGYSLGISYDAKLILEKGYTCTGAQVMNVIFVVLIGLLASGQASPSMREFAGGQAAVYKILETINREPKIDAYSTTGRKLDDIQGDIEFISVYFSYLALPWSNEKIFXFSLAIQSGTTVACICCSSSSPLCL

SEQ ID NO: 145021 - protein, 62 aa, Oryza sativa
  Clone ID: PAT_MRT4530_45780C.1.pep
MLIARCETGRRFPSGQSSLDSGPQPPQPAVAPACQWPRMCPVAYWDSPFSEGILGWPLSSVP

SEQ ID NO: 145022 - protein, 817 aa, Oryza sativa
  Clone ID: PAT_MRT4530_45781C.1.pep
MRRRNLIITSDSDSDDGGGGGGAATASTPASASASASFPSVSGGGCGDGWPSPQNPRSVPVQFPSPSSPPPSPPIEISDEEEAEAEVVVEEEEVVVVEDEEEEYEEVEEIEDPDGDSPFVDAPEHISPPPPPPPPARTPMPTPTPTPTPTPTRPPVPVWAAPLPARTPTPTPSAPPRAAAPSPAGTPSPSPIPPSSTPVSALSGPLRQVDEFLRGLGLRLRPEWLESCAAGVPGFYGLGGVEAMARRCFEQFLFADMNACGAGVLPEGVGSMHNAVLDGPLVLQVDEIVNLSAPLRERYRDAHAGPKRCLKLSMTDGIQRIYGMEYRPIKDLEVLAPAGFKIVIRNVHIRRGLFMLVPEVIEILGGVDDELDEARNRLVSEVNKPPRGKRKQGGLPLSSRATLAAWPTNANATNDAEQGASVPRTVNTPHPTRLGNASHASQVGRTTQPMVDNLIPHVVVSNAQEQSRHIQEITMQGQPTSLNRHNKEASASYRYNAQCSISGTTRAMADEHVLVSNAQEQSPHIQEITMQDQSTSLNGRNKEASASTSYRYNAQCSISGTTRAMADERVDPSFVGNNVHEQMQRVQGITMQDHISASSESKRELSVTTPSGYDSRLAPHGVGNTGTRSGEATRSSNVDDGINNIGHPISLCGENEKPFTYIFNMLADWGVQQDTVPYIQGKIKGLITSVKRFQYKQSMQYDLYVYIDDGSFITEAFVDRDIVQNMIGLSAEELAAALSSGGPAQANIRKTMKAFEHFLVNFEGTILIELNRDSSVPIVREMNKGCSSSDAWQLLRRVKTFSGQGYMRSLDFMDTTP

SEQ ID NO: 145023 - protein, 65 aa, Oryza sativa
  Clone ID: PAT_MRT4530_45782C.1.pep
LKIFHGNNILIELTSSHRCYTKHHSFHSARAEHVLNNTPKPAFFFSYFFSWCLLTLLTTHRLTAH

SEQ ID NO: 145024 - protein, 158 aa, Oryza sativa
  unsure (1)..(158): unsure at all Xaa locations
  Clone ID: PAT_MRT4530_45783C.1.pep
WIFNLPRYVGTTTFLYYQRTCTFFTTDGHYTLHGTYLRTHLLLHLRYHTTLRVGHTFLRRSTRQHALHFFPTAKDDSPDRFSRDSVYLLLLPXLTNTTLVXHVXTLVDLDVHYPTGATDAXGVMPTRFHYTTHLTXTVXNHSELARHXRLLTGRLYTV

SEQ ID NO: 145025 - protein, 520 aa, Oryza sativa
  Clone ID: PAT_MRT4530_45784C.1.pep
MPQFFFFLALIPQELADSNGYLHCRATGSTLPVAIGVLPYPSSLPFILPTAMGGGLPTSSMLMGTNSPVTEVEILGIVIAPGGTAASMWQSIENLFRYNKTTQAIHLQAEFSNLPPPLPRLMKHMTFFDIPAVPAPLVATQPTAATAMPPTAPIAPNTATAPSAPIAPYASTAATAPYALTAAAALRMQTRSHSGIHRSPRERLNLHASATTLSPIPKSIRSALNDPNWHAAMAGVDFGETFSPVIKPTIIRAILSLALTSKWPIHQLDVKNAFLHGHLSETVYRRQPTGFIDAKHPDAVCCMNPSLYSLKQALRAWFERFKAFVLGLGFTAAKSDSSLFIFRSSLGTAYLLLYVDDIILTASSASLLQRIIKALSSEFSMKDMGPLHHFLSVQVHRSGTTMLLHQEKYATDLLDRADMTSCKPCSTPVDTSSKLSAATGVAIADPTAYRSMAGALQYLIFTRPDIAYAVQQICLHMHDPCEGHLNLVKRVLCYIKGTLRHGILLSASLPNKFTAYSDAN

SEQ ID NO: 145026 - protein, 1261 aa, Oryza sativa
  unsure (1)..(1261): unsure at all Xaa locations
  Clone ID: PAT_MRT4530_45785C.1.pep
AAAAAATAAAEAAAAAKTARAQLWSQAVAVHIKSLVPVVLDLSKSNYTHXCTLFEVAVGKFXCLTTSLRQAPPRHPSTPTXRRMDYTILSWIYGSISQEILSIVMTPGGTAASMWQSIENLFRDNKTTRAIHLQAEFSNLVQGDLSATEFCHKLKTLSDSLRDVSQPVPDQTLVLTMIKGMNPKHKHLSALLPMMSPFPSFIQARSLLLLDEMNDDAGDPAAKATALVADSRSTPTPAIDNGGGSRGNGNGGKKGKGKGKQGGNKGSNTNSSPSPLPVQPHWNPWTSXIQLWPTAGLLGPRPGAVPRPAAPQSYMNTPGHAAHAVPPVHAGTPSTPTWDANSIANSLNAMTLQQPSDQWYMDTSATAHMSSGSGNISISDKPPPHTXIVVGNGASLPVTATGSHKISTLSQPFHLHNILVTPHIIKNLIXWHRHLGHPGHHTQHHLAGHSIISSSSNKDSMLCHACQLGRQVRLSFSLSSSKTTVAFEIIHCDVWTSPVSSVSGFKYYLLLLVDFTHHLWTFPLRLKSEVFQILSNFHSLVRTQFSTVLRAIQCDNGREFDNSSMHQFAATHGIQLRFSCPYTSQQNGKAERMIRTTNEVVRSLLFQAHLPPSFWVEALTTATHVLXHKLSPRSTACVFLGYPPNHRGYRCMDLASRRVIISRHVVFDENMFPFAATTTASPDETYDFLDILAVPAPPVATQPAAATAMLPTAPIAPNTTAASTAAPSALIAPNTTAAPSTPTAAAAPRMQTRSHSGIHRSPRERLNLHTSVTALSLIPKSVRSMLNDPNWYAAMVEEFQALTSNNTXELVSPPPRGNIITGKWVFKHKFHPDGFLERYKARXVLRGFSQKAGVDFGETFSPVIKPATIRAVLSLALTSKWPIHQLDVKNAFLHGHLSETVYCRQPTGFVDAKHPDVVCCLNRSLYGLKQAPRAWFERFKAFVLGLGFTAAKSDSSLFIFRSSLGTAYLLLYVDDIILTASSASLLQRIITALSSEFSMKDMGPLHHFLGVQVHRSGYTMLLHQEKYATDDPTAYRSMAGALQYLTFTRPDIAYAVQQICLHMHDPREGHLNLVKRVLRYIEGTLCHGILLSASSPHELTAYSDADWAGCPDTRRSMSGFCVFLGSNLLSWSAKRQPTVSRSSAEAEYRAVANAVAETTWIRQLLRELHQPLHRATVVFCDSISAVYMSANPVQHQQTKHIKLDLHFVRERVALGQVRVLHVPSSAXFVDVFTKGLPSSLFLDFRSSLNVRELPAESAGVC

SEQ ID NO: 145027 - protein, 841 aa, Oryza sativa
  Clone ID: PAT_MRT4530_45786C.1.pep
MAGPPGAVPAIKIRQWRPGEGRWPAGRKGGVQRWSPEEEKMRPCWEAWRWQLEEDVRHALLPPGSGGGAGVLGVAEDAEVDVDVVRGHGHGVPVRIRVRHRSGGMGSGASATAAAASMGGRGSGSFSLQWAAADELSGGEARRIERHVTLTPLFFHLSTFCRWGAGVVTGHRRCAGTQGNDGVKEGGVVGAAREVLATTGAVGDEESIGSAGEGEKLGGDRRRGGRRDGRQRDGRLPAAGGKKVQCPASCHCRSARRRSTCPAPLRPRPTAALLCSGRPAPPARSGHHRSAPGPAPLRPSRPSPALVAAAPVHRSSGCRSLINLTHSHSLLAHDAHGHAAMAAAALLLLAAAAAAVVVAMALRWLLLLGGPAAGRLGKRARMPPGSTGLPLIGETLRLISAYKTPNPEPFIDERVARHGGVFTTHVFGERTVFSADPAFNRLLLAAEGRAVHSSYPSSIATLLGARSLLLTRGAAHKRLHSLTLTRLGRPASPPLLAHIDRLVLATMRQWEPAATVRLMDEAKKITFNLTVKQLVSIEPGPWTESLRREYVKLIDGFFSIPFPLANLLPFTTYGQALKARKKVAGALREVIKKRMEEKAENGGSIGDDEGKKEKKDMVEELLEAEGGSFSEEEMVDFCLSLLVAGYETTSVLMTLAVKFLTETPAALAELKEEHANIRDMKGKNQPLEWSDYKSTPNTRRGKNETLRVGNIISGVFRRGHTVTLFIDYTIPKGCKIFASFRAVHLNNEHYENARTFNPWRWQINNKLQNAVGANIFTPFGGGPRLCPGYELARVVVSIFLHHLVTRFSWEETEEDRLVFFPTTRTLKGYPINLRLLSESIC

SEQ ID NO: 145028 - protein, 931 aa, Oryza sativa
  unsure (1)..(931): unsure at all Xaa locations
  Clone ID: PAT_MRT4530_45787C.1.pep
RAPTPTPARHTSHHQEPHLWHRHLGHPGHHTQHHLAGHSSIASSSNKDSMLCHACQLGRQVRLSFSLSSSKTTVAFEIIHCDVWTSPFXSVSGFKYYLLLLVDFTHHLWTFPLRLKSEVFQILSNFHSLVRTQFSTVLRAIQCDNGREFDNSSMHQFAATHGIQLRFSCPYTSQQNGKAERMIRTTNEVVRSLLFQAHLPPSFWVEALTTATHVLXHKLSPRSTACVFLGYPPNHRGYRCMDLASRRVIISRHVVFDENMFPFAATTTASPDETYDFLDILAVPAPPVATQPAAATAMLPTAPIAPNTTAAXGRWGAGATGGGREGTPAPRCRDLDAAAAAPPPTRESRLSSESDGLSPIGTAAPSALIAPNTTAAPSTPTAAAAPRMQTRSHSGIHRSPRERLNLHTSVTALSLIPKSVRSMLNDPNWYAAMVEEFQALTSNNTXELVSPPPRGNIITGKWVFKHKFHPDGFLERYKARXVLRGFSQKAGVDFGETFSPVIKPATIRAVLSLALTSKWPIHQLDVKNAFLHGHLSETVYCRQPTGFVDAKHPDVVCCLNRSLYGLKQAPRAWFERFKAFVLGLGFTAAKSDSSLFIFRSSLGTAYLLLYVDDIILTASSASLLQRIITALSSEFSMKDMGPLHHFLGVQVHRSGYTMLLHQEKYATDLLDRAGMTSCKPCSTPVDTSSKLSSAVGAAVADPTAYRSMAGALQYLTFTRPDIAYAVQQICLHMHDPREGHLNLVKRVLRYIEGTLCHGILLSASSPHELTAYSDADWAGCPDTRRSMSGFCVFLGSNLLSWSAKRQPTVSRSSAEAEYRAVANAVAETTWIRQLLRELHQPLHRATVVFCDSISAVYMSANPVQHQQTKHIKLDLHFVRERVALGQVRVLHVPSSAXFVDVFTKGLPSSLFLDFRSSLNVRELPAESAGVC

SEQ ID NO: 145029 - protein, 141 aa, Oryza sativa
  Clone ID: PAT_MRT4530_45788C.1.pep
MTASYGGGFRIELDVVAKHGGGADCGPDGVAVEGSVPRDNRNGSAASTSRQASRVQRGSRRRGGKGGDRATGGAIRVRGGNGMVRGMREGAPSRWQRRSVGRRESAREEEQSERRDFRLTGMGAGGKAEGETSGDQSRLIQ

SEQ ID NO: 145030 - protein, 725 aa, Oryza sativa
  Clone ID: PAT_MRT4530_45789C.1.pep
MSHSSGASDASSTSDEEPVPAPSTSVLQTVNIRSHVPVALDLDVSNYSQWRCSFESVLGKFGLEAHVQEPPALDLRTAEWRRADHCVVNWLHNSIAKNIFDVVYKPRASAFTVWSDIEGVFRDNAVQRSVYLETEFRSINQGDMTITQYTAKLKQLADGLRDINMPVSEPSQVLNLLRGLNTKFRSLRASIADRNPPHTFMTARSYLLLAEHPGKWVFKTKLHADGSLDKYKARWVVRGFNQCPGVDFGETFSPVVKPATIRTVLTLISSKQWPVHQLDVSNAFLHGHLQERVLCQQPTGFEDAARPADVCLLSRSLYGLRQAPRAWFKRFADHVTSLGFVQSRADPSLFVLRRGSDTAYLLLYVDDMILSASSSSLLQRIIDRLQAEFKVKDMGPLKYFLGIEVQRTADGFVLSQSKYATNVLERAGMANCKAVATPADAKPKLSSDEGPLFQDSSWYRSITGALQYLTLTRPDIAYAVQQVCLHMHAPREAHVTLLKRILRYIKGTAAFGLHLRASTSPTLTAFSDADWAGCPDTRRSTSGFCIFLGDSLISWSSKRQTTVSRSSAEAEYRGVANAVAECTWLRQLLGELHCRVPQATIAYCDNISSVYMSKNPVHHKRIKHIELDIHFVREKVALGELRVLPISSAHQFADVFTKGLPSSMFNEFRASLCVGDTTAATAGGCWRTASSDSRGALHAHDAHPAHDAQRSSLRSHRCTSVRPGD

SEQ ID NO: 145031 - protein, 659 aa, Oryza sativa
  Clone ID: PAT_MRT4530_4578C.1.pep
MAISGALFLPGIFQSLSILAVLGVLVTKSGAADFQEQPACVPFSCGHLEGIRYPFRLQGDPLGCGDEAYELVCRDGRAIIHINTGKYFVKDISYNESRFWVVDANLDNSSCPLPLWNNLPYFNDMGTKLYTSAVRWATFLNCSRAINNGMYMPVACLSGNTSFVYVLTTSSSYYVQNIEPSCGYLAVIPVDDRTKNVPDYASYADVVKFMRNGFPVSFPRVESPSHSPVIKACARDTFQNFKEQMYSRNIQNWTSAIIGTELQFLGCVINYYSSATQVWVTLVLVFAVEIVKCIIVLCRFILAPLTVLTFLGYKYRGTRISIDAVEKFLRMQQAHGPKRYAYTEITAITGHFREKLGQGGYGSVYKGFLPGDGHVAIKMLSNSMCNGEEFISEVSTISRIHHVNVVRLVGFCSEELRRALVYEYMPCGSLDKYIFSPEKSLSWDKLNEIALGIARGIDYLHHGCDMQIMHFDIKPHNILLDSNFTPKVADFGLAKLYPRDDSLVPVSAARGTIGYIAPEMISRSFGTISCKADVYSFGMLLLDIAGGRRNREQHTSNSAHLYYPALVYDCLTQQEVSEISEDIGIHWVERKLCIVGFWCIQMKPAERPSMSEVVEMLESDDPDNLQVPPRPFFGVDDHISEMDDCCNSSSKSSAISEDD

SEQ ID NO: 145032 - protein, 872 aa, Oryza sativa
  Clone ID: PAT_MRT4530_45790C.1.pep
MSHSSGASDASSTSDEEPVPAPSTSVLQTVNIRSHVPVVLDLDVSNYSQWRCSFESVLGKFGLEAHVQEPPALDLRTAEWRRADHCVVNWLHNSIAKNVFDVVYKPRASAFTVWSDIEGVFRDNAVQRSVYLETEFRSINQGDMTITQYTAKLKQLADGLRDINMPVSEPSQVLNLLRGLNTKFRSLRASIADRNPPHTFMTARSYLLLAELQMQHDAKAEAGEALYAGTGSSSGTSDTTGQPRPKGRGKRRGRGGGAPPGGAPSTPGGGAGAGHDGQPRPPAPWGYNPWTGFVQAWPFPFRAPGAGVLGPRPPFQAQQAMTAQHLLPALPPASEVFHTVRSFFAYAHTQQTQPAAEFDALLANRTWTLVPRPPGARIITGKWVFKTKLHADGSLDKYKARWVVRGFNQRPGVDFGETFSPVVKPATIRTVLTLISSKQWPAHQLDVSNAFLHGHLQERVLCQQPTGFEDAARPADVCLLSRSLLGFVQSRADPSLFVLRRGSDTAYLLLYVDDMILSASSSSLLQRIIDRLQAEFKVKDMGPLKYFLGIEVQRTADGFVLSQSKYATDVLERAGMANCKAVATPADAKPKLSSDEGPLFQDSSWYRSIAGALQYLTLTRPDIAYAVQQVCLHMHAPREAHVTLLKRILRYIKGTAAFGLHLRASTSPTLTAFSDADWAGCPDTRRSTSGFCIFLGDSLISWSSKRQTTVSRSSAEAEYRGVANAVAECTWLRQLLGELHCRVPQATIAYCDNISSVYMSKNPVHHKRTKHIELDIHFVREKVALGELRVLPIPSAHQFADVFTKGLPSSMFNEFRASLCVGDTTAATAGGCWRTASSDSRGALHAHDAHPAHDAALLSHRSHRCTSLRSGD

SEQ ID NO: 145033 - protein, 1414 aa, Oryza sativa
  Clone ID: PAT_MRT4530_45791C.1.pep
MSHSSGASDASSTSDEEPVPAPSTSVLQTVNIRSHVPVVLDLDVSNYSQWRCSFESVLGKFGLEAHVQEPPALDLRTAEWRRADHCVVNWLHNSIAKNVFDVVYKPRASAFTVWSDIEGVFRDNAVQRSVYLETEFRSINQGDMTITQYTAKLKQLADGLRDINMPVSEPSQVLNLLRGLNTKFRSLRASIADRNPPHTFMTARSYLLLAELQMQHDAKAEAGEALYAGTGSSSGTSDTTGQPRPKGRGKRRGRGGGAPPGGAPSTPGGGAGAGHDGQPRPPAPWGYNPWTGFVQAWPFPFRAPGAGVLGPRPPFQAQQAMTAQHLLPALPPASPGVHSTGAWDNSALYSALQSAGVATTTPPSAADWFLDTGASAHMSSTPGILAHPRPLPFSSCITVGNGAKLPVTHTASTHIPTSSTDLHLHNVLVSPPLIKNLISVKKLTRDNNVSIEFDPTGFSIKDLQTQVVKLRCDSPGDLYPLRLPSPHALSATSSPSVEHWHLRLGHPGSASLSKVLGSFDFQCNKSAPHHCSACHVGTNVRLPFHSSSSQTLFPFQLVHTDVWTSPIYSNSGYKYYVVFLDDFTHYIWTFPVRNKSEVFHTVRSFFAYAHTQFGLPVLALQTDNGKEYDSYALRSLLSLHGAVLRLSCPYSSQQNGKAERILRTINDYVRTMLVHSAAPLSFWAEALQTATHLINRRPCRATGSLTPYQLLLGAPPTYDHLRVFGCLCYPNTIATAPHKLSPRSLACVFIGYPADHRGYRCYDMVSRRVFTSRHVTFVEDVFPFRDAPSPRPSAPPPPDHGDDTIVLLPAPAQHVVTPVGTAPAHDAASPPSPASSTPSSAAPAHDVAPPPSPETSSPASASPPRHAMTTRARAGISKPNPRYAMTATSTLSPTPSSVRAALRDPNWRAAMQAEFDALLANRTWTLVPRPPGARIITGKWVFKTKLHADGSLDKYKARWVVRGFNQRPGVDFGETFSPVVKPATIRTVLTLISSKQWPAHQLDVSNAFLHGHLQERVLCQQPTGFEDAARPADVCLLSRSLYGLRQAPRAWFKRFADHATSLGFVQSRADPSLFVLRRGSDTAYLLLYVDDMILSASSSSLLQRIIDRLQAEFKVKDMGPLKYFLGIEVQRTADGFVLSQSKYATDVLERAGMANCKAVATPADAKPKLSSNEGLSSRTPPAHVTLLKRILRYIKGTAAFGLHLRASTSPTLTAFSDADWAGCPDTRRSTSGFCIFLGDSLISWSSKRQTTVSRSSAEAEYRGVANAVAECTWLRQLLGELHCRVPQATIAYCDNISSVYMSKNPVHHKRTKHIELDIHFVREKVALGELRVLPIPSAHQFADVFTKGLPSSMFNEFRASLCVGDTTAATAGGCWRTASSDSRGALHAHDAHPAHDAQRSSLRSHRCTSLRSGD

SEQ ID NO: 145034 - protein, 83 aa, Oryza sativa
  Clone ID: PAT_MRT4530_45792C.1.pep
MAPSTIAATMPHAPSAAQALATSPSVLITIYFHPCCRHGGSRSAEKDLVVLVALIAICVFCHWGLGSGKKDLVRYSMDIILTL

SEQ ID NO: 145035 - protein, 1785 aa, Oryza sativa
  Clone ID: PAT_MRT4530_45793C.1.pep
MSHSSGASDASSTSDEEPVPAPSTSVLQTVNIRSHVPVVLDLDVSNYSQWRCSFESVLGKFGLEAHVQEPPALDLRTAEWRRADHCVPRASAFTVWSDIEGVFRDNAVQRSVYLETEFRSINQGDMTITQYTAKLKQLADGLRDINMPVSEPSQVLNLLRGLNTKFRSLRASIADRNPPHTFMTARSYLLLAELQMQHDAKAEAGEALYAGTGSSSGTSDTTGQPRPKGRGKRRGRGGGAPPGGAPSTPGGGAGAGHDGQPRPPAPWGYNPWTGFVQAWPFPFRAPGAGVLGPRPPFQAQQAMTAQHLLPALPPASPGVHSTGAWDNSALYSALQSAGVATTTPPSAADWFLDTGASAHMSSTPGILAHPRPLPFSSCITVGNGAKLPVTHTASTHIPTSSTDLHLHNVLVSPPLIKNLISVKKLTRDNNVSIEFDPTGFSIKDLQTQVVKLRCDSPGDLYPLRLPSPHALSATSSPSVEHWHLRLGHPGSASLSKVLGSFDFQCNKSAPHHCSACHVGTNVRLPFHSSSSQTLFPFQLVHTDVWTSPIYSNSGYKYYVVFLDDFTHYIWTFPVRNKSEVFHTVRSFFAYAHTQFGLPVLALQTDNGKEYDSYALRSLLSLHGAVLRLSCPYSSQQNGKAERILRTINDCVRTMLVHSAAPLSFWAEALQTAMHLINRRPCRATGSLKPYQLLLGAPPTYDHLRVFGCLCYPNTIATAPHKLSPRSLACVFIGYPADHRGYRCYDMVSRRVFTSRHVTFVEDVFPFRDAPSPRPSAPPPPDHGDDTIVLLPAPAQHVVTPVGTAPAHDAASPPSPASSTPSSAAPAHDVAPPPSPETSSPASASPPRHAMTTRARAGISKPNPRYAMTATSTLSPTPSSVRVALRDPNWRAAMQAEFDALLANRTWTLVPRPPGARIITGKWVFKTKLHADGSLDKYKARWVVRGFNQRPGVDFGETFSPVVKPATIRTVLTLISSKQWPAHQLDVSNAFLHGHLQERVLCQQPTGFEDAARPADVCLLSRSLYGLRQAPRAWFKRFADHATSLGFVQSRADPSLFVLRRGSDTAYLLLYVDDMILSASSSSLLQRIIDRLQAEFKVKDMGPLKYFLGIEVQRTADGFVLSQSKYATDVLERAGMANCKAVATPADAKPKLSSDEGPLFQDSSWYRSIAGALQYLTLTRPDIAYAVQQVCLHMHAPREAHVTLLKRILRYIKGTAAFGLHLRASTSPTLTAFSDADWAGCPDTRRSTSGFCIFLGDSLISWSSKRQTTVSRSSAEAEYRGVANAVAECTWLRQLLGELHCRVPQATIAYCDNISSVYMSKNPVHHKRTKHIELDIHFVREKVALGELRVLPIPSAHQFADVFTKGLPSSMFNEFRASLCVAPHAHHLFDEMPLRARPPMEDAAGRDRLSDLPDEILHRIMSFLNARQAVQTCVLSRRWRNLWHTVPCINADFVEFDSIGYQGPVVPFKRFVNRLLEFRDPASVIDTFLLKYAMPDRLDGYKASNEEANRWIGHALQKQARILEVAVFFFPLDLDHSVFTSFYLRRIEFSHVYLRKGFFEQIETGCPLLEDLLLHQCFIWDGEISSQTLKVLTVDATELYTVKEMSISTPNLTSLTLSGLEYPKAVLKDMPLLVTASVSVTFDALNFDGYYDANDLRQYLWGLSAVRNLEFHYEGAELMIANNSQWCPEFVDVVNLTLGEWCLDANFHALIVFLQNSPRLVKLTLKLAKDRWTTPQRIIGELEERSFTCEHLKIVEVICLENDPQVIGVEDFFVRSVTRMNDESQG

SEQ ID NO: 145036 - protein, 1803 aa, Oryza sativa
  Clone ID: PAT_MRT4530_45794C.1.pep
MSHSSGASDASSTSDEEPVPAPSTSVLQTVNIRSHVPVVLDLDVSNYSQWRCSFESVLGKFGLEAHVQEPPALDLRTAEWRRADHCVVNWLHNSIAKNVFDVVYKPRASAFTVWSDIEGVFRDNAVQRSVYLETEFRSINQGDMTITQYTAKLKQLADGLRDINMPVSEPSQVLNLLRGLNTKFRSLRASIADRNPPHTFMTARSYLLLAELQMQHDAKAEAGEALYAGTGSSSGTSDTTGQPRPKGRGKRRGRGGGAPPGGAPSTPGGGAGAGHDGQPRPPAPWGYNPWTGFVQAWPFPFRAPGAGVLGPRPPFQAQQAMTAQHLLPALPPASPGVHSTGAWDNSALYSALQSAGVATTTPPSAADWFLDTGASAHMSSTPGILAHPRPLPFSSCITVGNGAKLPVTHTASTHIPTSSTDLHLHNVLVSPPLIKNLISVKKLTRDNNVSIEFDPTGFSIKDLQTQVVKLRCDSPGDLYPLRLPSPHALSATSSPSVEHWHLRLGHPGSASLSKVLGSFDFQCNKSAPHHCSACHVGTNVRLPFHSSSSQTLFPFQLVHTDVWTSPIYSNSGYKYYVVFLDDFTHYIWTFPVRNKSEVFHTVRSFFAYAHTQFGLPVLALQTDNGKEYDSYALRSLLSLHGAVLRLSCPYSSQQNGKAERILRTINDCVRTMLVHSAAPLSFWAEALQTAMHLINRRPCRATGSLKPYQLLLGAPPTYDHLRVFGCLCYPNTIATAPHKLSPRSLACVFIGYPADHRGYRCYDMVSRRVFTSRHVTFVEDVFPFRDAPSPRPSAPPPPDHGDDTIVLLPAPAQHVVTPVGTAPAHDAASPPSPASSTPSSAAPAHDVAPPPSPETSSPASASPPRHAMTTRARAGISKPNPRYAMTATSTLSPTPSSVRVALRDPNWRAAMQAEFDALLANRTWTLVPRPPGARIITGKWVFKTKLHADGSLDKYKARWVVRGFNQRPGVDFGETFSPVVKPATIRTVLTLISSKQWPAHQLDVSNAFLHGHLQERVLCQQPTGFEDAARPADVCLLSRSLYGLRQAPRAWFKRFADHATSLGFVQSRADPSLFVLRRGSDTAYLLLYVDDMILSASSSSLLQRIIDRLQAEFKVKDMGPLKYFLGIEVQRTADGFVLSQSKYATDVLERAGMANCKAVATPADAKPKLSSDEGPLFQDSSWYRSIAGALQYLTLTRPDIAYAVQQVCLHMHAPREAHVTLLKRILRYIKGTAAFGLHLRASTSPTLTAFSDADWAGCPDTRRSTSGFCIFLGDSLISWSSKRQTTVSRSSAEAEYRGVANAVAECTWLRQLLGELHCRVPQATIAYCDNISSVYMSKNPVHHKRTKHIELDIHFVREKVALGELRVLPIPSAHQFADVFTKGLPSSMFNEFRASLCVAPHAHHLFDEMPLRARPPMEDAAGRDRLSDLPDEILHRIMSFLNARQAVQTCVLSRRWRNLWHTVPCINADFVEFDSIGYQGPVVPFKRFVNRLLEFRDPASVIDTFLLKYAMPDRLDGYKASNEEANRWIGHALQKQARILEVAVFFFPLDLDHSVFTSFYLRRIEFSHVYLRKGFFEQIETGCPLLEDLLLHQCFIWDGEISSQTLKVLTVDATELYTVKEMSISTPNLTSLTLSGLEYPKAVLKDMPLLVTASVSVTFDALNFDGYYDANDLRQYLWGLSAVRNLEFHYEGAELMIANNSQWCPEFVDVVNLTLGEWCLDANFHALIVFLQNSPRLVKLTLKLAKDRWTTPQRIIGELEERSFTCEHLKIVEVICLENDPQVIGVEDFFVRSVTRMNDESQG

SEQ ID NO: 145037 - protein, 576 aa, Oryza sativa
  Clone ID: PAT_MRT4530_45795C.1.pep
MEWGDTAGWLAEEDNAIEPSLSGGGGRVQGTRIALGQAASGAVCLGAGKDRVPEAYVVVVHGRRRGRRLRVRAMLKLNNGRTAVSPLRGSGAVGAEAYLEGIDSSRWATAVAAAASMGTVSRLSLKHLLRCFDFYSIDRKFCNGTNLNTLYQYHWSMRLSTGSWHSWYPVKHTEIKVVSIENSEVLADGSKGVVKVRGPQVMKGYYKDHFFQFTDAKMMGCSFQISPILIVNESFTVDNGLLTSTLKIRRDKFRSANETVDHLFVSCPLARFACNVIASAFGLEKINSIQHLLEAWLNEFDKKKKQLVAVGIAATLGRWKAKEVYNVGSTLRLAKAGCKRDYIIPSMAGTLIEDGWSLWAYILPFMPGALHVSRTCNLIGCVISILHPGKGNADEVDGIRSEDVACLICQELLFDPSVLNCGHVYCMPCLTSVGGEELECQFCGAPHPAEPTVCSNLKNFLKHRFEELYNSRQEKSSGVPSRKEGTRKGKPSEILHTHVGVGCDGCGVFPIQGRRYSCKECEAPGLDLCEKCFMTGSTAEGRFDQKHTADHDMELDDSFLFPNLVDYMDDLYIDMT

SEQ ID NO: 145038 - protein, 69 aa, Oryza sativa
  Clone ID: PAT_MRT4530_45796C.1.pep
FLSPFSFTERDRYRYVFLLFFFFLEAARMSLLLDRLINQLVHAPFFFSSKGLREFNLIVVLDTQMKFSG

SEQ ID NO: 145039 - protein, 80 aa, Oryza sativa
  Clone ID: PAT_MRT4530_45797C.1.pep
YMHKTMASGGGRRACSGSLHAMHIKCADDTRFAQEFTRRLTDCDEETGGHRAAERLQGPPVSCPLYAHRKDVNHYIHWKL

SEQ ID NO: 145040 - protein, 184 aa, Oryza sativa
  unsure (1)..(184): unsure at all Xaa locations
  Clone ID: PAT_MRT4530_45798C.1.pep
WHLRTDVWSCGVTLYVMLVGAYXIEDKDDPKNIMKTVKLIKAIQYEIPQQVHISTDCRELISRIFVSDPSKRITMQEIKNHPWFLKNFPRELTEEAQSIYFTKNDYFPTFSAQTSGEIMTFMEEAQKIPKSFGDGYIDYRSDEEEMQEEEEGPEENEEEEDECDKILREVQEKETPNMKALSIG

SEQ ID NO: 145041 - protein, 160 aa, Oryza sativa
  Clone ID: PAT_MRT4530_45799C.1.pep
SFPLLSSLLLSSPPTRPAPGLPPTTRSPVHHHRHARAVSKHRRINPSKPTRRKSDRSSSGESFASPPCGDRSGRTGGASGTRSTGCPRACAPTASATASPTSPPPPRPPPRRAPPPPPNPAATPPARLPATGPSRPTSAPYTWSAPPARPSPTSPPSRSR

SEQ ID NO: 145042 - protein, 95 aa, Oryza sativa
  Clone ID: PAT_MRT4530_4579C.1.pep
RMYKICIQINQMPKGHLLNESHNNVSVQQLSFSKTIPNEWTSYPNVMIQIWSPATPNSIKFDKITPKKTPIVFISNLDNQNTKLDVSLVPIPAAR

SEQ ID NO: 145043 - protein, 54 aa, Oryza sativa
  Clone ID: PAT_MRT4530_457C.1.pep
MEALEYMPGVFCRSSRCRRRRSGQLILRGVDVLKFGRSRENELLTTMVPISSGD

SEQ ID NO: 145044 - protein, 56 aa, Oryza sativa
  Clone ID: PAT_MRT4530_45800C.1.pep
NGFHLTISAFPVVASALYVVYSSLRQPLLSVRARFYFQVSVKLVCHPSQHCYLCPS

SEQ ID NO: 145045 - protein, 87 aa, Oryza sativa
  Clone ID: PAT_MRT4530_45801C.1.pep
PPRSENPQVPLEASSKKRLAAWSFQVYNPCSHKIVGGVLTHHHPPVNVPTLISGLQLSVPVEPVGFLMITHSPVQIKVVDQTFDCTI

SEQ ID NO: 145046 - protein, 261 aa, Oryza sativa
  Clone ID: PAT_MRT4530_45802C.1.pep
MAAPHGMHGVAAAAPDATIRLFGRDVVSNDDAVVVVVDGQLPKEEAEEEAGGGAAAAAGETRRFECHYCRRNFPTSQALGGHQNAHKRERQHARRAHLEASLAAAHYLGQSAHLVYGGAALFGYGGHAAAVSPQYGPVWASSAVAPPGLYATSMGMARPAAYGAGVDVSALWRASSSSSSSPPMMGSGGGGAFGTVAGGGRHGEAAAAALVGCRAGKDENVVMSVVTSLPSLPSWQLPAPEKMGRSELGQEAGVVSLELRL

SEQ ID NO: 145047 - protein, 380 aa, Oryza sativa
  Clone ID: PAT_MRT4530_45803C.1.pep
MEWEEESEAARQKAAAASASVVPAPFLTKTYQLVDDPATDHVVSWEDDDGGESASSFVVWRPPEFARDILPNYFKHSNFSSFVRQLNTYGFRKVVPERWEFANEFFRKGEKQLLCEIHRRKSAAATWPPFPPPPPPFFAPRHFAAGAFFRHGDGMLHGRLGALVTTTERRHWFESAALPVAPSSRLLSQLGPVIAPARRAAATPEEEALMQENHRLLRGNAALVQELAHMRKLYSDIIYFVQNHVRPVAPSPAAAAALHGLGVLRPPPAGGKAPASEVRGASGRSATSSSSLTVAEDQPTLLALRLPRTTEKIINEVSGGNGGGSTKLFGVHLSSADEQTSSGASRKRSPPQEQPPTSPAPKRTLVVEHSELRLSIVSPP

SEQ ID NO: 145048 - protein, 147 aa, Oryza sativa
  unsure (1)..(147): unsure at all Xaa locations
  Clone ID: PAT_MRT4530_45804C.1.pep
TGAALPPSHSFRHSRTPNSAVVASPAHALPDHGRPSTPKTAPPSSRDAGNRTQRPSLLRRKMLQRLPPQPPPQLPPPPPRRPHXPPAIPRXSPPHPPSVARSRSMASPSDQRRRPLLRQPPPRPSPPRLPVSIAALASSASNLAPPP

SEQ ID NO: 145049 - protein, 219 aa, Oryza sativa
  unsure (1)..(219): unsure at all Xaa locations
  Clone ID: PAT_MRT4530_45805C.1.pep
WPTPPPPPLXPPPPPPPXPPPPPXPPPPQPDPXRQAPAPPQRPPLRLHPPPLPPPPPSPHXPSPPPPAPANPSTSNPTTPSPSTRKTTTTTTPPTPPPPTPTPTTSSSPPPSPASRGPWRPCRERALRAAAAAAEEEEAAAEGEVVDVVEWLWGIGMGRYAAAFEAHEVDGEVLPCLTMDDLRDMGIGAVGARRKLYCAIQRLPPPPALPPPPPPPPRR

SEQ ID NO: 145050 - protein, 372 aa, Oryza sativa
  unsure (1)..(372): unsure at all Xaa locations
  Clone ID: PAT_MRT4530_45806C.1.pep
SRAAAPQPLPSSLCFVVSYCLPQTPPPSPRPPSPFFTLAPRHPTAVAPSPAAAPXNPKPEPSRRIPLPSSLSLTSPTPXPPPSLPQDIVASPPYHAHPLPSSLSRLAAPPPHPXPKPEPPCRRPTPFVTLAHRTPPSSPRRRTPXPDHGRPSTPKTAPPSXPRRRKPHPAPFPTSSEDASAXPPQPPPQLPPPPLPPPPTIFGNAVYYYSAPXPSSRIPTSPRPLHSSTPGDPIAASDPAXSPPHPPSVARSRSMASPSDQRRRPLLRQPPPRPSPPRLPVSIAALASSASNLAPPPIAARRLDRRRPPSSPSTVAAHGASKPSPHAQLIPVAHDHAAHLSSVATSTSHLTSISSAPPAIPRRSPPRPPSVG

SEQ ID NO: 145051 - protein, 53 aa, Oryza sativa
  Clone ID: PAT_MRT4530_45807C.1.pep
NNKGDPAPAPGGQPGRKTRPGLGGRPRQARPREPFIFFTGGVKHQPMSGLIYA

SEQ ID NO: 145052 - protein, 449 aa, Oryza sativa
  Clone ID: PAT_MRT4530_45808C.1.pep
MDPPQRIFGAASSPPIGIPPTSIAAPVDPPHPIFGAASSSPIAHRSLLPTPSVATAVAVQVDPPPPHSESELVQALSDKYRLPVRFLLSSIPPTYLSAWELSDGKAQGLVWSHSDALDITHHYQSLGLHEIRFLYSEFISLRCVQDMEYMIARTPFSMRVLNPDVAKEKSRMLSKLNGYCCSLREALRQVQAGGNLVEMFNLRSKFAQEHELCTCRTELLRQMKVDALNRVLVLGLGEGASSAHSADMIWILKHHRPDEYAVAVNDDGTVSWPIIHGLVQNIRNMMGNKLTSNDTLANSRTSLLGVIGRFQFEHKVQEVLEKTRSHSTVHDRSYFKIPAAAPSSAPAAVPCTAPPAAPAAASTAAPAAASTAAPAAASTAAPAAASTAAPAAASTAVPDDATPAEASDASSDDAGEEVAIMKFMEMEGEPEEQRAKRFQRYCASLDFCL

SEQ ID NO: 145053 - protein, 323 aa, Oryza sativa
  Clone ID: PAT_MRT4530_45809C.1.pep
MRNLVPPKVKIFAWKLALDRLPTQENKHRRHLAPWAICVICGFEAESSYHAVLRCPKARELRKEMKAYWHIPSEKKLEYTGTDWLLVLLDSLSPTHKAQLLLLFWRAWHIRNDAVHAQGREEVAGSCCFLRTYCDILFPIQQNDIVNKGKGIIGVNNLNVLGKDKSVRVAWEKPEPGWAKINVDGAFIAESGQARIGVIIRDSAGLPLLSSWRTVTRVCSAEEVELLACNEGLKLALEWIRMPDILESDCVTAINMLSVKSSDKSRWHSLITEVKGMMCLLQDVKLRKVGRGCNMVDHELAQLARRLNSCAVWRFDAALCIRT

SEQ ID NO: 145054 - protein, 61 aa, Oryza sativa
  Clone ID: PAT_MRT4530_4580C.1.pep
MVGICSRRDLHHLVYRVFDAMPDRSTGPPSRCLLAPLSPDAGQMEPENNSVPFPCSIHFHW

SEQ ID NO: 145055 - protein, 39 aa, Oryza sativa
  Clone ID: PAT_MRT4530_45810C.1.pep
MEVMPDPYQPREQLAVSFSVAGRCRSCEHEQRRRCAESG

SEQ ID NO: 145056 - protein, 86 aa, Oryza sativa
  Clone ID: PAT_MRT4530_45811C.1.pep
HPKLKQTRGSMQIPKKKHRGKSTFFFCPQLLRVTTTFWGFFFTLFFLLKGPQFCRCPLNPRLISGGPPPPPPFLFCPQLGLGRPTP

SEQ ID NO: 145057 - protein, 44 aa, Oryza sativa
  Clone ID: PAT_MRT4530_45812C.1.pep
MTASNTAVNSNIVAAFGKKGDGLPYYSVAATRLLGGAIGSDDDL

SEQ ID NO: 145058 - protein, 110 aa, Oryza sativa
  unsure (1)..(110): unsure at all Xaa locations
  Clone ID: PAT_MRT4530_45813C.1.pep
LLEANEXLXXPGLISRXYRYWCXDYYEILXVRTMRLXXXNPXXYTGLKXYGLSVLXRXPLLXPIXNXNRRYMEXKRLKMGHXYGXRPSGXTSLADGGKKQDQIDSASEQE

SEQ ID NO: 145059 - protein, 74 aa, Oryza sativa
  Clone ID: PAT_MRT4530_45814C.1.pep
FFFLHFCLKNTRSNSWHFPLGVGFFLKSFSSSPLIGGGAKNFVCRRHTTEPKPAGLYVVGCFIYATLSRSSENV

SEQ ID NO: 145060 - protein, 301 aa, Oryza sativa
  Clone ID: PAT_MRT4530_45815C.1.pep
MDPTKSSTPPPVMGAPVGFPPGAYPPPPPAGAAAAAYAQQLYAPPAAAAAQQAAAAQQQLQMFWAEQYREIEATTDFKNHNLPLARIKKIMKADEDVRMIAAEAPVVFARACEMFILELTHRGWAHAEENKRRTLQKSDIAAAIARTEVFDFLVDIVPRDDAKDADAAAAAAAAGIPRPAAGVPATDPLAYYYVPQQDISTAAVVWALTHVVQHGDTILLLAVMLLPHRAQLWQEVLGVSALCRGLCERPQERVDSEFGCRLFVTSTSTTKARWQWWETAGRWPSSSGGAWACFGRGRAGA

SEQ ID NO: 145061 - protein, 205 aa, Oryza sativa
  Clone ID: PAT_MRT4530_45816C.1.pep
MEPKSTTPPPPPPPPVLGAPVPYPPAGAYPPPVGPYAHAPPLYAPPPPAAAAASAAATAASQQAAAAQLQNFWAEQYREIEHTTDFKNHNLPLARIKKIMKADEDVRMIAAEAPVVFARACEMFILELTHRGWAHAEENKRRTLQKSDIAAAIARTEVFDFLVDIVPRDEAKDAEAAAAVAAGIPHPAAGLPATDPMAYYYVQPQ

SEQ ID NO: 145062 - protein, 368 aa, Oryza sativa
  unsure (1)..(368): unsure at all Xaa locations
  Clone ID: PAT_MRT4530_45817C.1.pep
MDPTKSSTPPPVMGAPVGFPPGAYPPPPPAGAAAAAYAQQLYAPPAAAAAQQAAAAQQQLQMFWAEQYREIEATTDFKNHNLPLARIKKIMKADEDVRMIAAEXAPVVFARACEMFILELTHAGXWAHAEENKRRTLQKSDIAAAIARTEVFDFLVDIVPRDDAKDADAAAAAAAAGIPRPAAGVPATDPLAYYYVPQQPAGGAKGRRGEKGEEKARRLATGDEAAAATREQAGWGGGRRHRGHRPCGPPPGTSPRPPSSGRSRTSSSTATPSCSSPSCCCRTGHNSGKKSWEFPLFAGGCASGHRSVLIQNSDVAYLCNQMMLKLRDFYDPSKWWETAGRWPSSSGGAWACFGRGRAGAGNRSEGRT

SEQ ID NO: 145063 - protein, 158 aa, Oryza sativa
  Clone ID: PAT_MRT4530_45818C.1.pep
MACSWLVLTAAMAGLASWLIRLVSLKWNSSHPCKADEGSRLPPGSRGLPLLGESLEFFTSSTSLELPVFFKRRLNRGRRVLANGSIGCKFDRHESSGGCDGTHEGYGKLGRWHARPRTVESAAVSDRVMGRTATAVRRCGDNRSDGVEGGNGSDAQRR

SEQ ID NO: 145064 - protein, 82 aa, Oryza sativa
  unsure (1)..(82): unsure at all Xaa locations
  Clone ID: PAT_MRT4530_45819C.1.pep
KTYLMTXAGLWFVSIIGSCFSFLTLSYTIFLMAYTLPMLYEKYEDEVDVVGEKALIELKKQYAVLDHKLLSKIPMLAEKKQH

SEQ ID NO: 145065 - protein, 327 aa, Oryza sativa
  Clone ID: PAT_MRT4530_4581C.1.pep
MSSKATGEDDADDSSSPEVEASSLITLRVKDSEGVRITRTMRTTDALDDLMDFYLGMVPADMDAAEGVFMHYGRRVTGDRTPADYDMEDGDEVSFFPDGTWTTPVTLTVTDNNGRRVTHTMRRLHILDILFDLYFAMLPSTAPREGAFIYHCRELSPKQTPEECNMKDGDEIAFSPFSKPSAFVTLTIRGNNNNGGGSVVVTRTMLRTQERLQDLIDLYFAMVPTDDERGEFDVTYCGRKVDIEKTPADYGMEDGDQLRLAPATERSRFVTINLVTMVGVKRAYTLRRTDELQGLMDLCLSREPASMYQNGCIFLYNGLCSRLGNSG

SEQ ID NO: 145066 - protein, 84 aa, Oryza sativa
  unsure (1)..(84): unsure at all Xaa locations
  Clone ID: PAT_MRT4530_45820C.1.pep
WRSSPARGANGVPVAESGGGEADGVALGLANPTAAXARLGAAASGYRSGGGGGGEEGDDARAIEVTGELGEMEKKREGRAGMLK

SEQ ID NO: 145067 - protein, 79 aa, Oryza sativa
  Clone ID: PAT_MRT4530_45821C.1.pep
RGGITPSIFIGKSPIYSASPKKRDNLYPHLSNKGIRAHNFFNRSIKGFSTHMLGKGLTRRAQCSMAQTKISSQKSTGNP

SEQ ID NO: 145068 - protein, 513 aa, Oryza sativa
  Clone ID: PAT_MRT4530_45822C.1.pep
MEYGITPAGGFRWRSYRDLIRDVFIAGDMYCGPAKLLFPQITGSAGEDQARCGWSSASSVASSPVVSSSYMSSSGSPAWSSASSSPVHKLRVIAQQMVGDGYIQELIRAFGRRRPDELIFQRWFSQLDVDFVLVLHTDGMVRADSFSVEDLMALIKRWIRALLTMVQVLNITLLELPLPVAGIHWVRGGEHPQDAGLVDAVTLSALNVNDDHRHRTPELLPGMLQLYACVSEACDLLVSAGMGKDEITKMQALDAMNNGILMQSRRKLSDAIWVMMEKVRALFLMDACWQVSQEAAASGTHETTELTMNYITLLWRNHTMLDYFSVFVSDADSFSSVARLIAEMITCLECKLEETSLSIPDLGLRFIFLLNNWHRVLQRVESLRDLPAAVRQERILLLHASDSKIKRYIDDYLNASWSPLLRCLLIDKPFVALGRSHESKIETQLQTTYATQKFWKVPNPQLRQRLRRAIMSKVIPDYSKYIEQMDRQNKINRHLVVTSPEQLEQQIEELFEG

SEQ ID NO: 145069 - protein, 77 aa, Oryza sativa
  Clone ID: PAT_MRT4530_45823C.1.pep
MGRTTSGSSRAWWDNLKGSYVETNYSFYVQDIKVSTEHPASMSSITVTGPVFHVAFVARVNASLHPAPVGAQIPHPH

SEQ ID NO: 145070 - protein, 526 aa, Oryza sativa
  Clone ID: PAT_MRT4530_45824C.1.pep
MEYGITPAGGFRWRSYRDLIRDVFIAGDMYCGPAKLLFPQITGSAGEDQARCGWSSASSVASSPVVSSSYMSSSGSPAWSSASSSPVHKLRVIAQQMVGDGYIQELIRAFGRRRPDELIFQRWFSQLDVDFVLVLHTDGMVRADSFSVEDLMALIKRWIRALLTMVQVLNITLLELPLPVAGSTERMAAAADHAQFTGFAEESILRMLAFVDAVTLSALNVNDDHRHRTPELLPGMLQLYACVSEACDLLVSAGMGKDEITKMQALDAMNNGILMQSRRKLSDAIWVMMEKVRALFLMDACWQVSQEAAASGTHETTELTMNYITLLWRNHTMLDYFSVFVSDADSFSSVARLIAEMITCLECKLEETSLSIPDLGLRFIFLLNNWHRVLQRVESLRDLPAAVRQERILLLHASDSKIKRYIDDYLNASWSPLLRCLLIDKPFVALGRSHESKIETQLQTTYATQKFWKVPNPQLRQRLRRAIMSKVIPDYSKYIEQMDRQNKINRHLVVTSPEQLEQQIEELFEG

SEQ ID NO: 145071 - protein, 103 aa, Oryza sativa
  Clone ID: PAT_MRT4530_45825C.1.pep
FVYLLNCFFYFFILILLHAYFTVRGTFTLLLMYQETGGEEKERKKGSPSRTKTKKYTGGWPCNPKSAPPPLPGRTSSKGTKIKNMGGEAGAGTPRWPGTEELA

SEQ ID NO: 145072 - protein, 166 aa, Oryza sativa
  Clone ID: PAT_MRT4530_45826C.1.pep
MATTMTTLSEEQRSGTGELRSRMIDNKVENKPMCRCVRARESVWHEADVAAPDLSRRRGIMRGDQEERAHGTYGSRRFVIFVKKRGSRTAWDPRCFTTTQGEAQLSVGCVARSDWCGGSQRESTVSLRPWHGFGTRRKTLKVFIVGKLLKIPLGGWIISSFFVFKA

SEQ ID NO: 145073 - protein, 35 aa, Oryza sativa
  Clone ID: PAT_MRT4530_45827C.1.pep
GGVRTPQLRTVPRGAFIVVGARCVGVQPPCQYPRA

SEQ ID NO: 145074 - protein, 342 aa, Oryza sativa
  Clone ID: PAT_MRT4530_45828C.1.pep
MKLNVDGSYQENNTGGIGAILRNSTGDVIFAVYGFVEQSQSALEAEILACKEGIRLALQWTLLPIIIESDCAEAIQMILSEGKLRSAHTFLVREIQGMVKGAREMKLKKNGGGGGGGGGSRQQYGFRPTEPAGFGAGRGDATVDVPLDTMGDIKRREEALRNAGVPMEDKNWPPFFPIIHHDIANEIPANLQKLQYLAFASWLGIVLCLSWNFIAVIVCWIKEGDSKLFFLATIYALLGIPLSYLIWYRPLYRAMRTNSAFSFGWFFLCYLIHIGFCIIAAIAPPIVFHGKSLTGILAAIDTFSEHVIIGIFYFVGFALFCLETLLSIGVLQRLYMYFRGNK

SEQ ID NO: 145075 - protein, 94 aa, Oryza sativa
  unsure (1)..(94): unsure at all Xaa locations
  Clone ID: PAT_MRT4530_45829C.1.pep
MMVVTVGMVGNTLQPSLGLHLHRTTKTWIQRRXGRFGRTRGWPNQPTFRLAASSVAPLYRLVNFSPVXRVNSEFXAHSCISLILDIVSLIYRLS

SEQ ID NO: 145076 - protein, 87 aa, Oryza sativa
  Clone ID: PAT_MRT4530_4582C.1.pep
MPLARREVALSHHHHLPQNIKLPATPKATRSRLARHAPAFTDVMISPEILNCTVHTYPQGPTFVTKFNVTDGYHVAANMAGDVVVDT

SEQ ID NO: 145077 - protein, 127 aa, Oryza sativa
  Clone ID: PAT_MRT4530_45830C.1.pep
MKLNVDGSYQENNTGGIGAILRNSTGDVIFAVYGFVEQSQSALEAEILACKEGIRLALQWTLLPIIIESDCAEAIQMILSEGKLRSAHTFLVREIQGMVKGAREMKLKKVNRNCNRISHVLANKSYG

SEQ ID NO: 145078 - protein, 102 aa, Oryza sativa
  unsure (1)..(102): unsure at all Xaa locations
  Clone ID: PAT_MRT4530_45831C.1.pep
KWHASLNKKKKKKKKKKKKKKKKKKKKKKKKKKKKKKKKKKKRGCRFKEPKXTTPGMQIKXXXKGXPKXXXRGRXXKRGNWKTPVFPKLXPLEKNPXFFFWF

SEQ ID NO: 145079 - protein, 1224 aa, Oryza sativa
  Clone ID: PAT_MRT4530_45832C.1.pep
IHCSTEKPILTRCRDDFLRKSVGPSTQRGGYTRRYINRDHEEDHNRLFAKYYYDNPLYTDDQFRRRFRMRKHLFLRIVEALGVWSPYFRLRRDAFGKMGLSPLQKCTAAIRMLAYGTPADLMDETFGVAETTAMESMINFVQGVRHLFGQQYLRRPTQEDTQRLLQFGEAHGFPRMLGSLDCMHWQWENCPVAWKGQFPRGDYGVSTIMLEAVASADIWIWHAFFGVAGSNNDINVLDQSPLFTEVLQGRAPTVQFTVNGSDYNMGYYLADGIYPENVGPSYVTQRVFGKGKNWLISSLPWPSVPRALACGTLAGRPLRARRSRDRPDGRLAATRLPPAAEFTRSSLPWLAGSWQPSAPPDFRPATEVKTVNNYALFIGYMSMAVRVMGYLVVLWTTVILLGGFVSALEKKDFWCFTIITLVQTIGKDDKNIRAENMKDEDGDGGRRTSKEKPKHWPRWLRRLAAFVAYLVQQLVFAVVAGPLALAVAVLYACGLVITTGLAAWRLLHRDYGDGSNNLRPALDVLYTMVLLQGVLSYYRFSSDFWQSRLTNNVAKAYNFHHWRHFYAFVSLRRYIHETRIGCEKDPSFAKRRNLVKYAVDTMIESEFPNCWSFVCGASILGALLENPKLEEQHSLIKEHLAWSPSGAGDLLQKLVQSLDPARGYHYITSISAARILAHLAGDLRREQLNFPQGIHSIASLVEPPGDEKGDEYNALEHFQELMVEGLRLLAKLVSDEEWCRVIAEKEGLLAKIMVPLRSDMHHTKYHSVCSDSERPICREMIGASIQVMRQSGDYSWRHRRDGALEIYSRLRRGDDAPSTIATMREHFIKRLVLIFTQHTTAEDDRVDLLAGEMLAKLCSHGKENTTKILRAKQDVIGDLTGMLEDKITKCGIIAAQILEHLCIHHSDDDECAQNLKERIKFGMLKVLAKPRDEYVNRETLTAVLSLSVTISRNLMNARDLPPLFDAITSEAGGFSILGKVQLQKMIERSSCLNTANELKTVKLVADLLILTVKHGSRDAIRDAKELIESLSEVAKEISDTENFMVIAGGSDPKTLDSFVKEAEDQLLRRVGREDTPEMAVTLTVTKETATSVKASPASGVSVRRPHTIVITTGASLGLGVAPNIGRVGGKGCGHDLIRCAWWKQESWQSTVAPGLRRSWRAPAEQRHDDSDMVDASPATRLAVSTPGITSISSTRMSERRVSCRTPVLRPKSLAATVDGLIVNG

SEQ ID NO: 145080 - protein, 177 aa, Oryza sativa
  Clone ID: PAT_MRT4530_45833C.1.pep
MAEEDNLALSVVCERSPGTAVEAASGRPPKAGSERARRQTMSRLYDELGALLPNLPPRASTTRIVEEAIACVGELRARTAELEAYSAVAAAAGRAARDGPAEVVASGKTSCFAVRLRAARARPGALTRVLEVFQRHGVAVLAATVARDGEETAVTVTTAAVAPRVLETIKAEIICAA

SEQ ID NO: 145081 - protein, 62 aa, Oryza sativa
  Clone ID: PAT_MRT4530_45834C.1.pep
CLFFNKRRSYHMQHTSHQLLRGPRSWTRSGQFTTTGRVGKQGRTRQAAAKIPAAFASLGQTA

SEQ ID NO: 145082 - protein, 111 aa, Oryza sativa
  unsure (1)..(111): unsure at all Xaa locations
  Clone ID: PAT_MRT4530_45835C.1.pep
RTGRGAPAGAHTRERGRPKTARNENETEKRTGTGRAKREEQDSPXDASRQEHDRQXTGRERNQTKDRRPGAPGQQKQSSQQXQDASRKRXXAANRRRGRSHEESXPRPPEQ

SEQ ID NO: 145083 - protein, 174 aa, Oryza sativa
  unsure (1)..(174): unsure at all Xaa locations
  Clone ID: PAT_MRT4530_45836C.1.pep
ALACFSSRQSCASHVSCLHELCELATGLEASAAPFLWXLREDQAAXVGLVVPWALXVGVLCHASVGALMTHIWWASVMEGVSSGVPMVCRPFFGNQKMNALLVSHVWGFGMAFDRVMTCDGVATVVVSLVGGKDGCRMRARAQELQAKVATMFIEPNGNCRKNFARLVEIICAS

SEQ ID NO: 145084 - protein, 97 aa, Oryza sativa
  Clone ID: PAT_MRT4530_45837C.1.pep
AHSVRTDKKARRRFPGLLSVRVQASTNYAHHELLAAVSLSHPPLALGYVLGGCELTLGAGTALNEVAASGEDPHHHEYAKLVRGMNPPREEEDNVAC

SEQ ID NO: 145085 - protein, 247 aa, Oryza sativa
  unsure (1)..(247): unsure at all Xaa locations
  Clone ID: PAT_MRT4530_45838C.1.pep
KKSXXFSEKKKKGGKKXFFPXGKIXGQKKGXXXXFXIXXXCXKXXGXKNFSXXXPXGGFXKXKPLXXFXXXXGGTPKXKXFFFQKAXSKNSXPPXXFXXGXXXGGFPTXFXGGGGGGPXNSQWGXPLXKXKGGKPPGXPXCFXVFKXXFPSXXGVFFFXRGGNKRXPXXXFFXXGGGKXGXEXXGXGXXSKXXXXXXXLXXXRXRGXPFGGGGTGREXNXFXXXFXLXPFPFAXGKXPXXNFPFXPX

SEQ ID NO: 145086 - protein, 190 aa, Oryza sativa
  Clone ID: PAT_MRT4530_45839C.1.pep
MPHLAASPTSAAAAAPASARVAFLRPGRVPRPPLQTARGLRPDLGTLRTAEQPTLYDLLGISSEGTLDEVRAAYRRMARKYHPDVSPPDAAAENTRRFIEVQEAYETLSDPSRRATYDRALARGVCRLAFSSSRRVAPYYYQDQEDKSGWRRTWGDQIEELKRRSMTKDSEENLSWGARMRRRTETSSSE

SEQ ID NO: 145087 - protein, 375 aa, Oryza sativa
  Clone ID: PAT_MRT4530_4583C.1.pep
MSAQSAAARARVRPLTGGAHLSGALAPCALAPPSLQPCAAAVPDVAVAREDRRRGRRPVAVLVRPFAVAEDRRSTIAAVDPKTAVVSSSSPLPSVGLPPLLWSPDPVSFMGQLSAILIVFHISLLKISLNPKSWLIKLRQWKSYYNRCDVESGVPNIGTEDPCQNAVQIPEDNDSQVFARSPEEDEKQHPGSNQAPSQSTDKKDGTLQPNSGANRTVIWKMDNGRTMIITGSEFTPEDAARIPKRQRGRNNFRGAPKAVRRYSQVTSTAHDTNRHLNVQPPPQRIIVKGTVRGRIVPPAIVSSLQHQRQQGRPTVVSSSNAPRIAPIRRSIGKSPLGNPTGKKILPVTAVKTVATPPSKISKQGNVPGETSASRS

SEQ ID NO: 145088 - protein, 119 aa, Oryza sativa
  Clone ID: PAT_MRT4530_45840C.1.pep
CERKGRHVQLLWCSHAVSIDGCIIYTTFLALPVHRAGHAFAQHADHKRNNRVGRGDQPTSFPRLLAALVLVSGVCFTCRLGFDGLESFLLAHCALDFSASASFSALFLSSSACLRLQPG

SEQ ID NO: 145089 - protein, 224 aa, Oryza sativa
  Clone ID: PAT_MRT4530_45841C.1.pep
YGGDKEDDIPDDQAGHKLAEIKLEPAQEMELCIMLLECCSQERTYLPYYGLLAQRLCLINKVYQKNFEKCFAKQYSMIDRLDTNKLGNVANFFAHLLATDALPWHVLAYIRLTEEDTTSSSRIFIKILFHELSDHLGIRQLNKRLSDPKMKDYFDSIFLMDHPKNTRFWINFFTSIGLGGITETLREYQCLQCNNRSQNQVLMRVAETQVREGRCKETDGRRAP

SEQ ID NO: 145090 - protein, 114 aa, Oryza sativa
  unsure (1)..(114): unsure at all Xaa locations
  Clone ID: PAT_MRT4530_45842C.1.pep
SLTGISASTWRATQKKEENPTSSAATSSSPTPRHPHHRRRGRAEAAPPPPPRGGGRGGPAGGAQASSPAGEGGGGAGWRRRRGXAQRGGRPPEHVVVHSCRAAAAAPPVDLTLR

SEQ ID NO: 145091 - protein, 251 aa, Oryza sativa
  Clone ID: PAT_MRT4530_45843C.1.pep
MPISEVDIRRLVLAYTIQTEVNSHRALIGIHNVLPNQVIGNILIFIPSKSGHHSLLVVMVFPEVALLARTGGIPSQIMFCNDLVIKKNIVVELWKLRTYCDKKNESSDTDVHDNRHRHNICDDPNCHEPVDATPPHGQHNGMDPPWLDVVTWQVLRVGSSPPVSHRQRCPRCEPPMLPFSIGSPQCRSLSSSRWRRSRMARLCLNCPLAVSTNAESTAAFTARGCNGAPLSRREGERKGGEREEEGVKERC

SEQ ID NO: 145092 - protein, 123 aa, Oryza sativa
  Clone ID: PAT_MRT4530_45844C.1.pep
GPKFWAFFWGKTWAGPPLCLEFGPPPFWAVGPPPRIFLKNHPPPLFSTKKFFFPCFQGGKTPPQNFFFFPCPETPKLAPPFGSPQKTHPGSPLFFGAPFPGPKRGELFPTLGCFPKMPYFVLF

SEQ ID NO: 145093 - protein, 42 aa, Oryza sativa
  Clone ID: PAT_MRT4530_45845C.1.pep
QRMQQVICAVCCQQQMMKMLMHMPYMCNMAPFNCELCSCSCC

SEQ ID NO: 145094 - protein, 480 aa, Oryza sativa
  Clone ID: PAT_MRT4530_45846C.1.pep
MAPAHAVTPHVVLLPSPGAGHVAPAAQLAARLATHHGCTATIVTYTNLSTARNSSALASLPTGVTATALPEVSLDDLPADARIETRIFAVVRRTLPHLRELLLSFLGSSSPAGVTTLLTDMLCPAALAVAAELGIPRYVFFTSNLLCLTTLLYTPELATTTACECRDLPEPVVLPGCVPLHGADLIDPVQNRANPVYQLMVELGLDYLLADGFLINTFDAMEHDTLVAFKELSDKGVYPPAYAVGPLVRSPTSEAANDVCIRWLDEQPDGSVLYVCLGSGGTLSVAQTAELAAGLEASGQRFLWVVRFPSDKDVSASYFGTNDRGDNDDPMSYLPEGFVERTKGAGLAVPLWAPQVEVLNHRAVGGFLSHCGWNSTLEAASAGVPTLAWPLFAEQKMNAVMLSSERVGLAALRVRPDDDRGVVTREEVASAVRELMAGKKGAAAWKKARELRAAAAVASAPGGPQHQALAGMVGEWKGRG

SEQ ID NO: 145095 - protein, 77 aa, Oryza sativa
  Clone ID: PAT_MRT4530_45847C.1.pep
NHTSFVSPYEIYKLIFLILKEIYIHFLFIFSEPNSFFFQNLKPFYKHPLKHFQKFKKDPLFEEFLTPLTPFSKPFSL

SEQ ID NO: 145096 - protein, 77 aa, Oryza sativa
  Clone ID: PAT_MRT4530_45848C.1.pep
MNIAIHMITSKLHPCGPLWLHHEHDNSQHIYNNSSKNQPSPVSPRTSHLQLLVVYKKDPSLPIVHLLNTPKNLSRAC

SEQ ID NO: 145097 - protein, 92 aa, Oryza sativa
  Clone ID: PAT_MRT4530_45849C.1.pep
MAMRSALTSLPLRLRSPAPVAAACGGMRLMSDGKGRVLSEEERAKENVYVQVYLKMERERMEKRKKKLEKEKAEADKGNPAASDKNTEGGSN

SEQ ID NO: 145098 - protein, 504 aa, Oryza sativa
  unsure (1)..(504): unsure at all Xaa locations
  Clone ID: PAT_MRT4530_4584C.1.pep
MAQLGRLCAVLCPSRAAPGRPIGLGRFGPSVPVDRWWTASVVPGFNTQNSLEIWVKFLGVTKWYQSQLDCRLSQMVKPCQTWRRNRQLHACPEVKSSLKLRAAKSEKQLVSMRDNFNGSGSRQFHGSTQLNSISFPRQPLKDQPQSQVMANQTQTVEELLRQMRHRSLKITAAKLPSDQREVSATCYDCGEQGHYIRNCPWKVFTRSPEKDEKQCPGSNQAPSQSTNKKDGTLQHSSGANRKGTDHVPKDYQRNSVLVMTKKEQGTTVQPFHQPMAVDDISHNPSALPPILAPVDANHGRSNVARDVHKSLLVPVSAAKVHNQKPAPQDQASRFCRNCRKPGHCFSDCPLPRAAKAVRRDSQVISTAHDPNRHLNVQPPPQRIIVKGTVRGRIVPPAIVSSLQHQRQQGKQCKENNSSLQLQRGSMLLHQHPQQVSSAPGRSTVVSSSNAPRIAPIRRPIDKPPLGNPASKKSXPATAVKRVVTPPSKTNKQSNVPGETSASRN

SEQ ID NO: 145099 - protein, 93 aa, Oryza sativa
  Clone ID: PAT_MRT4530_45850C.1.pep
RRMRQRKPQNTANISLFVLLFVYMTHDLINVQCSLSCSLSSIYVALVLARVFFCIMLSFMFYHKLKRRLQRLVQWFVACHSTMYALSVDLADD

SEQ ID NO: 145100 - protein, 111 aa, Oryza sativa
  Clone ID: PAT_MRT4530_45851C.1.pep
LMRLSMGSAGPPAGSGPVFRGATSFLRAARWSARVVRARWADPLGCAPGALGYPILRPLFCCAGAALPGRCPLLGLCLGLEVPVGGGRSPALGLRLRRRPVPGLLPFASCG

SEQ ID NO: 145101 - protein, 46 aa, Oryza sativa
  Clone ID: PAT_MRT4530_45852C.1.pep
LLCFPKSVLASVLLLLMYRSIGVVCPVLPGLETVNFCYCNESKKLI

SEQ ID NO: 145102 - protein, 39 aa, Oryza sativa
  Clone ID: PAT_MRT4530_45853C.1.pep
PAGKQQPWNRYLHQHRIHILPHRVDYRMGAPCERWMPSS

SEQ ID NO: 145103 - protein, 33 aa, Oryza sativa
  Clone ID: PAT_MRT4530_45854C.1.pep
MYHLYNTALHALPRTCTAQTPCTFRCNIPCFGP

SEQ ID NO: 145104 - protein, 448 aa, Oryza sativa
  Clone ID: PAT_MRT4530_45855C.1.pep
MPAALVACSGKRRRRTATTHAARDSSSWASLAEDLVSLIGWRVLAGDVRDYICFRAACHHWRSCTASPCGRGVVDPRFHPRRWMMLPEGNGLYPGHGMLRGFVRFFNLSTGAFVRLKLPIVRDHRILDSVDGILLLQRNRDTAVRLLHPFTGDIVDFPPLDTLLPYMGRRSEEYLRDVAAASITSSADDDQAVLLMIWLFRTVRVAFAASGDKQWRVSSWSMYQAYTPLPFQGKLYILDQATAYGGPEVLQIDPPLQLQLEGTTELSLPPPKSIAKCPARTPDSFFLYHLVECDSDILLVTFGVSVYAQISVYRLADLISGTTVPDQGTFIVSKGEQGMADETEVGIDGFEEDGGIFLLRPGGVWPWMELLELALAYIVRLKTSGLITYVLLLWYFPQTGSTPSSYVPSCTMYLSSLKSISACWDTPRTEIGSNKITMKHKHMLNIVD

SEQ ID NO: 145105 - protein, 250 aa, Oryza sativa
  unsure (1)..(250): unsure at all Xaa locations
  Clone ID: PAT_MRT4530_45856C.1.pep
IFSCIGKKQKRTFEKNMKKTREKMIVRKNMQKKTHEKIKAKKREKYGFHRQXKKKKKKKAKKNKTKRVRFPWKKKIRSLKGKKYRLNNKSKKNKKKSDXRAKKFRSLKKGKKTEKNSKKKTNKNSPIQKWQKKKKQKIKPXIVSLKKGKKSTIPVKGGIKKKSGRKTKKIRKRIKKPKKHLKIRPIPSKSGNKKLFVKNKKKVKRAKKKKNENKTSKKNAREKNDAREKNVRNKKVKKKHERKKKQKKTC

SEQ ID NO: 145106 - protein, 50 aa, Oryza sativa
  unsure (1)..(50): unsure at all Xaa locations
  Clone ID: PAT_MRT4530_45857C.1.pep
QEGLAFNIDLEWGFLEHLVPXGIPVKEVTSLRPERQVELPPKKVIHDQLV

SEQ ID NO: 145107 - protein, 580 aa, Oryza sativa
  unsure (1)..(580): unsure at all Xaa locations
  Clone ID: PAT_MRT4530_45858C.1.pep
MNLFTIRPRYPFWKFAAVVHALKIWXAHYLIGNKCEIYTDHKSLKYIFTQSDLNLRQRRWLELVKDYNVEIHYHPGKANVVADALSQKPFEPKDAHLQEEMARLNVHIIPQSSSHKLSVRPTLEDHIRKAQSSDKDLMKIRTYTGEDKAPDFRVDDKDTLWHKDRICVPKEGDFXQIIMNEAHNSAYSIHPGSTKMYMDIKQKYWWNGMKADIAQFVAHXDTCQRIKAEHRKLAGLLQPLPIPVWKWDEIGMDFVVGLPRTQKGHDSIWVIVDQLTKSAHFIPVRTNYGGEKLAKLYVENIVTLHGVPSRIVSDRGTQFTSRFWKSLHKAMGTKLDFSSAYHPQTDGQTERVNQIMEDMLRACVLTYGKDWEQSLPYAEFSYNNGYQASLGMSPFEALYGRKCRTPLMWSEVGERALVGPAFIKEAEERVAEIREKLKAAQSRQKSYADKKRREVSFEPGDFVYLKVSPIRGTRRFQIQGKLAPRYIGPYQVLKKVGAVAYLLELPEGMSDIYPVFHVSQLRKCLRISPIPLDPNYPSSTELEDYYIYPSAVIEIILLYDSNLSFFNGTSSFIVMHPAKD

SEQ ID NO: 145108 - protein, 145 aa, Oryza sativa
  Clone ID: PAT_MRT4530_45859C.1.pep
STARFYYALLRASCISLRQVMQVTSKGLHITISFRQKFNSQQKCMCGCASSVVTNATHACSLVTSNAISRHGHVVTHPVPTLSANHVPFAFWPAASCMSLVPCILRGSLLSMFILSLEVAWVRTGTGATCSQQILNIGLSTFSDS

SEQ ID NO: 145109 - protein, 538 aa, Oryza sativa
  Clone ID: PAT_MRT4530_4585C.1.pep
MVCMRDNFIGSGSRQFHGSTQLNSISFPRQPLKDQPQPQVMANQTQTVEELLQQMRHRYQIYLMQQMQRQCQEPRQVHQPQMQVQVPARNLNQSQSQEFPTSAPKTPVKMRSRYPKITIAKSTSDQRKVSASCYDCGEQDHYVRNCPWKVFARSPEKYKKQCPGSNQAPSQSTDQKDEFTPEDAARIPKRQRGRNTFRGARQLTRHLIKYGPPRPEDDISGERFSTDDDDDDDDDDDDDDDEDEATLNSFMERGLEFKACTRCGIVEHTASLCLPTCRCGEYTHYSDECPLRKVTCFLCEGTDHVPKDCQRNSVLALTKKEQGTTVQPIRQPMAVDDISHNPSALPPIPAPVEANHGRSNVARDVHKSLLVPVSAVNVHNQKLAPQDQASRFCLNCLTSTAHDTNRHLNVQPPPQRIIVKGTVRGRIVPPAIVSSLQHQRQQGKQCQENNSSLQLQRGSTLLRQHPQQVLSAPGQPTAVNSSNAPCIAPIRRPICKSPLGNPMSKKIPSAIAVKRIAIPSLKINAQSNVSDATSGSRN

SEQ ID NO: 145110 - protein, 111 aa, Oryza sativa
  unsure (1)..(111): unsure at all Xaa locations
  Clone ID: PAT_MRT4530_45860C.1.pep
EKVRITPXNYRGRPNYPPXPQNRTFFTPNYANRTNYPPRPNPWWFWSTWRSTLSPSSPSDGDGRASKRRTAMAEARRXARRGGGGGEEQRGQRRGECRGGGGEASGGGGGE

SEQ ID NO: 145111 - protein, 116 aa, Oryza sativa
  Clone ID: PAT_MRT4530_45861C.1.pep
GATCKLPSQSARTAVVTDSNKEICLQVCRQLITDGITVVLTARDETSGVKATERLIGMGLSSDVLHQLKVTDSSSVARLAALLKTLYVQLDILVNNATGCRPGSRSQRGSQRGTVR

SEQ ID NO: 145112 - protein, 71 aa, Oryza sativa
  unsure (1)..(71): unsure at all Xaa locations
  Clone ID: PAT_MRT4530_45862C.1.pep
SALASSSFGVAHVQSVAYNGGCESQXSARLSHKPALGVXSWRVRIVKALGGWGCRSGVLPVQSSWLGPITV

SEQ ID NO: 145113 - protein, 439 aa, Oryza sativa
  Clone ID: PAT_MRT4530_45863C.1.pep
MEVQGEVDGSGVPLAVLLKRELCNQKVERPDMLFGEASKSKKGEDFTFLLPKCSRRPGQAQADGEDAGGAGDDDTISVFAIFDGHNGSAAAIYTRENLLNNVLAAIPPNLTSEEWTTALPRALVAGFVKTDKEFQTKAARSGTTVTFVIIDGWVVTVASVGDSRCILESAEGSVYFLSADHRLDTNEEEVERVTASGGDVGRINIAGGAGIGPLRCWPGGLCLSRSIGDIDVGEFIVPVPHVKQVKLSNAGGRLVIASDGVWDALRFQEALNYTRGLPAEAAASRIVKESVSSKGLRDDTTCIVVDILPPEKLSPPLKKHGKGGIKALFRRRPSDELTEDQMDRGCLEPDVVEEIYEEGSAMLAQRLKINYPTGNMFKLHDCAVCQLVMKPGEGISVHGSIPRNSRVDPWGGPFLCSSCQLKKEAMEGKQHLTSMNAFI

SEQ ID NO: 145114 - protein, 47 aa, Oryza sativa
  Clone ID: PAT_MRT4530_45864C.1.pep
LLIVNIDNTIYITIYITIYITTKFFITSVKYYIIRNKNPIAIPKKKA

SEQ ID NO: 145115 - protein, 132 aa, Oryza sativa
  Clone ID: PAT_MRT4530_45865C.1.pep
YESSCSFAVFSILPFARRRRCCHFLAAAALLDEGALAGRVAVEGGAAASELAVARVRLRAAPALQAQRRRQRPYYAAATDGHHHRLRRLRRHHVVRHLGIQRPCSGLHGDDDEEDGDQTRERGGHPPAAVRH

SEQ ID NO: 145116 - protein, 116 aa, Oryza sativa
  Clone ID: PAT_MRT4530_45866C.1.pep
LLRKKLRELRHRCQEGSLRDIVFCMRADLLRNLGNTCNSKIRRFTVQSLLAALDRPCLQLFAVMPVLEGHAVVPHVHRLRTWLSAASGCGLLRDVAVGRVAMRQMNGHVNCYVSCH

SEQ ID NO: 145117 - protein, 89 aa, Oryza sativa
  Clone ID: PAT_MRT4530_45867C.1.pep
SEKRGPAPRGFKGGRNGAPGASFLGRKKGGRGSPGGGTPVMGKPGEILQIPPPGGGGFGPPQGLFWGGVLSPGLGAGPLPFLGPPFTPQ

SEQ ID NO: 145118 - protein, 83 aa, Oryza sativa
  Clone ID: PAT_MRT4530_45868C.1.pep
LCGTSRARATSQRWADAGLWSRRRTIKPPFSFGTIEAAAMEVAQRPRETSQMQRWRTKVGSSHHLLEPPPPFPSVSPFLIPCP

SEQ ID NO: 145119 - protein, 143 aa, Oryza sativa
  Clone ID: PAT_MRT4530_45869C.1.pep
KRAGRPPPPSPLVVPAYSSLTAYCVASVSAGARLGSGGSAADSAPGPRAARSRGGSPRAARRRSSLPRRLCRRAPASGFLEARGGPSAGVVCILAQVLAEHDARHSHLRGARRADAGPRDPINANLYVKELMRKKLRELRHRC

SEQ ID NO: 145120 - protein, 70 aa, Oryza sativa
  unsure (1)..(70): unsure at all Xaa locations
  Clone ID: PAT_MRT4530_4586C.1.pep
SVSWPRGGEGAFHLGVELKEPRARGEREKGVEDGQPGAQGLGAYFIGXDCLATAQQVSKAPFYYFFFHMK

SEQ ID NO: 145121 - protein, 143 aa, Oryza sativa
  unsure (1)..(143): unsure at all Xaa locations
  Clone ID: PAT_MRT4530_45870C.1.pep
HAAARQSSLPRRLCRRAPASGFLEARGGPSAGAVCILAQVLAEHDARHSHLRGACRADAGPRDPINANLYXRKKLRELRHRCQEGSLRDIVFCMRADLLRNLGNTCNSKIRRRNGYISQGRRSMNKRARHADRKTSFGEPTKL

SEQ ID NO: 145122 - protein, 164 aa, Oryza sativa
  unsure (1)..(164): unsure at all Xaa locations
  Clone ID: PAT_MRT4530_45871C.1.pep
FFFFFFFFFFFFFFFFFFFFFFFFFFFFFPXXXXXXXXPXXXXVKKXXXPXFXXXXFXRGXVXPPXFFXXXXXXKKFXXGXKXKXFKXXFXKKKNPXXXKXGXPXXXXXXFXKKKPQXXGEWXXXFLAXKXXFPXKXLXXFFXXKKXXKKXRFFXGPPXKKTXP

SEQ ID NO: 145123 - protein, 103 aa, Oryza sativa
  unsure (1)..(103): unsure at all Xaa locations
  Clone ID: PAT_MRT4530_45872C.1.pep
PQRWISGAHGEAYSKAFAGTRGGGRGGGGASNQEKCAGEDRVLIAAAAAAAAGSRLACRSPAIGEVKRXLAARSLSSGICRADSAKVSETSWWTAGETHADGS

SEQ ID NO: 145124 - protein, 162 aa, Oryza sativa
  unsure (1)..(162): unsure at all Xaa locations
  Clone ID: PAT_MRT4530_45873C.1.pep
MGARCLALLLLYGTLLLLLLLPQLPLAGAATRYYTFNVKLQNVTRLCNTRAIPTVNGKFPGPKIVTREGDRVVVKVVNNIKDNITIHWHGVRQMRTGWSDGPAYVTQCPIQTGQSYVYNFTINGQRGTLFWHAHVSWLRSTLYGPIIILPXAGXPLPFXEPH

SEQ ID NO: 145125 - protein, 38 aa, Oryza sativa
  Clone ID: PAT_MRT4530_45874C.1.pep
MSGRNPEEKENKVVRVRDRWRSVEVHAAGPLVLAIPRP

SEQ ID NO: 145126 - protein, 829 aa, Oryza sativa
  Clone ID: PAT_MRT4530_45875C.1.pep
MDLQSLAVVLRAALSHVPEERKAAEASLTQFLALVADVIVSIIAIHVNASELFQYTPQHLVRLLQIIVDGNCDMAVRQFASIHFKNFVAKNWSPTDPEEKHIIPESDKSMVRENILGFVTQLPPLLRAQLGESIKTLILADYPEQWPSLLPWVTHNLESQDQIFGALYVLRILARKYEFKSEDERIPLYQIVEECFPRLLNILRNLVPISNPPIEVADLIKLICKIFWSSIYLEIPKQLFDPNVFNTWMILFLNLLERPVPVEGQPLDPDARKSWGWWKVKKWIIHILNRLYTRFADMKLQRPESKAFAQMFQKNYAGKILGCHLQLLNAIRTGGYLPDRVINLILQYLTNSVTKNSMYQLMQPQIDIILFEIIFPLMCFNDSDQMLWDEDPHEYVRKGYDIIEDLYSPRTAAMDFVSELVRKRGKSNLQKFIHFIVEIFMRYNEASIEVKPYRQKDGALLAIGTLCDRLKQTEPYKAELERMLVQHVFPEFSSHVGHLRAKAAWVAGQYAHINFSDQNNFRKAMHCVISGLRDPELPVRVDSVFALRSFVEACKDLDEIRPILPQLLDEFFKLMSEVENEDLVFTLETIVDKFGEEMAPYALGLCQSLAAAFWRCMASSEADEEVEDTGALAAVGCLRAISTILESISSLPHLFPQIEPTLLPILRRMLTSDGQDVYEEVLEIVSYMTFYSPTISLEMWGLWPLMMEALNDWAIDFFENILVPLDNYISRGTDQFIACKDPDYQQSLWRALSSIMTDQNMEDSDIIPAPKLIEVVFQNCKGQVDHWIEPYLRLTIDWLRRAVKPYLKSLLVQVGCNFSKLIYLMPGKP

SEQ ID NO: 145127 - protein, 38 aa, Oryza sativa
  Clone ID: PAT_MRT4530_45876C.1.pep
FFFFFFFFFDPQFQHTTVTHTTYAHNIIRYYLSLVANT

SEQ ID NO: 145128 - protein, 61 aa, Oryza sativa
  Clone ID: PAT_MRT4530_45877C.1.pep
LATFLHEYDQMGVITCAGPASTYARQLTTSSVILGFNQLTYVQGALPIIAWPAHYAMVYVV

SEQ ID NO: 145129 - protein, 71 aa, Oryza sativa
  Clone ID: PAT_MRT4530_45878C.1.pep
PTPCHHSISQIQSPSRMKERKNQRKKRENGSFDAALIFLIRVALLRIWIYHRLLRYSPEIRPFGRVYPGQA

SEQ ID NO: 145130 - protein, 590 aa, Oryza sativa
  Clone ID: PAT_MRT4530_45879C.1.pep
MSSRRSMGALAAVCVCMFVFVSSARAEDPYRFFDWEVTTGNINPLGVQQQGILINGQFPGPEIDCQTNDNLIVNVDVMEKVGSLDPKFESTHSLVGIRFHFVSVFVMNGLQHRKNSWQDGVSGTNCPIPPGQNFTYQMQAKDQIGSFFYFPSLAFHKAAGGFGAIRIRSRPLIPVPFDPPAGEYTMLIGDWYKTSHKAWHCSYTNFINSRWILALQAMLDSGKQLPSPDGILINGKGPNGASFTVEQGKTYRLRVSNVGLQSTLNLRIQDHNMTLVEVEGTHTVQNTYSSLYVHAGQSLSVLFTANRPPGVYQITVSTRFAKRALNSSAVLRYAGSSATISSPPPPAGLADDIDFSLDQARSIRTNLTASGPRPNPQGSYHYGSINVTRTIRLANSAGRVAGKQRYAVNGVSFVEADTPLKLADYYRISDVFRLGGIPDAPPAGAAAAPRSEAAVMDSDYRSFLEIVFENSEDSVQIWHLDGYSLFVVGMDRGVWSEQSRKSYNLVDAVSRCTVQVYPRAWTAVLVALDNVGMWNLRSEDWARRYQGQQFYLRVYTPSHSFRDELPIPSNALRCGRATNASGRSRTLSRY

SEQ ID NO: 145131 - protein, 542 aa, Oryza sativa
  Clone ID: PAT_MRT4530_4587C.1.pep
MPPPRLGSAEPVSCRARAPAAPPRDRPIGFVPIRAVGSRGPAVDSLGGPGPRWTGAHVPLTGGARLPAPPLPLDDVSEEFPISAPKTPVKMRSRSPKITTAKSMSDQRKVSATCYDCGEQGHYIRNCPWKVFARSPEKDEKQCPGSNQAPSQSTNKKDGTLQHNFGANRKVIWKMDNGRTMIITSSEFTPEDAARIPKRQRGRNTFRGARQLTRHLIKYGPPRPEDDESGERFAADDDDDDTDDDDDTTLNSFMERGLEFKACARCGIVGHTASLCLPTCRCDHVPKDCQLNAVIAKTKKEQGTTVQPIRQPMTIDNSGHNPSALPPTPAPVEANHGRSNVTKDVHKSLLVPVSAAKVHNQKPAPRDQASRFCRNCRKPGHRFSDCPLPRAAKAVRRDSQVTSIAHDTNRHLNVQPPPQRIIVKGTVKGRIVPPATVSSLQHQRQQGKQCQENNSSLQLQRGGTLLRQHPRQVLSAPGRPTVVSSSNAPGIAPIWRPIDKSPLGNPTGKKILPVTADKTVAPPPSKINKQSNVPGETSGSRN

SEQ ID NO: 145132 - protein, 90 aa, Oryza sativa
  unsure (1)..(90): unsure at all Xaa locations
  Clone ID: PAT_MRT4530_45880C.1.pep
XPTFFFFFFFFFFFFLEHLLQILLFHXXCXGXSFXSXCLXXFXXXGKCTLGGXVXTHXXVLXXSGIIXXLPXYTXXXXLXLXXPRXXQIK

SEQ ID NO: 145133 - protein, 572 aa, Oryza sativa
  Clone ID: PAT_MRT4530_45881C.1.pep
MDLDKSTSTSASLKKLQEEGALPGYGTMERKPGGTEPEPVLGRMVAVEDYILCGFLPPPSEFFLLVLNFYGLSVLHLNPNSIAFLSIFSHICEAYIGVEPFLDLFRFYYELRWMEPKKVSGCVGFGLRDGLKSRYIPFQCPSSRSKWRARWFYLQIENSDAVFVVPEEQPDKIPSWTAKPALTPSLQSFIDIIDDLGVRGLSGYEVAADFIGRRIQPLQARAHPAFDYSGPEDETRVSPRGLNSETVEHRVGQVMVSGPTTASNVPAPLCEKGAAEREAAINALPLTNVIGPLVDHQAAALLKEGVAQEASDVAIAAAAATTSCGNVPRKGRKFSSVLGNRQKTPTPSASDVSPPPPRQQRLVILGEKAARAKAVQDGSGGNSSASPAVASTDVVVVPRSREVTPSSPASDLVPARGPPADVLTWEELHVEMGRILEAGARSIGREIAEARAVAASSAKERADKLARDLAEGLENRMSELENNLSEIRVSLRVTYTGLHQLAGECGVTTTIPANPDEFSLTTSLAELATAMEAISRHAARIGEEKSNRIYTGMCHVLACVWLAHPELDLQRI

SEQ ID NO: 145134 - protein, 442 aa, Oryza sativa
  Clone ID: PAT_MRT4530_45882C.1.pep
MGADRHWHQADRKEGKGCAAPFLCSKDSRSRRRSLPFSECNGRNCYRRFLLQRHDATALSLGARSQPPQLLPPCAAAAAVAASNENPSGVGSWDWIRRLGFVGCGGCLGYEIRCPRSSQGVPFISQGVLGIHFRVRLLRKLSNLQTLFVFFASTQTLAYSPRSLLRRSPSAVDLDKSTSTSASLKKLQEEGALPGRGTMERELGGTEPEPVLGRMVAVEDYILYGVNSTTVERRVGQVIVSSPTTASNVPVPLCEKGVAERKATINALPLPDVIGPLVDHQAAASLKEGVAQEASNVAIAAAATTTSGGNVPRKGRKFSSVLGNRRKTPTPSASDASPPPPRPQRLVTLGEKAARVKAAQDGSGGNSSASPAVASTDVVVVPRCCEVTPSGPASGLVPARGPPADVLTWEELQVEMGRIIEAGARGREIAEARAAAASSANE

SEQ ID NO: 145135 - protein, 392 aa, Oryza sativa
  Clone ID: PAT_MRT4530_45883C.1.pep
MDLDKSTSTSASLKKLQEEGALPGRGTMEREPGGLNGETVERRVGQVVISGPSTASNVPVPLCKKGAAEREAVINALPLTDIIGPLVDHQAAASLKEDIAKEASDVAAAAVTTSGSNVPRRGRMFSSVLRNRRKMPTPSASDASPPPPRRQRLVTLAFHRAARVKAAQDGSGGNSSASPAVASTDVVVVPRSREATPSGPVGDLAPARGPPADVLTWEELQVEMGRLLQAGARGIVREIAEARAAAASSVNKRADKLAHDLTEVREDLQKMKELVAGNERQWQGLKNRMSELENNLSEIRGSLWVTYTGLHQLVGECGVKTTIPANPDEFSLTASLAELATAMEAIPSKHAARILHGLSSLKDPTRPYQLWASPAKVPLGSSKALSRRRKGT

SEQ ID NO: 145136 - protein, 326 aa, Oryza sativa
  Clone ID: PAT_MRT4530_45884C.1.pep
MMVPLDPSSKPTSQRRIAEGDTVVVYERHDAMRAVAVRPGAVLQNRFGVFRHDDWIGRPFGCKVHSAASAGGGGARGGKGKGGGFVHLLAPTPELWTLVLSHRTQILYLADISLVVSYLELVPGCLVLESGTGSGSLTTSLARAVAPHGRVCTFDFHDQRAASAREDFERNDLTSIITVAVRDIQGQGFPEEHTGAADAVFLDLPQPWLAIPSAGTMLKQDGVLCSFSPCIEQVQRACEAMRSCFTDIRTFEILLRTYEVREGGLKGATTNEESNAVPLAQKKRKLLAAAETLDVKQNSSVMVRPCSTARGHTGYLTFARLRVHGN

SEQ ID NO: 145137 - protein, 49 aa, Oryza sativa
  Clone ID: PAT_MRT4530_45885C.1.pep
VKSPMVPGPLEFAVDLVVEGGISSLPSLSICRCIDWIWSVLSCTSYLDY

SEQ ID NO: 145138 - protein, 111 aa, Oryza sativa
  unsure (1)..(111): unsure at all Xaa locations
  Clone ID: PAT_MRT4530_45886C.1.pep
GLTEHILLDRYLXPHFRYYMREVRTVVYSHFLELYKRETMEAMASAFGVTADXIDLELYRWVGAGKLHCKIDKVASVLXTNRADAINAFYHATINQGDFLLNRIQNLSLFI

SEQ ID NO: 145139 - protein, 559 aa, Oryza sativa
  Clone ID: PAT_MRT4530_45887C.1.pep
MQQQTTGGVATRRRLSVPRGAGAAAAAASAASVWETRMKMDEVKGGVKVFSAGGDDADEEGLRVYRRLRRNQSDGGGGASGSTNAAAAAKKRRNWKASEPVTAIGDLRKSRSDVAVAAAAPAVGIVTTAKRSVTRVTTPEKKVAASAAAAEVKEVVVVEVPETNNLDEETEEEEDEEELEEELEAEDEEEEEEKEVLDQDHMAIDDDEAAKSTAPHQGKYQLLQCCHHQDFLMNLVLILFFPHNFSVDDQDLEPPTKRGVKIVPTSVEDERAANPEPVKPPEFSGDPVKKLAATIDLRAVNPEPVTIPPVEKKAMPVIIHRMTNAEPAKPSPVDLVMWRDVSKSTLVFGLGTFLLISSSYAKDLNYNTITAASYLGLVYLGLRFLSKSILNRGENVDCDDAERSGERYLVGEEEAIWLLRLVLPYINEVLLNLRSLFSGEPATTMKLALLLFAMARCGNFVTLWTLAKLASSLSSFQQPHGALNHSQTNVHMNNFEEIGPQASRSAVACTDKVFFGVFIIPKVCSSYSTQLARYELRLLDLVTLVTAFTGPPRHLGMCT

SEQ ID NO: 145140 - protein, 156 aa, Oryza sativa
  Clone ID: PAT_MRT4530_45888C.1.pep
GRETKKKKTPKGIYVHKKKTKYHARGKKGTENKNKKKTNKTNAERERFPRKPQKKAKKKGRGNKSSKKKNPGGKKKKLKKKKKLGGKKKLLRGAQNPKKTFHHGGFCPKNGNPKKGGSPKGSQKGQIKKRPGLGSPKAGVTAKRGPLRFLKGKGFH

SEQ ID NO: 145141 - protein, 382 aa, Oryza sativa
  Clone ID: PAT_MRT4530_45889C.1.pep
MAFFVKISAPCSLAGHGTTSSSSGSSRSKRGLLLPVGAGAGAGAYGGRQYSDVVPVPALSQAQASSSGGRLRIFSGTANPRLAQEVACYLGMELGRVKIKRFADGELYVQLQESVRGCDVFLVQPTCPPANENLMELLIMIDACRRASAKTITAVVPYFGYARADRKMRGGRESIAAKLVANLITEAGAHRVLACDLHSGQSIGYFDIPVDHVYGQPVILDYLASKTICPDEVVVVSPDVGGVARARTFAKKLSDAPLAIVDKRRQGHNQSEVVHLIGDVRGKVAVMVDDMIDTAGTVSQGAELLHREGARAVYACSTHAVLSPPAVDRLSSGLFQEVIVTNTVPVLHHRTFPQLTVLSVANLLGETIWRVHDDCSVSSIFQ

SEQ ID NO: 145142 - protein, 304 aa, Oryza sativa
  unsure (1)..(304): unsure at all Xaa locations
  Clone ID: PAT_MRT4530_4588C.1.pep
MQIFAVDASEDLESVKSTLLTLGSLQVATDNFDESKKLGEGGFGAVYKGHLFGQEVAVKRMAKGSNQGLEELKNELVLVTKLHHKNLVRLVGFCLEDGERLLVYEYMPNKSLDTFLFDVEQRRQLDWATRFRIIEGVARGLQYLHQDSQKKIVHRDMKASNXLLDADLNPKXIGDFGLARLFGQDQTRDVTNRIVGTFGYMAPEYVIRGQYSTKSDVFSFGILILEIVTGQRNSGPYFAEQNEDLVSLVWRHWTEGNIVEMVDYSLDRNYPEAEVLKCVNIGLLCVQQNPVDRPTMADVMILLT

SEQ ID NO: 145143 - protein, 70 aa, Oryza sativa
  Clone ID: PAT_MRT4530_45890C.1.pep
REPFNLGPQGPTDDKGLGKYITYSNGGQPWVWGGAWFCTQNLTTIQFRRIYFTKIHLRGIPFNHNPLKEV

SEQ ID NO: 145144 - protein, 429 aa, Oryza sativa
  Clone ID: PAT_MRT4530_45891C.1.pep
MAAVAATAPATSVTAATFSPSLPLLSRYQLPRAHRAASTVAFAARRFRGVNPSSDRPRGRRASVPAAPTTSAARDDGGGGGGIDALEAELWRLHRRAELRLHRLAAEADEAYRDLRYSARVVGGDRVVLTFRRSSLRFAAAALLWSLALSAAAWALLGWAVRAWQRRGLGWRGGEGAAVVRRRDRSLGGKEVVVAVSSSPVAAPVSRVPEPAREVKRREPKARLPEWWPELREEVSFDTENARDSFYRAAINFVLDDCSRAAQDIGAAQISGENPRNFLAGLASNIGLDKFRAATLVCASVAARTRSLFLQCWALEMQGKRSEALDELSKICRIHNMFPPEENSAEMEMVAGGLKKNLQVAERVHLLSLYRSICTAGNIRTAAEALGLGKLKLPDTTNCYGWGVGLQRDDEASNCDNSIRSLEATKKDW

SEQ ID NO: 145145 - protein, 357 aa, Oryza sativa
  Clone ID: PAT_MRT4530_45892C.1.pep
MGIAAGAALPGGPAGPAGGLFACRSAAASMRQTYLDLAAAAVAARSASCTSWADAMRASSPTRSSRSASDVDEFTAWVRKHPSALSKFEEIAAKSRGKKIVMFMDYDGTLSPIVADPDTAYMSDAMRAAVREVAKTFPTAIVSGRCRDKVRNFVGLSDLYYAGSHGMDIKGPSSNPESALCQPASEFLPMIDEVYKTLVEKTKSTPGAKVENNKFCLSVHFRCVDEKRWNALGEQVKAVIKEYPKLKLTQGRKVLEIRPSIEWDKGKALEFLLESLGFANCGDVLPVYIGDDRTDEDAFKVLRKRGQGLGILVSKCPKDTNASYSLQDPTEVMEFLLRLVEWKRKSSSSSLMIRPRV

SEQ ID NO: 145146 - protein, 68 aa, Oryza sativa
  Clone ID: PAT_MRT4530_45893C.1.pep
WEILASSAIRSPEDADSGAKQTTGTVPGGTCCPQERMIPTHHLFSVASDFDTTLAYTFDSFTGCKMLH

SEQ ID NO: 145147 - protein, 114 aa, Oryza sativa
  Clone ID: PAT_MRT4530_45894C.1.pep
RPPPARAPGHPHMAPSLLRPASPCLNLAPPTADGPGRSRSAVTIGGSRPLSVSLRVGGSSRRDFPCTTMASRDHSGLTRQLLDFQHGTVYEIDGELVPFMESKARLMDLLVRNC

SEQ ID NO: 145148 - protein, 46 aa, Oryza sativa
  Clone ID: PAT_MRT4530_45895C.1.pep
AIRLSFGMCSSSNSSLYHIVVGKVTEFVFVSDLGPVLFTLKPLIKF

SEQ ID NO: 145149 - protein, 485 aa, Oryza sativa
  Clone ID: PAT_MRT4530_45896C.1.pep
MAKPTVVLLPVWGAGHFMPMIEAGKRLLRGSGGALSVTVLLMPAPTPDAAVDIAAQVKREEASGADDISFRHLPAVDMPTVHTGIEEWVSLILRSHGPHVRAAIAGLDCPVAALVTDIFCTPALDVAAELGVPSYVYFTSGAVMLELLLYSPVLDEEVPGEFSEMDGALNIPGLPPVPPSVLPATMLHKKKMSTYRWFLETGRCYMKATGFIVNTAAELEQSVIDAIADGRCTRGVPAPTVYAIGPVIALTPPPEQPHECVRWLDAQPPASVLLVCFGSKGLLPPPKVREIAAALERSEHRFLWVLRGPPKDSRPGQRVPTDAMLDELLPEGFLDKTKGRGLVWPTRAPQKDILAHAAVGGFVTHCGWNSILESLWFGVPMLPWPLDNEQHANAFLLVSVLGVAVPLRLDRERDNFVEAAELERAVSTLLGGGDGEAGRKAREKAVAVKAACRKAVEKGGSSDAAFQRLAEEIRRGAVNVPKKRN

SEQ ID NO: 145150 - protein, 173 aa, Oryza sativa
  unsure (1)..(173): unsure at all Xaa locations
  Clone ID: PAT_MRT4530_45897C.1.pep
VESWDLGPSEPGAGHEGKGNGGQDHPEEIRGRKMGIRPPPESWRNKNEKFVAVKGLLKTKCRFRPVYHEMLIKGNSYMVIRVAEWMRAHPGRTLKDYDRYRVTYREDSAIFXRNFKRSFLQEAIARRRYSLVCFWPPSPLRVVYNISSNDEPNSPISNLIEGEHVTGDVIFYE

SEQ ID NO: 145151 - protein, 192 aa, Oryza sativa
  unsure (1)..(192): unsure at all Xaa locations
  Clone ID: PAT_MRT4530_45898C.1.pep
HSYITLLPKIATAVQIKDFRPISLLHSVPKLISKTITIRLQKEIPKLIDPMQSGFIKGRSITENLIFASELVQSALKNKKLMLVLKLDFYKAFDTVSWDALFRVLETRGFPEKWIGWTKTLLCSGKAQIIINGQKGEHIXYKRGVRQGDPLSPYLFILVADVLQKMIQQAYNTGVLKHPLDIDGAPPTLQYA

SEQ ID NO: 145152 - protein, 186 aa, Oryza sativa
  unsure (1)..(186): unsure at all Xaa locations
  Clone ID: PAT_MRT4530_45899C.1.pep
MAGCPEHAARLDTKRSNTVIIPSTKLPKVDKGQTSSKYDTSKQIDEFCKLSCSIWSSNEFIMNNYYRIIVQLLFIYGVDKRAPPVGDSWEXTYGGPSPSAHRPWVHHVVATADKRRRWQGRGAEVAPMRDGTTTATWMAGIHPRVNPTVWEWAAEARVWLRLAQASHGTAAARGHWRRGTTASSLA

SEQ ID NO: 145153 - protein, 456 aa, Oryza sativa
  unsure (1)..(456): unsure at all Xaa locations
  Clone ID: PAT_MRT4530_4589C.1.pep
MVCKRDNFAGSRPRQFHGATQCNSNNIPRQPLEDQPQPQVMANQTQTVEELLQQMRRRYQIYQMQQMQRQCQESRQCHPPQVXPEKDEKQCPGSNQAPSQSTNKKDGTLQHNFGANRKVIWKMDNGRTMIITSSEFTPEDAARIPKRTDHVPKDCQLNAVIAKTKKEQGTTVQPIRQPMTIDNSGHNPSALPPTPAPVEANHGRSNVTKDVHKSLLVPVSAAKVHNQKPAPRDQASRFCRNCRKPGHRFSDCPLPRAAKAVRRDSQVTSIAHDTNRHLNVQPPPQRIIVKGTVKGRIVPPATVSSLQHQRQQGKQCQENNSSLQLQRGGTLLRQHPRQVLSAPGRPTVVSSSNAPGIAPIWRPIDKSPLGNPTGKKILPVTADKTVAPPPSKINKQSNVPGSISGTQMKRVMEYLKVTMVGSMVLDTMKSLQRQYQGMWQFNVQISQTADQHQLSF

SEQ ID NO: 145154 - protein, 267 aa, Oryza sativa
  Clone ID: PAT_MRT4530_458C.1.pep
YNFIPPLIYFYAQICPLTCIKAIDNARKNCLWKGNNPNSTRRSLTSWDLVCRPKEKGGLGVVNLKLQNSTLLMKHLVKLYNGADLPWVDLVWKSYYLAKVPHTSLNKAVHKEESVLAMCTRPLEDSFLLPLSVLAYEEFLLLEEELSLLHLQPGQGDSWSFIWNSTTYTAKKFYKLNFMPLQPPRPYVWLWKTKCDMKIKVFTWLLFSDRLNTRDMLDKRHCAKENDDLTCVLCNGGHRETRLHLFFRGNCVVTLTFQFICNFTSIL

SEQ ID NO: 145155 - protein, 170 aa, Oryza sativa
  Clone ID: PAT_MRT4530_45900C.1.pep
MAAFLRSKCSSVGRTLMGGLGNNLFGAVNSSVETVSRPSHCDPIFQQIRTFIQMRTNLKVVDNSGAKRVMCIQSLRGKKGARLGDTIIGSVKEAQPRGKVKKGDVVYGVVVRAAMKRGRNDGSEIQFDDNAIVLVNNKGELIGTRVFGPVPHELRKKKHLKILALAEHIV

SEQ ID NO: 145156 - protein, 69 aa, Oryza sativa
  Clone ID: PAT_MRT4530_45901C.1.pep
MQQFVLQALAVARESTRKRQIWLHHPLPEEVVAGRTCPPSEELGTRHSRPSPNPSSVDHFHQSPKERRG

SEQ ID NO: 145157 - protein, 947 aa, Oryza sativa
  Clone ID: PAT_MRT4530_45902C.1.pep
MAVDDELDIRTGGACATAKCNKNCGPARHVGWAGLSAHVNMGRSGPGLMGWSDIKGGHPRAEKEAPAVDVCCGGRAASPLRVNMSLDITQVLLSAQSPDGATRKLAEESLKQFQEQNLPGFLFSLSNELANEEKPEESRRLAGLILKNALDAKEQHRKNELFQRWLALDVGVKAQIKGFLLQTLSSPVASARSTSSQVIAKVAGIEIPQKQWPELIASLLSNIHQVQPNVKQATLETLGYLCEEVSPEAVDQDQVNKILTAVVQGMNASEGNSDVRLAATRALYNALGFAQVNFSNDMERDYIMRVVCEATQSTDVKIRQAAFECLVAISSTYYDKLATYMQDIFNITAKAVRGDEESVALQAIEFWSSICDEEIDILDEYSSEFTADSDVPCYYFIKQALPALVPMLLETLLKQEEDQDLDEGAWNLAMAGGTCLGLVARTVGDDIVPLVMPFVEENITKPDWRHREAATYAFGSILEGPSADKLAPLVNVALNFMLSALVNDPSNHVKDTTAWTLGRIFEFLHGSALETAPIITSENCQQILTVLLQSMKDVPNVAEKACGALYFLAQGYVDAGSASPLTPFFQDIIQSLLFVTHREDAGESRLRTAAYETLNEVVRCSIEETGPIVMQLVPVIMMELHQTLEAGKLSTDEREKRSELQGLLCGCLQVIIQKLGAMESTKYSFLQYADQMMELFLRVFACRNATVHEEAMLAIGALAYAAGPNFSKALEDKILPYCDGIMTQLLKDLSSNQLHRSVKPPIFSCFGDIALAIGENFEKYLIYAMPMLQSAADLSAHAAAADDEMLDYTNQLRNGILEAYSGILQGFKSSPKTQLLMQYAPNILNFLDALYNGKDMDDTVMKTAIGVLGDLADTLGVHAGPLINQSISSKKFLEECLASDDPLVKESADWARVAISRAVSARPRLRRRPPRRRRRGRPRRRRWRPPR

SEQ ID NO: 145158 - protein, 241 aa, Oryza sativa
  Clone ID: PAT_MRT4530_45903C.1.pep
PQVDRGSFEWKGGRLEKIGWWGNIQGLGKKCGARDQLGGSFVAPGVAAAVRRGGRQRRDGGRRPGGEGEGGCGATAAGARGKKGRAAAAVARGEREEDGGSTAVAAALGPGAPPPSRLSLPPAAPAPSADADTVLPPRRHRQADADAGEREEAAPTFAAAPNSGGGSGATLFAAFPTLDIVGRRVVSSGGFTFPARLRGGGGGDPLAAFAPGPTSVVVAASPDFFSRLAPATSFPTRRPAA

SEQ ID NO: 145159 - protein, 872 aa, Oryza sativa
  Clone ID: PAT_MRT4530_45904C.1.pep
MSLDITQVLLSAQSPDGATRKLAEESLKQFQEQNLPGFLFSLSNELANEEKPEESRRLAGLILKNALDAKEQHRKNELFQRWLALDVGVKAQIKGFLLQTLSSPVASARSTSSQVIAKVAGIEIPQKQWPELIASLLSNIHQVQPNVKQATLETLGYLCEEVSPEAVDQDQVNKILTAVVQGMNASEGNSDVRLAATRALYNALGFAQVNFSNDMERDYIMRVVCEATQSTDVKIRQAAFECLVAISSTYYDKLATYMQDIFNITAKAVRGDEESVALQAIEFWSSICDEEIDILDEYSSEFTADSDVPCYYFIKQALPALVPMLLETLLKQEEDQDLDEGAWNLAMAGGTCLGLVARTVGDDIVPLVMPFVEENITKPDWRHREAATYAFGSILEGPSADKLAPLVNVALNFMLSALVNDPSNHVKDTTAWTLGRIFEFLHGSALETAPIITSENCQQILTVLLQSMKDVPNVAEKACGALYFLAQGYVDAGSASPLTPFFQDIIQSLLFVTHREDAGESRLRTAAYETLNEVVRCSIEETGPIVMQLVPVIMMELHQTLEAGKLSTDEREKRSELQGLLCGCLQVIIQKLGAMESTKYSFLQYADQMMELFLRVFACRNATVHEEAMLAIGALAYAAGPNFSKYMPQFYQYLEMGLQNFEEYQVCAITVGVVGDLCRALEDKILPYCDGIMTQLLKDLSSNQLHRSVKPPIFSCFGDIALAIGENFEKYLIYAMPMLQSAADLSAHAAAADDEMLDYTNQLRNGILEAYSGILQGFKSSPKTQLLMQYAPNILNFLDALYNGKDMDDTVMKTAIGVLGDLADTLGVHAGPLINQSISSKKFLEECLASDDPLVKESADWARVAISRAVSG

SEQ ID NO: 145160 - protein, 221 aa, Oryza sativa
  Clone ID: PAT_MRT4530_45905C.1.pep
QWPAPSPSSPSSSPPPPRATSPAAVAATTLTIQNLCPHPVWPLVTPTSGQPISDNTARLDPNSLISLAFPPTPWSGRVAARTGCDAAASPPAGCETGASPPSTVAQLSVHGGGDVATYSVSLVDGFNVPVVVSPQAVGGGQCPALGCVVDLNCDCPLGQRFSDGAACRGPPEYFKGRCPQTRTTPGDVEPVPQSCRSPGELKVIFCPPTMLTAAAAAAASD

SEQ ID NO: 145161 - protein, 226 aa, Oryza sativa
  Clone ID: PAT_MRT4530_45906C.1.pep
GISIIAVLYTTAQVTRDVHRLSWGRDVIAGRKAAAVVDFAGDQVVAYLLMSALSAVAPVIDYMLQAVYYLFTDCGGVVLNEPPSVAGLFCTPIALYYPSSLFLIAFVYRVFFYVSYFCLFLRLLCVSSFIPLFVRRRPSSPPWFLISIIFFTSSRTWPLVIARGSAVFAFSVCFLLSPFRSISRFFPGSVCLVFRSCVLSLASPGPPVLRVPCLMFVGGWSDSVSS

SEQ ID NO: 145162 - protein, 159 aa, Oryza sativa
  unsure (1)..(159): unsure at all Xaa locations
  Clone ID: PAT_MRT4530_45907C.1.pep
NMAXCIFGXTSXDXDRAKHGGIDSMSXDDLKKXXKNKKLIKKLARKYDASFASGTLIKQIXPRLLGPGLSKAGKXFPTPVSHAGDLSGKVTEVKSTIKFQLKKVLCMGVAVGNVEMTQEQLVGNIMLAINYLVSLLKKGWQNVGSLTIKATMSPPKRIY

SEQ ID NO: 145163 - protein, 64 aa, Oryza sativa
  Clone ID: PAT_MRT4530_45908C.1.pep
MASTTMATNLYTSGRSHCYSIDPCIDIGLVVDTEIVRTMQVLSCSHRICDYGFWETTLSITLTS

SEQ ID NO: 145164 - protein, 77 aa, Oryza sativa
  unsure (1)..(77): unsure at all Xaa locations
  Clone ID: PAT_MRT4530_45909C.1.pep
GGIVCVWDAESNLEGVQIWIHKGRHEGSRGISNLIEFIFEEADYASHRPHXNEKAFLHPDRRTSIRPIMTCLMAKAS

SEQ ID NO: 145165 - protein, 373 aa, Oryza sativa
  unsure (1)..(373): unsure at all Xaa locations
  Clone ID: PAT_MRT4530_4590C.1.pep
LSPLALRHFFVKRFXKILLPISPILLVVTPXRTSRQLHVCSEVKSSQISSFAQKEQQLVSMRDNFNGSGSHQFHGSTQLNSNSIPRQPLEDQPQPQVMANQTQIVEELLQQMRRRYQIYQMQQMQRQCQESRQCHPPQVRDQMPARNPNQSQSQEFPISAPKTPVKMQSRSPKITTAKSTSDQRTVSATCYDCGEQGHYVRNCPWKVFARSPEKDEKXCPGSNQAPSQSTDKKDGTLQPNSGANRTVIWKMDNGRTMIITGSEFTPEDAARIPKRQRGRNTFRGARQLTRHLIKYGPPRPEDDESGERFSADDNDDNDDDNDDNDDATLDCFRERXVKFKACARCGIVGHTASYCLPTCRCGEYTHYSDACLQ

SEQ ID NO: 145166 - protein, 149 aa, Oryza sativa
  Clone ID: PAT_MRT4530_45910C.1.pep
FPFRHRTPREPPKSRIKSAPAPTEHAERTNTGTTTKQKSRPEKGSDRIGSNRITGEEKNQTRRKQTEQSINQVERIQIEEAPGQRRTEICGQKRRRTRRQSKSTRRLLRGEKNEETRIESRGRGRKGSGTGRRKRDDATTPKRRSGRVG

SEQ ID NO: 145167 - protein, 121 aa, Oryza sativa
  Clone ID: PAT_MRT4530_45911C.1.pep
GGRVSDSEDSDQVSSDDEDEKYLQCFKQNKMEHKACSRCGEIGHVASSCATTCVHCEEDHPPDGCPTSRITCFWCEGTDHVPKDLPGQRNRHGKRKCQVRKDICCFNCHELGHFADQCPKL

SEQ ID NO: 145168 - protein, 370 aa, Oryza sativa
  unsure (1)..(370): unsure at all Xaa locations
  Clone ID: PAT_MRT4530_45912C.1.pep
MVGPEATGSAPRGAWRLDTGCRPSLSVILSPIVTGPRQPRDGRVGLAPLLLNPKDRAGSSKPHIGRFDQFGQFRWXLSESLKVMEANIKLLHKSVLYGDNLDYICTELPAALPHVLKHSITPTLCIYEDLQSFAKTSLRFIDLKHXACHLPLYGDGRSLGGILRLAYLLELAFTPGAKNIFKGLPDDKYIFPLHVFSGPDSSPSHVRSLNLAYVCLNTTTTGFAGFANLKKLTLHKLKRFAKTSVRFINLRHLNLYLPLYGNGRSVDGILRLAYLLEVAPVLEELELHGLIELAHCILRCAIRLDCMIMDPMVRIKGLPVVDWLVERGRRIAKELLEREESQGVLRVCLRIRGSRRLGRYVKRGKLLAHD

SEQ ID NO: 145169 - protein, 106 aa, Oryza sativa
  unsure (1)..(106): unsure at all Xaa locations
  Clone ID: PAT_MRT4530_45913C.1.pep
CGARALLGITKRRVLSKYDGIVHSSFLVRKAMNNISRMARYLANKVQPAQGIDCYSESESTVFGQKLRANVEXRLDFYLTSDAPRKSGNAQKTAICRVPLASPYAI

SEQ ID NO: 145170 - protein, 126 aa, Oryza sativa
  Clone ID: PAT_MRT4530_45914C.1.pep
RYIWPNGRHGPGLAVLGPRVVGPAWPDQHIGPCRASPRAAHTAQHDSGRAGPARRHDGPSPYTLCVGPGLLAPSMPVGRPRHDLAVGLGRHGPDPSRAVPCLGRASGLMAIYTHRQAELELKNSFS

SEQ ID NO: 145171 - protein, 1464 aa, Oryza sativa
  Clone ID: PAT_MRT4530_45915C.1.pep
MAEERESFESQWAPSDVTEENLKEMVVQGVFPAKEIIGWRPACGKAFPTPDTHEVVVFLLTTKFDYIVYPLLVFLNDITRNIIPSNGVEILLDQINWHAHEPKGKIFGPALKLSRSCRPSPSSAAKPPNPLGSKHPSAEIGAENIVLVTIDKLSLEQRQELERTMKSVQDKFMNLFKETHSGTIVQKYKLKVVAADEPETTSSKGSEARGTKAAADSSGGKGGEPKDGEVEDVVEEEDAEEQEEPPPCSNFQDQVDYAVQHALINQSGVLVNTLTNMIKSMVDDVMKEQFGLKPKNTGNLYQHPYSEWFERIPLPNRYKVPDFSKFSGQDNVSTYEHVSRFLAQCGEALAVDALRVRSFPLSLSGSAFTWFFALPYNSVQSWADLEKQFHSYFYSGTHEMKLSDLIAVNQRHDENGLIAPIKEKFSSQDFESLSHLAQKETIHEQRSSGKEERYDFDITKADKIFDLLLREKQIQLPAGHVIPSAEELGKRKYCQWHNSGSHATNDCKVFRQQIQAAIEGGKIKFDDSKKPMKVDGHPFPINMVYMSGRAADGGNHRNLQLNSTKIINKYQRKYDRQQERYYDEDDDDFDPYWDFEYEAKQADVDDVEEASTRLILSPEQAIFEKPEGTENRHLKPLYVNGFVNAKLMFKMMVDGGVAVNLMPYTTFRKLGRNADDLIKTNMILKDFGGNPSETKEVLNVELTIGSKTVPTTFFVIDGKGSYSLLLGRDWIHANCCIPSTMYQCLIQWQGDKIEIVPADRRRAQAVTLRASWRPCRYAEWVSNIVPIIKKNGKLRVFIDFSDLNKATPKDEYPMPIANQLVDAALRHKIISFMDGIAGYNQIFMAEEDIHKTTFRCPGAIGLYEWVVMTFGLKSAEATYQRAMNYIFHDLIDLLVEGMPFSLYLSADEKSIGSVLIQELEGKERAIFYLSRRLLHTETRYESPKAVKGLAIADFIVEHRDDSIGSVEIVPWTLFFDGSICTQGCGIGLVIISPRGAGFEFAYAIKPYATNNQLLKEVEADAVEIMGDSLLVISQLAGEYECKNDLLMIYTQKCRELMDSFWLVTLKHVSQGQNVEANDLAQGASVYKPMVKDIENPSQSASRKLHYKALKYTFLDDELYCRTIDGVLLKCLSADQAKVVMGEGSQDCQKFGAIQRAPASAMNPIIKPWPFRGWGIDMIGQINPPSSKGHKFILVATDYFTKWVEAIPLKKIDFGDAVQFVKEHIIYRYGIPQTITTDQGSIFVSDEFVQFADSMGIKLLNSSPYYAQANGQAEASNKSLIKLIKRNISDFSRQWHMRLAEALWSYRMACHGSIQVPPCKLVYGHEAVLPWETTIGSRRIGLQDNLTTDEYYNLMVDETEDLVWSRLRALAKMTKDKERIAYHYNKKVVPKSFSEGELVWKLILPIGTRDNKFGKWSPNWEGPFQIYKVVSKGAYMLQGLDGEVYGRALNGKYLKKYYPSVWINS

SEQ ID NO: 145172 - protein, 1117 aa, Oryza sativa
  unsure (1)..(1117): unsure at all Xaa locations
  Clone ID: PAT_MRT4530_45916C.1.pep
KIILGQSRSIRNDGLFRLLKLINIILNISLFDKIDKYITVFSFFYQILITHRKFSAAAHDKLLGGLLADGFDEGSCHSRYQSAMYRRNNAGKEPSPHLVSRLRRHEELQRRCGPGTAAYSNAVESLRSGKSGGIGSPPQTECRYLVSISYRGLGNRMLAAASAFLYAMLTDRVLLVDPSNEMGELFCEPFPGTTWLLPPGFPLTNFTSFSVDTTESYGNMLKNKVITTDALPAFAYIHLDHDYTFHDKFFFCDDDQSVLRNVPWLVMRTDSYIVPGLFLVTGFQAELDSLFPETDAVFHHLARYLFHPNNHIWGLVTRYYDAYLATARQRVGVQVRVFGARQESPKVLEQITACAHMENLLPDVITTGEPAATTRRRLKPKAVLVTSLTSWYYEKLKGMYWERATATGEAVGVHQPSHEEYQRFGSGSHDAKACAEIYLLSLSDALVTSGWSTFGYVAQGLAGLTPRVMYKPANESSAVPDPPCRRDVSMEPCFLTPPYNNCRMKRSAHSGKVVAFHMAYDGGVVXRMGCGVEFGRSPNLVRLVMXKFLSCTRGFPKVFRTLSMSLVRGFRLPTSLYFLKNNLFKIIFKCFNKXSESLKIFLNRVASLLQRVSLSFTRGSNEPRTYLLVTKSRASAIAGSKRDVLMGGLLVPGLDERTCASRYSSAMYRKNTARSPCRHLVKRLREQEALQRRCGPGTAAYWRAAERLGSRRNGTAGADDEGCKYLVLVPYRGLGNRMLAMASAFLYAMLTGRALLVDRGESLADLFCEPFPGTSWLLPPEFPIKNLQDLTGEAPESYRNLVQSDRPATSVSELPYVFVDLDHGCTYHDKLFYCDDERHFLHRAPWLLMRTDGYFPPALFLNPAYQDELDRLFPRKDSVFYLLAHYLLHPTNKVWGLITRFYDSYLRDSDERLGIQVRVFDGDTPFKHILDQITACTSQERLLPEVVEQEPSSFPAPAAAATAARSKAVLMTGLNSWYYDNIRSRYWQSPTATGEVVRVHQPSHEEHQLSGSTTHDMKAMAEMYLLSMTDAIVTSGWSTFGYVGHGLGGLSPWVMFKPENLTTPDPPCRRAVSMEPCLHGPPFYDCRVKRGADTGKLVPHVRHCEDMSWGLKLVHPE

SEQ ID NO: 145173 - protein, 72 aa, Oryza sativa
  Clone ID: PAT_MRT4530_45917C.1.pep
MSSASQVGQDTNKSRRKGLGYRDLTWNWFSISETSQTPLLSPELLSYWETLPIPDSLEGVEESHEQLQLNAI

SEQ ID NO: 145174 - protein, 591 aa, Oryza sativa
  Clone ID: PAT_MRT4530_45918C.1.pep
MGSGGAAAAAAAVPLRKEKQRSAAGRWPEVEDGVVPATAKRHVRRAWRCGVNVVLAAFVMVVPPMVILLDARGAGAPAVWISSVNAFRRGDGSILQWPAAAAARDKLLGGLLADGLDDGSCHSRYQSAMYRRNAGREPSPHLVSKLRRHEELQRRCGPGTAAYSDAVERLRSGKSGGIVSPSPEAECRYLVSISYRGLGNRILAAASAFLYAMLTDRVLLVDPSNEMDELFCEPFPGATWLLPPGFPLANYTSFSVETAESYGNMVKNKVITTDAGDAAPTTAQLPAFAYIHLDHTSTVEDKFFFCDEDQRAIRNIPWLVMRTDSYIVPGLFLVTGFQDELDSLFPETDAVFHHLGRYLFHPTNHVWGLVTRYYDAYLATAQQRVGIQVRVFGAQPESPKLLDQITTCTQKEKLLPEVIAAGEPPVVDVAPANSKSKAVLVTSLKSWYYEKMKSMYWEHATATGEAVSVHQPSHEEYQRFGARSHDGKAWAEIYLLSLSDALVTSGWSTFGYVAQGLAGLTPWVMHKPANDTAAAAGDDPPCRRDVSMEPCFHAPPFYDCRLKRGADTGKMVPHVRHCDDVQWGLKLVRRG

SEQ ID NO: 145175 - protein, 103 aa, Oryza sativa
  Clone ID: PAT_MRT4530_45919C.1.pep
MSLLNKLGPAGHRGPLDPLKPGLIRVVDLSFNMFRQNLPVLLIATDHRVARFTYTVEITARGVEKRIHRGDVDEEALSPSTDDESPRPLSRQRLEKLKGVGLA

SEQ ID NO: 145176 - protein, 159 aa, Oryza sativa
  unsure (1)..(159): unsure at all Xaa locations
  Clone ID: PAT_MRT4530_4591C.1.pep
MSVHFDYQRMRKIRGLLAELAIVEDEIFYLEKKVDDLRLRLHRERKWTDQCIFQQQQQNWPQNRHQRHSICSLGGRRELQGAELLPRLPCPXSDEALECESKASVGSVSSKGEEVEQIRRSSHSFENLKLPERKICLSGPNKLSEELIRLTVNIFHKLN

SEQ ID NO: 145177 - protein, 102 aa, Oryza sativa
  Clone ID: PAT_MRT4530_45920C.1.pep
MEPPSASPSSCRHLPYCRRPSLDLASYGPDLESSVEGEDGGWEGMTKGEVGGKEGMAEGEVRGRRCREPLSWARAASGIERRQWGGGAVERRRESYAGGQGK

SEQ ID NO: 145178 - protein, 81 aa, Oryza sativa
  Clone ID: PAT_MRT4530_45921C.1.pep
FEWQTIFNVCLKTIHSVVTRRLSDLNCFPLYRKRKGKVDWGKENKWSGTFLIIETWKGQCVAFSKLFWQCKSMVLLFFSFP

SEQ ID NO: 145179 - protein, 399 aa, Oryza sativa
  Clone ID: PAT_MRT4530_45922C.1.pep
MDQMAERQHKKRKPEKMAGARTSGHDKEEEKKVKAPSVYLVVGHEVSWATYSVFKVDPYAAAKRGGGGGDEEDPAPVPIPRRLARISAKFCMSFAPVPVRSWIVGVGGDSADEDYAPETIVFDTETRAVIRGPNLLSTKLHPVVLTIGHKIYALARYPSVTGQLDFVPWFEVLDLSQARVVDGHLESCEWKPLPRPPFFPWDLTPLQYLSPPMVTVESYVALASCILVSLSQQEGTHMFDVDKEQWSKLDDNSLPFVRGAVPHGPIFLGLSRAKKIITAYNITVVCQPRSGGTAPSLSIVEFPVVSDMEEEILSTPIFLSLGSPGFCSLKSWSDHPTTDDPCTRARIKLMAYHTEEPISQEYIESSHGLLIPNQWKQVYEICDSSRELIWQCLITAMSL

SEQ ID NO: 145180 - protein, 79 aa, Oryza sativa
  unsure (1)..(79): unsure at all Xaa locations
  Clone ID: PAT_MRT4530_45923C.1.pep
WLXLLILLPSSSXPSNXTTVDDDGDDLDLHGEASPPPLPASLPRSPTSPLTLAHRRRDRGDRGREGEVEVVGRPTIFFV

SEQ ID NO: 145181 - protein, 570 aa, Oryza sativa
  Clone ID: PAT_MRT4530_45924C.1.pep
IAGVEVEQLLRRFEPEKGDQPLAYARSVVEYCSYIALRVETKRHDYLSDSEFHSLTYDMMIAWEAPDDETDAALQKMSFSFVDGKDDDDCGSMFCLSPTQMAIQVDGRRTVSPEAFAKIIPACPAMAHAITVRNLFDALTNSTGGRLHFLIYHKYLKCLDKVLRFAKRISGGHKAPALQLSDGEVILDIYGAATTKPILQHIGTSTWPGRLTLTTHALYFEPVSVDFSYNEAVVYDLSRDLKQSIKRESTGPWGAQLFDKAVMYKSSSTREPVFFEFPQFKGHTRRDYWFAIIKEVLHAHKFIRKYRMINLHKAEALSVATLGILRYRTVKEGFHILPAHFKTTLAFNLAEKLPKGDKILEALYGQMKDYSSRFRVDEDSVQSSSDDLTLADPFPLSAYTLVNMGLLTLKEEDNPEEWDLTVRDVQTGGTSSVQMALERSVGYSGRVEAARATLDQVKVEDIDTNVAVLKFKEHEQSSSYNARGICDIRVPALEKHTCTDCAGSIHEAYAGEEEEQREVGEETERVVAANPSCSCTALEASGYQEMDIEVEIEMTHIGNVGTLHMYYMYL

SEQ ID NO: 145182 - protein, 693 aa, Oryza sativa
  unsure (1)..(693): unsure at all Xaa locations
  Clone ID: PAT_MRT4530_45925C.1.pep
GLLEDLLLAPRVDGGGGGDGEAMAAPDYAIPPLSPTAASVVHRCARIAGVEVEQLLRRFEPEKGDQPLAYARSVVEYCSYIALRVETKRHDYLSDSEFHSLTYDMMIAWEAPDDETDAALQKMSFSFVDGKDDDDCGSMFCLSPTQMAIQVDGRRTVSPEAFAKIIPACPAMAHAITVRNLFDALTNSTGGRLHFLIYHKYLKCLDKVLRFAKRISGGHKAPALQLSDGEVILDIYGAATTKPILQHIGTSTWPGRLTLTTHALYFEPVSVDFSYNEAVVYDLSRDLKQSIKRESTGPWGAQLFDKAVMYKSSSTREPVFFEFPQFKGHTRRDYWFAIIKEVLHAHKFIRKYRMINLHKAEALSVATLGILRYRTVKEGFHILPAHFKTTLAFNLAEKLPKGDKILEALYGQMKDYSSRFRVDEDSVQSSSDDLTLADPFPLSAYTLVNMGLLTLKEEDNPEEWDLTVRDVQTGGTSSVQMALERSVGYSGRVEAARATLDQVKVEDIDTNVAVLKELLFPLIEIGKRLLFLAEWEDPLKSYVFLFCFLFIVYRHTGNGQMIGAFEVTTPPRRRTVEQLLALQQAISQLEAQVQAGNIFLLKLRSLLLAAFPQHEXVAATMLVASAIFAYLPLRSILVLIVLEAYTRHMPARKKSSEKLVRRLREWWLRIPAAPVQLLRPQDTRRWTSRLRSR

SEQ ID NO: 145183 - protein, 97 aa, Oryza sativa
  Clone ID: PAT_MRT4530_45926C.1.pep
MFYFRPSQSFSTPLAANPSTYQINPSAAARRRRRSLAPSPSRPQPISPSTARFGEWPKVEEEKRERLTALGLEDSSDSIDNINQSQDIEQGKLPYTY

SEQ ID NO: 145184 - protein, 166 aa, Oryza sativa
  Clone ID: PAT_MRT4530_45927C.1.pep
MTRARARARAVRLAVSEIPLAVRRSARQQQQPPEPAADVPDHFLCPISLDMMRDPVTAPTGITYDRDGVEVWLERGRPTCPVTGRPLRPEELVPNHATRRMIQEWCVANRALGVERVPTPRVPVSAADAREILEGVAAAARRGDAAACGRMVARARALGKESERNR

SEQ ID NO: 145185 - protein, 96 aa, Oryza sativa
  unsure (1)..(96): unsure at all Xaa locations
  Clone ID: PAT_MRT4530_45928C.1.pep
NNKTKKKRSRKYRIKKKKXKNKRKKKEIKKKIDPPKXRKKKRKRIHPPPPTPKREKNKRXEKKKNNGNKTKKKKKRTLINKHKKQKQCRQSTQKLA

SEQ ID NO: 145186 - protein, 62 aa, Oryza sativa
  Clone ID: PAT_MRT4530_45929C.1.pep
IIRGCTHSRPTDLTIKLLITHGFNESLISTHAHHTNMGGQDCRLTKEGDLTEPSGRLLKDFT

SEQ ID NO: 145187 - protein, 303 aa, Oryza sativa
  Clone ID: PAT_MRT4530_4592C.1.pep
MSPLALRLFFAKQFFKILLPVPPILIVVKPWRINRQLCVCSEVKSSIKLHAAKSGKQMVSVRGNFNGSGSRQFHGSTQLNSISFPRQPLKDQPQPQVMANQTQTVEELLQQMRHRYQIYLMQQMQRQCQEPRQVHQPQMQVQVPARNLNQSQSQEFPISAPKTPVKVLSRSPKITSANSPSDQRKISATCYDCGEQGHYVRNGPWKMFARSPEKYKKQCPESNQAPSQSTDQKDGTLQPNSGANRTVKWKMDNGRTMIITSSEFTPEDAARIPKRQKGRNTFRGARQLTRHLIKYGPPRPEDD

SEQ ID NO: 145188 - protein, 60 aa, Oryza sativa
  Clone ID: PAT_MRT4530_45930C.1.pep
VISNTRGEDHGGEGQTQGVLTCRIRTNLKTRMRIHTKHTAVEACDLRAGYTLDSIRGNNT

SEQ ID NO: 145189 - protein, 830 aa, Oryza sativa
  Clone ID: PAT_MRT4530_45931C.1.pep
MGPDKWRSATGILSPLSHDDHGDIDEKALGQQGEVSDVHPEPGIIGGRWLKYWTEAGAVLSSVGLFEAQLSSGAFQLLGMAELGLLPSVFARRGPGRSATPWVAVAASAAVSVAVSFLGFDDVVATANLLYSLGALLEFAAFLRLRAREESPSSLKRPYRVPLPLPALAAMCLVPSAFLAYVVAVAGWRVSAVAAALTALGVGWHGAMRVCRSRKWLRFNTAVAADHRLQLQDAPPPPAVILQTNRHRARGTPSLPHLMDDVWPWLAGLAGEEPPPPQAVVALAAFADGTTSIVLQADHVALAEGDEEEKTLVDFSLALNSTNGGAARVLWTSGRFEAASGVALQRQLLARLLDEVITLSPSVSCLSGNLGLGVGGAPKSKLDEEIVAGIGNDSAASFFSLTLLLRLFWLCATEAPADTGFLFFQALGADIQRALVDCRPALALFLASLGPDVEERFMRSLGYMLAKLCLLREMQADADQPAPAATRRPRALPAACLSYATEVHGLWVLRGYAPVLAMPRVTCAASTTAPITALPHEAPEEPALRYGLVHQQLEVVAQLEYAVRARRGERFMTVAVRVDNVRVRVARLGFRRDDADADADGGDAHDDAMDGERHFPSRLRLWVGPRFGASYATGPSLGRSTGNPEQDVETTRTVKGAFAAAGATKLANGGVPPRIKAKTRSSARARNRSWRWEQEAEGSAGVFEGVLCDPATGTEISAWRGDNNNNNGGAGDPRNGMRRRYGGPGRAFSKMRGLVVAGDELPEEVTWRVGREAEGRTLPWRVGLKAWLTYLPNQVRSHHFETRCVEWAHEVDLPLAAVNGDERAFAPTLR

SEQ ID NO: 145190 - protein, 54 aa, Oryza sativa
  Clone ID: PAT_MRT4530_45932C.1.pep
TSWLKNIHNPVICRYDPEGLSQAIQASTRGTQSCCAKSDDLVVCTHEHVFQEIH

SEQ ID NO: 145191 - protein, 61 aa, Oryza sativa
  Clone ID: PAT_MRT4530_45933C.1.pep
KTGVTQHWQEDKMDIPNWPDRNRGPSHGNRNGLRVLSSNYEKKGFPRVTDKNLSCGGYITF

SEQ ID NO: 145192 - protein, 562 aa, Oryza sativa
  Clone ID: PAT_MRT4530_45934C.1.pep
MGGGAARRWRSGGCCSRLWLVLVVFATVTMLLRHRYDSGLGHGAAAVVRIEPVHRKVKPADRGGARPSFSDSGSAKPVTVDHKSATTDSSTGTESDGGGEPSSASSSLPAAAHPFSRALAAAGDKGDRCGGRYVYVQELPPRFNTDMVKNCVALFPWKDMCKFTANGGFGPPMSGGGGMFQETGWYNSDKYTVDIIFHERMRRYECLTDDPSLAAAVYVPFFAGLEVWRHLWGFNATARDAMALEVVDIITSRPEWRAMGGRDHFFTAGLITWDFRRLADGDAGWGSKLFSLPAIKNMTALVVEASPWHLNDAAIPFPTAFHPASDEAVFVWQDKVRRLERPWLFSFAGAARPGSAKSIRSELITQCRASSACSLMECRDGPSNKCGSAASYMRLFQSSTFCLQPQGDSYTRKSAFDAMLAGCIPVFFHPGTAYVQYTWHLPRNHADYSVYISEDDVRRNASIEERLRRIAPAAVERMRETVISLIPTVVYAQPSSRLDTMKDAFDVAVDAIVDKVTRLRRDIVDGRGEEEKLEMYSWKYPLLREGQKVEDPHEWDSLFAFA

SEQ ID NO: 145193 - protein, 43 aa, Oryza sativa
  unsure (1)..(43): unsure at all Xaa locations
  Clone ID: PAT_MRT4530_45935C.1.pep
LRSYALMQVTHDTXHLWFXMQGKPCKYSXPSCTAQSVSCXGNT

SEQ ID NO: 145194 - protein, 64 aa, Oryza sativa
  Clone ID: PAT_MRT4530_45936C.1.pep
MDTLLGSGRFLARRPPLALAPRCSRGSPEKGGGSDKDMICVVDHSSRVIQAPDSFDLLRLELDV

SEQ ID NO: 145195 - protein, 204 aa, Oryza sativa
  unsure (1)..(204): unsure at all Xaa locations
  Clone ID: PAT_MRT4530_45937C.1.pep
MAIKDRFTGNPGRLTVLTTSESTGGEGGRDGVGSAVVSGCPAVGFTAVQEGTAHCLLRGRGETXWCGWLGEGYAEGLVTVSPFAVSCSGGWLGLLQRGVALDSDWLILLNYYNCFTAFNFCFXMPALCKRTFSLLWIYPASYLLFRYDLLSTVGNTQSCSLFPHPRAEDLPSGSYFVDVGFIAAVKLRNSGSRISGLDMQSVIG

SEQ ID NO: 145196 - protein, 704 aa, Oryza sativa
  Clone ID: PAT_MRT4530_45938C.1.pep
MGCVCGRAAAVDDGRCGAAAEAAVAAGKGVGMGVGMVRREGEARKVQARVGGREEAAERRRAAAAAMAMAACRVRSPVPRAVEGEQVAAGWPPWLVSVAAEAVRGWVPRRAESFEKLDKIGQGTYSNVYRARDLEKEKIVALKKVRFDNLEPESVKFMAREILILRRLDHPNIIKLEGLVTSRMSCSLYLVFEYMEHDLAGLASFPGVKFTESQVKCYMQQLLCGLEHCHSRHILHRDIKGSNLLIDNRGILKIADFGLASFFDPEQRHPLTSRVVTLWYRPPELLLGATNYGVAVDLWSSGCILAELYAGKPIMPGRTEVEQLHKIFKLCGSPSEDYWRKSKLPHATIFKPQHPYARRVSETFKDFPPPAVALVDVLLSVDPADRGTASSALQSEFFATKPYACNPSSLPRYPPSKEFDAKRREEEARRQGIAGGKQHKYDPERRTRESRAVPAPDANAELVSSLQVDEKRQNQVNAKSRSEMFNPSKEDSASGFPIEPPRPTHPAESSQDSQRVYTRTFHSGPLVNQNKPSKAGRSENGDIHLSGVANASDFRVVVSTRSNIRSDNGNGTVVTQAEAFPHERRLSESINERFSSSGKYDQVFQQKDDRSSRVDGAIGYGSKGNKIHHSGPLICPSGNVDQMLKENDRQIQEVFRRTRVEKSRARRGHGHSGDGHHQFGLRPSDFGAAPVFPSSRSSYRAMQQ

SEQ ID NO: 145197 - protein, 138 aa, Oryza sativa
  unsure (1)..(138): unsure at all Xaa locations
  Clone ID: PAT_MRT4530_45939C.1.pep
WLLRGGGETLAWCGWLGEGYAEGLVTISPFAVSCSGXWLGLLQRGVALDSDWLILINYYNCFNVFNYYFXMAALCKXTPSLLWLYPASYLLFRYDLLSTVGSTQSCSLFPHTRAEDLPSWSCLVEVGFVVAVKLRNSG

SEQ ID NO: 145198 - protein, 105 aa, Oryza sativa
  Clone ID: PAT_MRT4530_4593C.1.pep
MPCVLVICHPRTLVHAFSPSSFSGELPSPRGLPSSLGLAPAPGHALPRGGLNSGNFHPFFLPATAALRSMIVYGRGGLAWPPQSEWKGRRGVYTRAHVCGCCLCA

SEQ ID NO: 145199 - protein, 98 aa, Oryza sativa
  unsure (1)..(98): unsure at all Xaa locations
  Clone ID: PAT_MRT4530_45940C.1.pep
MIATVRPSRKKEKKTKXEFEEEMEDAVEAAXASSSKKKTKGRSISQASRAKXREEEVLKAKRPFLEQHKENDGRPDXNMRVSEEIELPXKALQRFAKE

SEQ ID NO: 145200 - protein, 277 aa, Oryza sativa
  unsure (1)..(277): unsure at all Xaa locations
  Clone ID: PAT_MRT4530_45941C.1.pep
MAIKDRFTGNPGRLTVLTISGSTGGEGGRDGVGSAGVSGCPAAGFTTAQEGTAHCLLRGGGETLAWCGXSGEGYAEGLVTISPFAVSCTGGWLSLLQRGVALDSDWLILINYYKCFTXAFNFCFXMLALCKRTFSLLWLYPASYLLFRYDLLSTMGSTQSCSLFLHTRAEDLPSGSCFVEVGFVAAVKLRNSGSXFLGVTSNIQDKSRRPTSPMRGSDAISGRRCVRQAERTLYPAGRAASETXPPRRVVHAILQPKWCVFCLCVFLRFCVFSSSPV

SEQ ID NO: 145201 - protein, 264 aa, Oryza sativa
  unsure (1)..(264): unsure at all Xaa locations
  Clone ID: PAT_MRT4530_45942C.1.pep
MAIKDRFMRNPRRLTMLTTSGSTGGEGGRDGVGSARVSGCPAVGFTVAQEGTAHCLLRGGGETLAWCGWLGEGYAEGLVTISPFAVSCSGGWLGLLQRGVALDSDWLILLNLLQXCFTTFNYCFXMPAILQXTPSLLWLYPASYLLFRYDLLSTVGSTQSCFLFSHTRAEVLSSWRCLRKVVFVAAVKLRNSGSXFLGVTRLGSGQPPALLLSGSSSAGGGGGAVPPRQPHQAPEHPTAAVASLHDTRQQRLDVSFKKTKLTFF

SEQ ID NO: 145202 - protein, 193 aa, Oryza sativa
  unsure (1)..(193): unsure at all Xaa locations
  Clone ID: PAT_MRT4530_45943C.1.pep
MAIKDRFTGNPGRLTVLTTSGSTGGEGGHDGVGSAGVSGCPAAGFTAAQDGTAHCLLRGGGETLAWCGWLGEGYAEGLVTITPFAVSCLSGWLGLLQRGVALDNDWLILINYYNCFTAFNYCFXMPALCKXTLSLLWIYPASYLLFWYDLLSTVDSTQPCSLFPHTRAEDLPSWSCLIEVGFVAAVKLRNPGS

SEQ ID NO: 145203 - protein, 194 aa, Oryza sativa
  unsure (1)..(194): unsure at all Xaa locations
  Clone ID: PAT_MRT4530_45944C.1.pep
MAIKDRFTGNPGRLTVLTTSGSTGGEGGRDGVGSAGVSGCPAAGFTAAQEGTTHCLLRGEGETLAWCGWLGEGYAEGLVTISXFAVSCSGGWLGLLQRGVALDSDWLILLNYYNCFTAFNYFFXNDYFIAKEPLSLLWIYPASYLLFRYDLLSTVGSTQSCSLFPHTRAEDLHSWSRLVEVGFVAAVKLRNSGS

SEQ ID NO: 145204 - protein, 50 aa, Oryza sativa
  Clone ID: PAT_MRT4530_45945C.1.pep
MEVAQVQVYSARLHKGGSGTVVTRTVEVLDRRGGDGLGSKGMMAPWQHET

SEQ ID NO: 145205 - protein, 103 aa, Oryza sativa
  Clone ID: PAT_MRT4530_45946C.1.pep
MGSGKEGNGAPTKKTTLHDLYDLQGQAPGDHHLWRSGTDLVALIGRGGPGSTKHPLIFQKGLLNFNGFQGPVKAVILSWKGRKKRYWEPGIKGFPKGGQPFGA

SEQ ID NO: 145206 - protein, 151 aa, Oryza sativa
  unsure (1)..(151): unsure at all Xaa locations
  Clone ID: PAT_MRT4530_45947C.1.pep
MAFGSQAITTYLLGKPQQQLVERMKSQXQQIGWLAGPFAVAVDLLAPLFXLRHRPANAVVFDGVLPWAATAAAGLRIPRYAFTGMGCFALSVQRALLRHPPRVRPASDDEPFLVPGLPDVVRLFRPQPPEPCLRRREPLSLRRERGEGRES

SEQ ID NO: 145207 - protein, 226 aa, Oryza sativa
  unsure (1)..(226): unsure at all Xaa locations
  Clone ID: PAT_MRT4530_45948C.1.pep
MAIKDRFTGNPGRLTVLTTSGSTGGEGGHDGVGSAGVSGCPVAGFTTAQEGTAHCLFRGGGETLAWCGWLGEGYAEGLVTISPFAVLCSSGWLGLLQRGVALDSDWLILINYYNCFTAFNFCFXMLALCKXTPSLLWLYPTSYLLFRXVLLSTVGSTQPCSLFPHTRVEVLSSWSCIEEVDLIAAVKLRNSGSXISGRDKLVSEPTHVPAMHLTTVHLHRPRTGIL

SEQ ID NO: 145208 - protein, 194 aa, Oryza sativa
  unsure (1)..(194): unsure at all Xaa locations
  Clone ID: PAT_MRT4530_45949C.1.pep
MAIKDQFTGNPGRLTVLTTSGSTGGEGGRDRVGSAGVSGCPAARFIAAQEGTAHCLFRSGGETLAWCGWLGEGYAEGLVTISHFAVSCSGGWLGLLQRGVALDSNWLILINYYNCFIAFNYCFXISALLQMNPXSLLWLHPASYLLFRYDLLSTVGSTQSCSLFPHTRVEVLLSWRCLEEVGFVAAVKLRNSGS

SEQ ID NO: 145209 - protein, 74 aa, Oryza sativa
  Clone ID: PAT_MRT4530_4594C.1.pep
MVDGEVNSMQPSMSSTSLPSRSPPPPRLAFKLYSSSTPSIMDVPRAGEIKGSVLGEVKTGAAAVASLLGRHRHG

SEQ ID NO: 145210 - protein, 205 aa, Oryza sativa
  Clone ID: PAT_MRT4530_45950C.1.pep
MSTNAVIRRGLKKTRSPGHGFHPAAPLKGEERLINAPKRKNNARSTIVSPIDLKLSLHFSTTGHSLSVYGHRRANASCRQTSTCLCGIPAVISLPIVATPAVLPSPSPTLTSRRHPRRSSTTIIVSDKPPATTVYVPCRSTRSVVGAPVGSTIVIVHAQMCPSAPSPSSPMPMLPVVTVAVAEVRHMGKGDYLPCWRGQVLTEGR

SEQ ID NO: 145211 - protein, 86 aa, Oryza sativa
  Clone ID: PAT_MRT4530_45951C.1.pep
GDREREEREREEGGEVERGDGLPPPKKRIESRHGRQGQNANARPGASESATASLRGAGAGARVRTIRRRFPPPSFALSPLTSHTHT

SEQ ID NO: 145212 - protein, 187 aa, Oryza sativa
  unsure (1)..(187): unsure at all Xaa locations
  Clone ID: PAT_MRT4530_45952C.1.pep
MAIKDRFTGNPGRLTVLTTSGSTGGEGGRDGVGLAGLSGCPATGFTAAQEGTAHCFLRSGGETLAWCGWLGEGYVEGLVTISPFAVSCSGGWLGLLQRGVALDSDWLILINYYNCFTTFNYCFXMPALCKXTFSLLCLYPASYLLFQYDLLSTVGSTQSCSLFPHTRVEVLPSWSCLRKFGFVAAVK

SEQ ID NO: 145213 - protein, 234 aa, Oryza sativa
  Clone ID: PAT_MRT4530_45953C.1.pep
MALRALDNTLPMASAERPKKLPKLSAAAAAVVPAASPEGKRKKNDENSAPKATTEQAVEYVRSEDLQPVPHPKAKAAGLVAELDSKDWIRACDALNDARRLAIHHPSLLNPILGKVMLAIVKTMKSPRSAVCKTSIMACTDVFDSFGNLLSSASDDAFDKLLLQLLLKASQDKRFVAEEAEKAMRAMAASMPPLPLLRKLKAYVHHANLRVRAKAAVAMSQCASRMDVATMKEF

SEQ ID NO: 145214 - protein, 89 aa, Oryza sativa
  unsure (1)..(89): unsure at all Xaa locations
  Clone ID: PAT_MRT4530_45954C.1.pep
GNPARTKPTDPSIELGPKFKKGGWXLGPSKSIFSIVGLAPLKVSGHVGLASSIPLKARVTIXAQPGGKLEXIPDGAVIENKDFKGPRDL

SEQ ID NO: 145215 - protein, 189 aa, Oryza sativa
  unsure (1)..(189): unsure at all Xaa locations
  Clone ID: PAT_MRT4530_45955C.1.pep
MTVKDRFTGNPGRLTVLTTSGSTGGEGGRDGVGSAGVSGCPAAGFTAAQEGTAHCLLRGGGETLAWCGWLGEGLVTISPFAVSCSGGWLGLLQRGVALDSDWLILINYYSCFTAFNYCFXMLALCKRTPSLLWLYPTSYLLFRYDLLSTVGSTQSCSLFPHTRAEGLSSWSCLVEVGFVAAVKLRNSGS

SEQ ID NO: 145216 - protein, 198 aa, Oryza sativa
  Clone ID: PAT_MRT4530_45956C.1.pep
MASSPSSSFSSSPSAAGAAPASSSYWCYNCDPFVRAAPHKDSAVAYPNYAGGILEEMGAPPPCTAYFRHRAAADDRSPFNPVIVLCRSPAAVAAGDDDSLATVTSFELFYDDGVGSGLRPLPETMSDFLMGSAFERLLDQLTQIEAGGLSRARENPPASKASISMPRGRPLAQFNRRRGDRKSDGSGMVLILEISSDM

SEQ ID NO: 145217 - protein, 210 aa, Oryza sativa
  Clone ID: PAT_MRT4530_45957C.1.pep
MASSPSSSFSSSPSAAGAAPASSSYWCYNCDPFVRAAPHKDSAVAYPNYGGGILEEMGAPPPCTAYLRHPCAHHAKDLRLRRTCCADAVAAADDRSPFNPVIVLCRSPAAVAAGDDDSLATVTSFELFYDDGVGSGLRPLPETMSDFLMGSAFERLLDQLTQIEAGGLSRARENPPASKASISMPRGRPLAQCNCTAITRVSESTMLVPH

SEQ ID NO: 145218 - protein, 80 aa, Oryza sativa
  Clone ID: PAT_MRT4530_45958C.1.pep
MAARWYVVDTGEQRGVSGGMEATGMEESGGPGGTEDREAGGVGGPRHRQLGEGGGDGGGQPRGLVGVVNAARPTGETERW

SEQ ID NO: 145219 - protein, 86 aa, Oryza sativa
  Clone ID: PAT_MRT4530_45959C.1.pep
MTELVAPHRETAQAPLCRFGRGLRASGCLGRRGRGRSNPTPLGEIKRRADTSPSGPTSPRVPGHVGDCVCLKPLVTILPVPYHRQR

SEQ ID NO: 145220 - protein, 213 aa, Oryza sativa
  Clone ID: PAT_MRT4530_4595C.1.pep
MLGAAARPPATNASPGASPEPESESESGVPSIGTEDPCQNAVQIPEDNFSQATVKPKRSHYVRNCPWKVFARSLEKDEKQCPGSNQAPSQPTDKKDGTLQPNSGANRTVIWKMDNGWTMIITSSEFTPEDAARIPKRQRRKNTFRGARQLTRHLIKYGPPRPEDDESGERFSADDDDDDDDDDNDATLDSFRERELKFKACTRCGVVGHTDSL

SEQ ID NO: 145221 - protein, 118 aa, Oryza sativa
  unsure (1)..(118): unsure at all Xaa locations
  Clone ID: PAT_MRT4530_45960C.1.pep
XAGLTXXNRXVTXXVEXLKXXRVRAXAEVXXTXYXXLXRRXXYLTNXXPXFTFSVXXVSXXMQRPTTEXQQXLXRIXHYXXGTXXHGFXVPXXXARKGHFDXYXXXXQXXGIQXXXXT

SEQ ID NO: 145222 - protein, 266 aa, Oryza sativa
  Clone ID: PAT_MRT4530_45961C.1.pep
MRWRVAGSLEEVQQRVRWSGDGGAAAAALVQRWTAAAARIQLQVETTDNTEGVNSTPWAQPKRFIQKPARFVSPVVVGNPQPTTRISASIQLREFMLKNVDRLKSVKLLEIDSSVAYASDVVESFCNGNLTEGLFIDASSSMLFKDDMTIKPDTFGKRIFIPTNLLYLLNINLIKHNGVTQPFSADALDSRLEEFIRQINTSNAQLAYDGSRDPIETLNIPTNSTIVPSSILFQLVSSDHNLADPRHPEMAAFLGPSVGDASEQAS

SEQ ID NO: 145223 - protein, 1466 aa, Oryza sativa
  Clone ID: PAT_MRT4530_45962C.1.pep
MASKVRFTVGSNVWVEDADVAWIDGLVEQVTGDELIIRCTSGKKVTANVSSVYPKDAEAKRCGVEDMTRLAYLHEPGVLHNLKSRYGMNEIYTYTGNILIAVNPFQRLPHLYNNHMMEIYKGAGFGELSPHPFAIADRAYRYMMNYGVSQAILVSGESGAGKTESTKMLMQYLAFMGGKVQSGGRSVQQQVLESNPVLEAFGNAKTVRNNNSSYMSSHISFVSQCSRFGKFVEIQFDQSGKISGAAIRTYLLERSRVCQISDPERNYHCFYMLCSAPAEERERYKLGDPASFHYLNQSNCIKLDGMDDSSEYIATRRAMDIVGISSDEQDAIFRVVAAILHLGNVEFVEGSEADSSVPKDDKSKFHLRTASELFMCDEEALEESLCKRVIATRGESIVKNLDARAAALSRDALARIVYSRLFDWLVNKINTSIGQDPSSKLLIGVLDIYGFESFKTNSFEQFCINLTNEKLQQHFNQHVFKMEQEEYTKEEIDWSYIQFVDNQEILDLIEKKPGGIIALLDETCMLRNSTHETFAEKLYQQFKGNQHFSRPKFSRSDFTIHHYAGHVTYQTDLFLDKNIDYAVNEHQVLLHASRCSFVSSLFPPSEESTKSTKFTSIGSSFKQQLQALLETLSSVEPHYIRCIKPNNVLKPAIFENSNVLQQLRCGGVLEAIRISCLGYPTRRTFDEFVDRFGVLLPEVLDESYDEVTATEMLLEKVNLTGYQIGKTKVFLRAGQMAELDARRTEVLSSSASKIQRKVRSYLAHKHFIQLRLSATQLQAVCRGQIARHYYEDLRRKAATLTIQTYYRMHFARKNYRDLCSASTTVQSGLRGMAARKELQYRQQTKAAVIIQSYCRSYLAHSQYMGLKKAAITTQCAWRGRLARRELRKLKMAAKETGALQAAKNKLEKQVEELTWRLQLEKRMRVDMEEAKSQENKKLQQKLQELELQSNETKDLLKREQETAKAAWEKAALVPEVQVDTTLVNELTAENEKLKTLVASLETKIDETEQRFDEVKKAREELLKKATDAESKINGLTNTMLSLQEKLTNMELENQVLRQQALFRSPVRTIPENTSPKATPHGTPPASKEYGKFAQPRPSFFERQHESVDALINCVTENIGFSEGKPIAAITIYKCLVHWKIFETEKTSVFDRLIQIFGSAMQKHDSNEDLAYWLSTSSTLLIMLQKSLKAAGSSGGTPRKKPQTQSSFLGRMVFRSSNITVDMDLVRQIEAKYPAFLFKQQLTAFVEGLYGMIRDNVKKELSSLLSHAIQVPRIMKASMVPAIFMRKIFTQIFSFINAQLFNSLLVRHECCSFSNGEYVKQGLAQMEVWCGEVKPEYVGSALDELKHIRQAVGFLVIFKKFRISYDEIVNDLCPVLSVQQLYKICTQYWDDKYNTESVSEEVLDEMRTLITKESGQDSSENTFLLDDEISMPISLEEIGDSMDSKEFQHIAPPPELVAIPAFQFLKS

SEQ ID NO: 145224 - protein, 117 aa, Oryza sativa
  Clone ID: PAT_MRT4530_45963C.1.pep
QKVECNLYIHCPHKYLLLTSDKISISKTGIPSAYPASRSPSIYKLMASSVSIVLQYALCRACFWLQTYPTHWPDRSRHQIEKPKSALYSAQHFDVRNAPRSYLLLMHVHRLESQDGS

SEQ ID NO: 145225 - protein, 113 aa, Oryza sativa
  Clone ID: PAT_MRT4530_45964C.1.pep
MCRRGGVRRPEEGDPNANVRCLAASVCAMSWETLRYDGHVTARPPARARTNRATLQRNRWRYRKAQTKLSSRPGVSVLQQGNGPDEWRCYVTASILQWHIADSISSVTDYSPF

SEQ ID NO: 145226 - protein, 91 aa, Oryza sativa
  Clone ID: PAT_MRT4530_45965C.1.pep
GVSPCECAKVLALLGRPRSFGGTLSRKRPASGLMIACPPIVVRKIIRLYLPVSSPRVHFEPPPVAISLNKKKKKGGRPHRRLPADRRQHTS

SEQ ID NO: 145227 - protein, 37 aa, Oryza sativa
  Clone ID: PAT_MRT4530_45966C.1.pep
LTPPSMELGISRGALYPVVRLSQALYREGYMVMLFCF

SEQ ID NO: 145228 - protein, 700 aa, Oryza sativa
  Clone ID: PAT_MRT4530_45967C.1.pep
MSSSANPLGAPSAEHAEHLSNLVAIPSLAHENHYFLGPVGNPDPTEFIIGETNRIPFRLTNPDLGHWKNTFKSWPSLEKVPPEKSWTTWFKRVSASKRVHWDEIGIGQALDLTIANSAKDEHLMAAASYFWSNTTNAFLFNQGPMTPTLIDISMITDSAQLEHPVDFRFEDINHEVYQSCREIFSAAISPCILPVGIHQGRNIQASYEFYHPMSSARQLGMGQLPIGLFFADKIQCRGGISSTLMMDRLLSLQGPPLGSIDNIELATFRSKSFDRWWGEWKLHLFHQPASIYMTDLFPDVVPQTTESSPPHQSNSGKDIQYAPGLIPNGGGLSPPVIGYDAPKTSALLQGLVREPADASKKRKTRSSAVSIVAPIKKKKTKKSKPADDLPTLDPSIEQALDEEAIEDEVDQAVAEKKKTAVKKKSAAATSKPAPPPSPPPSPSVQQSSSDQTPSAAGSHHVEEEEQPAAPATLVLADLFSFDIRDYLDEGEEDTTSKALAPLSDDVKKTLGSILDRLEASSLNSLVVDCGSIKARLHEIQALILDELADILTPAVSLEQHQFKLEKAMLRLAERRERKDIEATIQANRQLVHEEKSKLDQLSEGLIKSNIDRLEARKIDLLTQLEECNAELDMEHKKLADLPKSIEEQKARLKSAIKHVAELTKSLKVIPRTDAQDAQAIEEVEQIRQKAISAIQRYLSR

SEQ ID NO: 145229 - protein, 68 aa, Oryza sativa
  Clone ID: PAT_MRT4530_45968C.1.pep
GWSPKKAPPFPGLSPTPRPPGWTPPPFPGLRTPLRNTAGATFSTRPVPLPPPCLGGARIKLIFSLGVN

SEQ ID NO: 145230 - protein, 48 aa, Oryza sativa
  Clone ID: PAT_MRT4530_45969C.1.pep
MGNIFVKKPKVTDVDRAILTLKTQRRKLAQFQQQLEKVIEAEKEAARQ

SEQ ID NO: 145231 - protein, 230 aa, Oryza sativa
  unsure (1)..(230): unsure at all Xaa locations
  Clone ID: PAT_MRT4530_4596C.1.pep
MAVDDISHNPSALPPILAPVDANHGRSNVARDVHKSLLVPVSAAKVHNQKPAPQDQASRFCRNCRKPGHCFSDCPLPRAAKAVRRDSQVISTAHDPNRHLNVQPPPQRIIVKGTVRGRIVPPAIVSSLQHQRQQGKQCKENNSSLQLQRGSMLLHQHPQQVSSAPGRSTVVSSSNAPRIAPIRRPIDKPPLGNPASKKSXPATAVKRVVTPPSKTNKQSNVPGETSASRN

SEQ ID NO: 145232 - protein, 312 aa, Oryza sativa
  Clone ID: PAT_MRT4530_45970C.1.pep
MSSSASPSGAPLVEYAEHLSHQVTIPSLTHENHYFLGPISTPDPTKFIIGETNRISFRLTNPDLGHWKNTFKSWPSLEKVPPEKSWTTWFERVSASKRVHWDEIGIGQALDLTIENSTKDEPLMAAASYFWSNTINVFLFNQGPMTPTLIDISMITGLDVTSSANPMSLNTNNHYDFKTKSIGAEALETKRQFPLGKILLGYLYQMLNNASAKIAVGSVVGAGDDGEERTHRRCTSYGEYASTPTDAGAKLSAELLKDWFCSFYEGFQKDARVSFLYEDSAELEHPLDFRFEDINHEIYQSSTEIFSAAISP

SEQ ID NO: 145233 - protein, 789 aa, Oryza sativa
  Clone ID: PAT_MRT4530_45971C.1.pep
MSSSASPPGAPSAEYAEHLSNLVAIPSLSHENHYFLGPVGNPDLTKFIIGETNRIPFRLTNPDLGHWKNTFKSWLSLEKVPPEKSWTTWFKRVSASKRVHWDEIGIGQALELTIANSAKDEPLMAAASYFWSNTTNAFLFNQGPMTPTLIDISMITGLDVTSSANPMSLNTKNQYDFKTKSIGGWSGYVAAYMGQGSVTPREHVAFLLMWLEKFLFCGSSCGPTTNWQFLAEALETKRQFPLGKIFLGYLYQMLSNASAKIAVGSVVGAGGPCFYEGFQKDARIWFLYEDSAQLEHPVDFRFEDINHKVYQSSREIFSAAISSCILPIGIHQGRNIQASYEFYHPISSARQLGMGQLPISLFFANKIQCRGGISSTLMMDRLLGLQGPPLGSIDNIELATFRSKSFDRWWGEWKLHLIHQPASMYMTDLFPDVVPQTTESSPPHQSNSGKDIQYAPGLIPNGGVLSPPVIGYDAPKTSALLQGLVREPADAGKKRKTRSSAVSIVAPIKKKKTKKTKPADDLPALDPSIEQALDEEVIEDEVDQAAAEKKKTAVKKKSAVTTSKPAPPPSPPPSPSVQQSSSDQTPSAAGSHHVEEEEQPVAPAIPVLADLFSFDIRDYLDEGEEDTTSKALAPLSDDVKITLGSILDRLEASSLDSLVVNCGSIRARLHEIQPLIPDELADILTLAVYLEQHQFKLEKAKLRLAERRERPIKSNIDRLEARKIDLLAQLEECNAELDMEHKKLADLPKSIEEQKARLKSSIKHVAELTKSLKVIPGTDAQDAQAIEEV

SEQ ID NO: 145234 - protein, 148 aa, Oryza sativa
  Clone ID: PAT_MRT4530_45972C.1.pep
GYPECSAFFFLGIPGGKGFPLLPVFFVLVDALCRSFFLHFFPGFWGVYSPRGLFGFFCSLAPPFSPRVFSVCFGLGFVGFSLFAPVPLLSGFVPVFPFLSFGGFWGAFGGLLGFSRCSRGFPRRYKLKKKKTKQKKKKKKKKKKKKKK

SEQ ID NO: 145235 - protein, 760 aa, Oryza sativa
  Clone ID: PAT_MRT4530_45973C.1.pep
MSSSASPSGAPSTEYVEHLSYQVAIPSLTHENHYSLGPIGNPDPTEFIIGETNRIPFRLTNPDLEKVPPEKSWTTWFKRVSASKRVHWDEIGIGQALDLTIANSAKDEPLMAAASYFWSNTINPFLFNQGLMTPTLIDISMITGLDVTSSANPMSLNTKNQYDFKTKSIGEKFLFCGSSCGPTTNWQFLAEALETKKQFPLDKILIGYLYHMLNNASAKIVVGSVVGVGGPWWLLQTWLNLIVMKVVTRPSVSEAEFPRLEPIVGDDGEERTHRRCTSYGEYASTPTEAGAKLSAELLKDWFCSFYEGFQKDAPVWFLYEDSAELEHPLDFRFEDVNHEVYQSSREIFSAAISPCILPVGIHQGRNIQASYEFYHPMSSARQLGMGQLPIGLFFADKIQCRGGISSTLMMDRLLNLQGPPLGSIDNIELATFRSRNFDRWWGEWKLHLFHQPASMYMTDLFLDVVPQTTESSPPHQSNSGKDIQYAPGLIPNGGGLSPLIIGYDAPKTSALLQGLIREPADAGKKRKTRSSAVNIAAPTKKKKTKKTKSADDLPTLDPSIEQALDEEIIEDEVDQATAEKKKTAVKKKSVAITSKPAPPPPPPPSPSVQQSSSDQTPSAVGSHHVEEEEQPAAPAIPVLADLFSFDIREYLDEGEEDTTSKALAPLSDDPFTLSKANRQLVHEEKSKLDQLSEGPIKSNIDRLEARKIELLAQLEECNAELDIEHKKLADLPKSIEEQKARLKTAIKHVADLTKSLKVIP

SEQ ID NO: 145236 - protein, 79 aa, Oryza sativa
  Clone ID: PAT_MRT4530_45974C.1.pep
MAAYNFKVNGRYKINAEDLPRLERRTSFDDTDITNVQRDLCHFIHHECCHVKGDFFDPEGALATSDEFKDLWEWNTAMP

SEQ ID NO: 145237 - protein, 170 aa, Oryza sativa
  Clone ID: PAT_MRT4530_45975C.1.pep
MAINGVAGAGAGDVDVDVDVDASAPPPPLHLVMFPWLAFGHLIPFLQLAKRLAARGHAAVTFLATPRNASRLAALPPELAAYVRVVSLPLPVLDGLPEGAESTADVPPEKVELLKKAFDGLAAPFAAFLADACAAGDREGRPDPFSRRPDWVVVDFAHGWLPPIADEHRV

SEQ ID NO: 145238 - protein, 350 aa, Oryza sativa
  Clone ID: PAT_MRT4530_45976C.1.pep
MALPRGVRSPKPMAAAAASASPPQPRPGHMLVLGTGFVGRYVSQRLLAQGWRVSGTCTSPAKKTELEMLGMDASIFDATSSRCCFFFFFLLFLFFVPSSLTNLRSLQDATHLLISIPPIPGIGDPLLSSHSNLQTTLSNSNLQWLCYLSSTSVYGDCGGAWVDEDHTVNPKTESVKLRYAAEKGWLNVIDDLDLSAFVFRLGGIYGPGRSAVDTIAKSKSLSRRQKSRESKQYTARIHVADICQAILASMSIRSARRIYNVVDDDPAPRSEVFAFARSLVERKHPGLIMDSVVLPATQDRIVAAEKRVSNARLKEELGVKLLHPTYKSGLQSILDSWSVESSFSNRNVDV

SEQ ID NO: 145239 - protein, 734 aa, Oryza sativa
  unsure (1)..(734): unsure at all Xaa locations
  Clone ID: PAT_MRT4530_45977C.1.pep
MSSSASPLGAPSAEYAEHLSNLVAIPSLAHESHYFLGPIGNPDPTEFIIGESNSIPFRLTNPDLASKRVHWDEIGIGQALDLTIANSAKDEPLMAAASYFWSNTTNAFLFNQGLMTPTLIDIIMITALETKRQFPLGKILLGYLNQMLSNASAKIAVGSVVGAGGPWWLLQTWLNLIVMKVVNRPSVSKTEFPRLEPIVDNDREERTHRRCTSYGEYASTPTDAGAKLLAELLKDWFCSFYEGFQKDARIWFLYEDSAQLEHPVDFRFKDINPEVYQSSKEIFSAAISPCVLPVGIHQGRNIQASYEFYHPMSSARQLGMGQLPIGLFFADKIQCRGGISSTLMMDRLLSLQGPPLGSIGNIELATFRSKTSMYMTDLFPDVVPQTTESSPPHQSNSGKDIQCAPGLIPNGGGLSPPVIGYDAPKTSTLLQGLVREPADAGKKRKTRSSAVSIIAPIKEKKTKKTKPADDLPTLDPSIEQALDEEAIGDEVDQAAAEKKKTAVKKKSAATTSKPASPPSPPPSPPVQQSSSDQTPLAAGSYHVEEEEQPAAPAIPVLADLFSFDIRDYLDEGEEDTTSKALAPLSDDVKKTLGNESADILTPAVYLEQHQFKLKKAKLRLAERRERKDIEATIQANRQLVHEEKSKLDQLSEGPIKSNIDRLEARKNELLAQLEECNAELDMEHKKLADLPKSIEEQKTRLKSAKXVAELTKSLKVIPGTDAQDAQAIEEIEQI

SEQ ID NO: 145240 - protein, 358 aa, Oryza sativa
  Clone ID: PAT_MRT4530_45978C.1.pep
MAAAAASALPPQPRPGHMLVFGTGLVARYVSQRLLAQGWPATYFPCSSILDRILLLLPPRVSGTCTSPAKKTELEMLGMDASIFDATSSRCCFFFFFLLFLFFVPSSLTNLRSLQDATHLLISIPPIPGIGDPLLSSHSNLQTTLSNSNLQWLCYLSSTSVYGDCGGAWVDEDHTVNPKTESVKLRYAAEKGWLNVIDDLDLSAFVFRLGGIYGPGRSAVDTIAKSKSLSRRQKSRESKQYTARIHVADICQAILASMSIRSARRIYNVVDDDPAPRSEVFAFARSLVERKHPGLIMDSVVLPATQDRIVAAEKRVSNARLKEELGVKLLHPTYKSGLQSILDSWSVESSFSNRNVDV

SEQ ID NO: 145241 - protein, 717 aa, Oryza sativa
  Clone ID: PAT_MRT4530_45979C.1.pep
MSSSASPSGAPSAEYAEHLSNLIAIPSLSHENHYFLGLVGNPDPTEFIVGETNRIPFRLTNPDLGPMTPTLIDISMITGLDVTSSANPMSLNTKNQYDFKTKSIGGWSGYVAAYMGQGSVTPREHVAFLLMWLEKFLLCGSSCGPTTNWQFLAEALETKRQFPLGKILLGYLYQMLNNASAKIAIGSVVGAGGPWWLLQTWLNLIVMKVVNRPSVSEAEFPRLEPIVGDDGEERTHRRCTSYGELLKDWFCSFYESFQKDARVWFLYEDSTELEHPLDFRFEDISHEVYQSSREIFSAAISPCILPVGIHQGRNIQASYEFYHPMSSAGQLGMGQLPIGLFFADKIQCRGEISSTLMMDRLLNLQGPPLGSIDNIELATFRSKNFDRWWGEWKLHLFHQPASMYMTDLFPDVVPQTTESSPPHQSNSGKDIQYAPGLIPNGGGLSPPVIGYDAPKTSALLQGLIREPADAGKKRKTRSLAVNIAAPTKKKKTKKTKPADDLPTLDSSIEQALDEEIIEDEVDQAAAEKKKTAVKKKSAATTSKPAPPPFPPPVQQSSSDQTSSAVGSHHVEEEEQPAAPAILVLADLFSFDIRDYLDEGEEDTTSKALAPLSDDVKKTLESPIKSNIDRLEAHKIELLAQLEECNAELDMEHKKLADLPKSIEEQKARLKSAIKHVADLTKSLKVIPRTDTQDAQAIEEVEQIRQKAISAIQRYLSQ

SEQ ID NO: 145242 - protein, 68 aa, Oryza sativa
  Clone ID: PAT_MRT4530_4597C.1.pep
MASRRLNCHSLHACSKSVEAFLSPARSRCQQHPRRGDGASAAQRRKVASSPHNGAALRHSYGPEQASP

SEQ ID NO: 145243 - protein, 669 aa, Oryza sativa
  unsure (1)..(669): unsure at all Xaa locations
  Clone ID: PAT_MRT4530_45980C.1.pep
MSSSASPLRAPSAEYAEHLSNLVVIPSLAHENHYFLXAQSAIQTPPSLLLVKPIXPLQINQPRSRSLEEYLQILAIPRESSTRKELDHMVQTYEPLMATASYFCCGPTTNWQFLAEALETKRQFPLGKILLGYLYQMLSNASAKIAVGSVVGAGGHWWLLQTWLNLIVMKVVNWPSVSETEFPRLEPIVDDDGEERTHRRCTSYGEYASTPTDAGAKLSAELLKDWFCSFYECFQKDARIWFLYEDSAQLEHPVDFRFEDINHETTESSPPHQSNSGKDIQYAPGLIPNGGGLSPPVIGYDAPKTSALLQGLVREPADAGKKRKTRSSAVSIIAPIKEKKTKKTKPADDLPTLDPSIEQALDEEAIGDEVDQAAAEKKKTAVKKKSAATTSKPASPSFSSFCVLACRFRRCEVCVPRLIPGRGFYAQISSEITSEFPGVTLQVLADLFSFDIRDYLDEGEEDTTSKALAPLSDDVKKTLGSILDRLEASSLDSLVVDCGSIRARLHEIQALIPDELADILTPAVYLEQHQFKLEKAKLRLAERRERKDIEATIQANRQLVHEEKSKLDQLSEGPIKSNIDRLEAPKIELLAQLEECNAELDMEHKKLADLPKSIEEQKTRLKSAIKHVAELTKSLKVIPGTDAHDAQAIEEVEQIRQKAISVIQRYLSL

SEQ ID NO: 145244 - protein, 896 aa, Oryza sativa
  unsure (1)..(896): unsure at all Xaa locations
  Clone ID: PAT_MRT4530_45981C.1.pep
MSSSASPSGALSAEYTEHISHQVAIPSLTHENHYFLGPIGNPDPTEFIIGEINRIPFRLTNPDLGHWKNTFKSWPSLEKVPPEKSWTTWFKRVSASKRVYWDEIGIGQALDLTIANSAKDEPLMAAASYFWSNTINAFLFNQGPMTPTLIDISMITGLDVTSSANPMSLNTKNQYDFKTKSIGGWSGYVAAYMGQGSVTPQEHVAFLLMWLEKFLFCGSSCGPTTNWQFLAEALETKRQISLGKILLGYLYQMLNNASAKIAVGSVVGAGGPWWLLQTWLNLIVMKVVNRPSVSEAKFPRLEPIVGDDGEESTHRRCTSYGEYASTPTDAGAKLSAELLKDWFCSFYEGFQKDARVWFLYEDSAELEHPLDFRFEDINHEIYQSSRKIFSAVISPCILPVGIHXGRNIQAYEFYHPMSSARXLGMGQLPIGLFFADKIQYRGEISSTLMMDRLLNLQGPPLGSIDNIELAMFRSKNFDRWWGEWKLHLFHQAASMYMTDLFPDVVPQTTESSPPRQSNSGKDIQYAPGLIPNGGGLSPPVIGYDAPKTSALLQGLIREPADTGKKRKTRSSAVSITAPTKKKKTKKTKPADDLPTLDPSIEQALDEEIFEDEVDQATAEVSDTERTSSDNYFVXSRSLPGLVXQKKNTTVKKKSAATTSKPAPPPSPPPSPPAQQSSSDQTPSAVGSHHIEEEEQPAAPAIPVLADLFSFDIGDYLDEGEEDTTSKALAPLSDDVKKTLESILDRLEASSLDSLVVDCGSIRARLHEIQALIPDELADILTPAXTLSNTNSNWKDQLSEGPIKSNIDRLEARKIELLAQLEECNAELDMEHKKLADLPKSIEEQKARLKSAIKHVADLTKSLKVIPGTNAQDAQAIEEVEQIRQKAISAIQRYLSQ

SEQ ID NO: 145245 - protein, 68 aa, Oryza sativa
  Clone ID: PAT_MRT4530_45982C.1.pep
KKPDSQEEQGQTGALRKIASDRRENANPGNVLRADGWGEGASPQSGEPRRRRGKGRRGRREEEDHLVL

SEQ ID NO: 145246 - protein, 911 aa, Oryza sativa
  Clone ID: PAT_MRT4530_45983C.1.pep
MSSSTNPSGAPSAEYAEHLSNLVAIPSLSHENHYFLGPVGNPDPTEFIIGETNRIPFRLTNLDLNRWKNTFKSWPSLEKVPPEKSWTTWFKRVSASKRVHWDEVGIGQALDLTIANSAKDEPLMAAASYFWSNTINAFLFNQGPMTPTLIDIIMISDLDVISSANPMSLNTKNQYDFKTKSIGGWSGYVVAYMGQGSVTPREHVAFLLMWLEKYLFCGSSCGPTTNWQFLAEALETKRQFPLGKILLGYLYQMLNNASAKIAVGSVVGAGGPWWLLQSWLNLIVMKVVNRPSVSEAEFPRLEPIVGDDGEERTHRRCTSYGEYASTPTDAGAKLSAELLKDWFCSFYESFQKDARVWFLYEDSAELEHPVDFRFEDINHEVYQSSREIFSVAISPCILPVGIHQGRNIKASYEFYHPMSSARQLGMGQLPIGLFFADKIQCRGEISSTLMMDQLLSLQGPPLGSIDNIELATFGSKSFDRWWGEWKLHLFHQPASMYMTDLFPDVVPQTTESSPPHQSNSGKDIQYAPGLIPNGGGLSPPVIGYDAPKTSALLQGLVREPADAGKKRKTRSSAVSVVAPTKKTKTKKTKSTDDLPTLDPSIEQALDEEIIEDEVDQATAEVSDAERTPSASPKQTPPTPSAPVHFSRKKKTAVKKKSAATTSKPIPPPSPPPSPPVQQSSSDQTPSAVGSHHVEEKEQPATPAIPVLADLFSFNIRDYLDEGEEDTMSKALAPLSDDVKKNSRKARLHEIQVLIPDELADMLTPAVYLEQHQFKLEKAKLRLAERRERKDIEATIQVNRQLVHEEKSKLDQLSEGPIKSNIDRLEARKIELLAQLEECNAKLDMEHKKLANLPKSIEEQTARLKSAIRHVADLTKSLKVIPGTDAQDAQAIEEVEQIRQKAISAIQRYLSQ

SEQ ID NO: 145247 - protein, 55 aa, Oryza sativa
  Clone ID: PAT_MRT4530_45984C.1.pep
MGSFRQWWRRVAAAVKDRRSVLLARGDPRDEPRRAVGGLPERRAGVPVGADLAVA

SEQ ID NO: 145248 - protein, 123 aa, Oryza sativa
  Clone ID: PAT_MRT4530_45985C.1.pep
AAACLLKRGVALDSDWLILINYYSSFTAFNYCFEMPALCKRTPSFLWLYPASYLLFRYDLLSTVGSTQSCSLFPHTRVEVLLSWSYLREVGFVTAVKLKNSGSRISGCDNRSLDLERPRPQGR

SEQ ID NO: 145249 - protein, 438 aa, Oryza sativa
  unsure (1)..(438): unsure at all Xaa locations
  Clone ID: PAT_MRT4530_45986C.1.pep
MAVKDRFTGNLVRLTVLTTSESTGGEGGRDGVGSVGVSGCPAAGFTAAHEGTAHCLLRGGGETLAWCEWLGAGYTKGLVTISPFVVPCSGGWLGLLQLGVALDIDWLILINFYNCFTTFNYCFXMQALCKRISSLLWLYPASYLLFRYDLLSTVGSTQSCSLFPHTRAGDLPSGSCLVEVGLVAAIKLRNSGSXISGRDSCHLHCLRPAALSTSAFGMYSGPLAGDSIPQAILDGSDETNLFESSSTGKDFNSGNGQPPFRAAVNPAADQPDTPADPTPSRPPSPGDGNRRREAAADGAKTAAAAEAAARATLAVALRGGRRGKGRERKRGRPILTEGLGRREGGATANSNDERREDDGDGLREDLERRLGGVREREVVHGARHNRSKAAAMGGSSPEREEKQAPAARLTGETADGVAHKLANPAASTAQCGDGSSGC

SEQ ID NO: 145250 - protein, 62 aa, Oryza sativa
  Clone ID: PAT_MRT4530_45987C.1.pep
LICAAGLLAALGGCATYDYAGGGEGGYYRGAPSVEYRYPAGYSEYYSGKELKRKIIKEKKKK

SEQ ID NO: 145251 - protein, 231 aa, Oryza sativa
  unsure (1)..(231): unsure at all Xaa locations
  Clone ID: PAT_MRT4530_45988C.1.pep
MAIKDRFTGNPGRLTVLTTSRSTSGEGGRDGVGSAGVSGCPTAGFTAAQEGTAHCLLRGGGETLAWCGWLGEGYAEGLVTISPFAVSCSGGWLGLLQRGVALDSDWLILINYYSCFTAFNYCFXMLALCKRTPSLLWLYPASYHLFRYDLLSTVGSTQSCSLFPHTRVEVLLSWSRLREVGFVAAVKLRNSGSXISGRDKIDLRCVRLPGFKLGGLGRCSGHQAKSYWTIH

SEQ ID NO: 145252 - protein, 285 aa, Oryza sativa
  unsure (1)..(285): unsure at all Xaa locations
  Clone ID: PAT_MRT4530_4598C.1.pep
MPSSLSQATRCAAPLPCRCDTRSSSPVVVVAPAATSPPLPPLPSRRPLLSPSPAVGRLSPPLPPPPLRRWPPLSPLSPRPPPPPQXPVFTPRPRFPVTLAPPFFPPLLFFSIPVSAPFPFPPFLISPLXFSPFFLCYPLPVFPAVSSLFPASPPPPPPRFPSPPSPLCPPESPPPPFPSFLSRVFRSGPFCSSPPPSLSPPPDSRPPPPXSPFPVIFPRCSPAPPGLSRPVSAISXRPPFCRSTSPFPPFLDRPPSPPPPALFLFRPPSPSFFYRSSAGLSFPCV

SEQ ID NO: 145253 - protein, 269 aa, Oryza sativa
  Clone ID: PAT_MRT4530_45990C.1.pep
MAVKDRFTGNPGRLTVLTTSGSTGGEGGRDGVGSAEVFGCPAAGFTAAQEGTAHCLLRGGGETLAWCGWLGEGYVEGLVTISPFAVSCSGGWLGLLQRGVALDSDWLILINYYSCFTAFNYCFEMPALCKRTPSFLWLYPASYLIFRYDLLSTVGSTQSCSLFPHTRVEVLLSWSRLREVGFVAAVKLRNSGSRISGCDIPGAARGASSETAAEWLSPSSSSMCSSSIWFEDAASLWRPLPRPLPRPPARPLPRPLLVILTITDKIRKR

SEQ ID NO: 145254 - protein, 144 aa, Oryza sativa
  Clone ID: PAT_MRT4530_45991C.1.pep
KMRTQNMAQSVARKQRRDCGGFPAHLLHVVLVSRQHRPPPHSRHPPRPRPRRPRSRRADAQLTGQGSNPAASTHHPKTRRGNGAPTPGTARGNRIGGSRGKPRKMERGTRRDETMGVLEAISVSLFDSGGGLLVLNAGLVMDVV

SEQ ID NO: 145255 - protein, 229 aa, Oryza sativa
  unsure (1)..(229): unsure at all Xaa locations
  Clone ID: PAT_MRT4530_45992C.1.pep
MAVKDRFTGNPGRLTVLTTSGSTGGEGGRDGVGSAGVSGCPAAGFTAAQEGTAHCLLRGGGETLAWCGWLGEGYVEGLVTISPFAVSCSGGWLXGLLQRGVALDSDWLILINXYYSCFTTFNYCFXMLALCKRTSSLLWLYPASYLLFRYDLLSTVGSTQSCSLFPHTRAEDLPSWSCFVKVGFVAAVKLRNSGSXISGRDTYFLFIRNPAAMNTTGGSSSANASRPIP

SEQ ID NO: 145256 - protein, 110 aa, Oryza sativa
  Clone ID: PAT_MRT4530_45993C.1.pep
SAWHSVRVALVLVPHALHLGARLALFALRILRRRTTSSSLLGRSGSECCRLLAGLPSLHPVAVGSRTGGRPPGPVVQLSCSRVVVTGQAPKHEDLPRVQPPVLTCRIDGH

SEQ ID NO: 145257 - protein, 243 aa, Oryza sativa
  unsure (1)..(243): unsure at all Xaa locations
  Clone ID: PAT_MRT4530_45994C.1.pep
GDPLSPMLFILVMDVLNAMLRHASDSGGFLPLNDRALQHRASLYADDLVLFFSPIHQDLEFIQGILYVFGAASRTLAGHSVLVQTVLSSIPVHVSMAIGLPVXLLRPFTRSVAPSVSDMFMASTFFLLGNGESMLFWSDQRIDGRSVASLALDLLFVVPQCLRGSRTVASGLXNNSWVSDIRGALTIPVISQFLLIWDAVLHVQHAFFYGQHSFAYADLLWNAKGPEHLRDNFDSLVRLVSLH

SEQ ID NO: 145258 - protein, 78 aa, Oryza sativa
  Clone ID: PAT_MRT4530_45995C.1.pep
ETIETSRKRDGQFSELSTNSFLTRSSSGAAVEKKVATVLPLASVLFCYLLSKFVQNRQSRTMFTSNDNVGYIKKKKKK

SEQ ID NO: 145259 - protein, 333 aa, Oryza sativa
  Clone ID: PAT_MRT4530_45996C.1.pep
YPRCPHYPGHLPISPYLGCGASCTALAGCQGSSHLTSSAGRLISSRSVASIVTRPAPFALRILRRRTTSSSLLGRSGSECCRLLAGLPSLHPVAVGSRTGGRPPGPAYLSTSATASTPWSSWSLGVCGRSGTLGFRLRSLFGPSVVPRQRVIKDRAVHVQSPFRAGEELNFVNALTRTDLLNPDWPASSTRAWGPVVQLSCSRVVVTGQAPKHEDLPRVQPPVLTCRIDGHASWRGQVQATDSRVAGDDKPGQPPTRSGAAQLLVRVRACTPPAAGRPVGPPPPQLVAPSDCHVKLIVNSLGHHICMMGISDVGLTFPTNDGWVTRNSSSCRQ

SEQ ID NO: 145260 - protein, 75 aa, Oryza sativa
  Clone ID: PAT_MRT4530_45997C.1.pep
STKFVKAPRHCPAKSEGWSQIEPLAFRKTNPRLGFILLKEGLRKWGMLLGIFPLRLIRGFVPLPKRVFPSPMEKT

SEQ ID NO: 145261 - protein, 120 aa, Oryza sativa
  Clone ID: PAT_MRT4530_45998C.1.pep
MAGIAFPPIAPIAAATGVDSGEIRRLRWSTAQGITRRRIGTRRTRYRGENAGEVPNWTSRGKGFSTAGTGLGAGKERGHRAAGKARGHGHGSAIGPCHALARPKLRALGWAVGLRPYGYL

SEQ ID NO: 145262 - protein, 342 aa, Oryza sativa
  Clone ID: PAT_MRT4530_4599C.1.pep
MATLGLAPNMNPNKSFEVLPNPGDSVSSLSFSPKSNLLVATSWDNQVRCWEIVGGSSQPKASISHDQPVLCSAWKDDGTTVFSGGCDKQVKMWPLLSGGQAQTVAMHDAPVKEIAWIPQMNLLVSGSWDKTLRYWDTRQSNPVHVQQLPERCYALTVNYPLMIVGTADRNLVVFNLQNPQTEFKRIQSPLKYQTRCLAAFPDQQGFLVGSIEGRVGVHHIDDSQQSKNFTFKCHREGNDIFSVNSLNFHPVHHTFATAGSDGAFNFWDKDSKQRLKAFSRCPLPIPCSTFNSDGSIFAYAVCYDWSRGAENHNPATAKTSIYLHSPQESEVKGKPRIATSRK

SEQ ID NO: 145263 - protein, 208 aa, Oryza sativa
  Clone ID: PAT_MRT4530_459C.1.pep
MADGAIDSSEVQLSTNAHPSHTYTVRPSQIEVELRQELANFKHQRQEDCQSIQNALSEFNNQTKEYMINGSASTPPPQINLAALFPSHSSPTTQQNTTNNSSRNVFNQIDGNNSGNCSQQDAGLSNNEQGDMGNNSENVVLQRMDGSTFGYSSQQTAPATNQGNSKRGRDGDYVDSEDDYADDGNYDDADETPEPFVAAVIVDYPCTK

SEQ ID NO: 145264 - protein, 355 aa, Oryza sativa
  Clone ID: PAT_MRT4530_45C.1.pep
MAAAAATAPAAAVVRRMKLGSQGMEVSAQGLGCMGMSAVYGERKPEADMVALVRHAVAAGVTFLDTSDVYGPHTNEVLVGKAVAAAAATEEEVQVQVATKFGITPAWEVRGDPAYVRAACEGSLRRLGVGCIDLYYQHRIDSTVPVEITMGELKKLVEEGKIKYIGLSEASASTIRRAHVVHPITAVQIEWSLWSRDVEEDIVPTCRELGIGIVAYSPLGRGFFSSGAKLVDELPDDDFRKSLPRFQPENLEKNAAIFEKVNAMAARKGCTSSQLALAWVHHQGSDVCPIPGTTKIHNFDQNVGALSVKLTPDEMSELESYASADVVQGDRYHGTFLNTWKNSETPPLSSWRSGN

SEQ ID NO: 145265 - protein, 83 aa, Oryza sativa
  unsure (1)..(83): unsure at all Xaa locations
  Clone ID: PAT_MRT4530_46000C.1.pep
PPPPPQTKPGKLLPRKAHXXXLXPHXLXARVHDXWHXXLXLALPIGASIKLCRGAARCEGEEKEDDKHLHTRRRPIDRAVRCR

SEQ ID NO: 145266 - protein, 183 aa, Oryza sativa
  Clone ID: PAT_MRT4530_46001C.1.pep
MPRRCLMAHATRGFTLILSIFLKKNIRSEKGKNKLSTSTSTTLRAGAQAVHFFPVDTTRRNHLKPDGTRPDYFVGNNLCLDPSSPPRSINQPIQADADADADPSKKSTATPTQVYENLIKDQLFPFRSERGEKDGTNQSSVMNGKEGHIKEKKNPQIRTTSYGCTDEFQFTIVCLMQITPRNR

SEQ ID NO: 145267 - protein, 214 aa, Oryza sativa
  unsure (1)..(214): unsure at all Xaa locations
  Clone ID: PAT_MRT4530_46002C.1.pep
RTPTCGSAWTSARRTSRRPSPTSTTPRAASSTSTPSSRTCGCSWTSPRGTRGRARRAAGTRRTPPSRPPCSTRTRRSRSSCGSPARSSRWSSERPASRRRSPXPPPTTDSSPPTPSAPATPAAPTVRKGGPVRRCPPPVLPSPHRPPHPPPCRSHHRERQIHPPPPTAGAPESASTTTSAAAATTSTSYAEGRMGRRGGPGGGAVGGDEAGDGG

SEQ ID NO: 145268 - protein, 64 aa, Oryza sativa
  Clone ID: PAT_MRT4530_46003C.1.pep
AMIDMAGYIHISCKRNHARSEHPDARRLTFIRDGLRHRYSDMVHIPWATASWQLCCTLYVMCSS

SEQ ID NO: 145269 - protein, 184 aa, Oryza sativa
  unsure (1)..(184): unsure at all Xaa locations
  Clone ID: PAT_MRT4530_46004C.1.pep
TRALFYRSFLAPTPVSSPLAPRAPPHFLVCAGCAPGAALSWPFTQRFAPARHLSPRGRCCPPHADRQYLAALLAEHQKLGPFMQVLPICTKLLSQEIMRVSSIVHNHGFGDFDRHRFRSPSPMSSPNPRSNRSXNGFSPWNGLHQERIRXPQGPSMDLQGAPPGPSSHVVKSLPRLVVPLGPYP

SEQ ID NO: 145270 - protein, 121 aa, Oryza sativa
  Clone ID: PAT_MRT4530_46005C.1.pep
MASNGCGGGHSGQPAKVAAAGEARQCICSPTTHEGSFRCRLHRRGGMPRSASCQQLQLGAESSPLLCSAAAMRRSASQLQFANQHPLDPGMSRSASEKELPPCAGVPRSASWQDFAQKEDH

SEQ ID NO: 145271 - protein, 230 aa, Oryza sativa
  Clone ID: PAT_MRT4530_46006C.1.pep
MADTDKPGVMYDDINGCEAQKQELREGVKLPLTHPVLLHGPPGAGKSMRAKVIVCETSDTAIVFIDEVDAIVAGRLRSGGSGWDPPAKSTLQTRALSPFGSLYRAPLPNCSPRSLRRCPRSLPIPQRNRARAPTPCAAPPPATPAPPTPPSLLVYHRIATPAPDDASASPHSSPSATTAGLRELAPDDATLRRAADVATGSWELAPDDTTPRRAATDHPAVAEGCLKALN

SEQ ID NO: 145272 - protein, 123 aa, Oryza sativa
  Clone ID: PAT_MRT4530_46007C.1.pep
LTLTKCWWFVLGSCQRRFAWLHIAMTTRGLCYPRLITLSVSLFILANLVVDLMMITVLRDIVCEDAVMFLRLRWEVSRSLSVGCDKSPRCQWKVFAISLLVAINPAVSGWNLGALGCVSLSCS

SEQ ID NO: 145273 - protein, 92 aa, Oryza sativa
  Clone ID: PAT_MRT4530_46008C.1.pep
MAPNDAGGVAKEAPGPRTERARRRPPMQRVYAFQFMLLGATAIIGVYAEPVSSLPRLFLALAIKIIDPKAQSIPCKSRGFNCGYNEFESLMN

SEQ ID NO: 145274 - protein, 91 aa, Oryza sativa
  unsure (1)..(91): unsure at all Xaa locations
  Clone ID: PAT_MRT4530_46009C.1.pep
MLTRVPDLPKGSNRXRFGRSHDTVRSGFXNKHALEPRNRSTTSPLVITRVETRKTPKYDDAAPEXIMDVKLFGRFPLTWKEFERGTRTIGK

SEQ ID NO: 145275 - protein, 366 aa, Oryza sativa
  Clone ID: PAT_MRT4530_4600C.1.pep
MSSSASCLAPPPLRLPCSSSSSPSPAAAARFGSRRRAVAAAAPAKGWRLVRVSCFRQEDVPTTSDDGPGFEHISRPESSRGAEASGEEGEGEGEGSSGQRERGSGERDDWFLRAQEIKRNLRERIFRFQTQRWTVPWTGKTIAQVMILWIATFWFVGSWIVPFLAHAAGFSKESLTHRGQALYSLLTDITEGLAGIAILHHCLGRFRPLPPGWFEFNLKGRWYLDVALGCLLFPLVNFLSHININLIPMSSGPVPGVSSVEQSIVARDPVAMVLYAVVVTVCAPIWEEIVFRGFLLPSLTRYMPLPWSILVSAAAFALAHFNAQRVMPLVFLGVVMGGVFARSRNLLASMVLHSLWNGFVFLDLMK

SEQ ID NO: 145276 - protein, 65 aa, Oryza sativa
  unsure (1)..(65): unsure at all Xaa locations
  Clone ID: PAT_MRT4530_46010C.1.pep
IPRNYSIKISLHYEEQHITAVWXSYLTVKFEEHRKPVDVEVAVSACQVPRQRTQVAWVRFIIRAS

SEQ ID NO: 145277 - protein, 57 aa, Oryza sativa
  Clone ID: PAT_MRT4530_46011C.1.pep
TQKVCKAYQTARCCRSSVVMSPGARTVRLMACDTKYHICFHLLHVIPVQPLAIVHRV

SEQ ID NO: 145278 - protein, 45 aa, Oryza sativa
  Clone ID: PAT_MRT4530_46012C.1.pep
GRGQGGVVRQSAREQVQLWPRRCPAGGRCGAGANKGERRGSWFYL

SEQ ID NO: 145279 - protein, 157 aa, Oryza sativa
  Clone ID: PAT_MRT4530_46013C.1.pep
MQASRARLFKEYKEVQREKSADPDIQLICDDSNIFKWTALIKGPSETPFEGGVFQLAFSIPEQYPLLPPQVRFLTKIFHPNVHFKTGEICLDILKNAWSPAWTLQSVCRAIIALMAHPEPDSPLNCDSGNLLRSGDIRGYQSMARMYTRLAAMPKKG

SEQ ID NO: 145280 - protein, 360 aa, Oryza sativa
  unsure (1)..(360): unsure at all Xaa locations
  Clone ID: PAT_MRT4530_46014C.1.pep
MQALVSSNRRPLAIVVAAPVLQMLLIAALLHLGSCNGGDRIERLPGQPEVSFGQYAGYVGVDDKGQRALFYYFVEAELDPATKPLVLWLNGGPGCSSLGVGAFSENGPFRPSGQVLVKNEYSWNKEANVIYLETPAGVGYSYSADAAYYQGVDDKMTAMDNMVFLQRWLEKFPQYKGRELYISGESYAGHYIPQLADVMVEFNKKNKIFNLKGIALGNPVLEFTTDFNSRAEYFWSHGLISDSTYRIFTSVCNYSRYVTEYYGGSLTPLCARVMNQVTRETSRFVDKYDVTLDVCLSSVLSQSKILTPHQQVGQRIDVCVEDETVNYLNREXDCREALHAKLIGERXWAVCSSVLEYELL

SEQ ID NO: 145281 - protein, 546 aa, Oryza sativa
  unsure (1)..(546): unsure at all Xaa locations
  Clone ID: PAT_MRT4530_46015C.1.pep
MAGVAFRLGQRVHAAGDPARVGTVRYLGPVDGHPGDWLGVDWDAGPGGRHDGSLAGRRYFAAAGERSASFARPTALSAGITLPDAIRNSYRVEEFMKEDQDEMYVFSSSQNRVAXNWLKSVKFRXQLKNLNDLSRGCVSYMGISTIGSVNELTNRCGHFXGSLNLVTSFPGVRLSDNPVTDPAQGKVPXLTDNRLTNXVKTLNGSKITPRERREAEIRYVRLVMGKADSYDPEEIKRLHPRFAELKAFHGIEDEKPSSKXLLVLKKVASGLISNEIVKLSYLRSLEQLHLNKNMLKHVTYPSNPPPLGSLGDAAVLPFEKLRVLLLGSNQIDEVLSVDSLNLFPSLTLWLSTPILISTFLKDVRLSDNPVADPAKGGVPRFVLIARLGKVKILNGSEISPRERREAEIRYVRLVMGKAESYDPEEIKRLHPRFAELKAFHGIEDEKPSSRTSGPQKMASGLISITLKCVGPSMGEKQPLTKKLPPATTVGKLKSLCESFFKLKDVKLRLYLEEEGCPMPQFFEEDTVSLMELGIGTGSTIIVDEES

SEQ ID NO: 145282 - protein, 65 aa, Oryza sativa
  Clone ID: PAT_MRT4530_46016C.1.pep
FFFFFTGKDQHLVLWTISRATKVVVQCVNRQSSTVLQREISICCNLSQPIPPPYFGHILSAMQPH

SEQ ID NO: 145283 - protein, 206 aa, Oryza sativa
  unsure (1)..(206): unsure at all Xaa locations
  Clone ID: PAT_MRT4530_46017C.1.pep
HIDSWDEIVKLSYLRSLEQLHLNKNMLKHVTYPSNPPPLGSLGDAAVLPFEKLRVLLLGSNQIDEVLSVDSLNLFPSLTDVRLSDNPVADPAKGGVPRFVLIARLGKVKILNGSEISPRERREAEIRYVRLVMGKAESYDPEEIKRLHPRFAELKAFHGIEDEKPSSRTSGPQKMASGLISITLKCVGPSMGEKQPLXKKLPXCTT

SEQ ID NO: 145284 - protein, 94 aa, Oryza sativa
  Clone ID: PAT_MRT4530_46018C.1.pep
MASRTPRAPLLATRVGVAPPVASASSCVTTPLAASRVANRVLPARAVARPGDTAGSCSNSDDRSKPSDREIRWNRVQTSGGIAMRVPASARGRR

SEQ ID NO: 145285 - protein, 47 aa, Oryza sativa
  Clone ID: PAT_MRT4530_46019C.1.pep
WHTTPASRRIISGQSESFACRLCCVSFTHDRHALTCIVASHSASSVM

SEQ ID NO: 145286 - protein, 75 aa, Oryza sativa
  unsure (1)..(75): unsure at all Xaa locations
  Clone ID: PAT_MRT4530_4601C.1.pep
RFIPYSYSKLTQLPKDSXLGGCCNTAMIANINPSNTSLKETQNTLYWADTASENKIQAFSTANDEAFERTHSKTD

SEQ ID NO: 145287 - protein, 54 aa, Oryza sativa
  unsure (1)..(54): unsure at all Xaa locations
  Clone ID: PAT_MRT4530_46020C.1.pep
LVLDPQLQFEAAWALTNIASGTSENTKVVVESGAVRLXPIFVKLLNSXSEDVRE

SEQ ID NO: 145288 - protein, 98 aa, Oryza sativa
  Clone ID: PAT_MRT4530_46021C.1.pep
AVRRASTRGAAARRRRRARGGPAPSPPRAAATGGSASPTGRRASAPPSSPPSASSARTGGGGGGGGRRWCATPRPPLLFSYPRSGQRRRGSPSRRSHR

SEQ ID NO: 145289 - protein, 82 aa, Oryza sativa
  unsure (1)..(82): unsure at all Xaa locations
  Clone ID: PAT_MRT4530_46022C.1.pep
LAVRGRHASGXHRGHCHRNHYCRTHHRASSHRATAAAAAVVQPLTPPLRRAPRPLPPHRQPPPLPPRVLPLLPPIAAENRSL

SEQ ID NO: 145290 - protein, 69 aa, Oryza sativa
  Clone ID: PAT_MRT4530_46023C.1.pep
KSCLVSYRIHVLGTTSLYCRILCSYSDMFLLKYTECSFSYSRTSHSITFHRSSPLALERSASLVSTGLE

SEQ ID NO: 145291 - protein, 170 aa, Oryza sativa
  unsure (1)..(170): unsure at all Xaa locations
  Clone ID: PAT_MRT4530_46024C.1.pep
SYLASSSSXSSCCCLYAASPSFDVRGDPLLLALLPSPAPPQLGGGPTTTTTPNLLFAALTTSNGASSSSASSSSSSSPSPPIFTLSSMLLLLQLLLLLFVSPLPDLLFSPFLLRSSCCSCSWHCSLIDSHQVLDDFTFFRDENVVLVRGYEVAKKAFEASNPHAAMALET

SEQ ID NO: 145292 - protein, 671 aa, Oryza sativa
  Clone ID: PAT_MRT4530_46025C.1.pep
MSLRRRERRVIAAAGAAALVAVGLNLAFSAVAAHRRRKRRELPGFTAQVNLSAADIKRLADRVVSKSKETYDAVAAVPLDKVSFSNVIAPLAELDAQQFPLVQACVLPRMVSPSDDVRRASAEAEKRLDSHFQQCSYRSKLKVREFERNGAKLTQSKKTEMEKLKSHIDDLSLKYIQSLNDSTKFLLLNEEDLAGMPLEFLKELENTNGKWKVLLTSYHVTPILEHCKVGSTRKLIAVAYGQKGGKENIAILEKLVQLRHRLARLLGYPNYADYAIEPRMPRTSRKVLEFLEEMSEQLNGLANRELSVLKDLKMEEEGDAQFSVEDLLYYMKRAEELKVDLDIGEIKQFFPVDLVISGILKMFQDLFALRFEEMKDAETWHDTVRLFSVWDASSSDLLGYFFLDIFSREGKYAHTCVVALQNRCLCSNGTRKVPVAVLLSQCPKEFDGNSALLRFPEVVRIFHEFSHVVHHISNRATFSRFSGLQLEGDFAEIPSLLLENWCYENISLKMMSGFHQDITKSITSEACQSLKRRRDIFAGLKLKQEILLCLVDQIIHTGENVNIDDLIKDLHPKVMLGIPLLEGNSPASCFPRIAIGYDAVCYSYIWSEVFAADLFASKFKDDLLNQHAGLRFRNKVLAPGGSKNPLDIISDYLGREPSLQAFIQSRTRNSL

SEQ ID NO: 145293 - protein, 129 aa, Oryza sativa
  unsure (1)..(129): unsure at all Xaa locations
  Clone ID: PAT_MRT4530_46026C.1.pep
MVRPDHSNPILISSESPGLMVAVVSSFPLSQKLFLSQDALMKRSRSFAEAXVIMVCPVLLAIALKKVDLKSQEHGPVIPIAMLVXMAAITLISGTFPFLALCFSKEVRRNGAWRLPTMGQWLXPFSCAC

SEQ ID NO: 145294 - protein, 159 aa, Oryza sativa
  Clone ID: PAT_MRT4530_46027C.1.pep
MSIPGNGHLPASTDLPDHSSSASDPEADADYRPISAAATDSDTDTDPDPAPHHRLGSIGNGVSELDLDSGGDDDHCEGADGEDTVAEEEEGLGLGEEAARAFSEDERRRRAPLPAGAAARIVDAMRGVEFPGAPPPWAGSVPEDQWLDRSLRAGAGHPH

SEQ ID NO: 145295 - protein, 231 aa, Oryza sativa
  unsure (1)..(231): unsure at all Xaa locations
  Clone ID: PAT_MRT4530_46028C.1.pep
RTVAHAPLDNQHWATDVKGALTVQVIIEYLQVWEMVDGVILHDGTPDQFRWKLFKTESXTCKSAYESFFVGTFRFAPWRIIWKSWAPLKCKFFVCLAIDNRCWMADCLDKREVSHPAVCPLCDXAEESIQHILVNCVYSXQVWSLILQRIGLIFISPSQDTIRFSSWWVKAIRGLDKDXKKGLKSLIIMVAWEIWNHRNACVFNEASPSVMTVIQTMANECNLWCLAGRSH

SEQ ID NO: 145296 - protein, 337 aa, Oryza sativa
  unsure (1)..(337): unsure at all Xaa locations
  Clone ID: PAT_MRT4530_46029C.1.pep
MGKIKIGINGFGRIGRLVARVALQSEDVELVAVNDPFITTEYMTYMFKYDTVHGQWKHHEVKVKDSKTLIFGTKEVAVFGCRNPEEIPWAAAGAEYVVESTGVFTDKDKAAAHLKGGAKKVVISAPSKDAPMFVVGVNEKEYKSDVNIVSNASCTTNXLAPLAKVINDRFGIVEGLMTTVHAITATQKTVDGPSMKDWRGGRAASFNIIPSSTGAAKAVGKVLPALNGKLTGMAFRVPTVDVSVVDLTVRLEKPASYDQIKAAIKEEAEGKLKGILGYVEEDLVSPDFQGDSRSSIFDAKAGIALSDTFVKLVSWYDNEWGYSTRVIDLIRHMHSTN

SEQ ID NO: 145297 - protein, 291 aa, Oryza sativa
  Clone ID: PAT_MRT4530_4602C.1.pep
MRDFPSCFGESGVQIADASSSSSSAGKGAAQNLVTCLYQAQFSGRPCVISVTWSKSLMGQGLSIGVDDLSNQCLCKADIKPWLFSKKKGSKRLDVEDGKIEIFWDLSGAKFGAGPEPMEGFYVAVVFDLELILLLGDMKKDAYRKTGANRPMLNAAFVARREHIYGKKIYTAKAQFCENGQFHDVVIECDTVSLKDPCLEIRVDKKPVMQVKRLAWKFRGNQTILVDGLPVEVFWDVHSWLFGLTTSNAVFMFQTCQAPEKSMPWSYSQVFRESQLQGLGFSLILYAWKLE

SEQ ID NO: 145298 - protein, 103 aa, Oryza sativa
  unsure (1)..(103): unsure at all Xaa locations
  Clone ID: PAT_MRT4530_46030C.1.pep
MSAGGRRGGSTSTVERWQARHRRIRHGTDTGAAAMGDGMWEAGYPAAAPCPTRGDPAAVRRIRCDGESGAEPARGGAAAPPPPASGGWRGVXGSGTARLRARR

SEQ ID NO: 145299 - protein, 74 aa, Oryza sativa
  Clone ID: PAT_MRT4530_46031C.1.pep
TGSTKDNKNCPQEYSGGNPFPIPIQTLKKRGKGKGKLRTPRDGNRLNHYFPNIPHPKLSLAKEYKPNFGQIQGA

SEQ ID NO: 145300 - protein, 235 aa, Oryza sativa
  Clone ID: PAT_MRT4530_46032C.1.pep
MAAARDEGAADGRTAARGAGRWAGGGARRVDGRWTAYGCMQRRRCRWMAAAREEGAADGQTAACGAGRWAAARDEAAAQDEAAARDEEAGADGGRLHAATASTTAAAAVAGIPGFLFATIPDGLPESDADATMTTCLPHFRKLLADLNNRAASDDDDDAVPPVTCVVADHLLGFSLDASAAVLASRCRPPPTPARRRPPPRPRLASRLRPPPARRRRSRYRPCKQSYNKHTKNGM

SEQ ID NO: 145301 - protein, 179 aa, Oryza sativa
  Clone ID: PAT_MRT4530_46033C.1.pep
MASANSASKKRSIGAPSQQQGSVSCALGKEVSLDAVPLYLEETEWHGEEKGTRLRCKHGLCLARRVAWEGEDTGRRFLGCPLEEDEDQCKFVQWVDPEWDSRVKKTLAGMWDMVDRGVKREAIIQADMFKAFALKDRLEKEKNDELAHKNALLDMREAQLKELLYKSASEANELCSPSS

SEQ ID NO: 145302 - protein, 60 aa, Oryza sativa
  Clone ID: PAT_MRT4530_46034C.1.pep
FSNEKTVEACSLVATTPLAMTTKLSSYRTTINMICSMNEEYISTLKLSNLFSIQKRLDTC

SEQ ID NO: 145303 - protein, 389 aa, Oryza sativa
  Clone ID: PAT_MRT4530_46035C.1.pep
MVEGRERERLSSFCRRNTGAALSDQLAGSGRSGDGGAWQRSSGWLLAERTAVASAPTGVDSLLLPPPWATGVSRLPVRTRLGWREDLVVDALAVVRRWMRLRSSSVLESGGAATEGERGGRRRSGDGGSGRGRERRSARWQRRERRKGGGRLDGELGGGDVRTRRVLDHSPDLKRGNFTDDDDELTIRLHALLGNKWNTRIKLKLLSQGIDPQKHQPVSARTSVAAASELTTTASTVSFPPLAPAPVRGSSRRKEGRLGGVFLVVVAGGRRVAACSPIAALPPRSPSASLPAVALALHCSARRRSAAALALRCATRILARTPPLHPPPRSPIAAPSPRSPSASLPAAALALHCSARLARARGRSAAALVLRCTTCIRARFSAYRRPPSL

SEQ ID NO: 145304 - protein, 103 aa, Oryza sativa
  unsure (1)..(103): unsure at all Xaa locations
  Clone ID: PAT_MRT4530_46036C.1.pep
MEEGHGLRRHKRRRLVGQQAATTQLVEEVDDQQQQQQEEEAPTCSICLQPWTCNGDHRIWYTPSVSXICIPCGHVYGRSCLEKWLVHVLQRGTGQAKLCVASN

SEQ ID NO: 145305 - protein, 237 aa, Oryza sativa
  unsure (1)..(237): unsure at all Xaa locations
  Clone ID: PAT_MRT4530_46037C.1.pep
DKLVYFWGPCTENSFFSSEIIQNNNEDKLCWKHTSNGTCNTKSAYKDLYDENYPSRGQMWKARNDLKFQGKLKEPTKVCFVSEAMANTYTIFSAHKSLQDDHQDMEQERRIKNIPNGNRCYVDAAWENGFTGTGILFHMLSSHNALFMLXAHSSLQAELVGLQLVMEVANFLNFTGITFLTNDATITDTCQSCGKVWSPSNQPLRLLXSQIKSVIPENPMHVVWISRKINSVADKMA

SEQ ID NO: 145306 - protein, 208 aa, Oryza sativa
  Clone ID: PAT_MRT4530_46038C.1.pep
MAPVVAIVLCTLVTIAAILFLSFFGSWMGPVVSIDGVTATGLDAAGAAGNATTTTISPSFDVAVRVKMQRFHLAPGGVREGLRRRVVRGGRGHRARRAPGLPALRHLAVRGVGDGARRAAHHRAVRRRARPPRRRAAARGGVAGRVRVVPEIGRRPWLDAEQRVSRNVRRHGVARPWEFNGDSGGGGGGGGVHRREAVAKPSHYYKSR

SEQ ID NO: 145307 - protein, 306 aa, Oryza sativa
  Clone ID: PAT_MRT4530_46039C.1.pep
MEEENNCQPARRAGRCKRSEVWDHFEQKAGCNYCKALLCVDPARDGTSCLKKHYEETCPVRHPNKSGRGRQNGHGSPVASSERQGNHVLQNNASMISKSTSDGQKMETAAAAAAAEDHFIRMIALHGFPSSMVEDKQFIRFVGMLCPDFKMPSRDDVEERCDALFDQETSSLKDAIARTSGLVSLSIGRARTAMVDTVYLAAHFIDDEWNLCRRVIRVFKDNGMFSDEFKTPYGYILDVKDYLYNKTLYDTVEGTISSCGLFPKLVGAILDNENYTDIVRNKLYKKNHLKNLSASQRKLFHATDMH

SEQ ID NO: 145308 - protein, 65 aa, Oryza sativa
  Clone ID: PAT_MRT4530_4603C.1.pep
MATRDRLLFEVHLAGELLVGGGRNQVLGGRRWSSKGSRIWRFRRQRRRCTDGDASTTIPSDRQVC

SEQ ID NO: 145309 - protein, 107 aa, Oryza sativa
  Clone ID: PAT_MRT4530_46040C.1.pep
QKPRPPKPGKWAANPKTPGKQNPPGIPPGEKKRERGPMGKTTKGNPSRGAGFLGGAAVGPFPLIGAPGDKTAQLQGGPTHQGGGPLDDLGPLPPPGGPFNNTPASKG

SEQ ID NO: 145310 - protein, 119 aa, Oryza sativa
  unsure (1)..(119): unsure at all Xaa locations
  Clone ID: PAT_MRT4530_46041C.1.pep
GVMTVSIPKNTRVTTKXDHALCTYCDNQTELLIQVYEVXRTRTRDNNLVSKSXLSVMARASMGDAXITVRXNIDADGILNVSAVDKTTGQYNKITISNYRGGVSTEEIVKMVQDADKFT

SEQ ID NO: 145311 - protein, 182 aa, Oryza sativa
  unsure (1)..(182): unsure at all Xaa locations
  Clone ID: PAT_MRT4530_46042C.1.pep
TVRAFVFSPVSSLDCDLQACKSKGAHGTIWAXLVFEPSSMTNCVNERLLSNYGXLLLLDGHQYSKRRLFHHSVNPTHLPYWRENNPSLRXFCLTQIXNSRHLMITIHRNYERLNDHIPXYSCGYFSDSYSFKXRCLNDRXDKISRLVFLLLIQMKQAFTLLLHTTYLLSESXILGQLGYVFT

SEQ ID NO: 145312 - protein, 73 aa, Oryza sativa
  Clone ID: PAT_MRT4530_46043C.1.pep
TTPRNDTPPTIPPMQVENGTSRAPTPGRNPQAAELCSLYKRSEPTRMTTQKPRSWCRSHKLQDLPQDLQSAAS

SEQ ID NO: 145313 - protein, 917 aa, Oryza sativa
  unsure (1)..(917): unsure at all Xaa locations
  Clone ID: PAT_MRT4530_46044C.1.pep
MHGFMVLIAGLWIKHTSYPTTYGSHYVDPRSNVPQYSAHSVHEYYSSIVACQVEGLGAXGSASMTSSLHDSSTNTSVNQGASTSTSLVWTQVGSIVFPIYTITPISNGPIITGNEKGTATTPRNDTPPTIPPMQVENGTSRAPTPGRNPQAAELCSLYKRSEPTRMTTQKPRSWCPVHKTSKHTLEDYPLIVHVKAKLYACWERGIQRTSPTGAIYCPIHKSRSHDLTSCKIFLRTFKVPHHRVQQPRVQALCVAKERDVEPAPDRFVGYVGTNPNEPYVLHLLEDYEFSSESPRDVNVVDNIETSPSAAARTPVNSCEXLDAILRESPFDPVTNPDVGQXSHHHEISPEGTASQXAENAEAKNANREHPSGNRSPRATREPIEPHRENRDLREHLDDXRRDRRDRNNNDRHRHHSPSRRRRAHSDRRNDTNYNNQQDQGGQSLSSGRXQDQERDGNDQRDHNSQSPAPSRDRGHNHCSRSRAPKPSDPSSSSSSFSSSDIPPLRRHNHGPPSVPGGRCRAFTPSLRNVRWPEKFRPREIEKYDGSTNPEKFLQVYSTILYAAGADDNALANYLPAALKGSARSWLFHIPXPAQSPHGTYKRHAIKDVLHALTQNLGESLRDYIRRFNECRNTILEITDASVIRAFKSGVRDRXTTXELATRRIISARKLFEIIDRCAHADDALREKEGKSKVGEEKKSTKRDAPESSKKRSRKSGKRKLSGEVLAAEQTDPPRRPNPQNDDSRKXWCPIHKTNNHATEDCYVFKMELARQLAIXRGKPAATAKMKWSQHKIEFTKADHPKIATTPGRYPIVVEPTIRNIKVAQVLIDGGSPINLLFASTLDVMGIPRSELTPTYQPFHVITPEXSSKPLGNVTLPVTFGXANNFRTEHITFGVAEFDNAYNAIIALQEATMIMAVF

SEQ ID NO: 145314 - protein, 132 aa, Oryza sativa
  unsure (1)..(132): unsure at all Xaa locations
  Clone ID: PAT_MRT4530_46045C.1.pep
TERGRLAVYHTICTVSAEAPYSPLLVRGLLEVYCERPSAGPAETENLGDMFKPEASGEGRRGXTIRAKAMARXYACFVGQGPRQEATQAKMVRRKXQPEGMGFAKVPYPTVRKPSGLLRPCGDSPRSIGRAI

SEQ ID NO: 145315 - protein, 81 aa, Oryza sativa
  Clone ID: PAT_MRT4530_46046C.1.pep
AHRRACTSPANHARGSPPSSPSSSPHSSPLSLPPPQVNPTASQHQMSSVEASFTAPPPGAPAPVGGGAPAPVGGGVPPPPV

SEQ ID NO: 145316 - protein, 135 aa, Oryza sativa
  Clone ID: PAT_MRT4530_46047C.1.pep
MRWRKITLSIEVDAGKEREGERIARSGWRRFVVISVERLLVLDFLERKAEGEGERVGGVLGGSREEEDDLFICELGGNGPKLYRPRGKTFLEKEVSLEILIKLPPSPPLSPPQPSISYHSSSRPRYEYLKCGARA

SEQ ID NO: 145317 - protein, 36 aa, Oryza sativa
  Clone ID: PAT_MRT4530_46048C.1.pep
FSLCFYYQFYGSHILYFRVHLILLPISFLVHLHINI

SEQ ID NO: 145318 - protein, 113 aa, Oryza sativa
  unsure (1)..(113): unsure at all Xaa locations
  Clone ID: PAT_MRT4530_46049C.1.pep
KTRDLGDLLNSSVGPKLAIGYMSVLVDLILQSTRNKDKETVIKSINDSRSAKTLSMCGNHLEAHQLDPNVAHRSYCRNRLYHLTXSNSDLADPXVADPDSSRSLLCFRNNPHL

SEQ ID NO: 145319 - protein, 72 aa, Oryza sativa
  Clone ID: PAT_MRT4530_4604C.1.pep
WRLQLAPVFPRSGGKPWFRWPKAWHLKLEIPGPTGRPGEKGGDWGNYGGGSFSGFPFGFTWNLPLAASGSRY

SEQ ID NO: 145320 - protein, 419 aa, Oryza sativa
  Clone ID: PAT_MRT4530_46050C.1.pep
MGGVIGALFRGGGHRREMHRAPMNQPGYGGGGENHRRAMLTKKYSYIPDNYQSLDQVTAALRDQGLESSNLILGIDFTKSNEWTGKRSFSGQSLHKIGSTPNPYEQAISIIGKTLAPFDDDNLIPCFGFGDATTHDYNVFSFHPDNSPCHGFEEVLSCYKKIVPHLRLSGPTSFAPIVEAAVDIVDRSGGQYHVLVIVADGQVTRSVDTSDNDLSPQERRTVDSVVMASSYPLSIVLVGVGDGPWEDMQKFDDKIPARQFDNFQFVNFTSIMSRSTTQQQKESAFALAALMEVPIQYKATMELGILGRSTGKAKRIMPAPPPLPSAAGRQPSLRREDSAAATAAAAPPSPREDQVCPICLTNAKDLAFGCGHMGMWGEPDQMPNLSTDDSVQAEAVLRMIKCLWTDGMELKSVLNVQNA

SEQ ID NO: 145321 - protein, 114 aa, Oryza sativa
  Clone ID: PAT_MRT4530_46051C.1.pep
RKTRGLGDLLNSSAGPKLAFGYASVPVDLILQSTRNKDKETAVKPINDSRSAKTLSMRGDHLEAYQLNPMSYTKSYCRNRLYHLTQSDSDLADPIVADPDSSRFLLCSRIDLRL

SEQ ID NO: 145322 - protein, 61 aa, Oryza sativa
  Clone ID: PAT_MRT4530_46052C.1.pep
NMKVQAKKSIVPYNNRVKKVRNHRGHVHGMTTPKFHFVSPSQIHPWKSPGFPFSQVKKNMM

SEQ ID NO: 145323 - protein, 114 aa, Oryza sativa
  unsure (1)..(114): unsure at all Xaa locations
  Clone ID: PAT_MRT4530_46053C.1.pep
RITRGLGDLLNSSASPKLAFRYASMPVDLILQSTRNKDKETVVKSINDSRSAKTLSIRGNHLEAYQLNSMSYXKSYCRNRLYHLTQSDSDLADPIVADPDSSRFLLCFCNNLHL

SEQ ID NO: 145324 - protein, 70 aa, Oryza sativa
  Clone ID: PAT_MRT4530_46054C.1.pep
SFIKKPHGLRVVTGAQGLNNGVLLGTHSGVIWWTPTIWDFTFGSPPCLWGLKGLPFGCPPQFGQIRLGGF

SEQ ID NO: 145325 - protein, 104 aa, Oryza sativa
  unsure (1)..(104): unsure at all Xaa locations
  Clone ID: PAT_MRT4530_46055C.1.pep
LQCRSKLAFGYASVPVDLILQSTRDKDKETVVKSINDSRSAWTLSMRGNYLEAYQSDPMSYTKSYCRNRLYHLTQSDSDLADPXIVADSDFSRFLLCFRDDLHL

SEQ ID NO: 145326 - protein, 107 aa, Oryza sativa
  unsure (1)..(107): unsure at all Xaa locations
  Clone ID: PAT_MRT4530_46056C.1.pep
MLNSSAGPKLAFGYASVPVDLILQSTRNNDKETAVKPINDSRSAKTLSTRGHHLEAYQLNPMSYTKSYCRNRLYHQTKXSDSNSADPIVADQDSSRFLLCSRDNPYL

SEQ ID NO: 145327 - protein, 83 aa, Oryza sativa
  Clone ID: PAT_MRT4530_46057C.1.pep
EREMLAACAACKQEVTRYHQSGLWMGHLGGAKNKPISTSSMALLALGACQEVKYQRTPSYKVSLPPPSFLQSFTCKRSLPWAP

SEQ ID NO: 145328 - protein, 115 aa, Oryza sativa
  unsure (1)..(115): unsure at all Xaa locations
  Clone ID: PAT_MRT4530_46058C.1.pep
CKTRGLGDLLNSSAGPKLAFGYASVPVDLILQSTRNKDKETVVKSINDSRSARTLSMCGNHLEAYQLNPMSYTKSYCRNRLYQLTQSDSDSADPXIVADLDSSRFLLCFRINLRL

SEQ ID NO: 145329 - protein, 603 aa, Oryza sativa
  Clone ID: PAT_MRT4530_46059C.1.pep
MAGEHRFYDSNGDVSRYMLDDMEFLPLFGEAEAATTLPLPVLPDVEPLPTAPAPAATAHVEPAPAADFGLGNPVLADLGFDVDLDFFPELNFQSPPPPPAMNAGGYTHQVQASPPVMHHQQQQQQPLAPLPAAHGFAGQPAPATTMAPSGGDDGLFLAAPSRDAPCSPVMFNFMDFNVDMGDVDMDDVLMWADQDTHGAAAGGDTAPPVVVDEYADFVPFQAGDLDCSNCHLVREMMHANASRTIYFLVHATGVGSFQHAIVDRRYTATGAEGLHFPGRQLLYFDLTNHTIESASDFIASNVEKLKNDTTGHHFLDTGYNFSGAVRTDMANSHTAMEMNMLHTIVSAPFENVTTDAASPPAAQFIGAPPAAELPAPVPAPAPPAAHEQNAVVATLLFKVEEFYAAANSRPAAKRADVKILESSQVTQQAGGSSAATATMYPSMVDRKRKRAQATPSRMAPHEVIQYLRATAVETDKELETLNNFFKVCDGEDKALITFSVEQIRSIKKKIGRIINKPVTAMSSRRMARFIDEIDTIKEEKARVFEEIIKILKNPRRKRENDGSSGSNRKNVGGSSGGKKKTVGGSSGSKKKNVGRPSAKKAQK

SEQ ID NO: 145330 - protein, 79 aa, Oryza sativa
  unsure (1)..(79): unsure at all Xaa locations
  Clone ID: PAT_MRT4530_4605C.1.pep
CCCCCTLLGASPTPSPPAPPIRPPPPRXPKPPPLCSCPDPRHGTPLRRRGGSPPPPPPALRPAASGSRDLTLCWNPRRV

SEQ ID NO: 145331 - protein, 115 aa, Oryza sativa
  unsure (1)..(115): unsure at all Xaa locations
  Clone ID: PAT_MRT4530_46060C.1.pep
QKTRGLGDLLNSSAGPKLAFGCMSVPVDLILQSTRNKDKETVVKSINDSRSARTLSMRGNHLEAHQLEPDVVHRSYCRNRLYHLTQSDSDLADPXIVADPDSSRFLLCFRTNPHL

SEQ ID NO: 145332 - protein, 68 aa, Oryza sativa
  Clone ID: PAT_MRT4530_46061C.1.pep
MARRMGWRRTTSLRVEDLAGGEVALKSPCAEGIAREREDGVGLSGENGTNGVKSLGGNAEFEMEIARK

SEQ ID NO: 145333 - protein, 93 aa, Oryza sativa
  Clone ID: PAT_MRT4530_46062C.1.pep
MSSTPEALPITLVTHERTSRAECRTAAALAFAPPQPRCLGPLATSGAIRSAALSVSPAASGVLSAQTSIVFAEFYRTPWRQPREWGIGDDSDD

SEQ ID NO: 145334 - protein, 228 aa, Oryza sativa
  Clone ID: PAT_MRT4530_46063C.1.pep
TRDKTLSDLLDSVLSIVKLITITFMQIHWPFRVKKGSGISNTEDYIPPDIPSTWGAMEKLYDSGKSRAIGVSNFSSKKLGDLLAVACVPPAVDQVECHPGWQQTKLHNFCQSTGVHLSAYSPLGSPGSTWMNGNVLKEPIIISIAEKLGKTPAQVALRWNIQMGHSVLPKSVSEERIKQNLDVYDWSIPEDLLAKFSEIKQVRLLRGNFIVNPQSVYKTHEELWDREI

SEQ ID NO: 145335 - protein, 55 aa, Oryza sativa
  Clone ID: PAT_MRT4530_46064C.1.pep
REGNDCRSSLHRLHVELLGIGQLHRYGANYAPLQERALRHGINEMDHTGNFRAGK

SEQ ID NO: 145336 - protein, 76 aa, Oryza sativa
  Clone ID: PAT_MRT4530_46065C.1.pep
MAATIPAAPDDTSCGPLWIEKKIRSAALAKEEFLGGRRDPVEVRDLHSGLSPPSSPLASWRGFLTSLPPPLGDKLA

SEQ ID NO: 145337 - protein, 56 aa, Oryza sativa
  Clone ID: PAT_MRT4530_46066C.1.pep
NACSIGHPACLYVSRHPFGFPRAPPLCFLWRTLIPPTRTCAFFLRAGASLCPGPHF

SEQ ID NO: 145338 - protein, 67 aa, Oryza sativa
  Clone ID: PAT_MRT4530_46067C.1.pep
EWPIHPHLFVVRRFCRVIVVARMAFYLRCVEYALCDSFAFGFALLMQGWDRFGLSGCYRSIVPCLSF

SEQ ID NO: 145339 - protein, 658 aa, Oryza sativa
  Clone ID: PAT_MRT4530_46068C.1.pep
MTNVSWNACLRAYDSHRLLYIFMSSQVITHYHVKYYQVRKMMRNNQNTQVEGASATKKRKTSYSNSNREDSSPVVDDGMHMVNNFEESFGDLDDCNEEYSKVNLVALRISQSVVSLASFKGRTRLFACTGTIMEYGPSKMSILTSASLVRCTKDENKTDEKLKIKVRLPNGKLTEGKLWNYDLYYNIAVVKIKYFPELSTAQIHNQGQSNVKLSQSKLVAVGRGYESGELMATGGTLLYKPSKLDCKELMTSTCKITKAGIGGPLVGFDGNFVGMNFCDKKETPFLPINIIRKCLKHFDMFGRVVQPWLGLRIGSLKHEKLDIREQIHGSFSNTGGIYVKERLLLSTVAEPSGVPEGASTPLSDPPSSTYKTSFLVFHNPDNDNSWAIKRLLPFLLTRSMGVVTLFVSIGVYAETVFDGSPAADSGINVGDVITKLDGVDLFHAQEFYELILGKSEDILRRDEEMLFKVSILRPSNGLTFRAIVNAEVVDMSRKNRWPVPKAEWLYPCTDDRCDEIVAPDPIVIRTCEDSYYLRAPPLHAQPAAASDRILLTRREPSMDQLKELGWAKRWSSQPYVSCRTTSLQELTRLGIKHVENLVIPSVRNDDWGFLVPYLIGSISLIVLAIGSISPGYVFVVSANKPVKVGKSRHQTIQMSDIF

SEQ ID NO: 145340 - protein, 137 aa, Oryza sativa
  unsure (1)..(137): unsure at all Xaa locations
  Clone ID: PAT_MRT4530_46069C.1.pep
SKLDCKELMTSTCKITKAGIGGPLVGFDGNFVGMNFCDKKETPFLPINIIRKXMLFKVSILRPSNGLTFRAIVNAEVVDMSRKNRWPVPKAEWLYPCTDDRCDEIVAPDPIVIRTCEDSYYLPALDESELRLYYGEE

SEQ ID NO: 145341 - protein, 157 aa, Oryza sativa
  Clone ID: PAT_MRT4530_4606C.1.pep
FRVLCCHCRDVDIEDVQQRGQPESPVVVPALALEPYVPRDDVDQSLESTLADRDRRIQYWRTKFEVAELERTMVEVKKDQAVEALRGREVWFNSYLRSCYTAMAGVAHSCTSSSSTKGLHVLGGLHVYSPDYFRPTPAAARAAAAVSFAFPRRPAPR

SEQ ID NO: 145342 - protein, 89 aa, Oryza sativa
  Clone ID: PAT_MRT4530_46070C.1.pep
KKSDKQGEEDKIKEHQLEKKPSFMASVALIILLLNRNLYGPGIKCYALFVCMVAGMFGLIDAYAAGRILAASVAYLTGLKPPGGLWRDE

SEQ ID NO: 145343 - protein, 147 aa, Oryza sativa
  Clone ID: PAT_MRT4530_46071C.1.pep
RRVAPISTSPAATCEHRAGRLLLPARTRLLAPKSISPRTVFSASDSLLRLASSPRPAAPRPRLAACAGFHPSRDGREHPSGAVVLLPPPPVRKMMRNNQNTQVEGASATKKRKTSYSNSNREDSHQLWMASHAYCAEIFSPWLSYAI

SEQ ID NO: 145344 - protein, 121 aa, Oryza sativa
  Clone ID: PAT_MRT4530_46072C.1.pep
MPPADAAQAAAAGDASRRHRASRLRRGRLPPTPRKPPGTPLATAAPAASAGDDSRHRFPSASRRGRRRRGSAWYPDYGCLHCGKGVLGPSFEAKAMGPIACIVNTLRAGTIAGYKPAANIF

SEQ ID NO: 145345 - protein, 713 aa, Oryza sativa
  Clone ID: PAT_MRT4530_46073C.1.pep
MECQLKKYLVLLATLVATVTYAAGLNPPGGSWLEDGGGGGRWQLAGDAILQDTNYWRYIVFYWFNAISFAASLVVVSLLFLLLHKGRPPPAPGDQAAHAHPGAGLNPPGGFWRSTEAAGDPVLPGLHPIRYKFFFFSNAISFIASLLAITFNVYYEKLDLKRIKFPLYGLTVTAILGLGGAYAAGSCRDSRHTGYVLGLIVPVLVCIFLQWFLVGSNAISLPFGTRGSKQYNNDLDKPCELIQLLAILAAIVAYQAGIDPPGGVWADNGASHSGDPILLTTHPRRYKVFFYFNSVAFVASLVIMVMLQNEFLVRSHVLEAAMILDLFCLIGAYAVGSCRDTSTSIYTVALAGGVLIYVVIHILFSTLEKKSDKQGEEDKIKEHQLEKKRELLLLVEILAATLTYQAGLTPPGGFWENDEFGHRAGFPVLLDKFPIRYKAFFYCNAASFMASVALIILLLNRNLYGPGIKCYALFVCMVAGMFGLIDAYAAGSSMHLRTSIVVLILVTVVFAAVVYVAIIGRGQRANINQHQSKQTQNQQTNKEDGMMDTPRQTQDQQEADMKKKADMMAKYLMLAGILAASVAYLTGLKPPGGLWRDEGNGHSAGNPVLYDIDKRRYNAFFYSNSTSFMASITVIVLLLRRMTKGDEHKLPLWPMHTAMLLDMLALLGAYAAGSTRNWCTFKDAILLLLPVLGFVVILFFWKKGGEEKHDGSK

SEQ ID NO: 145346 - protein, 147 aa, Oryza sativa
  Clone ID: PAT_MRT4530_46074C.1.pep
NPPHAPRTIDGPAEGTGWAKRWSSQPYVSCRTTSLQELTRLGIKHVENLVIPSVRNDAAFFFTVVGSTGFLPIRAGQLSRDWGFLVPYLIGSISLIVLAIGSISPGLLQAAIGAFLTVFPDYQDRVARHEAAHFLVLPLISLQFWAS

SEQ ID NO: 145347 - protein, 61 aa, Oryza sativa
  Clone ID: PAT_MRT4530_46075C.1.pep
FTLNLPENLVVSKVAVWTTVANPITKYALTITPLAMSLEELLPPNQQKYANIIMLRSSLVV

SEQ ID NO: 145348 - protein, 73 aa, Oryza sativa
  Clone ID: PAT_MRT4530_46076C.1.pep
VPYIAGKVKVYVLKETHFNKCGFAFFSPTSGPALFPNCRKENRTGPVGVNWMQACTRQHPATQAVKFTRKPLR

SEQ ID NO: 145349 - protein, 53 aa, Oryza sativa
  Clone ID: PAT_MRT4530_46077C.1.pep
MAAPDVEYRCFVGGLVWATDDRSLEAAFFTYREILHSKIIHHPATGRSPGCGL

SEQ ID NO: 145350 - protein, 402 aa, Oryza sativa
  unsure (1)..(402): unsure at all Xaa locations
  Clone ID: PAT_MRT4530_46078C.1.pep
PFSVVTHGLVPNLVEGGLXHLQYADDTILFVKAGDHNVLVLKFLLFCFEXMSGMKINYQKSEMYGFGMNKGEELKFADMLNCKVHKLPVTYLGLPMHAGKLGLRDFAXSLRKWKKRLQSWKSGYLTYGGRGIKINSYLSSIPMYTMCFYWLPKGFHHKMGTARSNFYWQGLSEKNKYHMINWEALCRPKDYGGMGFLDTRVMNICLLSKWIIKLENGSPDNYQQGALVSEVFNGGDWDLEFRRNLNSQREAERXLIQGICLDEGEDQIVWPHSKIKVFSTRSMYRILTFGGIRDVDLWEIXKCKLPLKIKHFLFLVGKGRLPYAEQLVKRTWKGTVYEALSFAPKWGVLLGNEEQAVLGGWYEAILEKFNQLRVRTLPATLPYFSIIIYTINKCMFTFIILL

SEQ ID NO: 145351 - protein, 263 aa, Oryza sativa
  unsure (1)..(263): unsure at all Xaa locations
  Clone ID: PAT_MRT4530_46079C.1.pep
MGIWIRRVPTSGWPEVALHPLXQCPSSRSKWRTRWFYLQIENSDPALVIPEDQPEKIPEWTAKHALTLLTSASAFVAPLPLVSVNYKIDFDLIAPKRYSLARHKIPPTGQDRNIHLKLCSVPPLVGSSPLCSCASFCLSGSDHLMSTGGGINGGWTRGDENDNTNGGNNTDKASFSTRAFSGPHAFCISIIIDHVRPCSATSLPSSQALIIQISFRRLAQQCHESPGGLQKLGGGRSKHQTDPGPYSPYWARSWAQRLHLRGT

SEQ ID NO: 145352 - protein, 487 aa, Oryza sativa
  Clone ID: PAT_MRT4530_4607C.1.pep
MDLDKSTSTNASLKKLQDDGALPGRGTMQRETGGTDPKPVLGHMVAVEDYILCGFLPPPSEFLLLVLNFYGLSLLHLNPNSIAFLSIFSYLCGPYIGVEPFLDLFYFYYELRWMEPKKIENSDPVFVVHEEQPDKIPEWTAKPALTPSLKSFIDIIDDLRVRELSGYEVAVNFIGLNSKTVERRVSQRPYDALPLIDVIGPLADHKAEASLKEGVAKEASDIAVAAATMNGNNVPKKGRKFSSVLGNCWKVPTPSASDASPPPLRRQRLVTLGEKNPSQGGVGEGGARRVRDVDIEDVQQRGQPESPVVVPALALEPYVPRDDVDQSLSVKADVATTSLDLESTLADRDRRIQYWRTKFEVAELERTMVEVKKDQAVEALRGREVWFNSYLRSCYTAMAGVCRELQVPRGNLEESAAGYISWLNGACTLLEGIGKRIDEALKQECRRSSRYVGGHVLACIRDHRPQLHLEFLHEGFARSRRAPRVLS

SEQ ID NO: 145353 - protein, 79 aa, Oryza sativa
  Clone ID: PAT_MRT4530_46080C.1.pep
SLDLTRPNKPACFQVSNLIALNKIKQSVYITRLSCKEKTIIYSAKLTNSILCCVYCQAQCLGLASAALQGKSSTTSFCI

SEQ ID NO: 145354 - protein, 189 aa, Oryza sativa
  Clone ID: PAT_MRT4530_46081C.1.pep
CSRAAPALLAALHRRPRKRTMKLTRAEGRRRRSSGSGGRSRRTRSGCRRRRPRCRRWIRRRRRGSLREDITSSASRRRASRTPIAAVRSRSRRSWSPSSPPAAAEEAPRLTACTATAGRRSPRPRRGGRGISETTAPSRETRRRRRQQGTITRRLNSRRTVRGPREETTLRPVFVRRTRAPFAERPSTT

SEQ ID NO: 145355 - protein, 99 aa, Oryza sativa
  Clone ID: PAT_MRT4530_46082C.1.pep
MACGHAVTFLAPMWVFIQGEPAYGSNESSSSLPPPRTRQCCHRELHAATENSSPPPPRRVAAKLTMPSASLSAPLLWHARVGGRREEASSSRANLLPLA

SEQ ID NO: 145356 - protein, 353 aa, Oryza sativa
  Clone ID: PAT_MRT4530_46083C.1.pep
MSTIYMSQLPATLPLMEGDQDQGLYPAFHRAKDPPILFPFMIDSAVEHQGQIYGDQGLRRQQVLGESNQQFNDHMMMGGSDVFLTPSPFRPTIQSIGSDMIQRSSYDPYDIESNNKQHANGSTSKWMSTPPMKMRIIRKGAATDPEGGAVRKPRRRAQAHQDESQQQLQQALGVVRVCSDCNTTKTPLWRSGPCGPKSLCNACGIRQRKARRAMAAAANGGAAVAPAKSVAAAPVNNKPAAKKEKRAADVDRSLPFKKRCKMVDHVAAAVAATKPTAAGEVVAAAPKDQDHVIVVGGENAAATSMPAQNPISKAAATAAAAAASPAFFHGLPRDEITDAAMLLMTLSCGLVHS

SEQ ID NO: 145357 - protein, 63 aa, Oryza sativa
  Clone ID: PAT_MRT4530_46084C.1.pep
SRPAHCSSSGSPYSVAPAGTEPRTRPRRASSLPRPRRAVHPRRPSIPLHRRVLLSPIHRCLRS

SEQ ID NO: 145358 - protein, 130 aa, Oryza sativa
  Clone ID: PAT_MRT4530_46085C.1.pep
MATSMITSPLVAPARAKGLPSISRRGSSFAIVCSGGKKIKTDKPYGIGGGMSVDIDASGRKSTGKGVYQFVDKYGANVDGYSPIYSPEEWSPTGDTYVGGTTGLLIWAVTLAGLLGGGALLVYNTSALAG

SEQ ID NO: 145359 - protein, 342 aa, Oryza sativa
  Clone ID: PAT_MRT4530_46086C.1.pep
IRHEGALDRLLDDEQLAELVAAHGAVIPLVGLLFGKNYTLHEAVARALVKLGKDRPGCKLEMVKAGVIESILDILHDAPDFLCIALAEMLRILTNNASIAKGPSAAKVVQPLFSLLSKADIGPEGQYSTLQVLVNILEHPECRADYNLTPRQTIEPVISLLNSSPPAVQQLAAELLSHLILEENLQKDTITELAIPPLIQVLSSGLPNLQQRAIKALANLALAWPNTIAKEGGVFELSKVLLQSDPPLPHVVWESAASVLSSILQYSTEFFLEVPVAVLVQLLRSGTESTVVGALNALLVLESDDSTSAEAMAESGAVEALLDLLRSHPCEEAAARLIEALL

SEQ ID NO: 145360 - protein, 191 aa, Oryza sativa
  Clone ID: PAT_MRT4530_46087C.1.pep
MGSSSKVVRPEEVLDSLANDGTIDALRMKIIAQLKANEDMKKNTMMMAEQSRVLNTPGAEKKTKRELFDALRQELENPVLEKASREVWDLILENGGLGKEITDTIESVMRRLSGIDMMPPPPSTSIPSHQERERNMAADGGEKSKEIDTPEKPSSSSRKRPYSDTTTKGAGAVPNGGATSQHDGSEDSSQK

SEQ ID NO: 145361 - protein, 111 aa, Oryza sativa
  Clone ID: PAT_MRT4530_46088C.1.pep
PAATGGYGDRWTAARRRSSSAIKPRRAPRRGRRRRRCKPACTWSCRRRPSSRWRSARSSRRSSRTRSPPARTPPPPPRRRGPAPPRPSCSPAPPPLHVYSEMMKREIKSTR

SEQ ID NO: 145362 - protein, 61 aa, Oryza sativa
  Clone ID: PAT_MRT4530_46089C.1.pep
YIGVQGVERHQIVKCRFREENETILQFLGPSLHFLYVKVTLKRQNLLLCNQNRSKLQWSWH

SEQ ID NO: 145363 - protein, 74 aa, Oryza sativa
  unsure (1)..(74): unsure at all Xaa locations
  Clone ID: PAT_MRT4530_4608C.1.pep
LTIVNDAITGNNFISSWFGMVYSWFGDRTMQPGWLIXMAGPMQQGMLCSVGLILFXYLTVLLNSEMFAKCCFCK

SEQ ID NO: 145364 - protein, 98 aa, Oryza sativa
  Clone ID: PAT_MRT4530_46090C.1.pep
MVRMADVSGPGLGEAGRYTLGGEGGGSDGRILGCERGLAVAPVVQAVAGGDADGRAWSGSSTRAGPCGCVVQRGRAAGLVRRRPTRERVRADARARQG

SEQ ID NO: 145365 - protein, 352 aa, Oryza sativa
  unsure (1)..(352): unsure at all Xaa locations
  Clone ID: PAT_MRT4530_46091C.1.pep
MARCSPPLLRRLFCRAAKSASAAGAGTGGTSKKNIVFLGSPQVAASVLETLLVASESPDSSFQVSAVVTQPPAAKNRGRKLMPSAVAQLALDRGFPGDLIFTPERAGEEAFLSDLKEVRPELCITAAYGNILPQRFLDIPPYGTVNIHPSLLPLYRGAAPVQRALQDGVEETGVSLAYTVRALDAGPVIASEKFAVDEYIKAPELLAILFNLGSKLLLHELPSILDGTAKEKAKPQDDSKITHAPKLNSDESWLSFNQEAKLLHNKVRAFAGWPGTRAKLQLVNQNGEPDVLEIKVISTKACASCDKTGDGNEVGELIADSSXVELQLPGKKVTTARDFWNGLRGQRLLKSP

SEQ ID NO: 145366 - protein, 163 aa, Oryza sativa
  unsure (1)..(163): unsure at all Xaa locations
  Clone ID: PAT_MRT4530_46092C.1.pep
AHASAHASAHASAILFNLGSKLLLHELPSILDGTAKEKAKPQDDSKITHAPKLNSDESWLSFNQEAKLLHNXGWPGTRAKLQLVNQNGEPDVLEIKVISTKACASCDKTGDGNEVLFSGNSLLIPCGGSSCLEVVELQLPGKKVTTARDFWNGLRGQRLLKSP

SEQ ID NO: 145367 - protein, 54 aa, Oryza sativa
  unsure (1)..(54): unsure at all Xaa locations
  Clone ID: PAT_MRT4530_46093C.1.pep
MVFFFQPYQFRLIATGAEHHGAEAAGDASXXGASARRGLXTVSVANGSYPTVTT

SEQ ID NO: 145368 - protein, 526 aa, Oryza sativa
  Clone ID: PAT_MRT4530_46094C.1.pep
MDLTITSLVAACLSMAVLFVATKMIQQRPRTLCLYEKENKEEELLLPPVMSVVSVLTAYLPTLIAKGLPAVIHDLHSRLVTLLVTAHFFQASESEIRQSNIYKVTVPVFGRGVLYDVDLATRSRQISFCTDSIKPINLRGHVDSMVHEVEGYFAQWGEDGVVDIKYEMGNLILLIANRCLLGKQFGESKLEQVSTLLHELFDNGFHLISLFFPYLPTPQHRRRDKARAMLGEMIHEAVRSRRNSGVAEDDVLQKFLDSKYINGRCMTENEIAGLLICMMFAAQHTSSSTSTWTGACLLSHGHRSYLAAAIQEQKRIIQQHGDRINWGILLQMTTLTHCIKEALRLHPPANLLIRHASKSFSVQTRQGHRYQIPKGHTLATCTTVGNRLPYIYKDPNVYDPSRFGPGREEDKVGGKFSYTPFSAGRHVCLGEDFAYMQIKVIWSHLLRNFDLELISPFPEEDREKLIPGRPGGGGDGRGKGWRKRRTGGRPAAGGRGCGAHAAAPRVGGRGGAGGESTREAMAQRQR

SEQ ID NO: 145369 - protein, 54 aa, Oryza sativa
  Clone ID: PAT_MRT4530_46095C.1.pep
IVKTSIKSTPITIFLYLSLSSYTRWFYFIIIYAPSSVASRMHMDTEVSALTCNG

SEQ ID NO: 145370 - protein, 147 aa, Oryza sativa
  Clone ID: PAT_MRT4530_46096C.1.pep
MVVVVRFAAARVLPAPRAHPPPAAVAGLLCHLARPAASSSSSPRSWSSSSDLPPPACTPTARRVGGMGSRQSPPPKPPPPVTATRAAAAVAGGEAGREEESEKERREVDKKTREGEEDERFHLLAASKNLTANEDYLFLLAANLSDR

SEQ ID NO: 145371 - protein, 501 aa, Oryza sativa
  Clone ID: PAT_MRT4530_46097C.1.pep
MERVFSTRQIRRKHCLYGLCFALKFALSRPKVKLGQSPTGLLFTQSELRKSRFEKVRARNLSCSMLPEPIDLPKTNAQKLSIHPPIRHAEPPIRLSKIQSKANPLCECATATHPHSGEPMDVLKRELQRKRQLLDADFGGRKLLRRAEIERREMERIREAERRLLLQKQLRSSSSHHRAASRSTTTPGAPDGDESSRTEHRGDGEEKEGAPLLPREEVIRRLRVLRQPATLFGEDDAARLRRLHAVLEDPAALADVEAAEIGEGQTNDFLRDIQALRAKAVAASASAAAKPKAGAATAESGGETREEVPFEELCDEDKIMTFFKRLMSEWSQEMDEMPEAERRTAKGKAAVATCKQCARYLEPLFKLCKKKTLPEDVRGSLLEVVRCCMRRDYLAAVDNYIKLAIGNSPWPIGVTMVGIHERSAREKIYANSVAHIMNDETTRKYLQSVKRLMTFCQRKYPTDPSRSVEFNSLANGSDLQSLLAEQNSKNSEETLRLVAAS

SEQ ID NO: 145372 - protein, 208 aa, Oryza sativa
  unsure (1)..(208): unsure at all Xaa locations
  Clone ID: PAT_MRT4530_46098C.1.pep
GEGRAVLPPPLPLCCGAAHRPPLSPSTAGSFVVVVVTAVVVVVVRSAAARVLPAVHAHPPPXPPWQASSVTEHGRQRRRRRGHGRRRQIRRRPRATRAACTSAARRRGRPPLSPSXPAASSSSSPRSWSSSSDLPPPXRAHLPPAVSSAPPRCVLPSVGGMGSRQSPPPKPPPPVTATRAAAAVAGGEAGREEESEKERREVDKNPRV

SEQ ID NO: 145373 - protein, 65 aa, Oryza sativa
  Clone ID: PAT_MRT4530_46099C.1.pep
HAITCFLDVVLNEIIKLVCPFFGAPLMYHYSMAVGQRILFLFFSCNSVLYMDQSERPQYRSVPMI

SEQ ID NO: 145374 - protein, 38 aa, Oryza sativa
  Clone ID: PAT_MRT4530_4609C.1.pep
LIKRKLHIIIHTSRYTNWRLDELQSNNTSGKGYHKWVI

SEQ ID NO: 145375 - protein, 44 aa, Oryza sativa
  Clone ID: PAT_MRT4530_460C.1.pep
VAICSGNCFLGVNPHSSLPVGTHPKPKPPWPLTIPSKVPTACAG

SEQ ID NO: 145376 - protein, 88 aa, Oryza sativa
  Clone ID: PAT_MRT4530_46100C.1.pep
LTCHNYRARFHQYNKCTASALRVRLCRRCFLRILVQRWRCMPKRHDGIFGRLRQALWILSIFTTYFACCRRYTIPGITDTLAALPISG

SEQ ID NO: 145377 - protein, 51 aa, Oryza sativa
  unsure (1)..(51): unsure at all Xaa locations
  Clone ID: PAT_MRT4530_46102C.1.pep
GGSAWVSAPLAPPATWRSGEGLXGPRGVTWHPEAXPWLPLHRTRCRGKTRL

SEQ ID NO: 145378 - protein, 823 aa, Oryza sativa
  Clone ID: PAT_MRT4530_46103C.1.pep
MSLPRRFGSIVSDSPFGDSAIDSDSRTGSCLFGSVLPGSELTGRARCSTSKLSLVLSNRAGGLGFGGNQEGASGPYFLGGAWFLFNRRVLRYFRNDGYEWRKKKNGKTIAEAHERLKVDNVDALNCYYAHADKNSTFQRRIYWMLDPAYDHIVFVHYRDVQEGSISVSALNDSSTSNQNGSGSRAEAQSSPGLTSELFAPCLNSCSPGSAEEVSSQIMAINNETNSVSQPDWVQHCNQAALRKLKVQLSLEDREDHDVDAKDIPSNSEPITVYGIQNEEPGTCRNLADVFSGLEFSKENHPEETGLPFSSTIDVLKNSDTWLEEDQIEAILHSASMIVTENQWFNIREVSPEWSYCSESTKVIIAGDFLRDPSHGSWAIVFGDVKLLFDGHVSEQFLKFGLPFPNLECGLQVSPSEIMKGASERLNRDTAVNCVMEVLLNNKFEEWLFSKYEQNSEGNHFLPRQYHGVIHTIAALGYNWALKLLLNSGVLVNYRDANGWTALHWAARFGREETVVLLLDAGAAAGALSDPTAQDPAAKTPASVASAYGFKGLSAYLSEAELIAHLHSLESKENGSSGDQISRVVGRISDTSAHAQSGSDDQLALKESLGAMRYAVQAAGRIQTAFRIFSFRKKQQAGLQNRGNHIISIREVGAASHGMLEKAALSIQKNFRCWKKRKEFLKIRKNVIKIQARVRAHQQHNKYKELLRSVGILEKVMLRWYRKGVGLRGFHPGAIAMPIDEEDEDDVAKVFRKQRVETALNKAVSRVSSIIDSPVARQQYRRMLKMHKQNKDDDEKVEVSPASHVYGSGSHHMCWLSYNKQPMF

SEQ ID NO: 145379 - protein, 44 aa, Oryza sativa
  Clone ID: PAT_MRT4530_46104C.1.pep
MERLLVELPRRLILRFWLQHAEEWTQHRKVKLRELDIVGCVSSP

SEQ ID NO: 145380 - protein, 458 aa, Oryza sativa
  Clone ID: PAT_MRT4530_46105C.1.pep
DLGISGLDMNCGTYMQQHATAAIQQGKLTEEDIDKALKNLFAIRMRLGHFDGDPRSNSVYGGLGAADICTPEHRSLALEAAMDGIVLLKNDAGILPLDRTAVASAAVIGPNANDGLALIGNYFGPPCESTTPLNGILGYIKNVRFLAGCNSAACDVAATDQAAAVASSSDYVFLFMGLSQKQESEGRDRTSLLLPGEQQSLITAVADAAKRPVILVLLTGGPVDVTFAQTNPKIGAILWAGYPGQAGGLAIARVLFGDHNPGGRLPVTWYPEEFTKVPMTDMRMRADPATGYPGRSYRFYQGKTVYKFGYGLSYSSYSRQLVSGGKPAESYTNLLASLRTTTTSEGDESYHIEEIGTDGCEQLKFPAVVEVQNHGPMDGKHSVLMYLRWPNAKGGRPTTQLIGFRSQHLKVGEKANIRFDISPCEHFSRVRKDGKKVIDRGSHYLMVDKDELEIRFEA

SEQ ID NO: 145381 - protein, 249 aa, Oryza sativa
  Clone ID: PAT_MRT4530_46106C.1.pep
MQYTVEGSGGGGVQTVEAAVRKGPWTMEEDLSLVNYIAANGEGAWNTLARAAGLNRTGKSCRLRWLNYLRPDVRRGNITPEEHTLIVELQARWGNRWSKIARYLPGRTDNEVKNFWRTKIQKKHRKSTDGIYATTTSESIMPAATVHQNTVAEDQGSSSVSGRTTTATVAVTQEYATEAPPPSGMSSGSYLDQLQPGYASSIHGGQDGGAAAAAAGDVVVSDEFLAASSDNFWALEDLWPTVQSLHGNC

SEQ ID NO: 145382 - protein, 116 aa, Oryza sativa
  Clone ID: PAT_MRT4530_46107C.1.pep
NDVADRLAFSEVLSSDTIFLIPMNDTYQLPWGKFNGYSNLKEVFPRFLSYHFKKMEGSRRTVHQPHIFFTQKEIYTPLGIYFDTHLCFKTHMSEYTISCVSVGVGCARNACYFGMS

SEQ ID NO: 145383 - protein, 308 aa, Oryza sativa
  Clone ID: PAT_MRT4530_46108C.1.pep
VLLPGNVHVAIKMLSGNSNCNGDEFISEVSTIGRIHHINVVRLVGFCSEEMRRALVYEYMPRGSLDKYIFSLEKCFSWDKLNEIALGIARGINYLHQGCEMQILHFDIKPHNILLDDNFVPKVADFGLAKLYPREKSFVSDRALRGTVGYMAPEMVSRSFGVISDKSDVYSFGMLLLEMAGGRRNADPNANSNASRAYYPAWVYDQLIADQQVDEISNVADMHELERKLCLVGLWCIQMKSHDRLTMSEAIEMLEGGVDALQVPPRPFFCDGDGIGNGMPPPQVMDSYFHSSELTAISEEDDGISELA

SEQ ID NO: 145384 - protein, 711 aa, Oryza sativa
  Clone ID: PAT_MRT4530_46109C.1.pep
MEAAALSTVLYVLALVVADADHHVVRVQGRRHQCQPFSCGHLQNVSYPFRRRGDPRSRRCGFRSYELDCSSDDGKATIRINTGKYYVSSINYTASIFWVVDANLQDDANSSCPLPRSDQLPYVGLGIPGSHDSWDLGLDDMITWVGFVNCSQELITNSSSKYLYVYHPVDCLTTALSFVYYMLPFFGSLVPSVEDIEPSCGYLAMTPIGGGWNSVNLPEYTSYAEVVKSMRGGFAVKFPTPWLNWFGLIKKCLNKSVSHRTMSTNGGLEHLDSLFAANSLLPIPPTSPPFAGTRRTSSAVQLPRDLLCLGQSYMAGLVVRRGQGPSAAWRRGEGPPLVAGGGGDVDRAGDDGGGEGDGQATKSTMDGVRRLRMAKVCVRTVGRDDFSYSQGQGGYGSVYKGVFLPGDVHVAIKMLDGNSNCNGEDFISEVATIGRIHHINVVRLVGFCSEEMRRALVYEYMPRGSLNKYIFSSERSFSWDKLNEIALGIARGINYLHQGCEMQILHFDIKPDNILLDDNFVSKVADFGLAKLYPREKSFVSDRALRGTVGYMAPEMVSRSFGVISDKSDVYSFGMLLLEMAGGRRNADPNANSNASRAYYPAWVYDQLIADQQVDEISNVADMHELERKLCLVGLWCIQMKSHDRPTMSEAIEMLEGDVDALQVPLRPFFCDGDGIGNGMPPPQVMDSYFHSSELTAISEEDDGIAELASS

SEQ ID NO: 145385 - protein, 43 aa, Oryza sativa
  Clone ID: PAT_MRT4530_4610C.1.pep
RALANCHVRQLRLCHGNGVVLYGYGCDSLVTAGTSIPNIALVL

SEQ ID NO: 145386 - protein, 142 aa, Oryza sativa
  unsure (1)..(142): unsure at all Xaa locations
  Clone ID: PAT_MRT4530_46110C.1.pep
MGRPSCPSALTPRWHAVVVAGEAXDDEERRGVXTGPEASMVVGGGGRRPSSYQDDSHRATVGSGGDEGDTDADADEEERIPSGGADLGEWYTVQKRWRWRWSRGRCGQAWRHLPYGAGEVELGLVSTALLAAAVSGVNGIIV

SEQ ID NO: 145387 - protein, 155 aa, Oryza sativa
  Clone ID: PAT_MRT4530_46111C.1.pep
MACKWVLEVKGGSRAPAWAVRWRGRMLTYCVTNESCVQMLTYCVTNESCAGYAVLKEGGLLHSGDGTLKMVMPLPIRMRVKGENLQRRGRRRKGCYTVATASSGQSCHSRFACGWKERTDNEEEKEEGDKQPDETREGVVEAMSLGRPRHPQSVR

SEQ ID NO: 145388 - protein, 88 aa, Oryza sativa
  Clone ID: PAT_MRT4530_46112C.1.pep
MATRRLGAEARRGGGSGGDGVVERSGGGANPNFPGCVGGSGVFWGEGGETWCMRATTMVAVGREEVRRLSMLTAVEAEVTECKAYCYI

SEQ ID NO: 145389 - protein, 125 aa, Oryza sativa
  unsure (1)..(125): unsure at all Xaa locations
  Clone ID: PAT_MRT4530_46113C.1.pep
GACGICGPLPPQIIAARTTIFDLDAVVGDGIIDLVDVHLDLEFDFFFWDGWVLLLLQKDSSTPNGCVHRVTEHTAHVPRYTLHIFHQLMYNSXARVVHELMTETTCDLACFXETMLRYTLFVTLT

SEQ ID NO: 145390 - protein, 66 aa, Oryza sativa
  unsure (1)..(66): unsure at all Xaa locations
  Clone ID: PAT_MRT4530_46114C.1.pep
FFFFFIGYXEQFLFXIELCLYYVYNRIRRPQVLNKFYDINRMKSFWYALERCVYTMMGGAIYTMCP

SEQ ID NO: 145391 - protein, 259 aa, Oryza sativa
  Clone ID: PAT_MRT4530_46115C.1.pep
MRRKPLTIEAVGRAKDDGDFNNALHRATSLNGGSVWAQQVAVSPLGRSIVTPSPSRNVASPQKLSHRCSTRGQATTTRQEHPTTTPPRGHVVAPASAVPSVHLKAKLSPLRLRLGRYHASVGDGVGPVRPVVLTTIILPSSSFYSMSGVRGVGRRLMSSVGGVGRRLVAIGEEEKKSCAGPSILSPPTLPLLVATALRRRWKGAAVVAQSADKEWKCGTRSLHPSMPSTGPPCHHRLHRRNCAANKEVLKTTAPRRGTA

SEQ ID NO: 145392 - protein, 96 aa, Oryza sativa
  unsure (1)..(96): unsure at all Xaa locations
  Clone ID: PAT_MRT4530_46116C.1.pep
MASGAGGVVSIARSSLGRVHDLGRRRRRPEAAKPPLVAASPRHRRRPRFRRRRQPETADPAPSCVDLAPSWPDRXMERLRPRRIEEEAATPAEEQF

SEQ ID NO: 145393 - protein, 1063 aa, Oryza sativa
  Clone ID: PAT_MRT4530_46117C.1.pep
MAAAGVPFSIRGYAARARAGAADEGGRCWPFAGKAGALPPMEVRGFRWWEDEAAALAEEEGEEERRLAAKRRKRSIVELFAAVPKVVAAADEGLGRGKRVRRKLDKGDPPAVGVEAAKKKGFRKQKVLVEIGVRKKALHSEKFKGKNSKTKVTSASMSQLFQNAIQKQKKKSLSKKKGVPLEKKSMKGNKTTTLSSQKTTKSSCHVQSILKKHLKTGVGTLLKNTDVMSPSKSLLKPKRVTFSDDNDILGRTDSQLGDGTEKSQLLQTSQQHYKDGKSQGGDNHCSTYEPQFSYQRAGAIVDSVEEDTSSTVLLTKSKEKTILANPVDLNHCLEISSSGSCLNSINSAVLSGQVLPQNFAGVGSIPNEGSNVHVGFQAEENHHKYHGSSVGASLAVKARSSDLIRRQLPEPSSSCFVASLRVNDGNRSKMLQERLTALHPRLIRSKDMVNSISSSAGSNKSTDAQTPNCVSACRNMHSEGYQGLPLNSHGEFVKLHPSGTIDPNGMFKRQFPVGDYVRPSAFPAFITPETCVDYAHLKSSYQGPQFCAVDTFDFQSEPYHSPTASAAYGMGFRQSPSSERMEVHGYAVPSNNDPYSNQQELSVGCFCPAFTGQGNQTHKPLEMQNCFPSQHYEQNSQPAPETTVRLMGKNFTLGTSSNQFRGLDNKNPCPSKQSRDEDHGTSAKAFSQLFHGTRVEPPSTLRNSNGGVEHPSRFSSVPEAELRCGLDSYSFRTSDRYQQPHLAVQNKLYVNPVSRHNESEPWQQQLHVENHILGASEPQLLGTMHLRQSKTAATVPSYSPKHNFSNLVEIRPARSQFAYFPRQNVTQRTPISSFLSGYAVQSSPGLTTPTKFTSLRPLPPSVTSSHVYSSEDAQPHGSVPPFYPSIALSDQASKNCDPGDLKDNRSMQQTPITSNHDSSEQLNRGFKRPAVEDDVFLKPRKSFIAVGKDLNLLPLQEERLGLCGSRPDAQLPVCLSKDSEVDVQLLNNDTQIAWSDSVNRVRTILPVKLRSGAKHILEPGASPTATLGQEESWPLHSIKTFVVEDDAHAVGTSKKRDEEICRV

SEQ ID NO: 145394 - protein, 69 aa, Oryza sativa
  unsure (1)..(69): unsure at all Xaa locations
  Clone ID: PAT_MRT4530_46118C.1.pep
AENKSAQETATTRTAPSPKTTHHRESRXAARNRPGKPGASHAAEKQRXATTRGTEQTRRHTNANKTTDA

SEQ ID NO: 145395 - protein, 70 aa, Oryza sativa
  Clone ID: PAT_MRT4530_46119C.1.pep
MDAISIEEITEMTAAIDAKEQVKQNKAYKCQMDHKVKKNKATKLPKKVELCQHYIYLKVLRQAAVIPLKE

SEQ ID NO: 145396 - protein, 263 aa, Oryza sativa
  Clone ID: PAT_MRT4530_4611C.1.pep
MVIVGSSTAGSDYAMTITAPFVMASRADWSMEDLALLGVAREHPLDLDVELSDCHALEARVDDGDDDGEAPFLAGRGEAEAKVLGEGKAMAAAAEVEAAARGEGRGGDARRQWRLREGKADMVARGGGGGSARRSRRRRARFHHRSTTATMRRGGGGARRWQRDGGGSGGGDGGAREEEVEATVTGTRRRRREGQAAMAAARGGGGGGGMRGRGRALPGVYLAGTDVPNPGVNTPAPARDESMEALIISTGRGEACDRPPVAT

SEQ ID NO: 145397 - protein, 211 aa, Oryza sativa
  Clone ID: PAT_MRT4530_46120C.1.pep
TWMRGRKANADGSPTPHGGRFQPEQKSRRIKTHMSKAMQAEGAQDSENVTRGRMADIYRKTQSDTQQPVTVRLTRDIQLHCLEIIQPLEKICDAFSVFQYSMAVTCGSGGVRRRQWRRLGTTSASSAANGEDIGSPAVECTAVMVVAAAVEGAALGADRGGWGRRRQEKRSVWAAQRRCGERGPRLRGGQRTRCSSAAAVHLVPNSCSPGI

SEQ ID NO: 145398 - protein, 230 aa, Oryza sativa
  Clone ID: PAT_MRT4530_46121C.1.pep
MAARAVCAAEEGWRLVRVAALSFGEDKNNVVQTAMGIEVALLNLKDVTSAKPFIQTAIEPNLNGFMKMEGADFYYCGLGMSFKLYVKMRDNAGDATVVTATTGNAAAVGGGAAGGQRGRGDGGRSGVRTPPLAATQKAHEAAAGGGAAGRRRRAAGGGRSGGRCTCCTGLPEDRATARGAASRQSRRAVGRHVVGEEDGADGESEDTAAVVVHGRRSRASALNCVASGSV

SEQ ID NO: 145399 - protein, 53 aa, Oryza sativa
  unsure (1)..(53): unsure at all Xaa locations
  Clone ID: PAT_MRT4530_46122C.1.pep
RSSRNGRLAMFSMFGFFVQAIVTGKGPIXNLFXHXANPVANNAWXYATNFVPG

SEQ ID NO: 145400 - protein, 426 aa, Oryza sativa; identical to SEQ ID NO: 108334
  Clone ID: PAT_MRT4530_46123C.1.pep

SEQ ID NO: 145401 - protein, 255 aa, Oryza sativa
  Clone ID: PAT_MRT4530_46124C.1.pep
MHEVMCMCAVIGWQGGHQSIVIMGSARMPHGWTGLAQSKMEQDSMIQATTAQLGKQGRQGRRFRRRRASTTRVTHAKFGRRAREEKARAGIGEGALQDDVALTGSMRRSPTWDPRGFASARGARHGLAWPRGGFLLVQVMSTRIRTAWGARIDYVAAICTTSFESKEQRMVKIKSRNSTLIATLTMVRSSGSTSPRTPALHLALVGRSREASREARHRDWRGARPPCPTAVTGGAWRRPAAGPDGTVVPAGGRAA

SEQ ID NO: 145402 - protein, 252 aa, Oryza sativa
  unsure (1)..(252): unsure at all Xaa locations
  Clone ID: PAT_MRT4530_46125C.1.pep
MGAGVVGGGDGWWQWRCEIRRSVGKSSAGAGSWWRRRQRRHPRLGGRRLVPCVGCGGFSCPSLVPPPRLLPLVPLHQSHLRRLLLSLTSSMMVLVLGGLVEEAMFGVLEAAVDGCMLLPDSCRLLMQTSSSPANFVVSARQEDLCSHYNARMMKVDWSLVQSSLLCLISRNHAEFVIRVELGPHARFRSTGFLLEFLRFNDELRGDPLLCPVKLTPISTAQHHTSVLCCFCGGXPRWGLPVCQAVCTSYEAL

SEQ ID NO: 145403 - protein, 90 aa, Oryza sativa
  Clone ID: PAT_MRT4530_46126C.1.pep
FTPPLCTLKKAQKKGSASTAFKAHPTSMVSPPAGKSSIFRALPKDVLANAYRFSKEKGQRLQLNKGDEFGAFPPIQNKSLPDVYNAAESS

SEQ ID NO: 145404 - protein, 290 aa, Oryza sativa
  unsure (1)..(290): unsure at all Xaa locations
  Clone ID: PAT_MRT4530_46127C.1.pep
MGARSAGGPPPHVSLCSAARSPLSFLALFFFRRLCFSTQHPKAKEKQQPKMCGGAILAELIPSAPAARRVTAGHVWPGDANKAKKKGARADDFEAAFRDFDNDSDDEEMMVEEAEEEEATSEHKPFVFRXAAPAVKATPVINLVEEEDEEEVAAAMASIKYEPETSESSESNALPDFSWQGMSASDEFAVAAAALSLDSDDDLAKKRPRTEPEDTTDSGSGDDTDALFDALLFADQYNHFNGGAYESLDSLFSADAVQTTPAPASADQGMGFWSFDAGCCLVDVEASLSF

SEQ ID NO: 145405 - protein, 329 aa, Oryza sativa
  Clone ID: PAT_MRT4530_46128C.1.pep
MCGGAILAELIPSAPAARRVTAGHVWPGDANKAKKKGARADDFEAAFRDFDNDSDDEEMMVEEAEEEEATSEHKPFVFRAKKAAAAASSRRRKPAQYRGVRRRPWGKWAAEIRDPVKGIRVWLGTFTNAEAAALAYDDAARAIRGDRAKLNFPSATTPDTRKRGRATAAAAPAVKATPVINLVEEEDEEEVAAAMASIKYEPETSESSESNALPDFSWQGMSASDEFAVAAAALSLDSDDDLAKKRPRTEPEDTTDSGSGDDTDALFDALLFADQYNHFNGGAYESLDSLFSADAVQTTAAAAAADQGMGLWSFDDGCCLVDVEASLSF

SEQ ID NO: 145406 - protein, 151 aa, Oryza sativa
  unsure (1)..(151): unsure at all Xaa locations
  Clone ID: PAT_MRT4530_46129C.1.pep
GLFKMEDVSMGMWVEDFKHXPAPVQYIHSWRFCQFGCVHNYFTAHYQSPWQMLCLWNKLSSGRAHCCTTDDAHSSTPSISQLTAGNIDRSPHEGNILCRAYMDQGLHLLDLNSSCSTDSGYHFTGALLRQDKYYIGGIFTASPPGAHVVYI

SEQ ID NO: 145407 - protein, 136 aa, Oryza sativa
  unsure (1)..(136): unsure at all Xaa locations
  Clone ID: PAT_MRT4530_4612C.1.pep
MAPHVRMPRHLFFIPFFSLLQRVGDAATGRDGRAGEAGAAAEAEQGAGAAGFGRRRGATSSRRRARPPPPRSPAIAALARRRSRPXSAASPRTAAAHCSCSATTRTVVRAAAPSFAHDESTTTTPTIGLASLYCIV

SEQ ID NO: 145408 - protein, 158 aa, Oryza sativa
  unsure (1)..(158): unsure at all Xaa locations
  Clone ID: PAT_MRT4530_46130C.1.pep
PIRDKRRQGXNQSEXLHLIGXVRGXRLLVDGSDDMIDTAGDRVVHRERMLAATGEGASAPSTPSSTHAVLSPPAVDQALQSASSRMVIVTXNPVPVLHHRTFPQLTVLSLSNLLXETIWRVHDDCSVSSIFHDDQFNNTIYTTYSINSINLVHSKHTS

SEQ ID NO: 145409 - protein, 117 aa, Oryza sativa
  Clone ID: PAT_MRT4530_46131C.1.pep
NFKSLTEYCSRLQILLTGRSNRKCNINGLANPQELICNDWNHIKGTGKKLLRYYRTKSAQTVISHHHRTLKPSMSDRFSSNDFDKEQLSAKSTYAFQFKKKIHVSLFFIYVTGQLTL

SEQ ID NO: 145410 - protein, 72 aa, Oryza sativa
  unsure (1)..(72): unsure at all Xaa locations
  Clone ID: PAT_MRT4530_46132C.1.pep
MAPSNLPSVINATSQNIETLLAAQCHLGSKNLQVHMENYLXKTRQDGVNVINVGKTWKKIVLAARVIVAIDN

SEQ ID NO: 145411 - protein, 71 aa, Oryza sativa
  Clone ID: PAT_MRT4530_46133C.1.pep
MAPSISLVAATGVEAGGRGKESAVVEVVASGRGGAPADHGMVATPCRCRCRCSKEVAGIRPFQPGGAAPSH

SEQ ID NO: 145412 - protein, 53 aa, Oryza sativa
  Clone ID: PAT_MRT4530_46134C.1.pep
CSSADELNSATTPPILDRAKIVRVSNIATTPRQANASESYRYELDGSTTTSPS

SEQ ID NO: 145413 - protein, 113 aa, Oryza sativa
  Clone ID: PAT_MRT4530_46135C.1.pep
MARGETQQTKVHFKGSDDFVIFIDDVETYQKWKTDKSVPLAHFISSFKIFCTHGQGAQGTLDAASKAALENELGTSVDDDVIKQILEKGETQNTEFPERQGSKNDSKGPMASH

SEQ ID NO: 145414 - protein, 92 aa, Oryza sativa
  Clone ID: PAT_MRT4530_46136C.1.pep
KMCQFFPLVSFFPKKVGKNSLKAGVRPPVIDNRLFAPYQKRSILSFLKTQFKLLIPTFKIKIASQKKKKKTNKKKTQKKKKKKKYKKKKKKK

SEQ ID NO: 145415 - protein, 78 aa, Oryza sativa
  Clone ID: PAT_MRT4530_46137C.1.pep
LLPVREILNARGPFINRVGVIRDKNFDIRSHCTGIFILIEELEKWIIKLNDRIYHDSIPLHEVKLLTKQIREIFKTKP

SEQ ID NO: 145416 - protein, 103 aa, Oryza sativa
  unsure (1)..(103): unsure at all Xaa locations
  Clone ID: PAT_MRT4530_46138C.1.pep
PTPFQGGKGPPPRCPGAPKKRGLFPRGGLKNGSPXPKGGPGGPNPPPPPGGGVAKKNKPGGLKFWAFERGPFYSPPRGPFGGQFGAPPPGNSPPQRGNFRCSR

SEQ ID NO: 145417 - protein, 631 aa, Oryza sativa
  Clone ID: PAT_MRT4530_46139C.1.pep
MTAPCIAGAIKIATHISSMCSPQWSPVFRHVEADDTAKRRTQKSKSFKEVEKFDVFVLEKSSGCKFRSLQLLLFAIMSAAFLTLLYTPSVYDHQMQSSSRFVSGWIWDKTIPDPRYVSSLGVQWEDVYKTVENLNDGERKLKVGLLNFNSTEIGSWTQLLPDSDFSIIRLEHAKESITWQTLYPEWIDEEEETEIPSCPSLPDPIFPRGTHFDVVAVKLPCTRAGGWSRDVARLHLQLSAAKVAVTAQEAIVNLVKHEGNAWMYKPDLKALREKLRLPVGSCELAVPLKAKARLYSVDRRREAYATILHSASEYVCGAITAAQSIRQAGSTRDFVILVDETISNHHRKGLEAAGWKVRIIQRIRNPKAERDAYNEWNYSKFRLWQLTDYDKIIFIDADLLILRNVDFLFAMPEITATGNNATLFNSGVMVIEPSNCTFQLLMDHINEITSYNGGDQGYLNEIFTWWHRIPKHMNFLKHFWEGDEEEVKVKKTRLFGADPPILYVLHYLGLKPWLCFRDYDCNWNNPILREFASDVAHARWWKVHDKMPKKLQHYCLLRSRQKAGLEWDRRQAEKANFTDGHWRRNITDPRLKTCFEKFCFWESMLWHWGESKNSTKENPVPATPTASLTSS

SEQ ID NO: 145418 - protein, 185 aa, Oryza sativa
  Clone ID: PAT_MRT4530_4613C.1.pep
MPVMSSPVHGVQEHRQSGGGEKKAEQGEKEAAAKVEKVPFLKLFSFADRWDYVLMAVGSLGACAHGASVPVFFIFFGKLINIIGLAYLFPTTVSGRVAKYSLDFVYLGIVILFSSWTEVACWMHTGERQAAKMRQAYLRSMLDQDIAVFDTEASTGEVINAITSDILVVQDAISEKVHTLLLTPA

SEQ ID NO: 145419 - protein, 89 aa, Oryza sativa
  Clone ID: PAT_MRT4530_46140C.1.pep
PDLVMAIISKKNITMALGCLVAFVILAVALSSCKADESTDVCFYTGLRACQVRMCGAYCRKYYGNLVDWKGAYCNEQVKCCCKARSISR

SEQ ID NO: 145420 - protein, 73 aa, Oryza sativa
  Clone ID: PAT_MRT4530_46141C.1.pep
MGSLETTNTRYRPAGAADDTAKRRTQKSKSFKEVEKFDVFVLEKSSGCKFRSLQLLLFAIMSAAFLTLLYTPS

SEQ ID NO: 145421 - protein, 652 aa, Oryza sativa
  Clone ID: PAT_MRT4530_46142C.1.pep
MTAPCIAGAIKIATHISSMCSPQWSPVFRHVEADDTAKRRTQKSKSFKEVEKFDVFVLEKSSGCKFRSLQLLLFAIMSAAFLTLLYTPSVYDHQMQSSSRFVSGWIWDKTIPDPRYVSSLGVQWEDVYKTVENLNDGERKLKVGLLNFNSTEIGSWTQLLPDSDFSIIRLEHAKESITWQTLYPEWIDEEEETEIPSCPSLPDPIFPRGTHFDVVAVKLPCTRAGGWSRDVARLHLQLSAAKVAVTASRGNRGIHVLFVTDCFPIPNLFSCKNLVKHEGNAWMYKPDLKALREKLRLPVGSCELAVPLKAKARLYSVDRRREAYATILHSASEYVCGAITAAQSIRQAGSTRDFVILVDETISNHHRKGLEAAGWKVRIIQRIRNPKACVRDAYNEWNYSKFRLWQLTDYDKIIFIDADLLILRNVDFLFAMPEITATGNNATLFNSGVMVIEPSNCTFQLLMDHINEITSYNGGDQGYLNEIFTWWHRIPKHMNFLKHFWEGDEEEVKVKKTRLFGADPPILYVLHYLGLKPWLCFRDYDCNWNNPILREFASDVAHARWWKVHDKMPKKLQHYCLLRSRQKAGLEWDRRQAEKANFTDGHWRRNITDPRLKTCFEKFCFWESMLWHWGESKNSTKENPVPATPTASLTSS

SEQ ID NO: 145422 - protein, 98 aa, Oryza sativa
  Clone ID: PAT_MRT4530_46143C.1.pep
MTLGEEAESIRAFRTRCPLHQEVGSCVLELGPIERWALALRVRKAEEVLWGRIENYQHWIAPPRGERSPPTDLCVGPSEEWKWKRIISMSTSKRTLAE

SEQ ID NO: 145423 - protein, 345 aa, Oryza sativa
  unsure (1)..(345): unsure at all Xaa locations
  Clone ID: PAT_MRT4530_46144C.1.pep
PPRSPADSIGSPAATEEEEASAAFGATPEMEGFLCDRLLDAAQPIAERFRALFSLRNLRGDAPRRALLQAARDSSNLLAHEAAFALGQMQDAEAIPALEAVLKDLSLHPIVRHEAAEALGAIGLEKSISLLEESLAVDPAVEVQETCELAIRRIEEQKNTSGVESATVSPFLSVDPALPAKQGLPVEQLRHVVQHSPTCLHCALELLLNEQESMYERYAALFALRNDSGDAAVSAIVAALGVKSALLRHEVAYVLGQLQNKAASDALSTVLKNVDEHPMVRHEAAEALGSIADQESIALLEXFEAAEXPIVSQSCEVALSMLEYERSGKAFEFLFPQTPQVQQES

SEQ ID NO: 145424 - protein, 154 aa, Oryza sativa
  Clone ID: PAT_MRT4530_46145C.1.pep
MEGFLCDRLLDAAQPIAERFRALFSLRNLRGTPLAAPSSKVSPSSAHPLTSARDSSNLLAHEAAFALGQMQDAEAIPALEAVLKDLSLHPIVRHEAAEALGAIGLEKSISLLEESLAVDPAVEVQETCELAIRRIEDRGSSRVDLQACKLEYSI

SEQ ID NO: 145425 - protein, 68 aa, Oryza sativa
  Clone ID: PAT_MRT4530_46146C.1.pep
KTKDNFFSIYITQRFTWHIRFFLSVVLTFKTLYGYFFLQDTATAGKGTGCAITPRADTIPRWTHRRPH

SEQ ID NO: 145426 - protein, 102 aa, Oryza sativa
  Clone ID: PAT_MRT4530_46147C.1.pep
PQGKLNLRSKKRIKQFHPRPDSPQVDSPWGICGNPILFPGQGRPNWDSGKKDCPAKVSSNPQACMGGPPWLIGPVPQTNFFFFGCWFRTFCPFSRGTCPKKN

SEQ ID NO: 145427 - protein, 60 aa, Oryza sativa
  Clone ID: PAT_MRT4530_46148C.1.pep
GSAHVSVNDLTNAHRISTQKDQWLKHHRQDEFGAFTPLQYNHHAMSLAMCETLIKLAISI

SEQ ID NO: 145428 - protein, 295 aa, Oryza sativa
  Clone ID: PAT_MRT4530_46149C.1.pep
MAAIHALHTLRRTSMAMQTSITEIAAGHDKVTELVLALRAGFEAKRAAVETTPTTPSPMPTLPKAEVQQPLATAPPSLPSSLFAATVEETVMTASSPLPLPHPAEVLQPLVAAPSSQMSFASKAAAVLPCLTTVGPALPGAPSTPSQPRETILSRHDRSLLRPRRQRGIFKQLPRASTAITLRAAQRRGESSAAPPAWDLGGPRKPHFRAAIAACAARAMWLLVAPSSLHGSGVLPLCASGWGPPELGCGRMAGTTNIILDLFFFPNNVRSPDVKGLIIWDESRCQNNHRVQTSL

SEQ ID NO: 145429 - protein, 75 aa, Oryza sativa
  unsure (1)..(75): unsure at all Xaa locations
  Clone ID: PAT_MRT4530_4614C.1.pep
KRERNKRRRKKGMESKKMERKRKEGKEKEGRKEKRKKRNKEKKXKRVREKKKKREDVIKDKKGKKYSHHILLTRR

SEQ ID NO: 145430 - protein, 119 aa, Oryza sativa
  unsure (1)..(119): unsure at all Xaa locations
  Clone ID: PAT_MRT4530_46150C.1.pep
QVSDDSQAHHERFKRXHDDDSKAHITSYYQKLMHPLVTVYHYEGPNVNTSLTHAQAIILDERIHDKAHRYDEIIKIITTGSKATXLATDDSYNDQXIHPITKDLKADTNDELHATLEAI

SEQ ID NO: 145431 - protein, 66 aa, Oryza sativa
  Clone ID: PAT_MRT4530_46151C.1.pep
WKKKNKRGTKALGKFTQNGLITLLNYLLFRNQQRARGQRRTITESCKIPSLQSNSSILHTIFSLPP

SEQ ID NO: 145432 - protein, 263 aa, Oryza sativa
  Clone ID: PAT_MRT4530_46152C.1.pep
MAARHEDEEEETAVLLARQWHMVRRGGGGCRFGAVLREEKRQPIECGSAEPVWGGDGVQCCRVGASVRLGFWQCGPVKALPRGCGNRAKNGKGNPSERDMDDLTLAQKFPISAAAADDEATTARPLGTAGGIRIQLPASYKVFILGEVRHQVQQPATLSHLLSQITVETTVYNHSRWITLGASRSSPMQFPQQSAECHLVRSTSGDWAPMLVCGGAATRQGHARDRRRASRQQERCGRRKASSSSKILCILLPDSKDYCHAKY

SEQ ID NO: 145433 - protein, 184 aa, Oryza sativa
  Clone ID: PAT_MRT4530_46153C.1.pep
MNEVEKGLPGGASEDYGKVLRRDRCWLFRRPNHRFGHLLRRSHRTIARILTAPPRSLPGSPPLSPPLRSLLRRLYLCLHCSPPPPPLRRSSQATLRGEAAPQRERGERRRGVWLLVARRAGTWRKKSDLCGTVREAMTENHVDEIFDVAYASRIDEGILQSSLGENVQEKRSRSAPRRDSQKRK

SEQ ID NO: 145434 - protein, 826 aa, Oryza sativa
  Clone ID: PAT_MRT4530_46154C.1.pep
MAKTEAKAAKGKGSRWYPARLEASWAKTKWRRVGTELRQLFSMVDNQSLGTGTKTPLTKPPPGQPSEIDAGNIVPITLDKLSPEQRQEFEQIMSNVKNKYLESFKQTRLGPVQKYKLNVVAANEHRQAHRMMAMIRKIKVIKDQVDYAIYHALINQSGVLVNTLTNMIKSMVDGIVAVEQAKGPVFLPEGGFPPYRNLVIGNQQVVSNVPPGQPMASASASRPGATTSAQRPVNPYLLTREQPQHAGQNMNRLSQHRIAAMFRSPQPAVEPIQPTQTRQQVVQPIGQQAIQPVPKEPRTPINRQHQPVGAQFIPKQQVHNVQQPPQNYLGGNLNFQYQPHSPQVQYQPGGSPQPQFLPQYNQFNPTQQQMQGVPQQKPWVDMYADVMKEQLGLKPRDTGNLYRHPYPECGNLEMKLSNLTAVRQRHDETVQDYIQRFRGMRNRCYSLALTDSQLADLAFQGLIAPIKEKFLAQDFESLSHLVEKVTLHEQRFAEEFQEEDDDSEVAATEWARSKKVVPCQWVRNSGKEEKYDFDITKANKIFDLLLQEKQIQLPAGHVIPLAEELGKRKYCKWHNTCKVTTANEVEADKAKRLLKGKATASSSVNMVFMLPLEFEAKQADVDDVEEASARLILPPEQTNFEKPEGIENRHLKPLYVNGFVNGKPMSKMMVHGGAAVNLVPYTSFRKLGRNEDDLIKTNMIIKDFGGNPSETKGVLNVELTIGNKAVPTTFFVIDGKGSYSLLLGRDWIHANCCIPSIMHQCLIQWQGDKIKIVLADRSVNVVSADLALWEMDGIDCLSGKYWEGDFLKVSDYDIQPIEDGEPKLLL

SEQ ID NO: 145435 - protein, 46 aa, Oryza sativa
  Clone ID: PAT_MRT4530_46155C.1.pep
EAKNVWSKVFIPATNVRDPHYTLKLLTYTSHMRYKCKGYDDDPGIT

SEQ ID NO: 145436 - protein, 189 aa, Oryza sativa
  Clone ID: PAT_MRT4530_46156C.1.pep
MGFLHRKTSKQTGKLKTLLGLAISRIAAVRRPRLARKSIATDDVRQLLTLGHLDRAIHRAEQVIGEGNMLEAFEMIEMYYKRLIENAAKLDKPGECTEEIREAAAAVMLVAGWCGELPELPFARTILADKFGSDFAEAAKDGTGIVDPMVFWQLNSMELKKKVTKEIAMENNIVVDFSELQDAVKDGED

SEQ ID NO: 145437 - protein, 59 aa, Oryza sativa
  Clone ID: PAT_MRT4530_46157C.1.pep
LEQAGARLFDSIRWISWLYQILWKVSAFGHDGFHDLVPNDRVPTLLPRVKRLTVCTADQ

SEQ ID NO: 145438 - protein, 203 aa, Oryza sativa
  Clone ID: PAT_MRT4530_46158C.1.pep
MGFLHRKTSKQTSKLKTLLGLAVLRIATARRPHLARKSIATDDVRQLLTLDHLDRAIHRAEQVIGEDNMLEAFEMIEMYCKRLIEHAAKLDKPGECTDEIREAAASVMLAAGWCGELPELPFARTILADKFGSDFTEAAKDGTGIVDPMNGELTKLGLAVGVEVFWQLNSMELKKKVTKEIAMENNIVVDFSELQDAVKDGED

SEQ ID NO: 145439 - protein, 635 aa, Oryza sativa
  Clone ID: PAT_MRT4530_46159C.1.pep
MAILTRIPDNKCSSRIIVTTRIEHVARACSPASPGEDYIHRIKPLGSEDAKELFVNRVFGPQKDCPEQFEEIMYKILTKCSGLPLAIVCIASLLGSYTSPGGVEVWTRVCNSTGSLMENNPTLDGMRQILTLSYNHLPHHLKACIMYLSTFPEDYAISRDRLVQKWMAEGLIPEMRGLTSAEVAEAYFDELLSRNMTTTVSYSNDGKPNSCSVHDMMLEVIVSKALESNFVSLVGGQCGSMPYSSVRRLSIQNDDIGSGIDNTNLRHVRSLTVFRPEGHRKLLDRLAEFSLLRMLDLEGCKDLRNKHMKHICRLFLLKFLSLTDTDITKLPSQINKLQHLQTLWLFNTLLDKVPESLVDLENLKQVGFSNRQDWRKLLRLPQHISKMKAIEELTRFELLSEDAQLAMEIGDLVHLQFLNVVLNCFDCSDGQLLTELAKSIGRCSLYRLKVEDMMPDSNNMNFLLNLPSPPKLLRYLCIGGTIDRIPGWVQSLTHLVHVEFWWIYLPSDEIYGALYKLPSLTKISLDRWCCSEDELVARTDFKFPLLKVLSFVPDEGTPQVVRFEEGAMPKLETLVMYFHDKKRSLEGVEHLTSLKDVRVRGSRDNHEMGTAVIQLKEENARRHSSNQFKVIVEYE

SEQ ID NO: 145440 - protein, 41 aa, Oryza sativa
  Clone ID: PAT_MRT4530_4615C.1.pep
CAARSYLNLIIKSPTILATSITYHRHHVSVFLHRGSSLSAS

SEQ ID NO: 145441 - protein, 209 aa, Oryza sativa
  Clone ID: PAT_MRT4530_46160C.1.pep
MPSPSCCLQCNPCGGMLALFKRRPRALLRRAVGKMNSSRRRRRRAAGSFSSVRAVFWPLMSMRSDADRNDVAAADRPPASSSTDDDSGGGGLRAPSPSLDTPASTTAARVLALQAQLGEAAAASTKPSSGGDDGVEEACRSFEKHLMEMLVEERKVRDLMDVEELLCCWEKLRSPVFVQLVGRFYGELCMDLFSGRDTDVSSDSEDLSL

SEQ ID NO: 145442 - protein, 670 aa, Oryza sativa
  Clone ID: PAT_MRT4530_46161C.1.pep
MRALLRLRRRLPLPINTRAFSPSSPSPAPHEIPTVYSFLQPSVFAPRPKPQPPPPPPPPTPPAHKTLPVGDAVALEDELLAAVSEDRSDDAWLAFRSLASASLSPSPPAAAALVSHLAAAHHHRLGLKRAFAAAVFLLEKSPHADPVPEAALQAVFTSLAAAASAAPALALVRALLRCGRRLPAFPVWGSPLIELTRADTGAFVAFLKVFDEACKQMVSEKSPSAAAAMRPDLAACNAVLGGCCRLLGSVTEAERVLEIMSAIAVSPDVDSFGCLAFLYAWRDIPSRVDELDKLLDALGFGKKIFFKNLISGYLKSCSFESVSSVILRVVEERRVGGSNAFDLESYTEVAQRFVDNGRIRELAQLIIKAQETESLQQSLAVEDSVGFGIVNACVELGLLNKAHSILDEMTAQGASVGLGVYSSILKAYCKEQRTAEAAQLVSEISAAGLQLDAGSYDALIDASMTAHDFLSAFSLFKEMREARLPDLRTSYLTIMTGLTENNRPELMASFLDTVVDDPRIEIATHDWNSIIHAFCKVGRLEDARRTYRRMVFLRYEPNNQTYLSLINGYVSAEKYFSVLILWTEVRRKGADFNHELIDAFLYALVKGGFFDMAMQVIEKAQELKIFLDKWRHKQAFMETHKKLKVAKLRKRNFRKMEALIAFKNWAGLNA

SEQ ID NO: 145443 - protein, 73 aa, Oryza sativa
  unsure (1)..(73): unsure at all Xaa locations
  Clone ID: PAT_MRT4530_46162C.1.pep
QDQQAEEEEEACIELPINSQSSWLPALAAPSPSRSVRRRQVRLRPQVPAEGRXGNXPPXLHRXRRRXXHQVLL

SEQ ID NO: 145444 - protein, 207 aa, Oryza sativa
  unsure (1)..(207): unsure at all Xaa locations
  Clone ID: PAT_MRT4530_46163C.1.pep
IGSGPGLSVARLLSFSLSFFSHRLLPPXHREAAPGHGWARRARAGAARRRPGDXAEELRRPSTGGGGARRSRGERCGTATSXRAWLGEPPGWHVHGDLHGRSFVAXGLVTIMALIDEIVGGGSSXRNRRSNRSEDLPRDGGMTKFRGGGGAGKKLRHAHKVFDEMCSREKKRQRGADELVGARRTATARGGMETARRRRHDAAGRRR

SEQ ID NO: 145445 - protein, 110 aa, Oryza sativa
  Clone ID: PAT_MRT4530_46164C.1.pep
PSPGGPPRGLPPKPQGSARPFFPPTPGPPPQKTKARAGPGPPGEIVGPPRPPRDPPPGAPWAPQFPVFKRRGGAKPPLFFGTLPPQGPFWEGRDVPGGKTPPPPVRPLEQ

SEQ ID NO: 145446 - protein, 398 aa, Oryza sativa
  Clone ID: PAT_MRT4530_46165C.1.pep
YCFFVSKIRTTSIEDTSQLISSRKANIPIFGEPEHLNWYHHGNRWTDKFNHVVGVVHTNYLEYIKREKNGALQAFLVKHINNWVTRAYCDKVLYLAQLVLVLRLSAATQDLPKSIICNVHGVNPKFLKIGDKIMADRENGQQSFSKGAYFLGKMVWAKGYRELLDLLDKRKSDLQGFKLDVYGSGEDSQEVQSTAKKLNLNLNFFKGRDHADDSLHGYKVFINPSISDVLCTATAEALAMGKFVICAEHPSNEFFMSFPNCLTYRTPEEFVARVNEAMAREPQPLTPEQRYNLSWEAATERFMEYSDLDKVLSQPVTEGVHRSKTRRTIQSNLSDAMDGGLAFAHHCLTGSEVLRLATGAIPVNLELQVYMVCSKSRAGSMILRALGELIVMGPLSYT

SEQ ID NO: 145447 - protein, 138 aa, Oryza sativa
  Clone ID: PAT_MRT4530_46166C.1.pep
MPPRSPLLALVFLAAGVLSSATSPPPPPCSRSCAALNCDSVGIRYGKYCGVGWSGCDGEEPCDDLDACCRDHDHCVDKKGLMSVKCHEKFKNCMRKVKKAGKIGFSRKCPYEMAMATMTSGMDMAIMLSQLGTQKLEL

SEQ ID NO: 145448 - protein, 438 aa, Oryza sativa
  Clone ID: PAT_MRT4530_46167C.1.pep
MEVGSLQHLGDSFSYRWLKHAAQAPSFKRLVDDDVGGSSRYFIDMDPADLFSMRWTAPGTDFDFDFDLPGGDDDAASPIPLLVSASQIFHDGRLLPHELDDDGRFGAQEDGDAARVAHLLSEPRLSASSPLFHSAQSTPASLSSSSSARSGASKNASAPPLLAAGRRGGGSSPWKILLRYLRFLMPLYRKVRALPPLRAPRTRVSPASPASARARASTSSIDWCHGIADTAVHDAILYCKKSSTVDVWKPTNSGSSSADQREEAQSLTYDGVIVLPHLVNGWDTLSDFFLIPDTRVPAGTWYPGIELVPRYQTLVPGETSPQHVAARHLDHTFEKLASAHLPLMAASPTEPLTLPCLAHRLPLRLHRRGALHFLRLFPRVFDLRALLPLSLSLTAPTAELLAVATFAAYPTAAAAAAAAGSGERWGNDEGEGCTSGAI

SEQ ID NO: 145449 - protein, 120 aa, Oryza sativa
  Clone ID: PAT_MRT4530_46168C.1.pep
SDVYSFGVVLLEVATGQGPILQGNGHIIQHVKEKVASGDISSIADERLNGGYNVSSMWKVVEIALLCTKPLPAQRPSMTTVVVQMKESLALEVAREDRGLQANPTGDAVATSSTFDPSAR

SEQ ID NO: 145450 - protein, 86 aa, Oryza sativa
  Clone ID: PAT_MRT4530_46169C.1.pep
MVVTSTSGDVCGGRRGEFVRRRRSSRRRRSGRSPSWSPSRRRSRPPLRRRCRPPEHCRRRQAEGCRRFFLVADVVRSSSAVALVTG

SEQ ID NO: 145451 - protein, 52 aa, Oryza sativa
  Clone ID: PAT_MRT4530_4616C.1.pep
RLAKILALIFEYSPNKPSHIVSHNVALWSKLWWNKSVPSSDPGTRILSPIEP

SEQ ID NO: 145452 - protein, 201 aa, Oryza sativa
  Clone ID: PAT_MRT4530_46170C.1.pep
DAWADAWEPLLSLRIEGPTSLSSTPSMSPNDRLKLKRLAPGQVELSSRAIPAVTDDDGDGSHAAGLWPLLSLNGSDGSLQGFEELLASVLGKKAGEKGTFKLLKARASAQTYVKMGFAVEKRIADGEVNWSNFPEWKTKPKKLRAHYEVLARVEGGQAIPERIAQVQPFEADEAMSESVLTGNVSMSKTEVVHPPPVYFTL

SEQ ID NO: 145453 - protein, 48 aa, Oryza sativa
  Clone ID: PAT_MRT4530_46171C.1.pep
SKERYIGKPGRGVFLCVWSTGEIYPDPLCLAERPRWCIQILLRKIPAG

SEQ ID NO: 145454 - protein, 143 aa, Oryza sativa
  unsure (1)..(143): unsure at all Xaa locations
  Clone ID: PAT_MRT4530_46172C.1.pep
PDPPPWPPPPPPPPPLPYPPPXAPPPXPYPLPDPXPEPLPYPPPXPPPPPPPCPPPPPLAPPAPDPYPEPXPYXEPCREPYPKPEPPPSPPPPPPPPPWPYPPAPAPPPSPYPDPEPYPDPPXPPPPPLPPPPPPPPPSPPMP

SEQ ID NO: 145455 - protein, 114 aa, Oryza sativa
  unsure (1)..(114): unsure at all Xaa locations
  Clone ID: PAT_MRT4530_46173C.1.pep
FLLFGPTWRCLRDAFHRDKIPVCRSDLLDFIRLKGGKNSVWLTIFTACFWSLWIVRNNWIFNNKLLSNVINSPHQVISLLTQWSGLAPVKXRGELDVLRGSLLVSIQEIEGAPT

SEQ ID NO: 145456 - protein, 33 aa, Oryza sativa
  Clone ID: PAT_MRT4530_46174C.1.pep
FQSIFCFWWLLGSCLIKSGCNENLWTYLGMIYH

SEQ ID NO: 145457 - protein, 56 aa, Oryza sativa
  Clone ID: PAT_MRT4530_46175C.1.pep
PMFSIGSHHNEYLLVSLSLFCRLLAWIAISRRIAYSLFIALWLRLWTTPLAAAMAA

SEQ ID NO: 145458 - protein, 119 aa, Oryza sativa
  Clone ID: PAT_MRT4530_46176C.1.pep
MAKSSFKLDHTLERRQAEANRIREKYSDRIPVIVEKAERSDIPDIDKKKYLVPADLTVGQFVYVVRKRIKLSPEKAIFIFVKNTLPPTAALMSAIYEENKDEDGFLYMTYSGENTFGLL

SEQ ID NO: 145459 - protein, 632 aa, Oryza sativa
  unsure (1)..(632): unsure at all Xaa locations
  Clone ID: PAT_MRT4530_46177C.1.pep
MGAPPTRESEARDEEAEVSRSGEQGGGEASTTQQQQQPVPLRHQLLGACRADERLRPLLTLNLSCGAAEDRFISHLSQHFEASEVGLLYRCLCVPLVALRVGKVDRHGPLLCPTPIRGKLSLGLLPSSSMCIIFAGDDGHSEQLALLNNDHEVSEVCVEEISADNTGRSFLIRISESKVFYYWCAEKSKKHGMDLLAKMKNLLQGRPTLSDLTGISDSRLDAFATHLHAYLVASSIGDVKSLGSLNDFLGASSPQDQYLQPSSVVSKSSRFCTSAANAAKASSVYQTSLSPRXRAFKDGVPRMSCAKIAGRDKLKRRGDWLSSSTGPDDANLLTPKIVSSDSASEKCGGDCSENSANSPPLDLPLSFPLLPSLFPLATQYPLPKDSTEQPFKPYYCWCPPCPSSLQYSVTPLHMPVTSVEPLPLPPLSSLLSNDQPPTSTVSAKMDTTDLPSLNLPSILRDPLLHLPLPTSPLVSLHGSQVPTFTPLMSDPIVHVPVIDVCSSGQAYLVSCGPSMSATVTLLPSLKPLIPETESLVERSARETLMRLIASTPSASNPQLVNILPAVLTDVPEMNVRKHLGVHPGDRLSSSCSVDVIGPGFAVTEDDASVGDGAHATFAEYDDIGDQQHFQSM

SEQ ID NO: 145460 - protein, 342 aa, Oryza sativa
  Clone ID: PAT_MRT4530_46178C.1.pep
MERRRWLQAAVLCCLLVLCSGRELKTKHTPIYNSTLARTLAEYTSAVYTADLTQLFSWTCERCCDLTEGFEVIELIVDVKNCLQAYVGYASDMNAVVVVFRGTQETSIQNWIEDLFWKQLDLDYPGMPQAKVHSGFYSAYHNTTLRDGVVNGIKKTREAYGNIPIMVTGHSMGGAMASFCALDLVVNYRLKDVTLITFGQPRIGNAVFASHFKCHLPNAIRVTNAHDIVPHLPPYYHYFPQKTYHHFPREVWVHNVGLGSLVYSIEQICDDSGEDPTCSRSVSGNSVQDHINYLGISMHAEASGSCRIVTGDNKLQYKMDSDGNIVFSKQPGLSVDQLHSSQ

SEQ ID NO: 145461 - protein, 153 aa, Oryza sativa
  Clone ID: PAT_MRT4530_46179C.1.pep
MGAPPTRESEARDEEAEVSRSGEQGGGEASTTQQQQQPVPLRHQLLGACRADERLRPLLTLNLSCGAAEDRFISHLSQHFEASEVGLLYRCLCVPLVALRVGKVDRHGPLLCPTPIRRGKLSLGLLPSSSMCIIFAGDDGHSEQLAFLNMTMK

SEQ ID NO: 145462 - protein, 142 aa, Oryza sativa
  Clone ID: PAT_MRT4530_4617C.1.pep
QLEYLKDTYEGIPVYVQENGKFSNSISIHVQPNGFGQFDKEDSLNDTERVEYLSSYMGGTLAALRNGANVKGYFVWSFLDVFELFAGYHSPFGLHHVDFEDPSLPRQPKLSAQWYSKKFRSKDYLDMRRLLAVLLGLAREDV

SEQ ID NO: 145463 - protein, 207 aa, Oryza sativa
  unsure (1)..(207): unsure at all Xaa locations
  Clone ID: PAT_MRT4530_46180C.1.pep
PFPRGIIAPRRKEPHSYRVCECCRRSAHLVGDTALASGGIDEDARWVVVLPHAIALACHQLELPRALPPWSRSRSSLPCGSGELEASQWGRRRATDASFCADAGYSTIPTGKSAAATSASICHRRLDPPPTPPRSPSPPPRSTRRRGDRGMAARRXPRVVPRHRCLDPSPPHRSPPPAPPSTATREGRGGDASREESSSWREGRGQM

SEQ ID NO: 145464 - protein, 43 aa, Oryza sativa
  Clone ID: PAT_MRT4530_46181C.1.pep
YCFSLKEKFYKRFETLYLFLFFYIDRISCIEFFLRSRWSGIEK

SEQ ID NO: 145465 - protein, 102 aa, Oryza sativa
  unsure (1)..(102): unsure at all Xaa locations
  Clone ID: PAT_MRT4530_46182C.1.pep
LPAAAVWXQMYIVYRQVVDNKXGVVPHNVGKAGHRLEAPKRQIVKCRGLGLHLHFRTPPGRVNTLYGFPVSVLLLWNLWSEITIFNTGKQSRTHELRPRGAS

SEQ ID NO: 145466 - protein, 58 aa, Oryza sativa
  Clone ID: PAT_MRT4530_46183C.1.pep
TRSRHPSFAPDFNATSNHVLSYACLVLFGTISYDCSLLSETPSKLLVFNMDDSFLRSS

SEQ ID NO: 145467 - protein, 126 aa, Oryza sativa
  Clone ID: PAT_MRT4530_46184C.1.pep
SSRCRCHFRRTWSRRASPPPSVRRRRPPAAATPPRAASSPPPPARRRHAAAPPPPAQASSSPSSPPAPPSPLIAASPPPSVRRRRPPASATPPQAASSPPPPARRRHAAAAPPPAQASSPSSPPPP

SEQ ID NO: 145468 - protein, 38 aa, Oryza sativa
  Clone ID: PAT_MRT4530_46185C.1.pep
HRRKTTNIIRGAHSPVPGFLHPAGVVGVAPNFMGGGAV

SEQ ID NO: 145469 - protein, 123 aa, Oryza sativa
  unsure (1)..(123): unsure at all Xaa locations
  Clone ID: PAT_MRT4530_46186C.1.pep
AAGPAHASLVRRHSRARALPARSPPRASLPLDPPPSELHCPPXTRSHAPPAHPRASPPLDPPPKYLPTAGSDARMPPTAGSIAACLPAPGSAACAPPTAGSTAWMPPHCHIHCPRPAPLSDPP

SEQ ID NO: 145470 - protein, 130 aa, Oryza sativa
  unsure (1)..(130): unsure at all Xaa locations
  Clone ID: PAT_MRT4530_46187C.1.pep
AIKPESGVFDLLLXTTQSAGAMXMKISSDLMAAEQFPRTLLNRAIGGDSWLYTYHHHKAVGQTIXQLAEYATFTCQVNLFKDSGNESXLLEAYEEHFMLPKGKMLFITHRRVLLLEGPLMTHRKFSPAKD

SEQ ID NO: 145471 - protein, 250 aa, Oryza sativa
  Clone ID: PAT_MRT4530_46188C.1.pep
MASEAAKVVVPESVLRRRKREEVWAAASKEKAVAEKKKSIESRKLIFSRAKQYAEEYEAQEKELVQLKREARMKGGFYVSPEEKLLFVVRIRGINAMHPKTRKILQLLRLRQIFNGVFLKVNKATINMLRRVEPYVAYGYPNLKSVRELIYKRGYGKLNKQRIPLTNNKVIEESWCLYQGLGKHDIICIEDLVHEIMTVGPHFKEANNFLWPFKLKAPLGGLKKKRNHYVEGGDAGNRENYINELIRRMN

SEQ ID NO: 145472 - protein, 99 aa, Oryza sativa
  unsure (1)..(99): unsure at all Xaa locations
  Clone ID: PAT_MRT4530_46189C.1.pep
ATVLTGRTGIDGGVGARGRGWIRRCRRSQAWPDPSAAEALAPTSMLVTEKAAAEATLASGSPAMATPSGCFELSSPFHGKXFHSSSLLSHGAPKVTGSL

SEQ ID NO: 145473 - protein, 127 aa, Oryza sativa
  Clone ID: PAT_MRT4530_4618C.1.pep
MESPTKVDDEQWLAYWILYSFITLLEMVAEPVLYWIPVWYPVKVLFVAWLVLPQFKGASFIYKKLVREQLRKYRARGGAAATVTAGEDHKVHIAKTSRDLNMKIKQSHVWCAVLTKSDSLMENIHAG

SEQ ID NO: 145474 - protein, 47 aa, Oryza sativa
  Clone ID: PAT_MRT4530_46190C.1.pep
FIMYFITLLFFRAFHKHTTCLASSTSICVTLSVHYLYACPIHLFGYC

SEQ ID NO: 145475 - protein, 131 aa, Oryza sativa
  Clone ID: PAT_MRT4530_46191C.1.pep
MAAAAGDAVLDSATKTEWRRIDGDLIVKAAARRRADATVVLAPTTAVRGEGDSATKTGCWRRIDGDLQGGGREENQKMMEAWMRVSALAARSTKARSASATGGLRAAGIGQGRAGVMETVRLAAMETGSRG

SEQ ID NO: 145476 - protein, 160 aa, Oryza sativa
  Clone ID: PAT_MRT4530_46192C.1.pep
WSPWSRRRRSWSPSSLSLPSPRRRCSCRRAASTHGRHRPCRRRRRAAATPGLRRNRSPSPPRHLCQQPPHCLPCSRWWRRHPVCSPHEALPSPTPTLPLCSSPPMPIPASTPPSSSGFLPCHRPASRRRSAASIQSSWLSPLRRAQPSLERAPLLHRLCV

SEQ ID NO: 145477 - protein, 79 aa, Oryza sativa
  unsure (1)..(79): unsure at all Xaa locations
  Clone ID: PAT_MRT4530_46193C.1.pep
MFYFNIYFILFFFFFYFFFIFFFFFFFFFLXLLITLPQFIKHRFLLTRTFNRWFYNGTLYTTIEFTSQSRKANSVPSIF

SEQ ID NO: 145478 - protein, 74 aa, Oryza sativa
  Clone ID: PAT_MRT4530_46194C.1.pep
AVRPRVPPSRSSKPSDHFRVNKGRAAPIFILPTKQGKGRAILAFLRKPFLTRGLKKGCGFKPQPSGLEGNLNFF

SEQ ID NO: 145479 - protein, 147 aa, Oryza sativa
  Clone ID: PAT_MRT4530_46196C.1.pep
HPCIPPGTPHAGFFKRHPRTRARGAIFKTPGVRSISTPALLKRIHTAVATPPPYIWRTRSAQEELEQSIPPDAHGCRDLNRETEGQLIFSTKGPADDTPHKLDLELFDAVNVQASTAPPGARSICYPIKKAQSKRWPRLLKKEGKPP

SEQ ID NO: 145480 - protein, 135 aa, Oryza sativa
  Clone ID: PAT_MRT4530_46197C.1.pep
MGQSCFWAGTAQPTPYWTVPKPQCKISRCQQGERLMRAGGAENCVGTRTTGEEGDPLASAKLEPEKECPLTPVSLCKVLLMVIGLICALHTATVEGGRALAAAAVGGTGVDLPPTAPSYSSKCRYPYKCPPAGSP

SEQ ID NO: 145481 - protein, 54 aa, Oryza sativa
  Clone ID: PAT_MRT4530_46198C.1.pep
LSLNNDTLNQDPRNLQRIRLQDEDDQRGDGGQVDGVVVHLVQRRLRGQLVAYAV

SEQ ID NO: 145482 - protein, 78 aa, Oryza sativa
  Clone ID: PAT_MRT4530_46199C.1.pep
MSATASVLFTCQHSFRPSLRTSSSRTYHFIVTLVLDARTQLDWYMVHCEFTSIGRNHSNNELYSHVLGDHRFLLQNML

SEQ ID NO: 145483 - protein, 736 aa, Oryza sativa
  Clone ID: PAT_MRT4530_4619C.1.pep
MKRAADGMEKPKFLTREEREKLALERRQAAVTDQRRSALDLLQSLPRPPPPPPPPLSNPPRDSSSSHHRDSSDRDRDRDRDRDRDRDRDRDRERRRDDDSRRDRDRDRDRDRGDSSRRDRDRERGDRDRDRDRERGDRDRERGDREKDRLEKMAEREREKELDAIKEQYLGSKKPKKRVIKPSEKFRFSFDWENTEDTSRDMNSLYQSPHEARLLYGRGFLAGIDRREQKKVAAAHEKETRAEQRRKAGLDDRPEDDAVDKKEADAAAKYDAFDMRVDRHWTQKSLDEMTERDWRIFREDFNISYKGSKVPRPMRKWSESKLGTELLRAVEKAGYKEPSPIQMASIPLGLQQRDVIGIAETGSGKTAAFVLPMLSYITRLPPISEENEAEGPYAVVMAPTRELAQQIEEETVKFATYLGIKVVSIVGGQSIEEQGFKIRQGCEVVIATPGRLLDCLERRYAVLNQCNYVVLDEADRMIDMGFEPQVVGVLDAMPSSNLKPENEDEELDAKTIYRTTYMFSATMPPAVERLARKYLRNPVVVTIGTAGKATDLITQNVIMTKESEKMSRLQKILTDLGDKPAIVFCNTKKSADARAKDLDKAGFRVTTLHGGKSQEQRETSLDGFRNRRFTVLVATDVAGRGIDIPDVAHVINYEMPSSIDTYTHRIGRTGRAGKKGLATSFLTLENTDIFFDLKQMLIQSNSPVPPELARHEASKFKPGSVPDRPPRRNDTVYATH

SEQ ID NO: 145484 - protein, 215 aa, Oryza sativa
  Clone ID: PAT_MRT4530_461C.1.pep
FSMSSDKYQIIKTPIIIRNNMFVRPHLGKSKMGVSFGFIDDYQLSVWILKESAGQIKWVLSYQHDLWAAINQIDSFDFGGHQINGPWVLEETIPKYRTIENKETLSDKEWDSDNDDFLDTEVDDFLIDTEVDDEGHNDFAYFRILGFHPYKEVIFLEETLRTFAYHLNSSKIQYLGYSCPKYCYGRYTIHESFVYTPGMIGELNGHYAAGQSSPQ

SEQ ID NO: 145485 - protein, 438 aa, Oryza sativa
  Clone ID: PAT_MRT4530_46200C.1.pep
MERADENLLPAVYKEVSAAFNAGPTDLGYLTFLMNFLKSIASPLAGVLALQYDRPAVLAIGTVFWAVSTGAVGVSQYFQQVAFWRAVNGLGLAIVIPALQSFIADSYKDGTRGAGFGLLSLIGSIGGIGGSILATIMAGRDYWGLPGWRFAFLMVAFLSLLIGLLVYFYTVDPRKVSPSHFGDDEDHHERSHLIGNGIFPPQSIWKDSWIAARSVMKGIVGSLPWTAVVFFTMWFELIGFDNSSSAALNSMFAIGCASGSFLGGVIADRLSKYYPDSARIMCAQFSAFMGIPFSWILLTVIPQSVDYWSAFAVTLFLMGITISWCATCANNPMFAEVVPPKHRTMIYAFDRAFEGSFASLAAPAVGMVTEKIYGYNAKTVNLENGSVAGAYALSRGLLTMMIVPFGLCFLFYSPLYFVFKRDRENVRRLPSVKEQELI

SEQ ID NO: 145486 - protein, 79 aa, Oryza sativa
  Clone ID: PAT_MRT4530_46201C.1.pep
ELRLASLHRPAAVAFDVMPLQRCSLSGCRLFFIGLFNFCCLFLLGVSAVRTSRQQRSQLASRLGDRVLNFTSAVFSIDT

SEQ ID NO: 145487 - protein, 56 aa, Oryza sativa
  Clone ID: PAT_MRT4530_46202C.1.pep
SSVVSLTTFSPTKLFYFSVLSVLFFFLMPIHSLDSSSTSLLKMLHFNFCSVLLLIS

SEQ ID NO: 145488 - protein, 92 aa, Oryza sativa
  Clone ID: PAT_MRT4530_46203C.1.pep
PCQRLWADTCKRLEFWIEIPGVTNMEHKKLADLPKSIEEQKARLKSAIKHVADLTKSLKVIPVTDAQDAQAIEKVKQIRQKAISAIQRYLSQ

SEQ ID NO: 145489 - protein, 76 aa, Oryza sativa
  unsure (1)..(76): unsure at all Xaa locations
  Clone ID: PAT_MRT4530_46204C.1.pep
NFEKVVFNCHQVKATHAYIVSLVAPDGTKAKALTVCHHDTRGMNPALLNEVLQVNXGTIPVCHFIGNKAARWACCC

SEQ ID NO: 145490 - protein, 49 aa, Oryza sativa
  Clone ID: PAT_MRT4530_46205C.1.pep
GQGANLRKNAKFGPFGGQGLLEALCQEFSDQNLNVRQMAMGSRRALADS

SEQ ID NO: 145491 - protein, 177 aa, Oryza sativa
  Clone ID: PAT_MRT4530_46206C.1.pep
MSGREVREYTNLSDPKDRKWGKGKDKIDDEDITFQRMVAKMQEVAGERGGYLHGRGAILADSTPAVPAALRVEPKPKSDIRQQDLLKNIVGIKPKRTKVSSPSQPAENDKPKQSPEDSVNKVSSPQSQSGSRKESSQRDGAVSFEKPLLKPVEPRESKPQNATGSLLGLAYESSDEE

SEQ ID NO: 145492 - protein, 313 aa, Oryza sativa
  Clone ID: PAT_MRT4530_46207C.1.pep
MAPLKPPPPRLLLNGVSCMRNAQAVLRDINVSVHDGTALVLTGANGSGKSTFLRMLAGFSRPSAGEVLWNGHDITSPGVFQQYKLQLNWMSLKDAVKEKLTVLENVQWFELLEGKHGKSAPAIELMGLGRLMNEKARMLSMGQRKRLQLARLLAIDRPIWLLDEPSVALDAEGVKLLEYIIAEHRKKGGIVFVATHLPIEIEDAMSLRLPQRFPRRKTLVDLASDVLGEVACFVDFMNTSDLCAGCNKGALNAPLISPQGPLEVLSDPMLEVAGPLFKTRPNLEDASVEYVRNGSRSKIIFILQTIRSSPDLR

SEQ ID NO: 145493 - protein, 173 aa, Oryza sativa
  Clone ID: PAT_MRT4530_46208C.1.pep
MLWLPSSPPPPPPLTIGEAFPDARHLETPKWIAALLLVSCMFAGGLYTLTPLIAKDPLYLARVPWRLPVRVLCDTYLSLTMVIRFYTLMYLPRAPLVADEYLFMFGLCAVGGAAIVTTSFVLGIPVEDERVVMACAGVLAVLVAGLLAYWAWLVRKYGDNKPVDPASKLVVVV

SEQ ID NO: 145494 - protein, 565 aa, Oryza sativa
  unsure (1)..(565): unsure at all Xaa locations
  Clone ID: PAT_MRT4530_46209C.1.pep
MGSWRRKAYGALKDSTKVGLAKVNSDFKELDIAIVKATNHVECPPKDRHVRKXDLNSILHLFQKNWTVALKTLIVVHRLLREGDPTFKEEFLAYSYKGSVLQRANFKDDSSQLAWDCSAWVRAYALFLEERLECFRILKFDIETERLMRSPECSSKAHSRTRTLPCIELLEQLPALQQLLFRLIGCQPEGAAGTNYLIQYALALVLKESFKIYCAINDGIINLVDMFFDMPKYDAIKALVVYKRAGQQAEDLSDFYDSCKQLELARTFQFPTLRQPPSSFIATMEEYIREAPRPSINSVENGERKLVTYDQEATEESEKPAEEEKDEPAESEQEQEPKQEPKPPETTGDLLNLDAEVSPLVAELEENNAWALAIVGTGDQTKASTSLDLFSGNTSGWELAXTAPSSTSQTVQTKLAGGFDKLLLDSLYEDETRRRQIAGVTYTGSIGGGAPNPFDTNDPFATSSSFLPPSNVQFAMLNQQQHQYYQSQHQQQYYQPHHFQDHQHHHNMYFQTHYQQNQIYQQQQQQQHQYPAPQAGSSNPFGDPFGDLVPMAMAVSQKHGHSSLI

SEQ ID NO: 145495 - protein, 73 aa, Oryza sativa
  Clone ID: PAT_MRT4530_4620C.1.pep
SRQRLAAGHKLHLQPNVKMSISSSRSLEQAIPLYRSLLGPSLFFDSLYTSTVYKTKIESLGQSRSDKNRNVIQ

SEQ ID NO: 145496 - protein, 112 aa, Oryza sativa
  Clone ID: PAT_MRT4530_46210C.1.pep
KGGFFLLFCSSISPGPPGIAPIFFLNSNPFSFSIPGPPPPHGGFPPRPHCVFDLIPPLGGDFLGPKCLGLPLTFSKKTPPPPFLCFSPPPPGAGGLPRISRPGPRGGPSFPL

SEQ ID NO: 145497 - protein, 134 aa, Oryza sativa
  Clone ID: PAT_MRT4530_46211C.1.pep
MGDGVAWRGVAILANRRRRRNAESRERKRWKMERRCVPCPTIDVGLTCEVQMLGLVGPWRFADFGLKASEGVPEFWIKGPIGLRPCLSFSSGSGSTRHPITWPKFPCVHYPLQSLWLVMLPSSVTIVGLPHISL

SEQ ID NO: 145498 - protein, 126 aa, Oryza sativa
  Clone ID: PAT_MRT4530_46212C.1.pep
YTHAYFLVRQAIITITLGPLHSSHPGTSSTSHFTLHHIQCGTSHLLLFSWRHFVSLLRNVIREPHSRQALALFGWHCIGSPRSGPHSLRLLRCAAWCVELVLPGCGATGTPPKSPGLVCRSAAMLS

SEQ ID NO: 145499 - protein, 130 aa, Oryza sativa
  unsure (1)..(130): unsure at all Xaa locations
  Clone ID: PAT_MRT4530_46213C.1.pep
VRVTDKAYLLSYDLWNIPIRYTFTYTDCSRKXVRKPFQIIENISTSQVISKVLLGRVLGDQDDSRYKKDPXEGFEASNSIANTPTKVYEAGVHGANSPGDLVESLDYDLVVVPTYPNTLLIRSASITRGT

SEQ ID NO: 145500 - protein, 82 aa, Oryza sativa
  Clone ID: PAT_MRT4530_46214C.1.pep
PQRGGTPPGATKGPRGKPQKGREGENPTGRGGEPKPGQRKERPPPTGGPPPRPRGGGAAPPPPVWQNKKSPETGPTPNIFGF

SEQ ID NO: 145501 - protein, 533 aa, Oryza sativa
  Clone ID: PAT_MRT4530_46215C.1.pep
MASQHGGDPRLDRLSRALASDHPPPAAAAVHAHLVRAHAGTPPPVIRSLLNRAIRRLSKPHPRAALRLLLLMPRLPVSPDHFSLPFALNAAASLRLLPLGASLHALALRLALLPCRLPVANALVDLYAKCDDLPAAHTALADIAAPDAVSFNSLLCAHARLASVPDAESLFVAMPSRTQVSWNAMVVVYVNAGDVSSARRVFDQMPTRDSTSWSVLIVGYCKCGSMRSAREVFDRMPAKNLVAWTAMINGYAQSGVPKESLALFREMEAAGIEPDAATMVGVISAASQIGSTELAGWVGSYVDKKRIERNDKVLTALVDMHAKCGNVDEALSAFREIAQPDAYPYTALISGLAAHGHAKLALQVFERMQAQSVWPDPITFVGVLTACSHAGLVDKGLDYWEAMVKYYGMERRADHYACVVDMLGRAGRLEEAFEMVQTMPMGPHPGALGALLSACKTHGNVEIAEIVANKLFELEPHNTGNYIMLSNIYAEKEQWEEAERIRSVMRTRLPFKQPGSSWVEDRQRERGRFPLRS

SEQ ID NO: 145502 - protein, 120 aa, Oryza sativa
  Clone ID: PAT_MRT4530_46216C.1.pep
RSGAFQPNPAPPRPVAIPKNDVRICCRCRPGKTGLGFHPPSTACLSTADHHCSTTIKTLSVCGHSCTGAPASQHPHRAELRCRPRHLVSNQPPLSTATTRAKQASTTAGRSSLRCRSHRR

SEQ ID NO: 145503 - protein, 171 aa, Oryza sativa
  Clone ID: PAT_MRT4530_46217C.1.pep
MVPLPPCLADFVQTNSSSSLYGYSCCIGNLSKSQPLPDYKPKTSVRKKPRHLSIGKRRQCSSGLEAMENNVSVSVSLEGNISSLPNSIINDSNGKDTSFINHAAIAWAEMRRQWTGDQEKVPKEASQEPIISWCTTYDDLLSTSERFPQPIPLSEMVDFLVDIWHEEGLYD

SEQ ID NO: 145504 - protein, 307 aa, Oryza sativa
  Clone ID: PAT_MRT4530_46218C.1.pep
MGHHSCCNKQKVRRGLWSPEEDEKLVKYISTHGHGCWSSVPRLAGLQRCGKSCRLRWINYLRPDLKRGSFSQQEESLIIELHRVLGNRWAQIAKHLPGRTDNEVKNFWNSTIKKKLISQAVGSLHPSSADLYYNILDGAGQSIAAASLNAVENAAHGVTQSPPSSVYNSAAWASFSSHQPIFLPGHGVHGCGGGDLQYAAAVDGEFIRLCRAAEAYQLENGAAGIVGGQCKPSDHLLAPEGVVARSCLPAFVEQKGGGGGAFLADPAMGPVMDFMDAILGSSTTSAASASSVDSFSANTAMQPHWIP

SEQ ID NO: 145505 - protein, 79 aa, Oryza sativa
  Clone ID: PAT_MRT4530_46219C.1.pep
MDHPLPPSLCVASVANPRESARRVGVRAHVVRVGKHRAMFVSPPLSPGKITVDETGDSGCARPSTRSAVAGAEQKQPDC

SEQ ID NO: 145506 - protein, 154 aa, Oryza sativa
  unsure (1)..(154): unsure at all Xaa locations
  Clone ID: PAT_MRT4530_4621C.1.pep
MAAARPRLSSPAPTPPPPPLLPGADAGGRGRRRPRRSFPPPPPPPPAPLLPGADAAGRGRRRPRRSSPAPTLPWTPXSRRSSPALTQPAVDAAARAGPPRRRHRRGRRWPRRSSPAPLLGSSPCSLSLLSPKLTSLTSWLELSNEPSRAGLLAR

SEQ ID NO: 145507 - protein, 257 aa, Oryza sativa
  Clone ID: PAT_MRT4530_46220C.1.pep
MEAKNQGKEEEEKQYRKERDVLWTRIELRDREEEKNTGRQEHAPLNLTAREEEKRNTGRQERAPPKGTSSREEEEVNAGRQEHSAATGTHREEEEANTGRQEHAAAATTGTNHNQNQDCIHRKEGGAPTSEGQEYQEEEIGEANRKDRQQQGHGMGSRGDGTRKWIGGTVTEEKGLPILLNLLPPTCLQVDYDEHPRKESIDYDDIREVASSGQKSSICWESGAGKDNSSKIYHLVRHPQDDQSLFYGLQGGATRES

SEQ ID NO: 145508 - protein, 113 aa, Oryza sativa
  Clone ID: PAT_MRT4530_46221C.1.pep
MGPGKASKSTLLEILTTRLHPLLPPDQLVSDAPPPALTYTASSATQHDVLFPLLIVCKMLHFNSHLCLGTCVSPNGLAQCLCLTLADAATSGELFDLNGAFTDPNIGFTRSWT

SEQ ID NO: 145509 - protein, 212 aa, Oryza sativa
  Clone ID: PAT_MRT4530_46222C.1.pep
MGSKPPPPPQPSVSFKLVLLGDGRVGKTSLVLRYVNDVFSDKQEATVQASYLTKRLVVEGVPITLSIWDTAGQEKFHALGPIYYRDADAALLVYDITDNDTFLRVTKWVKELKQMANKDIVMAIAANKSDLVRSKHIDTNEAASYAESIGATLFVTSAKAGTGIDDIFSDIAKRLLERRKNSSDGLSLAHPKKGILIVDDEPEKEPPPKCCS

SEQ ID NO: 145510 - protein, 82 aa, Oryza sativa
  Clone ID: PAT_MRT4530_46223C.1.pep
ECRFCDDFVRDQPLGWYEVGEINPSVGPHCESCAFVRIMHRGYRVVMSLSLGVGCLLALLPHRGKAHHHPGKPLCCDGVCDD

SEQ ID NO: 145511 - protein, 792 aa, Oryza sativa
  Clone ID: PAT_MRT4530_46224C.1.pep
MAAAAARPARSPPGPTEISAEITTPNRLMGRNQITPWVLSGAGRRTGSRRTGLVSSATGRNGGFFFFFVGAPEEEDGVLPALVVVVTAAEEEERIEPERIEPERIEPEAEKKAPDTGEGLAKAAWALSLPADMAATGQRGSTPVWKGIDGRYVRFDKGSDAYDLPDGVRVPRSTRTLVRKLCELGWLFRKVRGFISDNISRSPSDAATEVGTVAQAFCSALQEELSDYYKLLAVLESYSLNPIPTPGSDSGVSGNYLSLRRLAVWLAEPAVRMRLMAVLVDGCRGLRGGAMAGAIHGHAQHGDPTFQDFMGRLLRRVCSPLFEMVRSWVLEGELEDVFAEFFIVGQPVKAESLWQEGYLLQSDMLPAFISPVLAQRILRTGKSINFLKVCCDDNGWADAATEAAVCVGTTTSRGGLGYGQIDALEALVVEAAKRIDRHLMDVIHKRYRFKDHCLAIKRYLLLGQGDFVQYLMDVVGPELSEPANRISSFHLAGLLETAIRASNAQYDDRDILDRIKVKMMDHGDGDRGWDVFSLEYDARVPLDTVFTASVMKRYLKIFNFLWKLKRVDHSLTGIWKTMKPNCIVSSPFYKEGTNIRSQFVSVLRKCQVLFNEMNHFVTNFQYYIMFEVLEVSWARFSEEMDSAKDLDDLLLAHDKYLTSIVEKSLLGERSHGILRNLFALFDIILQFRSHADRWFERIYELQLRGKGKPKSKAKAKSKEVDSWVDGGRKAMIQLAGELFRKMGEDLDSIAKDYTSSLDAFIAQLPMQQHVDLKFLLFRLDFTEYYSRVSSNK

SEQ ID NO: 145512 - protein, 1814 aa, Oryza sativa
  Clone ID: PAT_MRT4530_46225C.1.pep
MAVVLGAFVPDTAAQWRSVVKGEVARQLGVEAEARKLGARLEKVGAAVRDAEARVARGSDAAARWLARVRAAAYEADVAVDRCRATARRLTRGREQQLQQHNQALPWLLSTCCDVAEPRRDIAADLKNVSQKLKSIIKEQRQLQLQASVADHTDDHPRKILRHRKSEPTDIDIVGTAMEDDARRLVRRLTQPDSGGVVAIYGPDGIGKTTLAKVVFDSERVKRRFETRSWVHVSRGCVEDGKREAALLSQVVEAVVDGGGATTGAETVAELERMLAALVANRRFLLVLDEVRNGGEWEELVRRLLERGGRGSKVLVTAVTAGVARDMGAGHVHRVNRLGEDDGWALLRVAACVADDGGAALRGVGRRIVGKCGGVPLAIRAVAGVLRTREAIAEEWAVVDASPAWKVKGLPDDAMKPLYLCYDDMPCHLKQCFLYCSLFLSDFAVDRRSLVQQWIAEGFVQIRGDAGVEEVAEEYYDELIGRNLLQPAEADRHGCVERCTMHDTLRSMAQVLSHGENLTGDAQAQRLPSDGDAPFAPRHVSFPRNHLAAIPEEVLKLEGVRTLLLQRNPLTIGSNIFTRLLYLKVLDLTETAMEVIPETLGNLLYLRFLNLSQTRIKALPETICNLWSLKFLLLRECKALHVLPKGIEHLKGLRDLDLTGTVIKDAAFRVGHLRNLTSFRCFTVTSKEARTVQDTAQDRSGWPLDELKNLCQLRTLHVKRLEKATSQSKAAEVALHAKTGLRELELSCSGTVKTLQIPTVVRNIEDIFQELKPPRGLESLKIANYFGTKFPTWLSSTCLPNLLRLNITGCNFCQSFPLLGRLPELRSLCIADSSALKDIDAQLMDTDNSHQVPFPKLEDLHLQGLHNLETWTSIEAGALPSLQALQLESCPKLRCLPDGLRHVTSMTELRIVDMESLEAVENIAALRELSVWNTPNLKKICNLPSLEDLDICHCPSLETVDNINRLQEVHIFDHELQEMPRWIQAHASKLCSLEFMSTTELLKRCLIDGPDWPVIKDIAQVHGYSNDSSYIYYSKSLKIFEGSASIRESRDAERSVADSDKVDDASIESRNVDRDAEIDGFFSSKLVETGTARSEDNVPDRNMERFMTRSTGRRLHKLEEVPEGDEDEEEEGADPVVLIPDDTTKSDTVLEKLHPVVTHDHNDKAGSKMKRDPPAKTAPGTSVIQSAATMCHKLVREGSQAISITETDQDLSLDSFRSKEHASSKQKVDTSGSVIEKVKEGRYKSANINDRKHIERVHDSANKMSTTSVEKSIPETVKPMKATKNNSKATDYHGTENKSPDSLACSRQTISQIEKDVSDADKAANHPSSAITENRLHKANEIDASATAIKTEVSKKSAGANICNTLNPADSQTVHATDTAQDLPSSLLHDDPHLPDVGSSTSTSISDNCIQTESSNTSLSANLNNEEPKAKGVTKTTCASGPCKLTATLDCKQQTTNPSDDTDASMKKMASNISEKVVKTLKRPHAETVNITRSSSLPIDPKSHVIDTTAATKKLEATLKNRSSRNAAPGLADDKTPVYNDSHQAPKVYTAIWADTDTDTLKARFLSTMQHYRRMASHRRRRHRKHGSRTKWSIWPVLVAILLIISVAQLLFTFWMYRKLMNQNSKVGKEATSNSDCPQFFSPSFSLLTFALESFSVVDEEVKPISPPPEKEEEEAISPPQPPKREIIRVTTKAIVKEKASAFSSVGSSSSSGKSGAGGGALNAAALFRRFNSSAPVPRAEAAGDGDGGVRLEIEDIAAGDRRRETRKRKSPLDASGGGWWHGEMEGVDGEEVGWTDDMWEGMGSITLGGLEWH

SEQ ID NO: 145513 - protein, 344 aa, Oryza sativa
  unsure (1)..(344): unsure at all Xaa locations
  Clone ID: PAT_MRT4530_46226C.1.pep
TLYPPPAIHPPAPRGPLKVLQGCALEHTPXERLNHVPTVQTHATERXAKHRTGHRYARPIATEPTTSPRHENTKTTPSRGSQRRKTQSSSVQRTXTSFHPVLLAEGGVPQQCLQEGYHXPEGVVTVSPKDWAKLSLGTPTAVVRRPIXVHHLNIGGTWLPPHPTDAPPPASHLRHAVRRPPCRIRPMGPEREQARFGKLSLPSPHEEGEELPKHSERLATHKEDDLAASAIYPAARFNGGLAEATAPPPPRRPPMATRAAQHRRSCLQPPGRLAASGTGVQQRGHRTASGTGTTAVVQLPGRRTTSSAADADAVQPQLTRRSLRAAPPPAAAAASPAASRLDLA

SEQ ID NO: 145514 - protein, 53 aa, Oryza sativa
  Clone ID: PAT_MRT4530_46227C.1.pep
MAPLTKLSTMECWVLLELAYPNHPLTTKATLSIFKVSMLGALQRFRHPFPSDQ

SEQ ID NO: 145515 - protein, 84 aa, Oryza sativa
  unsure (1)..(84): unsure at all Xaa locations
  Clone ID: PAT_MRT4530_46228C.1.pep
FFLHLHLIFLLGIKSFCYWXMAGKVGGHXPRFGDWKSSDGGTXYTVFFDDARKRKNAGGVVPPPSLARGDSAPPPXXHRTPPHG

SEQ ID NO: 145516 - protein, 57 aa, Oryza sativa
  Clone ID: PAT_MRT4530_46229C.1.pep
WAPPLGFKAQVPWADRGGKQPQKRRFEGQKELPSCFLAKMDHLMDGTNGVVFGPWAI

SEQ ID NO: 145517 - protein, 297 aa, Oryza sativa
  Clone ID: PAT_MRT4530_4622C.1.pep
MGPTSPPPRTPPPLPPPPHPLPVIQMRFRGVQVDLVYAGPHGIRVADEILRLVPDTAAFRTMLRCVKHWAKARGVYSNVAGFLGGIGWAILVARVCQLYPNTSPACCSRASSASLRDATLRVTTEQLAVGDDVCQEIVKAGAMWVGWVESRLRQLSARVEADTSGVLLCHLHPQAGGGGDVLAVGVSARATMLGKSMATASSVVNQSSLRRSSLLPAATIPGVGVAVHGACGGVDGEVRLLSAVSLRPSRALARRTSRGPLPPGTEREDRDNRYRCQPKSQVRRFAKRHGDAGERGQ

SEQ ID NO: 145518 - protein, 39 aa, Oryza sativa
  unsure (1)..(39): unsure at all Xaa locations
  Clone ID: PAT_MRT4530_46230C.1.pep
ILQALTLLYGLQTYNKHKTLLSISAYSEPLEQARXGIPN

SEQ ID NO: 145519 - protein, 269 aa, Oryza sativa
  Clone ID: PAT_MRT4530_46231C.1.pep
MSSSSSGWHHSSRPPPPPPSGADKDQLFRGLEAALGTTFSSEPLAPPPQPMILVISGPSGVGKDAVIQRLQEEREGMHFVVTATSRAKRPGEVDGKDYYFVTKEEFLTMIERKELLEYALVYGEYKGIPKQQVFPPFSVRDLIEWGEIRDYMAKGYDIVLRVDIQGAATLREILGESAIFIFLVAESEEALVKRLIHRKTETSDMLLVRVATAREEVKRMNNFDYVVVNSEGNLEGAVKQVESIIDAEKAKAEPNDLQHYDHMVNLVPK

SEQ ID NO: 145520 - protein, 106 aa, Oryza sativa
  Clone ID: PAT_MRT4530_46232C.1.pep
LIVLIEVVNRGGVLASSEHALARSPPNNLSLTLNLSQKSFTNYIKDGSMRQLQSFTNNKNQEKSKEGATTAGHHCRRRVTTTSCCRTTAACTTSRSDGGRAPDAWV

SEQ ID NO: 145521 - protein, 111 aa, Oryza sativa
  Clone ID: PAT_MRT4530_46233C.1.pep
MDGWAHGWGIGGCGLVAVGGFRFCRFDRHDSVSEDPASTTSGKRPVWATAVVGQREESWRATAGVGDLDGGRQVSTAWKRYAGEPAMVGGHSGVSPFAAAACRNKMDTLDE

SEQ ID NO: 145522 - protein, 66 aa, Oryza sativa
  unsure (1)..(66): unsure at all Xaa locations
  Clone ID: PAT_MRT4530_46234C.1.pep
MKLSMKRPPYNHTSRMECMRMXSSWSGYCQCEVIERLCRDTSHVLGRGSCVGQSRSAGKVYIHCSV

SEQ ID NO: 145523 - protein, 67 aa, Oryza sativa
  Clone ID: PAT_MRT4530_46235C.1.pep
TPLSSPFSRTGLFGIFPKQNTSEFPTAKHNCKSRLHLRKGEEPILKFSRIFQNISKIKQIRISHSKT

SEQ ID NO: 145524 - protein, 94 aa, Oryza sativa
  Clone ID: PAT_MRT4530_46236C.1.pep
GTMSDKYVNIIYDTIISIIASRTYHQQVCNAVMMTPVQNISVRELRITKRCRCCLSGMYDISLLRKDWSRCRHQKSQRPDFCVIEMLYVSEDFR

SEQ ID NO: 145525 - protein, 199 aa, Oryza sativa
  unsure (1)..(199): unsure at all Xaa locations
  Clone ID: PAT_MRT4530_46237C.1.pep
MSHLVDPSRRTSSHTMVLHDVVMLENQIPLFLLLKATEMRGSSRATAESVLSSVLSGAYRWPSGPPGTARPRTGRAWAEACRXARPMHRAVPCQPTGRTHGPGTAQHDLXVSGRPEGTTAHLPILCVSGLACRPIVPGWPXIVPGHPSVPVGRPRHSPAVGPGYLGQDKMTYCGPGLRASGLMAIYSKTSSLNFVDMKM

SEQ ID NO: 145526 - protein, 49 aa, Oryza sativa
  unsure (1)..(49): unsure at all Xaa locations
  Clone ID: PAT_MRT4530_46238C.1.pep
FVFCILSMLYILNRKFLFFLIFGKIEHKMLLFLYFGMNRMLTXITTKFS

SEQ ID NO: 145527 - protein, 91 aa, Oryza sativa
  unsure (1)..(91): unsure at all Xaa locations
  Clone ID: PAT_MRT4530_46239C.1.pep
RRSPNIGTVHTSCRSXCSVHGPXRISSLTVTILITXVYDDSVALTLLAPTLYRLGAGLLALLPPLCACWLQLQDVILDELQPVQQQRKTSY

SEQ ID NO: 145528 - protein, 42 aa, Oryza sativa
  Clone ID: PAT_MRT4530_4623C.1.pep
SRLIIMQLIGPQPGIKRFCSGSPGTRNLYGYLKGETIGMEIF

SEQ ID NO: 145529 - protein, 85 aa, Oryza sativa
  Clone ID: PAT_MRT4530_46240C.1.pep
KFSLLRGFLLCAHYGVLFPPLAQHCDSLPFPPFAFFAPCPLPFLILSPFKGIVFEFFPYRRRRICFLLLLTLLYWLKKESCFPPF

SEQ ID NO: 145530 - protein, 54 aa, Oryza sativa
  Clone ID: PAT_MRT4530_46241C.1.pep
ITMFGLDSPRLVLGIGSSNIHGDLTQVLHSAIALHACQAYKYNVHSEFHPISSL

SEQ ID NO: 145531 - protein, 162 aa, Oryza sativa
  Clone ID: PAT_MRT4530_46242C.1.pep
MAACCSLGCLVCGLLGAALFLGCLEPEGLPLGRLLDRRVAYANLLTDELEYSDLKAETSGNEHFNAQVLSILLALAHLQGPSRAILLLDNPLFEIDLKVKGQGSPSEDKALSYYVFPSECHRHRFSICTGFQETKNDDEPTLWHGYSNATSVKPPIYTAIGP

SEQ ID NO: 145532 - protein, 312 aa, Oryza sativa
  Clone ID: PAT_MRT4530_46243C.1.pep
MASLLRLQALALNLTAPRRLPFLPLRVTTATAPLAGRLSTAAASGSSPESPASEPDLDSGLYLVATPIGNLEDITLRALRILKCADVILSEDTRHSGKLLQHYNIKTPLLSFHKFNEREREPNILKRLHEGEAVALISDAGTPGISDPGMELARLCATEGIPVIPIPGPSAAIAALSASGLPTDEFTFADETPSEDFLEHELRELMTQGHPLSAAVKMVSEATSAKKKDVYALALSKTAESQAWCGLTRSNGDVVADLCGTLNHLLRLAPAQAVALLELGKFPECEPKLDACHDHNPGAKVLTVAIYGLEGK

SEQ ID NO: 145533 - protein, 146 aa, Oryza sativa
  unsure (1)..(146): unsure at all Xaa locations
  Clone ID: PAT_MRT4530_46244C.1.pep
MTTRVQKKREKRGHVNSXNGRIGKHHKNPGGRGNAGRMHHHRMLYDKDHPXYIGKADMRYFHKLSKRLHCPAVNVECLRFMETTDKDGEAGAGKAPVIDVTQFGYTKVLGKGMLPPQRSIVDKVKLISXVAEKEIKDAGGADLLSA

SEQ ID NO: 145534 - protein, 122 aa, Oryza sativa
  unsure (1)..(122): unsure at all Xaa locations
  Clone ID: PAT_MRT4530_46245C.1.pep
KNPPESIWPNINSWNAGVLPGGXGDAPAPAPNQPTRSRSNSTTMAXAXRLVSTTLAXSSSSLAVGVXRPDLLXXSXRGFSSMADSIQRSGSXDITRGXISVDLIXLLSTSXTKGVFFXAIHL

SEQ ID NO: 145535 - protein, 88 aa, Oryza sativa
  unsure (1)..(88): unsure at all Xaa locations
  Clone ID: PAT_MRT4530_46246C.1.pep
MMNFLKTAKAMILIQWRYSGRRAVITXCYTRAPVHRPYRQXLTRGLSKYPYKAIRKDSSKKTAKKSRVKCFLKLVNFTHIIPTTYTSY

SEQ ID NO: 145536 - protein, 208 aa, Oryza sativa
  Clone ID: PAT_MRT4530_46247C.1.pep
MARPTMLACCKLYISESRNAAALRAIEQAACGGGAVVVNRFTDDAYNRGRTLASIRRQLGYFKPNSSGDQWRGAPETDALPVAPDAGPERSPRSKGVVVVGATGWVDNYNVPVRTGDVEAARRIARAVSERGGGLPSVQAMGLAHGGGVVEVACNLLDPARVGAEQVQGMVERLAAGEGLSVGKGYFTDYSQDKIVELYFKSAANTEG

SEQ ID NO: 145537 - protein, 51 aa, Oryza sativa
  unsure (1)..(51): unsure at all Xaa locations
  Clone ID: PAT_MRT4530_46248C.1.pep
GLAPXLCLWILGNLLSILCRRIXLVWXVRCFYYWPRKGGYLITSVSCMGWK

SEQ ID NO: 145538 - protein, 303 aa, Oryza sativa
  Clone ID: PAT_MRT4530_46249C.1.pep
MARPTTLLACCKLYISESRNDAALRAIEQAARGGGGGAVVVNRFTDDAYNRVGYTLVAPLTPSPAPPPLRHAVLGMVRAALEAIDFGAHAGTHPRLGAVDHICFHPLAHASLRHVADLAGAVAADIGDELQVPTFLYGAAHREGRTLASIRRQLGYFKPNSSGDQWRGAPETDALPVAPDAGPERPPRSKGVVVVGATSWVDNYNVPVHTGDVEAARRIARAVSERGGGLPSVQAMGLAHGGGVVEVACNLLDPARVGAEQVQGMVERLAAGEGLSVGKGYFTDFSQDKIVDLYFRSAANTEG

SEQ ID NO: 145539 - protein, 34 aa, Oryza sativa
  Clone ID: PAT_MRT4530_4624C.1.pep
MSFTKTKSTAVMVMLPTTREKGVVEGASGRGVDR

SEQ ID NO: 145540 - protein, 1353 aa, Oryza sativa
  Clone ID: PAT_MRT4530_46250C.1.pep
MSSTVTNVADDWKKGLAEVLDRLDSIRGKLSDLDNEQQAHHIAIQRLERAGRDRSPRRNNRDRDDDHDNDGRRGDRPPRYHKIDFPKFNGQGDPLHFLNRCEQFFQGQRTPEEEKVWLASYHLLDGARQWYMRIERDLGTPTWRRFSDLLNLHFGPPLRQAPLGKLAACRRKTKVAAYIDRFLDLLARAGPLTEEQQVDLFTTGLQEPLSIDASSSAAPTPSQPDAASSVGQASTQVAGRTVRRLSQSEMDERRRKGLCFNCDELYARGHKKVCKRLFLLDLAYDDDDDEVEGAAPAVEPETLRISLHAVTGVRPSNAMHLHVRLGDATLHALVDTGSTHNFLSQEAAARVHLPLVQRAGLRVTVANGDKVPSPGMFQDARISIDTEVFITDLYVLPLGGYDLVLGMQWLSTLGQILWDFGQLTMSFWHKDHMVLWRGLPTGASPAAHVATTRDLLDDLLTEFADVFATPSGLPPPRHQDHRITLLPDTAPVAVRPYRYSARHKDELERQCRDMEAQGIIRRSSSAFSSPVLLVKKADGSWRFCVDYRALNSRTVKDKFPIPVVDELLDELHGARFFSKLDLRSGYHQVRMRDADVEKTAFRTHDGLYEFLVMPFGLTNAPATFQSLMNEVLEPFLRRFVLVFFDDILIYSPSWSSHLQHLRAVFNTLRAHKLFVKRSKCSFGDTSVAYLGHVVSGQGVAMDASKVQAVVDWPRPCSARALRGFLGLAGYYRKFINDFGAVAAPLTRLLKKDGFLWSPEAEVAFGRLKKALTTAPVLALPDFDQPFIVECDASGTGFGAVLHQDGGPIAYFSRAFAPRHHALAAYERELIGLVQAVRHWRPYLWGRRFVVKTDHFSLKYLLDQRLATLPQHHWVGKLLGFDFEVAYKPGRQNTVADALSRRDEPAASLCAITTPVFDWLQDLHTANDTDPALVALRDQILAGNRTAPWALTDGIVTFKQRMYIPPASALLQTALAMVHDDKHEGIQKTLHRLRREFHTPGDRRVVQEFVKACAVCQRNKTEHLHPAGLLLPLPVPSAVWSDVSMDFVEGFPRVAGKSVILTVVDRFSKYAHFITLSHPYSAESVARAFYTDIVRLHGIPTSIVSDRDPVFTSTFWNALFAATGTKLHMSSAFLDDIRYRLEQAQQHAKKFYDRHHRELQFVVGDWVWLRLRHRVPASLATPVKGKLGPRYYGPYKVLEIINKVAYRLALPAGARLHDVFHVGLLKPFVGTPPTSPPALPSTLHGAALPQPAQVLKSRMARGVHQLLVRWDGLPASATSWEDLDDFRTRYPAFQLADELFVEEGRDVMWGIQYQRRNRRQQPEQAPWDTKEELGVNGFKKGEVNPVCSFLIYGN

SEQ ID NO: 145541 - protein, 133 aa, Oryza sativa
  Clone ID: PAT_MRT4530_46251C.1.pep
RLRPLPIPHLTIQLLSLSLSIHPKQNPQNNSERKKIHAAKPKFFVDFDLDINPSSNLPIAASAPNPCAPPSLAESKGAYQSIPPRRDWLPATTRGAAPLAAAAEEAPDSPPPRSARAIRARSWPSDSRRVAGA

SEQ ID NO: 145542 - protein, 395 aa, Oryza sativa
  Clone ID: PAT_MRT4530_46252C.1.pep
HLKADADLRILACVHDQSHVPGTLAVLEASNATPQTPLSLYLLQLVEIAGRSAPVFIPHKLRHSASRAGAAAASAAPPTDSDRIINAFFQYELKHPEGAVSVHPFTTISPYSSMHDEVCRLAVEKRTSLILLHYHKRHMLAGGVRAAVGLRVVNRKVLEVAPCSVAVFVDRNAGSVGLCAFIPGPVQDQSTSSRSRSGGHAASGSGQGFKAAVASLFFGGGDDREALAYATRMARHEGVAVGVIRFLPARGIKDEPSDRRIDNRAIEEVKALAARSRNIKVQEELVGDMERIVQVLRGLDEAGYDLVLVGMRHRWYPVMPANGMSDWSECPELGVIGDLLASSDFDTPYSVLIMKQQDQGGLNAAVPGAQDVWHVNDGGAEDAPAPPRNMSTAGS

SEQ ID NO: 145543 - protein, 550 aa, Oryza sativa
  Clone ID: PAT_MRT4530_46253C.1.pep
MTRIFVQRGAAGSSSSSSRSGSQTLQQQQQLQATSAVAREEELPPQPHQHPSELTASDNITDHLVEDADNSSNSNKPLGLDDPTSESSSSAEERAVMEKPPKDDSSVIDPAFLVEELTGLQFSDQFEQENLVQSGIGPSQIAGAASHPPPPPAPPAPPPKPSSGNNGLRRMGSGSSNNARIGSSRRPVAWPPVAVRSSASGSRPSSPRSLADSEGYNSADEQGPCYASNYYDSERERMFEHDLRRVRGFEINKMAEDGNCLFRAVADQVYGDPEAYDMARQMCVDYMERERDHFSQFMTEGFTSYCRRKRRDKVYGNNMEIQAFAEMYNRPIHIYSYSTEPINIFQGSYNTDVPPIRLSYHHGNHYNSVVDPRGLTVGAGLGFSSLRGTNNVDRDQVKAAIKAQQDQQIENALLAEGRLYSDLELTEKEIERMVMEASRAEYLKQQQQQLNFRESSTSGAEPSSSAAISGSSRSAGTADRVGEECFVLPDTVLTRSMQLLLAMGFNYIQVMEAYSIFGEDVDSMIYYLVEMGGTGASAGGSNRRKGKAAE

SEQ ID NO: 145544 - protein, 52 aa, Oryza sativa
  unsure (1)..(52): unsure at all Xaa locations
  Clone ID: PAT_MRT4530_46254C.1.pep
KRNLYLNFITICLIILNIVLLIQIIVCLCSFPLHGIXTLICSILFPGSPIPT

SEQ ID NO: 145545 - protein, 116 aa, Oryza sativa
  Clone ID: PAT_MRT4530_46255C.1.pep
HVAPPVVHVTAQALNWLQDLNACSFRTQCHLMDFTLTFLLLTSVSFARVKCDIYLDSDPFPYTVLPPKIPPCSPIQSCFVYFQSFPKFQLGLEMNMLQFQRPIYISRYIPLPARCS

SEQ ID NO: 145546 - protein, 127 aa, Oryza sativa
  unsure (1)..(127): unsure at all Xaa locations
  Clone ID: PAT_MRT4530_46256C.1.pep
HFSHSYLSLMNLDIYLMLKFIKININMVTTRRPKHVHRRQTRQAQTQQQPGVEGPVGGPRAGAGPHAWARGARGPSVSIRLCSLAVSHPNTTHTVFMHFHVYHQAATHPSTLCLIHHTPARGHEVYX

SEQ ID NO: 145547 - protein, 80 aa, Oryza sativa
  Clone ID: PAT_MRT4530_46257C.1.pep
MAPIYATGLSGYLLWHNGWQDEVAAAHGQRLLGYFAAAHSGSLCHPYRLNMNPWPGELAFSDRTKLECKVELDFVRDAVH

SEQ ID NO: 145548 - protein, 318 aa, Oryza sativa
  Clone ID: PAT_MRT4530_46258C.1.pep
MSTSASPSAASSAEYAEHLSNLVAIPSLSHENHYFLGPIGNLDPTEFIIGETNRIPFRLANPNLGHWKNTFKSWPSLEKTSPEKSWVTWYKRVSASKKVHWDEIGIGQALALTIANSAKDEPLMAVATYFWSNTINAFLFNQGPMTPTLIDITMIIGLDVTSLANPMSMNTKNQFDFRTKSIGGWSGYVAAYMGKGPVTSREHVAFLLMSLEKFLFCGSSCGPTTNWQFVAEALESKKQFPLGKILLGYLYQMLNNASAKIAVGLVVGAGGLWWLLQTWLNLVVMKAVNRPSVTEAEFPRLELITEDDGEECTWTVYY

SEQ ID NO: 145549 - protein, 63 aa, Oryza sativa
  Clone ID: PAT_MRT4530_46259C.1.pep
MAKKKDSPQSPEALGAYSHSITGCKEDDEHVPVCIRSLFFAKLQKRQFIGFDIPEATVPLLSI

SEQ ID NO: 145550 - protein, 194 aa, Oryza sativa
  unsure (1)..(194): unsure at all Xaa locations
  Clone ID: PAT_MRT4530_4625C.1.pep
LPRPSDENSDCRRKIQADRTPCQLLLFAAQSTKFLAVSTKFLFGIGNFFHNDYPLQIVQMYTSWVNLRTYFFCIVXGMASMDDVDFSPHQATPKESMNSKDDAKVQPSSGQTPNKGNYYMGHANAIMMMFQYIRDGCRRVESSMEDYTCKKVEKGYGEKRKVGEGYDPRWSSPIEITMKICNDDVSDEATEKEP

SEQ ID NO: 145551 - protein, 630 aa, Oryza sativa
  Clone ID: PAT_MRT4530_46260C.1.pep
MGIWFHYHPLCQRTKALTLACSGIYFATRAFCDKPNHRIVHKDKNPVRVRSALSRGFTLHELLQLCAKRRSLLVGKSCHGLAIHFGLVTDTVTCNILINLYTKCGQNDCARRVFDAMSVRSIISWNTMIAGYTHNREDVEALKLFSRMHREGTQMTEFTLSSTLCACAAKYAIIECKQLHTIAIKLALDSSSFVGTAFLDVYAKCNMIKDACWVFENMPEKTSVTWSSLFAGFVQNGLHEEVLCLFQSTQREGMQLTEFTVSSILSTCASLALIIEGTQVHAVIVKHGFHRNLFVATSLVDVYAKCGQIEKSYEVFADMEEKNVVLWNAMIASFSRHAHSWEAMILFEKMQQVGIFPNEVTYLSILSACSHTGLVEEGRHYFNLLLSDRTAEPNVLHYSCMVDVLGRSGKTDEAWKLLDKMPFEPTASMWGSLLGSSRIHKNIRLARIAAEQLFRLEPENGGNHVLLSNVYAASGNWENVVVARKYLRDSGAKKEMGRSWIEAKGKIHVFVAGEREHPGITDVYNKLEEIYHEMRKISHRANTQCDLHDVHADQKEELLKHHSEKLAFAFGLISLPPNIPITIYKNLRICGDCHSFMKIVSCITERQVIVRDINRFHHFKDGSCSCGDFW

SEQ ID NO: 145552 - protein, 157 aa, Oryza sativa
  Clone ID: PAT_MRT4530_46261C.1.pep
SIPGIFAIGDVAAFPLKMYDRMTRVEHVDHARKSAHHCVEALLTSHTKPYDYLPYFYSRVFEYEGSSRKIWWQFYGDNVGETIEVGSFEPKIATFWIDSDSRLKGVFLESGSSEEFSLLPQLAKSQPVVDKAKLKSATSVEDALEIARSSLHSGSSV

SEQ ID NO: 145553 - protein, 192 aa, Oryza sativa
  unsure (1)..(192): unsure at all Xaa locations
  Clone ID: PAT_MRT4530_46262C.1.pep
MTSALRRKAAEMASTAAAASSQGCISWALRQRGLGGGGARAVPVLPRRRFCVSAAAGAGFDNENREYVIVGGGNAAGYAARTFVEHGMADGRLCIVSKEAYPPYERPALTKGYLFPPDKKPARLPGFHTCVGSGGQRQTAEWYKENGXEVLYEDPVVAFDGKTHTLKTSSGKILKYGSLIISTGCEASRLPA

SEQ ID NO: 145554 - protein, 1119 aa, Oryza sativa
  Clone ID: PAT_MRT4530_46263C.1.pep
MLAKLFKWEALNQRSVPYGMTMMDHHPPPPSPPRDSGGSLEVRLFYVRLSPRGPTPPPRLALALRSSRGGDEEEAPTPLSLPLRLDRRDPASGEATYVSTASARLPPPSAAFEVADHRGAALLRGSLRRCPDAKPDSSPAWAIDCIPAAGAEAETSAFEVYVAGCCAGEPAVLTCALRLATPEEQKAAGGLVRRRSPTSNAAGDEDVNGSIQHPEGWYSDDDDGQLTWFNAGVRVGVGIGLGVCVGVGASGFFSPPLPNPTTRRGGGGHRSHPPDATAADDDDAAMTGAAAWPVCTICYEDLRPLSDQHLHCLPACGHVFHALCLEQWLEYCPGGKKKLTCPICKQPCGAAHPPTRLFFQSTGACPTQTASSSPSRHEPTDGGADRDELAAEVARLEQKAASLGRVLDEQRDGIQKLNAEASAAAGPPNLGGSCVAMWREKAAEAEVMKESVRREKECVQHLLNAKTEELSRKSSECGRLQEKGLSLAKELAALKLSTDMNLQEEEILKLASLGNHGNAANAVDVLTRSLALRNKSYKELMIQCNVLGRSESRSQQRFEKAKELIKKLKARVQDLEKEQEEKENGVIRDLRSAKKFKADQTNSGNTTVNNGFSGLAAGCGDYPMKLDEVVQDPCDKPGPSPEAKNDLNIKDKMDDKHADVIDLDADDSVFQHEHKKGLSAKPFGNDATRMAPGTGPQQVHNFNSLSDDFQIPIRNLGGEGTGKSVGKWCKGVATPGSLNTNANKRNLIAVGPDGRGGKDSKTQALWPKAQKVGSRAIVPSLGEVAVALRRKAAEMASTAAAASSQGCISWALRQRGLGGGGARAVPVLPRRRFCVSAAAGAGFDNENREYVIVGGGNAAGYAARTFVEHGMADGRLCIVSKEAYPPYERPALTKGYLFPPDKKPARLPGFHTCVGSGGQRQTAEWYKENGIEVLYEDPVVAFDGKTHTLKTSSGKILKYGSLIISTGCEASRLPAKIGGNLPGVHYIRDVADADSLVSSLGKAKKTVVMGGGHSQIALKPVPFELFPLSASIAAADHSKGSVLSSPAEGGGDGFHGRGGVVAGVHLVGAAGAWAWWWWCAGCPGASPWECLRLSGGGYGGSKGYSRVCCRWWRHQGWLP

SEQ ID NO: 145555 - protein, 362 aa, Oryza sativa
  unsure (1)..(362): unsure at all Xaa locations
  Clone ID: PAT_MRT4530_46264C.1.pep
MSCFACCGDEDTQGVPDNRNPYPGNHPARSDAYRTADPTPRGPQPVKVQPIAVPIIPVDEIREVTKNFGDEALIGEGSFGRVYFGVLRNGRSAAVKKLDSSKQPDQEFLAQVSMVSRLKHEHVVELLGYCVDGNLRVLAYEFATMGSLHDMLHGRKGVKGAQPGPVLSWAQRVKIAVGAAKGLEYLHEKAQPHIIHRDIKSSNVLLFDDDVAKIADFDLSNQAPDMAARLHSTRVLGTFGYHAPEXYAMTGQLSSKSDVYSFGVVLLELLTGRKPVDHTLPRGQQSLVTWATPRLSEDKVRQCVDSRLGGDYPPKAVAKFAAVAALCVQYEADFRPNMSIVVKALQPLLNARATNPGENAGS

SEQ ID NO: 145556 - protein, 108 aa, Oryza sativa
  Clone ID: PAT_MRT4530_46265C.1.pep
KKKIKKKYLIKNKKKKKEIIINKFFFEILVCRFCVSSLLFSCVLPYKGFSLLGYLLFSPGLFPTFFFFGPLIFPSLSALFHIPFWEILVFSHSSCLLALSLFSPFFIL

SEQ ID NO: 145557 - protein, 53 aa, Oryza sativa
  Clone ID: PAT_MRT4530_46266C.1.pep
EYLKHSLSYLKEILLYCVMTNSSTTLFNYKLNLMLFNWSLTLKLPDLSCPFYY

SEQ ID NO: 145558 - protein, 420 aa, Oryza sativa
  Clone ID: PAT_MRT4530_46267C.1.pep
MAGGAVLAGEHQGGAVRRRMWRRSHARRTESRTPRHVAIAPCLGSWQLAASAASTVLNAAHRWSSGGGQRPEGVELRWQSSIRARGCGGGDWTGDGSGRGGSSPVRQRLSLGTIRASSPEVTLVLLLRAVRAHIWRRPHGGGGALLVWGGRARRQPNSARVGEEELAGVREDELAGGQMRVGNGATHVDRQWAAATTTHLEQAGGRRAGVDSRVRGWRGAGAEEGVGGGGLGSGRRVLHGEGAAALHAARAPTTDLAGRNRRSRCRVELPRRPSFVSRRLRFPCRSRPPQLGLRAAAPSTADTFIDGEAVFRGGDASDEAAAGAQTCVVFVGDDGGADGVAAWATERAAARFLLVAARPHSEAASSSSLAAVSSPRAALASAAAPSTTDTTAGRCRRYTSSSPPPVPASPPTSSPLRAAL

SEQ ID NO: 145559 - protein, 175 aa, Oryza sativa
  unsure (1)..(175): unsure at all Xaa locations
  Clone ID: PAT_MRT4530_46268C.1.pep
MSSSSEDAVSSLGTGKEDEKEGRVGGAIEARVVGKDSSKDGGRRGREAGAMCDRPRDRERFWGLMKIFPGFLAKSLPPRLARYLPPFGLLLFDPTIFNFPNMTTIFNLPKIIPCPYVCQSKXPHQIRPNLSWVTKIVRGFLIHSIYSFRFPQNQSVKLGIKMTGEDHCHHRQLQN

SEQ ID NO: 145560 - protein, 102 aa, Oryza sativa
  unsure (1)..(102): unsure at all Xaa locations
  Clone ID: PAT_MRT4530_46269C.1.pep
GSGGTGGRERVQARKGRPGRPDRTKRDAYGRPPPARPGHEAVGRAPGFQPTTTLVTQKPPNPSPARAWFPFVLPWARRKRLPTWRVANCRAFGGEGRRXEGR

SEQ ID NO: 145561 - protein, 290 aa, Oryza sativa
  unsure (1)..(290): unsure at all Xaa locations
  Clone ID: PAT_MRT4530_4626C.1.pep
MVAAGSKELLRNEDXFTTEDAVAMDFPNIVALAETPTARTSPPPPLPTTSRPSERASCSPQGHPCSAGVPPRDPWRRGGCSGDGFPLPLPPRLLVVLGGVRLRVKVAEQHPGRVRLHPGRQLPQPRLHPALGASEAELAVVVLDGAQHHRAGPLLPRKDAEEAREQHAGELCDPNRTLDADGFGNQKEKGYLTGANLGEDVRFVRAPCAFVKCPRLLYHWRMKDEHLESIRSKPLDNLHLQLTAMMTSEAFCGKAAVVTVTVCPSLSGVQKMISAGFQSTENSSEHCTQI

SEQ ID NO: 145562 - protein, 110 aa, Oryza sativa
  unsure (1)..(110): unsure at all Xaa locations
  Clone ID: PAT_MRT4530_46270C.1.pep
ALGLRMQCCQQLQEESRECRCSAIRRMERSYQESMPMPLEHGWPAPAXRTTVGRGRPAQQADYGEGLSEDGYYCEQHHQPVMTRARLTRARQHAAQLPSMXRLEPHECSI

SEQ ID NO: 145563 - protein, 75 aa, Oryza sativa
  Clone ID: PAT_MRT4530_46271C.1.pep
ISKGGMDNHMIRLHHMTVSYLHPMQNHHIGQTVWTNCGMSKPTAATMDEGMPSSGDADRMCSVQRLLYYFARKDS

SEQ ID NO: 145564 - protein, 95 aa, Oryza sativa
  Clone ID: PAT_MRT4530_46272C.1.pep
MAARLSVGVGLQAILVTSLLLQMTLFLPCALATDGRKPSQLLIMGREMHQGLDPTKSTRCRRILVPRLVKHNWDPGHCKHYATYPFMIRAFNSSR

SEQ ID NO: 145565 - protein, 152 aa, Oryza sativa
  unsure (1)..(152): unsure at all Xaa locations
  Clone ID: PAT_MRT4530_46273C.1.pep
NENGFDLPREEEDTLSSILKSCCCYGNPIPTSVCTRVGRVGLRNHALLRRLHGRAGDQVFGXSARRDYSLFVNIYFTFTNMSNTGDNGNTGYKEKEAPVNTNGGNTASNSSGGPFLGSPIRPGLLPIRKKAASLVPDSQLVQDLFDYNASDR

SEQ ID NO: 145566 - protein, 697 aa, Oryza sativa
  Clone ID: PAT_MRT4530_46274C.1.pep
MPSMRALERLASWPTPPPPPPPPPPPAKAAAAEAERPCPPSSAATTSSSSSSSASAAPAAAGAPRVYPLRDFPGREAAGLGGAFRDNVRWLLRQWGGASPASPAAGGPGSASAAVAVAWRVLLSDDRTGVVVPIFAVEEPVASSPKPLCDYCRWAGWSHHWVSKRKYHFIIPAPADWDRQLAADVILGRTDHLLHGLIHSNGFGHLVMLRGRDGGSTALSGRDIMDIWDCLCSALRARAVSVVDFSQKRSLDLRLLLSVAHGDTWFTRWGYCLARGCFCVSTSTYAASVEALAALPVDYLRSRHVRRVVTIYRRLSNKPLVTVREFLRCLLDWKHLEPPLQLPPVKTCTRLQFMLPKPSVMKRHRQQPCQRFEDVIDLLQCRWSKKRLLDAAEVVVDRLLEHGSGAEMTRQAVRDAARGAIGDTGLLDFVIKSLGDTIVGNYIVRRVPDAETRVLHFSLEEYEEPTPALLDVEVECTPLPPVVRWPSTVEVERDLRAVYRAMVEVRSEAAQAVLDCKHWVKWWGLGDESDDQLRFFVEWQPQPWEAAELIRPMPLGEIVVVPLHASMGELLVESEHALRDTYYFFEEFQAEGLHGIAGEKWDPVMLGGAENGDTISVYGNGADMETELRCHGGLDLWEVRCVCGAQDDDGERMIACDACDVWHHTRCVGIADSEPVPPLFLCVLCGGALMAAGPINS

SEQ ID NO: 145567 - protein, 99 aa, Oryza sativa
  unsure (1)..(99): unsure at all Xaa locations
  Clone ID: PAT_MRT4530_46275C.1.pep
AYSWGEIGLHWRGNLATAYAPMASQLIKIRLXCYKPTGLHGASLTRRTQFTMKGIQSKTPTYXVARTLNGDPFIXSLETLLTSRPMVAWYLSNFPAYRT

SEQ ID NO: 145568 - protein, 335 aa, Oryza sativa
  Clone ID: PAT_MRT4530_46276C.1.pep
MAAAVHLRPIHSLSLPLPLLAAKAATPNPGWLPLSAKPGAGRRRSLLVCAASDPSKAAGKGEAGDAVARWAAWIPRAAVGGAGPEQVLRLISGAAATPICQFVDSPRTFLHAIDPRVKLVWLLALVVLPARSNIYLRFGLVAYLTLLSMWVLPNHIWKDQLGRVALLSGIIFIMLGFGSDGAPSLVQTRTPPPSVIGLPNIPTSTNGYSYTIMKLGPLQFTRKGLSVASTSACLSFAIFQSASLCLTTTTPEQLASALWWFMIPLKHIGVPVPEIILTLLLSLRFINLVFDEAIRNSALAIVARRINWEKLATMETIDIFFNYVRRIFKNIFDHA

SEQ ID NO: 145569 - protein, 229 aa, Oryza sativa
  Clone ID: PAT_MRT4530_46277C.1.pep
MEDFLDSIEFPQLNEVDKVLLDKPISKKELFDTIASMKHNKSPESEQIPGAILLLDIQKAFDSVSHDFLCCVLRKFNFSNEFIDWIKVFYSGRKSYVSNYGNLTRPLNMERGIFQGCPISPYLFLLVIESMALAIRQNPNIQGIPVAENELKISLLADDSTCFIDGSDNSFKSLFDTIGFFSESSGCKLNISKSEAIWIGSLKGCQRYPFCEKVAERIYYGKHMLLKAY

SEQ ID NO: 145570 - protein, 118 aa, Oryza sativa
  Clone ID: PAT_MRT4530_46278C.1.pep
MAAAKLLLGDARREPEAKIASALGALGVAAISMATTLAAEFEPSPGGLRTTTYNHLAVAGLAGTFLGGVALVGASVWVSDNPAARRAAGKKLLYFAAPPLLAAVVLSVAALLCKWGAI

SEQ ID NO: 145571 - protein, 53 aa, Oryza sativa
  Clone ID: PAT_MRT4530_46279C.1.pep
GLPRGVRNRELNKLARLGGQVGLPPELQGMGVSVPEPKPWGIPVFRTPPPMGM

SEQ ID NO: 145572 - protein, 215 aa, Oryza sativa
  Clone ID: PAT_MRT4530_4627C.1.pep
MLGLPSIDGRFRVTAGGGEVGPALQRRSTSPQPAAPSAPSLCRSITVPTSKANRLRSLAPPLIQGSSTLQAVILPANKDLIFEDSCSAGDYFTPVIQGMASMYDVDFSPHQATPKESMNFKDDAKVQPSSGQTPNKGNYYMGHANAIMMMFQYIRDGCRHVESSMEDFKSKKVEEGRDEKRKVGEGYDPRWSSPIEITMKICNDDVSDEATEKEP

SEQ ID NO: 145573 - protein, 170 aa, Oryza sativa
  Clone ID: PAT_MRT4530_46280C.1.pep
IVLDLGSALLYLHHDCEKCIVHGDIKPANVMLDVSHNAKLGDFGLARLVEHGGEPQTTQVVAGTPGYIDPEFINNRWPRTELDVYSFGIVLLEIACGKRPASRQLPNGASSLLAWVRDLYDQGKILDAADQRLNGEFNQQQMERVIVMGLCCSHQDPIQRPSIVQAMDVL

SEQ ID NO: 145574 - protein, 89 aa, Oryza sativa
  Clone ID: PAT_MRT4530_46281C.1.pep
MGKLGRYIKEDENGKYIYEWNKSILRPLYEETEPSLQEGLAEFRNEYEEKGYIEAGEDYHTYMAEVQEWSKKYWDLYFNTSEMEEEEDD

SEQ ID NO: 145575 - protein, 55 aa, Oryza sativa
  Clone ID: PAT_MRT4530_46282C.1.pep
MLMDLEAEEMTRRQPVLMVVGGGVGRCLGGKGGYEDTTNAVSTKKASVTDGPIRM

SEQ ID NO: 145576 - protein, 394 aa, Oryza sativa
  Clone ID: PAT_MRT4530_46283C.1.pep
FFTDAYDLFCISLVSKLLGRIYYTDIASDTPGSLPPNVSAAVNGVALCGTLAGQLFFGWLGDKLGRKSVYGFTLVLMVVCSVASGLSFGRTAKGVVATLCFFRFWLGFGIGGDYPLSATIMSEYANKRTRGAFIAAVFAMQGFGILFGAIVALVVSAGFRNAYPAPSYADGRAASLVPEADYVWRIILMFGTRPGGAQLLLAHENARRTARYTALIARNAKQAGRRHVQGARHGDPGGRGPRRGGRRRRRRQRVGALLASLRAAARGAPGGDDEHVVPARHRVLQPEPVPEGHLLQGRVDPAGEDDERRRGGVPHRARAGAHRAVRHHPGLLVHRRVHRRRRPLRHPADGVRHDDRLHARPRRAVPPLDDAGEPHRLRRHVRLHLLLRQFWAQC

SEQ ID NO: 145577 - protein, 113 aa, Oryza sativa
  Clone ID: PAT_MRT4530_46284C.1.pep
FLATQDGAEVSLQQMVEELMMDPVKADKSAVPDTGVDPDWEYQLSSIFIDTEKGQARYGTRSMTALAVKFNGEVTFYERYLESNLWKENLAIELEMSQWEDLRGTSNISPKSC

SEQ ID NO: 145578 - protein, 347 aa, Oryza sativa
  Clone ID: PAT_MRT4530_46285C.1.pep
MPSQQRSSSGSTAKAGDADGDGDAAAVSFLGDKSAKVFIAGHRGMVGSAVHRKLDALGFTNVVVRTRAELDLACQAAVEAFFAAELPRYVILAAAKVGGVHASSAAPAEYLTENLRITVNVVDAARRCGSVRKLLVLASSTIYPADAPQPTPESALLTGPPAEGSEWYAIPKIAGIKMCQAVRAEYGLDAIAAAPNNLYGPRHPFPPEHSHVIPALIRRFHRAKLEGAGEVAVWGSGAAAREFTHVDDLAEAVVVLMERYSGEEHVNVGSGEEVTVRELAEAVRGVVGYEGVVAWDAARPEGVARRVVDSGRMRKLGWEPRVALRDGIQDLYRFYLRHECGGQAHHA

SEQ ID NO: 145579 - protein, 116 aa, Oryza sativa
  Clone ID: PAT_MRT4530_46286C.1.pep
SNGQCNCLYARPNRKHQLPQRTALSKEEERQRKLAEEREKRAAAAERRFAALAAQSSSTSGTAAAEHPPQRAAAADDTSCSCCFSSLVGKVPFHRYNYKYCSTTCMHLHSEMLEDD

SEQ ID NO: 145580 - protein, 51 aa, Oryza sativa
  Clone ID: PAT_MRT4530_46287C.1.pep
MLPTARTKRTQEGEGFAEHQDMKAFEPKRLSTVIDSKELLQSNAPKEFLQS

SEQ ID NO: 145581 - protein, 91 aa, Oryza sativa
  Clone ID: PAT_MRT4530_46288C.1.pep
QDNVWGSDHRRLRPARRRPPRRRLRHLRQRRPLRCRGRYFYLSTPIRHEQMFPMFISLQSSHAQRVHCLDGCTRIWNVAAESYPIYAWLIF

SEQ ID NO: 145582 - protein, 379 aa, Oryza sativa
  Clone ID: PAT_MRT4530_46289C.1.pep
MAGSTFNCFGACMQHHAQQVHEPKKVVAPSSSFDFREEYTSAFRTESYNDFWARVLDITLAHGAALVPRHGGGGGCAASKRLPSYRLFAEHLLEPDQRAVAAALASPRGSRLRPDVRGLLAAYYAETANASFLCSHLLKDIEHIRLRYRPLKHTLRKLASDVGVSGLADVSAALGQPFTALAASQGRLREVQAGSGDLLRGLDAGRKKARHRIRSVARLRRALSVSFVTAVAVVAVVGACIGVHILAAFAAFPMMSPAWLGERFFSGRAARRALVQLEAAAKGTYILNRDMETISRLVARVRDEGEHMVALRRLCVEHRPAAGAGGKGRLVQEVLRQLSKNEESFRQQLDELEEHLFLCFMTTNKARIMVMNFMAAAAR

SEQ ID NO: 145583 - protein, 290 aa, Oryza sativa
  unsure (1)..(290): unsure at all Xaa locations
  Clone ID: PAT_MRT4530_4628C.1.pep
MCWKLLYTLVCTYRSTISYVLRSGLPSIDGGLRVTAGGGEVGPALHRRSTPPQPAAPSAPLLRRFIAVPTSKENRLRXSLAPPLIQGSSTLQAVXIPPVNKDENSDCRRKIQADRTPCQLLLFAAQSTKFLADSTKFLFGIGNFFHNDYPLQIDLIFEDSCSAVDYFTPVIQGMASMDDVDFSPHQATPKESMNSKDDAKVQPSSGQTPNKGNYYMGHANAIMMMFQYIRDGCRRVESSMEDXKCKKVEKGHGEKRKVGEGYDPRWSSPIEITMKICNDDVSDEATEKET

SEQ ID NO: 145584 - protein, 83 aa, Oryza sativa
  Clone ID: PAT_MRT4530_46290C.1.pep
PKFHQMSHDQDLPRELSSNAAMSGLGGAVSLCMLSPPKVTMGRMKVEANSAIRTGKTASFQFPPHPKPLHSTPYISSCICSPS

SEQ ID NO: 145585 - protein, 740 aa, Oryza sativa
  Clone ID: PAT_MRT4530_46291C.1.pep
MQYLYVRVVRARGVAAVGKTVAEVKLGNYRGVTPATAAHHWDQVFAFSKETIQSSFVEVFVRARGSDDHVGRVWFDLSEVPRRAPPDSTLAPQWHIMEDRKGERGAAEVMIAVWFGTQADEAFAEAWHSKAAGVHGYGPLGSIKSKVYVAPKLWYLRVSVIEAQDLIPMDKGPMAIGRYPELFVRAQVGSQMLRTRPAPVAANRGPSSPFWNEDLMFVVAEPFEEFLVLSLEDHVSPGRDDVLGRLVVPVSSIERRWDEKLVVSRWFGLDRGTGGGNVASGNTNRFGSRVHLRLSLDGGYHVLDEATAYSSDLRPTGKQLWQPHVGVLELGVLGATGLIPMKARDGRGATSDAYCVAKYGQKWIRTRTVVDSVCPRWNEQYTWEVFDPCTVITVGVFDNCHVDKPASGNTTLAVRDNCIGKVRIRLSTLETDRVYTHAYPLLMLHPSGVKKMGELHLAVRFCCGNAGNMFHAYVRPLLPKMHYIEPLLVRQVESLRFQATNVVAARLGRAEPPLGREVVEYMLDHRSHLWSMRRSKANFFRLVTVLSGPITIGRWFELVRSWNRPVHSCLAVFTFLVFVTMPELILPTAFLAMAFTGLWRYRVRSRHPPHMEMRLSHADAATVDELDEEFDTFPSSRGDVVRFRYDRLRSVAGRVQTVVGDIATQGERMQALLSWRDPRATVLFSIACVLAAVIAYTIPMKVLVGLWGLYAMRPPRFRSRMPSPLMNFFRRLPSKADSLL

SEQ ID NO: 145586 - protein, 71 aa, Oryza sativa
  Clone ID: PAT_MRT4530_46292C.1.pep
QRWRQCLQGNVIVREAGAQGRTALGRARGSHAVVTVTVNAARARFPGTGGLIRQTPVNVFRSSSCILSCVL

SEQ ID NO: 145587 - protein, 232 aa, Oryza sativa
  Clone ID: PAT_MRT4530_46293C.1.pep
MAAVVRCKPTRLTPIAGLSSSSGGGRRKKAGRRGEAKPPPPPPPQLRGGETKKKKKPDARTAAEAAQGLQRHEVERRKKPPPPPPPPKQEKAKRVVRWKCAAGCGACCKLDKGPDFPSPEEIFAEHPEDLKLYKSMIGADGWCINYDKSTRTCNIYEERPVFCRVEPKVFEEYFGVPSRPSTFDREACSACVDTIKMVYGEESAELTNFKRVIREESKKHEASLNQDKLLDT

SEQ ID NO: 145588 - protein, 550 aa, Oryza sativa
  Clone ID: PAT_MRT4530_46294C.1.pep
MVLELEATVICVDDSEWMRNGDYPPTRLQAQEDAANLVVGTKMTSNPENTVGVLAMAGDRVRVLLAPTSDPVKFLACMHGLEASGEANLTATLNIAELVLKNRPDKRLSQRIVVFVGSPVKDEKLETIGKKLKKYNVSLDVVEFGESDDEKPEKLEALVAAVGGSSHIVHIPPGEDLRAVLANTPIITGDEGGGAAAGGASRYEYNVDPNVDPEFAEALRLSEIARQEAAADGASRYEYSVDPNADPELAETFRLAAGEPSTSNTDTVLLESDSDTYVPFHEFIQNNPFVTGAESASDRPADDERATEEGFRMIREALARSANAAHAEISGNSSSGQELELGWQVALLVFLSHFFVNNTGIKQYPQRTGEICFQFEVEDIINLICWQGWQQCKYRRSCPSTRTRKLGHPRSRAEDARAALVGDRSRGGGGAAPGRLRWLRCAEARGAMEAADARMAGGGGGATRGRAGLVEARGAGRGGRVARGLALVHRLVANGDPRSTPWSRRARSSPLMSPSCSPSSLTASSTWSTAKQIDDLLAFYGWCDDVGLAR

SEQ ID NO: 145589 - protein, 742 aa, Oryza sativa
  Clone ID: PAT_MRT4530_46295C.1.pep
MGTSVQVTPLSGAYGEGPLCYLLAVDGFRFLLDCGWTDLCDPSHLQPLAKVAPTIDAVLLSHADTMHLGALPYAMKHLGLSAPVYATEPVFRLGILTLYDYFISRRQVSDFDLFTLDDIDAAFQNVVRLKYSQNHLLNDKGEGIVIAPHVAGHDLGGTVWKITKDGEDVVYAVDFNHRKERHLNGTALGSFVRPAVLITDAYNALNNHVYKRQQDQDFIDALVKVLTGGGSVLLPIDTAGRVLEILLILEQYWAQRHLIYPIYFLTNVSTSTVDYVKSFLEWMNDSISKSFEHTRDNAFLLKCVTQIINKDELEKLGDAPKVVLASMASLEVGFSHDIFVDMANEAKNLVLFTEKGQFGTLARMLQVDPPPKAVKVTMSKRIPLVGDELKAYEEEQERIKKEEALKASLNKEEEKKASLGSNAKASDPMVIDASTSRKPSNAGSKFGGNVDILIDGFVPPSSSVAPMFPFFENTSEWDDFGEVINPEDYLMKQEEMDNTLMPGAGDGMDSMLDEGSARLLLDSTPSKVISNEMTVQVKCSLAYMDFEGRSDGRSVKSVIAHVAPLKLVLVHGSAEATEHLKMHCSKNSDLHVYAPQIEETIDVTSDLCAYKVQLSEKLMSNVISKKLGEHEIAWVDAEVGKTDDKLTLLPPSSTPAAHKSVLVGDLKLADFKQFLANKGLRDFLQVEFAGGALRCGEYITLRKIGDAGQKGSTGSQQIVIEGPLCEDYYKIRELLYSQFYLL

SEQ ID NO: 145590 - protein, 200 aa, Oryza sativa
  Clone ID: PAT_MRT4530_46296C.1.pep
MSTPTVQMVAPAAAVVEDPSKHWTRHGPVLTACLVGINLLMVLLVFFYFWRFFSGKRGPPTSSTSTMASGGDDDEEEGASSSSSSADTSPGRHHQDREDIASSLPVFVYSSSAAAPDVGDAGGNGKAAAAAECAVCIVEFRDGDRARLLPRCGHRFHADCIGAWLQLHSTCPLCRAAVLLHPAAAEPAKNDQPKDDDCPV

SEQ ID NO: 145591 - protein, 66 aa, Oryza sativa
  Clone ID: PAT_MRT4530_46297C.1.pep
MLTRHLQIKQGNQIPEVWMLFTVYEVAIEDSSDNLLNWWSLYERSSTSKSDNESIFEEIDPLDGCD

SEQ ID NO: 145592 - protein, 58 aa, Oryza sativa
  Clone ID: PAT_MRT4530_46298C.1.pep
QPKALFFHFFFFFFFSGIKAGGPFYHTQVLFTGFPKSSPEDGCYFLKSTGSNFWDKIF

SEQ ID NO: 145593 - protein, 226 aa, Oryza sativa
  unsure (1)..(226): unsure at all Xaa locations
  Clone ID: PAT_MRT4530_46299C.1.pep
WIPRGCRNRHEALSLCLLFFFFGSAACPPPSSSSLSVAGAPRRLLPPSPSVTESATGDHEHERGRRSSGVGGEGGSATVEPRGGQIRRCRAAGRAPPTSSFGPRHPPPPVRPSPPPSSLSASPSAAESATGGXSSDAGEEGGSAAAVPWGGRIHHRWAAGRADLPPPQGXAPPPPPPTSSSGPHHHHPPSRARLRRAVRPALRGAPAPVRGGDGLVQARAVAAAEA

SEQ ID NO: 145594 - protein, 239 aa, Oryza sativa
  unsure (1)..(239): unsure at all Xaa locations
  Clone ID: PAT_MRT4530_4629C.1.pep
NLVLNSRQQSAPRGEFYEPPPSXEPIFTTGYEIRPKLISMVREKPFFGLDQENSYHHLREFEQLCSCLXIRGMKQETVQWKLFLFYLQERAKQWYTSIVRCVSGNWEKLRDRFCLAFFPITRITALRVEILSYKESAFYLDITAGGSFIHITLSEGKVILDXIMEKTYFMEQCNEPLPEAYVARIEEPLLIESKTEPSTSINSTEEHVSEPSSVDKKEIXTPGCAPMFRYDLDENYGNT

SEQ ID NO: 145595 - protein, 112 aa, Oryza sativa
  Clone ID: PAT_MRT4530_462C.1.pep
EAGPPILPPGDGFYPSLFGAPPRFKGRGAPSPAPGLWHWCPFLGCQATPFVTGGWLGVLPGVLYSQPRGWGQNIGLGLRGARRCPGCWGPGPSFCFSPLHHFSWLVLSRVWK

SEQ ID NO: 145596 - protein, 139 aa, Oryza sativa
  Clone ID: PAT_MRT4530_46300C.1.pep
MTAGKHVNGGSGVASSMDPMVATLPCVDPVVGAIPLADPAVVASGGRIRHQPLVRWGIDDDNSGGPLLAGSYGGGPPPSRIRRQRPQDRRTGGLWCGGVSMATTAADCIDDDDSGPLPHGSNGAALVVADSRLWRQCLI

SEQ ID NO: 145597 - protein, 505 aa, Oryza sativa
  Clone ID: PAT_MRT4530_46301C.1.pep
MSMRYNGGILIFVNGDANAMTILFVDSPYAPVRLLAGNHLPPFLPILDAADPRLGLFACKQTSPVLTAKRSSDFDVFMICGPVAVWSYFARDLVGIPCSARFGLEFGSGRAFIYGFPLPFSAWLPDPRGNRQKPHKFQFQKFEFKTTVIPQFWAQFGAVTAVFARTLGIQTSSRYKIFMMKLVRPDLSSHGLMGPFFAWIKSKKGQQGIIESSHISSRPSTTFRQIIIGISKALDCLLQHNIYPSEIRIEDVYVRVKGGITTVKLLVYEAQLATSRNTTASNQNAQRIKLWKDVKGVADKCVELAGLKKQIHPDCDRFLKYIGAGNVKWLEDYPDEWNDDKKACYLKALVASDSKYVRSKLQLIGFTWPDYSDFLNNLITDQVTRLDIKYNILDPYDYLRLCRNLVKHWLSLPSNLREKNDDYAFFLRKMEKWTPRIWCNLYEAIGWPPNLVLYISELQQQQVLIVSVPNERNIKVFGVAAAFDSVRDRFRSRFSELQQFKKTQC

SEQ ID NO: 145598 - protein, 162 aa, Oryza sativa
  Clone ID: PAT_MRT4530_46302C.1.pep
MARGRIQGRCISWTGSAISHVPCSTSSPPQCITETKDLSTWSPFSATTRPRSSPPTTMDTPCSSTPPPTPSSTSPTSIVPRGMMPWPSPSTKNRTASTSSTSDTTPLPATIASRCSAMGFFVKGSPYGVLYRRRPSQRPPKLQLPPTQHYLRFFQALWHSRL

SEQ ID NO: 145599 - protein, 261 aa, Oryza sativa
  Clone ID: PAT_MRT4530_46303C.1.pep
MVLGARLLLGLALLAALLAVVLQLYRLRKPVRSLLLLLPKFSTGLPVSLSSVFDVTKGKSNYGPGGGYHHFAGSSWKLAKFQFLPEIDVIGSASTSFPSSDGLTDSLQGLSSMEYYACVFSKKGIIGFVTSFQVNSIVDWRKFYFERYIFAGKIVGRYYDDEGNPTKYLKGIEMKAKRGAQLLEKQKSEEAKIPNCNSKWSQQEGGEVWCETGYPRLVRRPGDIALTGQVSQRCACYKEEELDKAGLVVYEGCDYLSTSCK

SEQ ID NO: 145600 - protein, 267 aa, Oryza sativa
  unsure (1)..(267): unsure at all Xaa locations
  Clone ID: PAT_MRT4530_46304C.1.pep
MHLAIDADQRSSVRSLAPAVYTVVPARLRNRRTVAEALHDRGWIRNITAALGVXSYPGAEPTLGHPQISSTXRMSXLSDLEYKPNWKSLAPPRCRYLLWLVALNRCWTADRLQSHGLSHPVRCVLCDQSDETIDHLLVACPESWQLWWIALRAIGLSKCLPINEPSFHHWLCDSKKKMTKAHRRGFDTIATLVAWTIWKERNNRVFNQVSITWVEIARAMIDEADLWRLARAAIHTLVVHVDRESFSFSVTVSSFANVGLVPTNENM

SEQ ID NO: 145601 - protein, 62 aa, Oryza sativa
  Clone ID: PAT_MRT4530_46305C.1.pep
TPQASAPKIQTTMLNRGGLDFNCREGANIRNQDPNKEGHFLITLGEEYWDLPEFYTIEHFFY

SEQ ID NO: 145602 - protein, 161 aa, Oryza sativa
  unsure (1)..(161): unsure at all Xaa locations
  Clone ID: PAT_MRT4530_46306C.1.pep
LARRRRCRCPSSPTAPVPPAPAPTAARPGSAAARSRSLSHRRPPSLSPDPSGTRPATAXSGRDEARRRRIREGRGPRRRPIAAQLSWSSGSSLGSSSHRSRPPPPAGSGSPLVVGVVVVVAGSASSLXPLSATFARQIRASIRRRRPVVVVGVVRIGVAAV

SEQ ID NO: 145603 - protein, 44 aa, Oryza sativa
  Clone ID: PAT_MRT4530_46307C.1.pep
LGYPLLKKLMHVVVFLLWKMLCNHLCRLNYKYIRVRPCDLTPIL

SEQ ID NO: 145604 - protein, 88 aa, Oryza sativa
  Clone ID: PAT_MRT4530_46308C.1.pep
GGGVLNFFFFFGGRNFILWRLRTFYMAGIHRGPMIKHPELGSMQSSQENTGGGRPFGRTPLIRAENNMAEAQPLLTGQDPVKGPNINR

SEQ ID NO: 145605 - protein, 350 aa, Oryza sativa
  Clone ID: PAT_MRT4530_46309C.1.pep
MALSTFVLAVLVMSGAAALGRELAGDGAAAAAAADVAMASRHEKWMAKHGKTYKDEEEKARRLEVFRANAKLIDSFNAAAEKDGGGGHRLATNRFADLTDDEFRAARTGYQRPPAAVAGAGGGFLYENFSLAAAPQSMDWRAMGAVTGVKDQGSCGCCWAFSAVAAVEGLAKIRTGQLVSLSEQELVDCDVRGEDQGCEGGLMDTAFQYIARRGGLAAESSYPYRGVDGACRAAAGRAAASIRGFQDVPSNDEGALMAAVARQPVSVAINGAGYVFRFYDRGVLGGAGCGTELNHAVTAVGYGTASDGTGYWLMKNSWGASWGEGGYVRIRRGVGREGACGIAQMASYPV

SEQ ID NO: 145606 - protein, 228 aa, Oryza sativa
  Clone ID: PAT_MRT4530_4630C.1.pep
MAAEAASGGGGGYRMLPQAGLPIGFRFRPTDEELLLHYLRRKVMSRPLPADVIPVADLARLHPWDLPGEGDGERYFFHLPATSCWRRGGGGSRAGGGGGAWRASGKEKLVVAPRCGKRPVGAKRTLVFFRRGGARTDWAMHEYRLLPADDHPPEANDVWVVCRVFKKTTTLAHRRSPPSIRGAPRRRAAAADDDDMPSSPSSCVTDGGDAGEEGEESSSCSVVASNCP

SEQ ID NO: 145607 - protein, 97 aa, Oryza sativa
  unsure (1)..(97): unsure at all Xaa locations
  Clone ID: PAT_MRT4530_46310C.1.pep
ILNIQRGQCGYHIGDKLWEVIFDQHRIQHTCEYSLDYNLQLERVNAYYNEVRVHHYLPHCMLMVLXPETMDSCLSEHYWQTLQQWISFFGLFEDQHN

SEQ ID NO: 145608 - protein, 555 aa, Oryza sativa
  Clone ID: PAT_MRT4530_46311C.1.pep
MPSPSPSAPPPPPPRVAAVDRRRLDPASIPDPTSPPHSLLLPPPLLVLQIEGRLKTASFMWRSIPCGGGDYIFPTVTASFGDNGSTDDNLTQERLDIGKQELGNIDNELEAQIMAQEGKLDLLLKTMEENEKKRAEAEERSRLDLKDLKAAVEARLPQVEKQVVDLHASLGNLSAKVEQMESSLLKQSRGDKGIGEETLVRQWFHIRQTGSVSEYVEKFDCLMHQLLAYEQIVPPVYFVQKFIDGLKDELVGMAKSGAIMYMIKIDEVVTEGETEIPAPIQQVIQQFQEVFAEPKGAPATFQAAMNKTLAPVLRRSTDDNLTQERLDIGKQELGNIDNELEGVQDGGALKEGVGSQGKRVRIANRNLAPPSSPPLQPCVAVAPVVAVVREGRRRGRRRVAVLVRPSIVAVDRQSTAVVVKPIFSAAFSSTPSPSVDLPPPFWSPVSSPRRSLRAGALRLCRRAVVRRRACAPEPPPVVTSPLTLSSSSLVVRPWTGGDYDPGKVRCGGLCCARGTVTAPFRGTMVVLRHMVTCCGAVSCGYSEEEFYSDADGVED

SEQ ID NO: 145609 - protein, 116 aa, Oryza sativa
  unsure (1)..(116): unsure at all Xaa locations
  Clone ID: PAT_MRT4530_46312C.1.pep
DVSGDVTTGGGSSVQARRRTTARRHERRAPARRGRRGELTGDQNNGGRSKKGDGVEXRAAATIGLTTTARRQRGGRGRRRDGDHDGDLPERRRRLERRRRTAGAAATTAARGLTGL

SEQ ID NO: 145610 - protein, 223 aa, Oryza sativa
  Clone ID: PAT_MRT4530_46313C.1.pep
MTSAVTSPPAAARARMLAGERRRDGTNGGHQHVESDAANSPVTKTAAEDQRTAAASRKRRDGEGADEDSDATATTMATSPSDGDDWSDGGARLERRRRRRHEVTRPSRVTNTSDKFNSPLVTATGGVVKKKPPANEEVLDPWWGRARGEGGSRRICQPPIRWPVVGSRPGEAAPAAGLEAEDEAAGGGHYSRVESDAAARPAPLVFKDQKKKKRDWLKSSQFI

SEQ ID NO: 145611 - protein, 472 aa, Oryza sativa
  Clone ID: PAT_MRT4530_46314C.1.pep
MVILEQPQLLLLLLLLVAAAAATGATAADDELECPSSIFDHAVNSQGAIQFPVFHKKHQCLRPWSVRATQASSTGASGAGKGGGLNNLQEEEITSSSSTKIDVIEDSSINDFLFLMAVSLGKPPVVNLVAIDTGSTLSWVQCQPCAVHCHTQSAKAGPIFDPGRSYTSRRVRCSSVKCGELRYDLRLQQANCMEKEDSCTYSVTYGNGWAYSVGKMVTDTLRIGDSFMDLMFGCSMDVKYSEFEAGIFGFGSSSFSFFEQLAGYPDILSYKALSYCLPTDETKPGYMILGRYDRAAMDGGYTPLFRSINRPTYSLTMEMLIANGQRLVTSSSEMIVDSGAQRTSLWPSTFALLDKTITQAMSSIGYHRTSRARQESYICYLSEHDYSGWNGTITPFSNWSALPLLEIGFAGGAALALPPRNVFYNDPHRGLCMTFAQNPALRSQILGNRVTRSFGTTFDIQGKQFGFKYAVC

SEQ ID NO: 145612 - protein, 70 aa, Oryza sativa
  Clone ID: PAT_MRT4530_46315C.1.pep
KNIMNCHALYNCMYLVTYNIIINNVVTQNSLSKRNESFMIIDGNFLSSIERRSALFLVLLAHTMVDRRTN

SEQ ID NO: 145613 - protein, 291 aa, Oryza sativa
  unsure (1)..(291): unsure at all Xaa locations
  Clone ID: PAT_MRT4530_46316C.1.pep
KGKRGLLRQRLGFAVDRVHGXGSQKRTAEIHPSKTDGQDPSVHDRTTGDDDDDVSGDVTTGGGSGVQARRRTTARRHERRAPARRKRRGELTGDQRRSGGNLRLDDDGGAPAVYSNDGGADEDGDATATTTAXSRATATTRATTTHGWSDGDDGGARSHGARALRAKRDEGEGGDGGKEAAAKAHGDRRRDRRFRVRRREIDPNXTRIHGFPKRFRRCFQKGKDRVDHGDPFSSIDFTGNGKGRRAPPVSGERAHGRATAGRLXAGEREREKVLGRLSAQSQKRLLKPFPI

SEQ ID NO: 145614 - protein, 178 aa, Oryza sativa
  unsure (1)..(178): unsure at all Xaa locations
  Clone ID: PAT_MRT4530_46317C.1.pep
QYPSHNTIHHSAPFGQDPSVHDRTTGDDDDDVSGDVTTGGGSXACKLAGERRRDGTNGGHQHVESDAANXPVTKTAAEDQRTATASRKKRRQPSAXRRRRCSGGLQQRWRGGRGRRRDGDHDGGLPERRRRLERRRRTAGAAATTAARGPTGLGLYGRRETKARVATGSGDTGGPLGV

SEQ ID NO: 145615 - protein, 309 aa, Oryza sativa
  unsure (1)..(309): unsure at all Xaa locations
  Clone ID: PAT_MRT4530_46318C.1.pep
MGISSALQRWEEWQLRILALSSLVVQYILLIMSPRRGDTLLLLTAVFLFIPGVLKCLEKPWALHSASINSLVNSPQNVRRTTGRNGKIDSIDDFVTMVRGYYSDVNGTPGTTVNFDPSEIFVDLSSPSFDYRLKKLKWFSALDADKTNGWLQKGLSHTFDLLYTKRKMYLPPEGRVQQMMQNVKRDWLKGLFRKSIVGSLLRMIALYLQFGAIGLFHHSHRQAYNDRDVKHLNFFGQLALDIVNTAERKSSSSIGRSKTGMDGNVSQHMDAMLYQHNLIGCFICNQRHYIRSFAXSFGCKDYLDQRWQM

SEQ ID NO: 145616 - protein, 171 aa, Oryza sativa
  unsure (1)..(171): unsure at all Xaa locations
  Clone ID: PAT_MRT4530_46319C.1.pep
DGSNVDAKGQRYNIFQSERKIQDKVCKLIIDGGSXSSDLVHALSLSMQRLPTPRYIQWMNQASTLKITHKVRVTFSIGSYVDKVECDVVPMNACHLLLGRPWQFDLNATHEGQTNYNSFIHRGVKHVLKPVHDSAIKSVVFLVVKKKKEQPYTSSSFSFLANIMQLSKILP

SEQ ID NO: 145617 - protein, 68 aa, Oryza sativa
  Clone ID: PAT_MRT4530_4631C.1.pep
KKKKKWVGIKAAFQINNTQYFFTKNQKNYSRGRVLIKKKHRLKFLEKNFLKPVFRPLNYTPNFECLKI

SEQ ID NO: 145618 - protein, 114 aa, Oryza sativa
  Clone ID: PAT_MRT4530_46320C.1.pep
MERRRAAAATEPRAGGARIIREPMVTTGFSRKTAETEEEMGHGNIWAVRSRARPKDACEKRGPGPRIEAEKNDRTGGDGEEREDHLSEADSSCGDRHATGHHRPAVFTRAADIP

SEQ ID NO: 145619 - protein, 66 aa, Oryza sativa
  Clone ID: PAT_MRT4530_46321C.1.pep
DMPFCEAVYSSIVGLEDLNGWSLFRTRIDMYITTHKMSHDTLSPLFITFAFGQVKLFTVLKKKSCL

SEQ ID NO: 145620 - protein, 49 aa, Oryza sativa
  Clone ID: PAT_MRT4530_46322C.1.pep
HSSGSKCYRDLAKVTTMTGRGLKKKGLTPSSNFKTPLKPAKPVLFTAEL

SEQ ID NO: 145621 - protein, 64 aa, Oryza sativa
  Clone ID: PAT_MRT4530_46323C.1.pep
ARKAWRSCSRSGASPATPTASTPTPRPRRKRLWKLMKPHESECIYCLLCLCCASGHGYIRFYKP

SEQ ID NO: 145622 - protein, 40 aa, Oryza sativa
  Clone ID: PAT_MRT4530_46324C.1.pep
LMSNGKGYTELDGTGNLMYRVKSYTKGSPREVVLMDADGR

SEQ ID NO: 145623 - protein, 884 aa, Oryza sativa
  Clone ID: PAT_MRT4530_46325C.1.pep
MAGTKPRGKPKSRALVAGAAHGGKEKKGVTGGAGKRGDMRGGRHGPRLPTALRRQLDALGPGTSRGSDEDEEAGSDDEGAHDVYEYEEGVPEEEAGKNGRYDAVEKYEYEFDSDASNADEDVPSDEGEDMEEDDAGEDEDEEKQIRILQETTGMPREAFDGGKRKKQPLELPFQPGVGDGPVTIHDLLNNIQGKPGYSKLRKRLQQQEKKPIVVQAPLAKVEREKLERGVVYQQSKKEVTKWEPLVKRNREAPTLYFENDLNLGVNTVGAIASEFKPRNEFEKQMAEIMRSTEMMEAHKNDGVKILELNKIDMEDVRERQNRLAKMRSLLFRHEMKAKRIKKIKSRTYHRMLKKDKLKAASADFEADPEAAKEHAMKQEFKRAEERMRLKHKNTSKWAKRILKRGLDVQDEGTRAAIAAQLQQNALLTRKMNSTKDDSSSSEESSDDEEDDDESEANILNKGKEKILKILGDDNEIPTSGVFSLPFMERAMKKHEEATYEEARLALEECDESLRKLEDGNTEENGDSVKVTGKRTFGPAEDTNKVTNKKQKLDDGDKNSDSEYESDSAQHLDDNEVHKIDDVQIGTALLDDDEPQDDLFKSFDDIIKNPGRKTTVEVGMLADNSWKKFKSSKGNDGSNTNGDIDKSTVKVSYMADQKLKQLDHNSDSDSEDEMVEGLLTISDAKENYKIPSQADLIRQAFAGDDVEAEFEKDKLDVLNEENPEPEKPALVPGWGQWTDIQQKKGLPSWMVKEHENAKRKREEALKRRKDAKLKHVIISEHVDKKAEKLLVRNLPFPYTSKDVYEQSIRMPIGPDFNPAISVAALNRPAIVKKPGVVIKPIQYEEVDPHEKPDEPKRVIQRAVPNPKAKRTSAKQAKAIASNKRK

SEQ ID NO: 145624 - protein, 58 aa, Oryza sativa
  unsure (1)..(58): unsure at all Xaa locations
  Clone ID: PAT_MRT4530_46326C.1.pep
LPHVIEIXLDIYMAYXRVRXNXXPITKRXSXXKHXMCKXQIISXRRLXSTTTXLDHXP

SEQ ID NO: 145625 - protein, 91 aa, Oryza sativa
  Clone ID: PAT_MRT4530_46327C.1.pep
LPPGPPQVRLVALQSFFQALSSVQAVFLPFHLQQVGVVFFVPTPAPPPVLLAFFLPSICGVFPASFLVPTGIPPVVGVWFLFVIVFWFQCC

SEQ ID NO: 145626 - protein, 301 aa, Oryza sativa
  Clone ID: PAT_MRT4530_46328C.1.pep
MAALLYRFNILSASKSTRGRKEEEAEKATKNPIPQKRNPEFKPTKSLPKNPQTFQRPIHTTQCHVPAFVRTGFRAMRVSSASSTPPPPAFAAAAWAVVLLAMLRSDVALAAAASSNDDTGLSPLMPPPPLAAPVPAAVSPAPATPPAVLSPRKLLRPQGADVVGVGFVSGSGGGGGGDGVRTRRVDDGCAGADDIAIYQGRATPLPSGVPAYTVDVMNRCAGGGGGDEECPIAGIHVRCGWFSSVSLVDPRVFRRLGHDDCLLNDGRPLLAGETVSFEYTNSFPYKLSVSVATCVVDPAAP

SEQ ID NO: 145627 - protein, 101 aa, Oryza sativa
  Clone ID: PAT_MRT4530_46329C.1.pep
KKEKPRSKEEPLSNGNLKTSKRRSSFSTKSDYPENGAQNTPVPRRKPSYMAATESAKAKLRGQNSPRLDSDSPADMNGFTRRQSLPSSTNNRAIRAEWRRW

SEQ ID NO: 145628 - protein, 65 aa, Oryza sativa
  Clone ID: PAT_MRT4530_4632C.1.pep
MQAPPAGGEERGDGERRGERDEERGEGRRKKRRDEHHGDVEHHESTTRTPMKKPKLSTADLDTRS

SEQ ID NO: 145629 - protein, 582 aa, Oryza sativa
  Clone ID: PAT_MRT4530_46330C.1.pep
MGKSPAKWIKSVLLGKKSAKSNSTKAKDLAKAANNKPVLSEDPPVISEPALVNSHNDGNAENCKLPNGVAVEAMGQGVENQNIVGSKAPTSPEKLSEELAAVKAQAAFRGYLARRAFRALKGIIRLQALIRGHLVRRQAASTLRVTWLIVKLQALVRGRNVRLSGASIQFVVKSGQHKFLSDKPSDAWKEKVSSNAYVRKLLSSSIGLEALHLQYDKRDPNSLYNWLERWTISQIWKSSSQPKKVADGKPQVRKASYAMETESAKLKRNVRKSSAVTVDSFQTNMTVEPEKIKRNSRKFSSSAADSVPDSQLSELEKVKRNLRKVTNSMAEASKISSSRADASKVSSSMADASKVSSSTADASKVSDSVAQIPPSLVNGISDHQDNQCEEAQQNACVSFPPETQELHSGILLEDNSHMNLLEPDLISNPETPFTSILTWEKFNDSTADAQEVEVLPLQNIDNEDNFPENGVLGKKEKPRSKEEPLSNGNLKTSKRRSSFSTKSDYPENGAQNTPVPRRKPSYMAATESAKAKLRGQNSPRLDSDSPADMNGFTRRQSLPSSTNSKLNPHSPHTQGPIYFKFD

SEQ ID NO: 145630 - protein, 210 aa, Oryza sativa
  unsure (1)..(210): unsure at all Xaa locations
  Clone ID: PAT_MRT4530_46331C.1.pep
MWTSLLIARSTMCLQTANDTTAPAKPAGAGPQLKLLVDKHSRRRARTRWTSSSASSAFVSFVEADADVSLEEFGDSLCPPIPCTGELLTLPDSNFAVVTDRPLLXVDAAGITQFLQAVGELAEGAERPAGVSEGAPRRAPPAASGVRPPRVRAGVRRGQRQAPSRRRARAPQVPLRPFPSPRVPGPRPPLSAAYSRRHRPSARYLPRRRR

SEQ ID NO: 145631 - protein, 132 aa, Oryza sativa
  unsure (1)..(132): unsure at all Xaa locations
  Clone ID: PAT_MRT4530_46332C.1.pep
TRGHGKYHYRNRPPNPQREETNPSGKRGDRGNGAHARARARHGWEGXARVGPGDRPSKKGGGGGLGRAGREGGERQPGREREEGAGPRGREGPREKERERNRGRGEGLRPRAEREREDFGPNLAQREREGYF

SEQ ID NO: 145632 - protein, 188 aa, Oryza sativa
  Clone ID: PAT_MRT4530_46333C.1.pep
MSVAHLFFLSFVLLLFSLLSSASAAAIGGATANDTTAPAKPAGAGPQLKLLVDKHSRRRARTRWTSSSASSAFVSFVEADADVSLEEFGDSLCPPIPCTGELLTLPDSNFAVVTDRPLLYVQVTRLRCGGFVFSTQICHNLVDAAGITQFLQAVGELAEGAERPAGCHVSKTRQKYCQGTFGEWFERV

SEQ ID NO: 145633 - protein, 176 aa, Oryza sativa
  unsure (1)..(176): unsure at all Xaa locations
  Clone ID: PAT_MRT4530_46334C.1.pep
MWTSLLIARSTTCLQTANDMTAQAKPAGAGPXLKLLADADVSLEEFGDSLCPPIPCAGELLTLPDSNFTVVTDRPLLYVQVTRLRCGGFVFSTQICHNLVDAAGITQFLQAVGELAEGAERLAGDELVHHRRFLFSPDDVAALRDQLPTRLGPGCHVSKTRQKYCQGTFGEWFERV

SEQ ID NO: 145634 - protein, 418 aa, Oryza sativa
  Clone ID: PAT_MRT4530_46335C.1.pep
MASLIRLSSRWRYQQLEEGGRSGFSRGGRVAAPWGPQVTTITLFGPESLAFDGGRSGPVHPASPTSRIILKWGGVVAGWTTSAYSGNYRRPLALRSHLKSGDLYIADSSWLHVQVHVKQMEYRVRQSQAERRDGVLLRGGDEHGRGCDGRFPDPEPARSAGAAAATPTPHSPARAPRHRPDAAAAPASLLGSPRARTRWTSSSASSAFVSFVEADADISLEEFGDSLCPPIPCTGELLTLPDSNFAVVTDRPLLYVQVTRLRCGGFVFSTQICHNLVDAAGITQFLQAVGELVEGAERPAGDELVHRRFLSGPDDVAALRDQLPTRLSPAADAALPLAPAAGRRPLPLACRLPPLQSRSPTDRRPSTCSSRARPLLAASASATAGSGSGNLLSPLRPCSSPPRRRTPSRRSVCGCHAC

SEQ ID NO: 145635 - protein, 187 aa, Oryza sativa
  unsure (1)..(187): unsure at all Xaa locations
  Clone ID: PAT_MRT4530_46336C.1.pep
SSIPSFVTGRLGGRQRQTWWATAAQRWQRVGSPRTEEDSVKKGVISFKNDPLKHIDLHHVVFSRRTVVGNHSAIVAAAPATPQGAVQWXTIDVTQLAAAXPFTVRHQVLAFFACHIDQESVVSGSSSKKSXSDSARRALERLADLRELSMQSRAMEAEAAKATGLEACLELVENDGHPTGGPVSSFP

SEQ ID NO: 145636 - protein, 136 aa, Oryza sativa
  Clone ID: PAT_MRT4530_46337C.1.pep
SSSSAPPIASSLSPSSSSRRSSPPTPSRATPPSSPPPAATSSSSAAATPSTASTSSTRSPAPRATRCRSLPRTSPTTTPPSRHPAASTSSIPSTPSSPSPWATRATTLASMGPSTASPVPPPSFDPSSNSAGASSA

SEQ ID NO: 145637 - protein, 60 aa, Oryza sativa
  unsure (1)..(60): unsure at all Xaa locations
  Clone ID: PAT_MRT4530_46338C.1.pep
XXXFFPPPKAIRGIPGNXXXTSTITHNXRTRTSQAQPYPLPGRXLTRSNQMHRHPKQTLI

SEQ ID NO: 145638 - protein, 706 aa, Oryza sativa
  unsure (1)..(706): unsure at all Xaa locations
  Clone ID: PAT_MRT4530_46339C.1.pep
MADQKVILAEPLLPGKEADFADDDDVEAQLTSYHTGASFSRTCLNLTNAVSGIGVLSMPYAVSQGGWLSLLLFVLVGAVCYYTGTLIERCMRADGSIASYPDIGQYAFGATGRRAVAFFMYVELYLVAISFLVLEGDNLDKLFPGATMEILGYQLHGKQLFIVLAAAVILPTTWLKNLGMLAYVSAAGLIASVALTASLIWAGVAETGFHRNSNTLNLAGIPTSLGLYFVCFTGHAVFPTIYSSMKNSKHFSKVLLISSVLCSLNYGLTAVLGYMIYGDDVQSQVTLNLPSGKLYTKIAIVMTLVNPLAKYALLVAPITAAVEERLSLTRGSXPARVAISTAILASTVVVASTVPFFGYLMSFIGSFLSVMATVLFPCLCYLKIYKADGIHRTEMVAIAGILLLGVFVAVTGTKRGSHKRSGVTGFSSVETTSTAAVAMAGSQTQSQRLPTPTRQVAGKRGWSRWRGGGQWESAVAAAQAAGERQQAAVRGRSRWKGGVGGCRRRKAAVWSRGLEEKETRAPGPRRVGSWSRNAATSSGLKRNLRWCTSSSPGRSLSLASSDAGSYSGWSYAGRGGWRASRGSLAHTGQTLCAFRELTDGLQELRDPRRVDEVVADLGAEHEAATPQSRHVEEADEEVHRVLARLRVKHATRALVHQQLQLRPGPGGLRRRRRVVRRLQARSAPAVTAAAVLVTSTEENPITPLRL

SEQ ID NO: 145639 - protein, 763 aa, Oryza sativa
  Clone ID: PAT_MRT4530_4633C.1.pep
MAASRCAARRALALAAAAAEALERACCSSDAAAVVSGNNRLMAEHLRAGRLEAAREVFDGMPRRDVVSWNTIMAVQARAGSHGRAVGAFLEMRRQGFRPDHTSFSTALSACARLEALEMGRCVHGLVFKSCSSGNVFVGASLITMYANCGVVSCLEQVLDGVESPNVALWNALISGLVMNHRVGYARKAFDRMPVRNVVSWTAMIKGHFTAHEVDMAFQLFKLMPVKNSVSWCVMIGGFVTHEKFSEAVELFNSLMMNGEEVTNVILVKIVNAFAGMKSIRGGRCIHGLAVKSGFAYDLVLEASLVLMYCKSLDITEARLEFDKMEGNHVGSWNAMLCGYIYSDKIDEARKLFDSMNNRDKISWNSMINGYINDGRIADATELYSKMTEKSLEAATALMSWFIDNGMLDKARDMFYNMPQIDVMSCTTLLFGYVKGGHMDDALDLFHMMQKRTVVTYNVMISGLFHQGKITEAYKLFNESPTRDSVTWSCLVAGLATNGLIHEALQFYKKMLLSNIRPSESVVSSLISCLSNYSMMVHGQQFHATTIKIGLDSHLLIQNSLISLYCKCGEMIIAQSIFDLMAKRDKVTWNTIIHGYALNNLGQNAVEMFESMTKAQVDPDDITFLGVLSACNHMSLLEEAKYFFNAMTCTYGILPNIMHYACMVDLFCRKCMIKEAEGLVKSMPFEPDSAIWTSLLSGCRLTGNDKLAEHAASQLIAIDPCTKMPYLHLISVHGLTNKSTVIDSLRSQIKSTATEKDVGYSWI

SEQ ID NO: 145640 - protein, 196 aa, Oryza sativa
  Clone ID: PAT_MRT4530_46340C.1.pep
RGKSIRDPPVITVSKSATYALYALTYLDRDVAYRPDEKYVKTHKCEPYAGAKVVGECERLWDEKGNVIKQTEPICCPCGPHRVQSKCGDIWSKLTKGKANTAHCVRFPGDWFHVFGIGAWSLRFSIRVQVKNGSSVWDVVVGPENKTVVSGDNFLRVKVVGDYTGYTSIPSFEDNYLVTPRKGTGSSQPQDLGNEH

SEQ ID NO: 145641 - protein, 68 aa, Oryza sativa
  Clone ID: PAT_MRT4530_46341C.1.pep
MRGCARRRPCGAASEEGDADDQDRLPLRILLMPASPIATRVRSQIRRCAVSVHELPPRLTLSEQATSP

SEQ ID NO: 145642 - protein, 268 aa, Oryza sativa
  Clone ID: PAT_MRT4530_46342C.1.pep
MAAAAARSIPYRWTLAGATALVTGGSKGIGHAIVEELAGFGARVHTCARNAAELEASRRRWEERGLRVTATVCDVSARGDRERLVAAAAAEFGGRLDILVNNVGRTMFRAAAACSGEDFAVLVATNLESCFHLSQLAHPLLLAAGGARGGGGGCVVNISSVAGSVGMPALAVYSMTKGGMNQLTRSLAAEWAGDGIRVNCVAPGGVKTDICQDETIDPELIKSEMDRLPMRRLAEPEEVAATVAFLCMPAASYITGQVVGVDGGRTIS

SEQ ID NO: 145643 - protein, 316 aa, Oryza sativa
  Clone ID: PAT_MRT4530_46343C.1.pep
MDIDGAGTKAAAAGWKAPASMVLVQLFITGMIMLSKVSIGGGMFIFALLAYRSLFGAVFILPFALIFERGKWRDMDWRAFGWIFFNAFIGYAVPMSLYFYGLKDTTASYAVIFINIIPLFAFILSLMFRLETFEIGSIVGVLKIVGVLLSVGGTMLVSLYKGKSLHLWNSILQHQNEPATKTATNQLRGTILLVASSFAYACWYLVQSKVLKVYPYKYWSSMITCLVGGFQVAFVGIILRRHKSAWKLGWDLNLVTVVYSGALATGGKYSLNSWVVAKRGPAYPPMFNPLSVVFTVVLDSVLMGDDVTVGRRSQHF

SEQ ID NO: 145644 - protein, 120 aa, Oryza sativa
  Clone ID: PAT_MRT4530_46344C.1.pep
QKIILSREWGFTKFTREKSVKLKAQGSTMSDGDEGQRVGSHGRRHKRANRKAFGVKTIQASTKMPHAEWNLRDFALASQIWHARSHHLRMGGHQDDRSLCNSSLGRTASDGGFAYHQDLV

SEQ ID NO: 145645 - protein, 49 aa, Oryza sativa
  Clone ID: PAT_MRT4530_46345C.1.pep
THCHTGIERRTPRGGDNARHTNKRRGKGGHTPTLQPRGRTSQERTPARA

SEQ ID NO: 145646 - protein, 131 aa, Oryza sativa
  unsure (1)..(131): unsure at all Xaa locations
  Clone ID: PAT_MRT4530_46346C.1.pep
MAHSPAAAAGGNGERAESGGARGKEGSREERGSSSEGWRRPEQRMEAAATAGERTADGRQQHLKKGRRGVRDGEDDRDXPKWPARDGXNGELTSERGKRGIGGDWWQPRGGRGAGGLSERDGGDCAARRRL

SEQ ID NO: 145647 - protein, 126 aa, Oryza sativa
  unsure (1)..(126): unsure at all Xaa locations
  Clone ID: PAT_MRT4530_46347C.1.pep
MRAPHGNDSGRAVHGGPSPRTGEGXGAPRGAHVAPTRRTFGNHAGGQTDGPNLPEGRSDGGGEHAAGAHGRLEPARRPWRTAALPRDGXRGRRRRPTTSGGGATARXTLAVAKRLGSDATTRRRGR

SEQ ID NO: 145648 - protein, 392 aa, Oryza sativa
  Clone ID: PAT_MRT4530_46348C.1.pep
MAFFLVACLPWVCFILLSLYVFQLFADARRRLPPGPWPPKPLIGDLLALGKGDQQHRSLARLADRYGPVMSLRLGTVLTVVVSTPDAMREIFHKNKDNLAGRPTADAFNAMGHSANSLLGLEHPGVRWRAIRRFSTAELLALSRLAELQPMPDRIAGKTGKSNLLNVVLDMEREWQHKGSVLSHDAMRVLFTDLYGAGASTTSVLIEWAIADLLQNPESMRKIKEEITNVIGTNAQIQEFDIARLPYLQAVVKETLRLRAVAPLVPRRAEATIEVQGFTIPKGTNVILNLWAINRDARAWNDPDKFMPERFIGNDINYLGQNFQFVPFGVGRRICLGLPLAQKVMYLVLGTLVHQFEWTLPEELKETGIDMTEKCGMVLCLANPLKVMAKKM

SEQ ID NO: 145649 - protein, 104 aa, Oryza sativa
  Clone ID: PAT_MRT4530_46349C.1.pep
VTSYLCHMVSYLSFFQILDHVHPVDVLAFRFVGLSLGNVSECFLVLFCFRCNLADNSLYCILLSVSSCFLVSVSYQAMHKVFGEMVFKANPCTVSPLMVSIKLV

SEQ ID NO: 145650 - protein, 61 aa, Oryza sativa
  Clone ID: PAT_MRT4530_4634C.1.pep
PRVSAVPFFVPSFSGAPYGLTWCACRSRSGVPCFFRRVLGWGDLAPPLAPLACCACMWCGY

SEQ ID NO: 145651 - protein, 499 aa, Oryza sativa
  Clone ID: PAT_MRT4530_46350C.1.pep
MAFFLVACLPWVCFILLSLYVFQLFADARRRLPPGPWPPKPLIGDLLALGKGDQQHRSLARLADRYGPVMSLRLGTVLTVVVSTPDAMREIFHKNKDNLAGRPTADAFNAMGHSANSLLGLEHPGVRWRAIRRFSTAELLAPRRLAALQPLCRDKVRGLVRGVSELAARGEPVHVRRVALDMALSLMLSAIYSVDLDPESTAVFRSVVEEAMLLIGTANLSDLFPAIAALDLQGVRRRVAELFTITYRQYDEQVARRRPERDAGEAGKNDLLNVVLDMEREWQQKGSVLSHDAMRVLFTDLYGAGASTTSVLIEWAIADLLQNPESMRKIKEEITNVIGTNAQIQEFDIARLPYLQAVVKETLRLRAVAPLVPRRAEATIEVQGFTIPKGTNVILNLWAINRDARAWNDPDKFMPERFIGNDINYLGQNFQFVPFGVGRRICLGLPLAQKVMYLVLGTLVHQFEWTLPEELKETGIDMTEKCGMVLCLANPLKVMAKKM

SEQ ID NO: 145652 - protein, 83 aa, Oryza sativa
  Clone ID: PAT_MRT4530_46351C.1.pep
MAVPRFAPYGLRQKRTALAAPLGVGRDDIDGAGRWGHTLLHFRRIGHNKPNPQSPINRGRLPLCMTGGPFNQEAGFLFNLVFV

SEQ ID NO: 145653 - protein, 240 aa, Oryza sativa
  unsure (1)..(240): unsure at all Xaa locations
  Clone ID: PAT_MRT4530_46352C.1.pep
PLLDRRSGVGKEVFYLPANVTPFLPERRRAARRRPHPPSGSWTPRVRRARTTPSPKPNQAAPPAQXTAVLSLPRPPSTAALVASPTVPELPPSTLAHPGALPSGALLPTPFGSLPALSCQGTHCSNPISVGPTILPLSSKNNFQSPHSLPLRPSSRPKPISSPSPPPKSKLNPSTSKLSALCTSEYQTSGRRGRPRSSSGGSVRRAVRWCTPLGRPMAVFAVNMADGTVQKLADGGGSAA

SEQ ID NO: 145654 - protein, 304 aa, Oryza sativa
  Clone ID: PAT_MRT4530_46353C.1.pep
MERCRRLTQGHLLLALQATAVASTGLHAAASCSCSTLSPWPPLALHVAASCLMGDASIHHGVNDGCCHRADEPTLFYMPHYEASLYDAFFAVNWEPPLLLRHVCVLGNNFHNYVIQAEENRSGPAAKAKLILTALQFSDGTTAHENHQNTAASDSIQIVIVVVIISLIATASVTPPSTAATALPSYHRPSAGDDQAQRPRNCSAASVLHGVVFFVYFLYIAMSTGGGNGRGIGSNDAPRGGGNGAPGGNVTGEGENVNINGGNNTINALSSTEALSGTATGEDSGTAAGVDAVRGGAMAMAEAA

SEQ ID NO: 145655 - protein, 66 aa, Oryza sativa
  Clone ID: PAT_MRT4530_46354C.1.pep
CAILVPNLCLVVAIPTTVTATREGVADGGRFELNLRIALASLWPTTSESQLRVPRRACVDPPPFEQ

SEQ ID NO: 145656 - protein, 239 aa, Oryza sativa
  Clone ID: PAT_MRT4530_46355C.1.pep
MRLATNPFNWLLVIKQLYICITSMRTEILIWIQLSSERCRSKALKVASTVNGVQSVTVAGEERNLLLVIGDGVVDASRLTRRLRNHVGYAEIVELTTSSSTAVPPVDVAAAAVTEDAVRPRYHGLVGGGGGLPWFARVGCPVTAHSVVASHAAPAAALWPGAGEVGGSWAASYSAHPSPCYRSSPLAGGYTLDVARSHAANYSPLIERHAGRGGHYPAHSCCSRRKLLRRSVPSCCTIQ

SEQ ID NO: 145657 - protein, 314 aa, Oryza sativa
  Clone ID: PAT_MRT4530_46356C.1.pep
MERCRRLTQGHLLLALQATAVASTGLHAAASCSCSTLSPWPPLALHVAASCLMGDASIHHGGAGLLCAVPGVNDGCCHRADEPTLFYMPHYEASLYDAFFAVNWEPPLLLRHVCVLGNNFHNYVIQAEENRSGPAAKAKLILTALQFSDGTTAHENHQNTAASDSIQIVIVVVIISLIATASVTPPSTAATALPSYHRPSAGDDQAQRPRNCSAASVLHGVVFFVYFLYIAMSTGGGNGRGIGSNDAPRGGGNGAPGGNVTGEGENVNINGGNNTINALSSTEALSGTATGEDSGTAAGVDAVRGGAMAMAEAA

SEQ ID NO: 145658 - protein, 108 aa, Oryza sativa
  unsure (1)..(108): unsure at all Xaa locations
  Clone ID: PAT_MRT4530_46357C.1.pep
LTRPWYPNLKSXREXXDLMXXGKLNMHRXXXQNNKXXEEGXGKHDTXRXEXXXHENXXXXPHFKEANNXXXPXKXKAPXXGXKKKRNHXXEXXXAGNXEDHXNEXNRR

SEQ ID NO: 145659 - protein, 88 aa, Oryza sativa
  Clone ID: PAT_MRT4530_46358C.1.pep
MVRTKDEVELGAVLAEDAVERRRWRWVLVEGELPSTPYTANWFDHKMLLNFCADLYRFIRRDICNHLGDFYDPCSELLADPKFKNLRE

SEQ ID NO: 145660 - protein, 180 aa, Oryza sativa
  Clone ID: PAT_MRT4530_46359C.1.pep
MGSCVPVDHSFLARTRDDAGTWRVGPLGVRMEARKCGVGVVSTYALPHEYKMRCNECLEWIARGGRCNAMQSCQCANGNGNQQAAVTLMKGVQNEFIEPPLAFGRVNSVNIAISNLKSSDEPPYCQAWVHGSAAMMWNVRNPESKEDRVDATNTRGHHAIHLNSQQHFVTMKYMHLFSLQ

SEQ ID NO: 145661 - protein, 396 aa, Oryza sativa
  unsure (1)..(396): unsure at all Xaa locations
  Clone ID: PAT_MRT4530_4635C.1.pep
RAAGIFVQTDTGCVLAVQLDRGDNAHTVKRKLQLALNVPTEESSLTFGDRVLKNDLSTIRNDSPLLLTKTFMHRSSSTPCLSPTGKDIQQQRDRGGPIELLVCPSRCSRTKQLVKDVARAIRNGVDPIPVNSGLGGAYYFRNSKGENAAIVKPNDEEPFAPNNPKGFTGKALGQPGLKRSVRVGETGFREVAAYLLDYDNSANVPPTVLVKISHPVFNVNECVSSANMKASKDYPGAVSKIASFQQFIPHDFDASDHGTSSFPVSAVHRIGILDIRIFNTDRHAGNLLVRKLTGPGKFGNQTELIPIDHGLCLPRVLGXDPNFEWIPWPQASIPFSDDELDYIANLDPMKDADMLRMELPMIREACLRVLILSTIFLKEATSFGLCLAEIGEMMSR

SEQ ID NO: 145662 - protein, 54 aa, Oryza sativa
  Clone ID: PAT_MRT4530_46360C.1.pep
TLGNFVPTTPVKQRKQTLSGIIWGKTFVGGFLNPPSNYRGQTWSRGWDSQTEAR

SEQ ID NO: 145663 - protein, 125 aa, Oryza sativa
  Clone ID: PAT_MRT4530_46361C.1.pep
MKQPVVDLVSNNSGGGGRQKEKERISNSSEIRVFGPSPLAGDFHRCGTDPSCPSDQTTQIDLALGRHRCWAMRSLGRGRQLGCSVRPASGRRQWMGHVLLAVRSARAHTLNRPGRFLPVTKVWSK

SEQ ID NO: 145664 - protein, 45 aa, Oryza sativa
  Clone ID: PAT_MRT4530_46362C.1.pep
LTCPPAVVLTACRGKGKTCRGNLMLPRHPLRQDGVPRSSIFCRSA

SEQ ID NO: 145665 - protein, 788 aa, Oryza sativa
  Clone ID: PAT_MRT4530_46363C.1.pep
MSSFTNLMINLLVLLALASLLSPAPALCYIHAGEAGSVVRTPNGTPPPPADAYRTYIVLVDPPPHGAATDDDGHRRWHESFLPGGRRMDDGADQARIIRSYTEVFEGFAARLTAAELAGVVSKKPGFVRAFPGRRTLRLMTTHTPEFLGLTRGAGFWRDVAGYGKGVVVGLLDTGVHAAHPSFDDRGVPPPPARWRGSCAVAATRRCNNKLVGVKSFVDGGGGGDDDVGHGTHTASTAAGNFVAGGASDRGLGAGTAAGIAPGAHVAMYKVCNGSGCDDDAVLAGFDEAMKDGVDVLSVSLGRWSSPPFDEDPIAIAAFSAVARGITVVCAAGNGGPEPSTVSNDAPWLLTVAAGSVGRSFSTTVLLGNGELVDGQALAQQPNSSTSYYPLHFSEKQPKCNELAGIVGDGVAGHLVVCQSDPVEDESVVSAMMATGAGGVVLINTESEGYTTVLEDYGPGMVQVTVAGGHNITEYARSSSSSAGGCKPNATVVFDNTLLSVHPAPTVASFSSRGPSKVAPGVLKPDVLAPGLNILAAWPPHLQHGGGGGGGGLFKVISGTSMATPHASGVAALVKSRHPDWLPAAIKSAILTTSDAVDGAGNPILDEHHERATAFLTGAGHINPARAADPGLVYDIAVADYAGYICALLGDAGLGTIVRNESLSCGKLDKNKIPEAQLNYPTITVPLPRSSSSAAPPPFTVNRTVTNVGPARSTYTMKLEIPRSLTMRVSPEKLVFSGVGEKKGFSVTVSGGGGGGEVVEGSLSWVSGKHVMRSPIVAVPQPYLKLGS

SEQ ID NO: 145666 - protein, 37 aa, Oryza sativa
  Clone ID: PAT_MRT4530_46364C.1.pep
MCRSVDLMPLVRFVLHAYNPRRLTFRLVGDMGPEYHV

SEQ ID NO: 145667 - protein, 104 aa, Oryza sativa
  Clone ID: PAT_MRT4530_46365C.1.pep
MARRKIVRGIWQRESMTELVAPHRETAQAPLCQFGRGLRVKSQALSGDRPSQGKRSGVTPLLKPGDSFEGSAPRLAFAPNSDEEGDASGADDRDDEAGDPGASD

SEQ ID NO: 145668 - protein, 97 aa, Oryza sativa
  Clone ID: PAT_MRT4530_46366C.1.pep
MRPTVAACPPTHPRTPHSPHIVPPNRERGRVKTESSRFDEDLAAATANCFAEAGGGADDGGRVGGDDAGDEKSMSRENIDAAPGPGGWGGGAGQMEC

SEQ ID NO: 145669 - protein, 118 aa, Oryza sativa
  Clone ID: PAT_MRT4530_46367C.1.pep
MGLSGTAYQTETRVGVCMESDLSASFNKFREEGGECENCPLRWRRRHPPRRTAELVAVLSAPPSSSLSAPPSSSSSSPPSLFLVLGERSAGEGRGASDTTALPPLRSPPRFVRPVEKG

SEQ ID NO: 145670 - protein, 83 aa, Oryza sativa
  Clone ID: PAT_MRT4530_46368C.1.pep
LQTKVVVCGYQGKRGPKKRVGKEPIAQPQNRGPGGGLNAEGQRSQGGKTPGRGSKAGPERGGDLKEPGKQGGGKPGEWMHGAN

SEQ ID NO: 145671 - protein, 417 aa, Oryza sativa
  unsure (1)..(417): unsure at all Xaa locations
  Clone ID: PAT_MRT4530_46369C.1.pep
MAPPAGTEAAGAGHRKNWRGESGNLWRIAGPVILTEIFQFLIGFVTAAFVGHIGKVELAAVSVVNGVVEGLAFGLLVKNHARTLGMGSALETLCGQAVGAGQPRMLGVYLQRSWVICLATSLALLPLYLLASPALRLLRQSAAISSVAGRYARWCAPQLFAYAVNFPMQKFYQAQSRVWAVTAISAAALAAHALLNWLVVARLGHGVVGAALVGDVSWWLLNAAQFAYLVGGSFPEAWSGFSRKAFTSLGGFVKLSLSSAVMLCLEMWYYTAVLILVGCLKNPEIQVGAISICMNYQLWTLMVAVGFNAAVSVRVANELGANHPKAAKFSVIVAVVTSAAVGLVFTLVALGWRLGQGGSHRLPSXKHWLLLSRWDLGGDADRNNPADCYSACHPLQNQMAERGHASRGADKGVGRGC

SEQ ID NO: 145672 - protein, 101 aa, Oryza sativa
  Clone ID: PAT_MRT4530_4636C.1.pep
MIAGGESESESDRRQENRAELEVSINRNLAVQVYIRMVFTFMAYLAFTWSTVVLLGGYVSSLQRKDFACLTAITVVQATRGATKPRQSTTPHRRRLQAKLQ

SEQ ID NO: 145673 - protein, 190 aa, Oryza sativa
  unsure (1)..(190): unsure at all Xaa locations
  Clone ID: PAT_MRT4530_46370C.1.pep
MAPVVSALAKYKLVFLGDQAVGKTAIITRFMYDKFDATYQXDTAGQERFRSLIPSYIRDSSVAVIVYDXRQSFLSISKWIEEVNTQRGGDVIIVLVGNKTDLVDKRQISTDEGEAKAQEHGAMFMETSAKAGFNIKPLFRKIAASLPGMEALSSAKQEDMVDINLRPAASGQIPSGAEAQEEQKAGGCSC

SEQ ID NO: 145674 - protein, 109 aa, Oryza sativa
  Clone ID: PAT_MRT4530_46371C.1.pep
MPRLVSGRSGGGRHMGSGSSDKEDCGQRIWRREGPRLVNSGSVCGRRVVWAVARLVGSRSGCRRRMGSRSCDEEACGWREGLKAWIRQPSGARIMAKRPKQGYGHGGVS

SEQ ID NO: 145675 - protein, 215 aa, Oryza sativa
  Clone ID: PAT_MRT4530_46372C.1.pep
MAPVVSALAKYKLVFLGDQAVGKTAIITRFMYDKFDATYQATIGIDFLSKTMYLEDRTVRLQLWDTAGQERFRSLIPSYIRDSSVAVIVYDVTDRQSFLSISKWIEEVNTQRGGDVIIVLVGNKTDLVDKRQISTDEGEAKAQEHGAMFMETSAKAGFNIKPLFRKIAASLPGMEALSSAKQEDMVDINLRPAASGQIPSGAEAQEEQKAGGCSC

SEQ ID NO: 145676 - protein, 64 aa, Oryza sativa
  Clone ID: PAT_MRT4530_46373C.1.pep
MGKTDDLLLLCWCGGVACYVHGAAALAGWEVRAERGESIGNSELATCMQREHGARHAAVDSTPI

SEQ ID NO: 145677 - protein, 132 aa, Oryza sativa
  unsure (1)..(132): unsure at all Xaa locations
  Clone ID: PAT_MRT4530_46374C.1.pep
GYEFDLGTPRGSPPSTAHRRPLAGGPPPPPPXSSRRPCSPPSTAHRRPLARGPPPPPPLXAPAARAPHRRRPRPGAVEGAAPAPVAGGTPSPEARCGRRSCSRARRRRYTVHHHSGTHPPPPALEPPPAGGS

SEQ ID NO: 145678 - protein, 122 aa, Oryza sativa
  unsure (1)..(122): unsure at all Xaa locations
  Clone ID: PAT_MRT4530_46375C.1.pep
ALHRAVEAPTEEIWTARTDRACNASRTGAAAIITSPTGRTTSFAARLEFSATNNTTEHKAILQVLRKARAXGAPRLVVNTDSQVAAGHIDTTYMALNPELAPSALADKTLSAGPILAHNCGR

SEQ ID NO: 145679 - protein, 64 aa, Oryza sativa
  Clone ID: PAT_MRT4530_46376C.1.pep
MVRTSDYAVGRWRQMRLRWGNCKGVGGGSTYSVTTPAARSTLSSRGRRRKDTLLEGEPSEKPEQ

SEQ ID NO: 145680 - protein, 103 aa, Oryza sativa
  Clone ID: PAT_MRT4530_46377C.1.pep
MERSCAAVSRFALARRRRSDELRRRARARGGRTARRAARLLGKTSREEPITEQESYHNSIVQHSFMSIEKALYNNHLIRYLMIFLKAIDEMQCAKWFYIEPYY

SEQ ID NO: 145681 - protein, 301 aa, Oryza sativa
  Clone ID: PAT_MRT4530_46378C.1.pep
MPSLATAAAAGAGAPLRRGPCAPRRQSAHASSSSSSSLPSPALATSTRFAATAPILRLVQRRPRAPLTAARAASPDAATGARSPSSGGQMLVFVPPHPLIKHWVSVLRNEQTPCAIFKSAMAELGRLLIYEASRDWLPTITGEIQTPVAVSSVEFIDPREPVMVVPILRAGLAMAENASSVLPATKTYHLGLRRDEETLQPSIYLNNLPDKIPEGTRVLVVDPMLATGGTIVAAIDLLVERGVTSKQIKVVSAVAAPPALQKLSNKFPGLHVYTGTIDSEVDERGFIVPGLGDAGDRSFAT

SEQ ID NO: 145682 - protein, 214 aa, Oryza sativa
  unsure (1)..(214): unsure at all Xaa locations
  Clone ID: PAT_MRT4530_46379C.1.pep
CAWLRLAQFWYNASLHXSLQWSPHKAPYGSNPYYGILLAFSMTSDDQVQADSNXLLKSRAFYSNVLQHHLARAQNHMKQVADSXRIVRSFMVGDHVYLMFEPYVQRSIATRPCANLAMKHYGPYEILEKIGSVGYKLKLSDIITQVSYVLQLNXTIPDHSPVFTQLPASLELDVVDXMPIEILNRRMVIKGNATIVQIQIRWGSLPATMATWED

SEQ ID NO: 145683 - protein, 194 aa, Oryza sativa
  Clone ID: PAT_MRT4530_4637C.1.pep
MEFSVSRPTLGSISMTARSSLNGNALLEKRPGGGGPRRGGGPPRGGWRLASAVAQRHEGGWRPAPAAASGPACGGEQAASGRDGALIPLRRWSCDKLPLRRRDVLPPGLSSLPTIVTSSLPIEDDKIGSGKLHVVALDLELSLLSITENDLPPPLLRSPLSAWIKAPSPATVTGSQAMRAMTRCGRAAHGPRAC

SEQ ID NO: 145684 - protein, 340 aa, Oryza sativa
  Clone ID: PAT_MRT4530_46380C.1.pep
MAASSPASSGKAASDSSAPAPNLRGLNKPKCIQCGNVARSRCPFQCCKSCCYKAQNPCHIHVLKQNNTLPDKPPLSTAPLSEQPSANIPSTGSSRLASLQRLPHHFLNSLRTKKSLAKKVPFILQDVMGINKWRFEKLKEHIQGDIDAENEAYERYTQNVGLLEETFGLTEDAADEPEPEATSSEERMETLVSEAKVRLKSDSANADGFRDRIATILDQKIKELLESKSTYEDDNPPDQNPDDHPKPVKLSIKQQMERGAKMTELLAKMIRAQSEVDLKICSGIAAQLFGKKNELSNQESVASVTIPYSFPKLWTRVEIDDAMMCKINGEFSSSTEVMQL

SEQ ID NO: 145685 - protein, 226 aa, Oryza sativa
  Clone ID: PAT_MRT4530_46381C.1.pep
MARNLATVAPIKISSSRLASLQRLPHHFLNSLRTKKSLAKKDVMGINKWRFEKLKEHIQGDIDAENEAYERREDGNIGFRGKGEAEIGLCKCRWLRDRIATILDQKIKELLESKSTYEDDNPPDQNPDDHPKPVKLSIKQQMERGAKMTELLAKMIRAQSEVDLKICSGIAAQLFGKKNELSNQESVASVTIPYSFPKLWTRVEIDDAMMCKINGEFSSSTERQKP

SEQ ID NO: 145686 - protein, 358 aa, Oryza sativa
  Clone ID: PAT_MRT4530_46382C.1.pep
MAASSPASSGKAASDSSAPAVAVANGNGTTPQKLPPASAFDMPKPNLRGLNKPKCIQCGNVARSRCPFQCCKSCCYKAQNPCHIHVLKQNNTLPDKPPLSTAPLRDLATVATIKISSSRLASLQRLPHHFLNSLRTKKSLAKKDVMGINKWRFEKLKEHIQGDIDAENEAYERYTQNVGLLEETFGLTEDAADEPEPEATSSEERMETLVSEAKVRLKSDSANADGFRDRIATILDQKIKELLESKSTYEDDNPPDQNPDDHPKPVKLSIKQQMERGAKMTELLAKMIRAQSEVDLKICSGIAAQLFGKKNELSNQESVASVTIPYSFPKLWTRVEIDDAMMCKINGEFSSSTERQKP

SEQ ID NO: 145687 - protein, 1113 aa, Oryza sativa
  unsure (1)..(1113): unsure at all Xaa locations
  Clone ID: PAT_MRT4530_46383C.1.pep
AIPLLLIFLQIISTTPDSGVRAGVRCLAHLISAGEKANWEAVQPLYMLVLRLAVDTRPKVGXVVSXCFLDILESYQKQTVMVPASEGITRCFERFLLLAGGSNAVNTDVAEGGPKGAKEVLYILNALKCCLPLMSSKPSNTIIKYFKALLDLHQPILTRSILEILHAVGDSPTVQLKSDVLLDIVCSLGLSVSVERKSGDEMASIARLLNVATRKIYNQNKNICVVKLPLVFTSLGDILASEFEEARFSAVEAFKSLIEDCIDESMILQGITQIKSRHPGIRSDPTTIEKICAILEGLLNVRYGDVWDKSFHVISMAFDKLGESSADLLPEALKNLADMQNLSDDDFSFRKQLDSCLGSAVAAMGPKNVLKILQIHSISDENEWIFPILEKHIVGASLQFFLTDIRDIIRAVEKNIPKLLKEDKLFSAKRAEGYVYSLWSLLPSCCNYARDTSIHFRALQNVLCDTLKNQLDLRGIICSSIQVLIKQNKEALSVPVEEAILAEDEISKSERRAKERYTKEFAEENLKAIRAFSSKFLEVLCSIFLASSNDAIGLLQPAISDIASISEKDTVGRFFLDAIRKLLDATKAVNAEQKNDSSMQIEANSNTNNMASRRALLLDFAASLMPGLAAKSINVLFSYVKPAIKDTDSLIQKRAYKVLSMLLKQDTEFIERNLDTLLGLMISSLPCQFPSKRYRLECLHHLIVYILKDSSKLGKREIIGSFLTEILLALKEANKKTRNRAYDLLIEIGRACEDAENDGRKENLHQFFGMVAGGLAGQTPYAISASVTGLARLTYEFSELIGVAYKLLPSTFLLMQRNNREIVKIKSLMEILVKKCGLDAVKAVMPEEHIKLLTNIRKINERKMRKSKSSEDGDNMSMTSRATSRQSRWNHTQMFSDFGSDEDDSNGPFSAQHTVASRTGTKASTRRSTRKRQADKSLLEKFIDQSTGEPLDLLDQKTVRLALKSTKKRAMPDEDDDEVEMDPEGRIIVREERERRKKKQPISRDDEADDRSMVRSQSVKRRKTTSSGWAYTGHDYTSKKASGDLKKKDKMDPYAYWPLDRKLLNRRSDRKAAARKGMSSVMKVTKKLEGKSAASALAAKRTQTKNRKQKKSK

SEQ ID NO: 145688 - protein, 417 aa, Oryza sativa
  Clone ID: PAT_MRT4530_46384C.1.pep
GNRAYDLLIEIGRACEDAENDGRKENLHQFFGMVAGGLAGQTPYAISASVTGLARLTYEFSELIGVAYKLLPSTFLLMQRNNREIVKANLGFIKALVAKSKADVLHEHLKGVVEGLLSWQTDTKNSFKAKIKSLMEILVKKCGLDAVKAVMPEEHIKLLTNIRKINERKMRKSKSSEDGDNMSMTSRATRQSRWNHTQMFSDFGSDEDDSNGPFSAQHTVASRTGTKASTRSTRKRQADKSLLEKFIDQSTGEPLDLLDQKTVRLALKSTKKRAMPDEDDDEVEMDPEGRIIVREERERRKKKQPISRDDEADDRSMVRSQSVKRRKTTSSGWAYTGHDYTSKKASGDLKKKDKMDPYAYWPLDRKLLNRRSDRKAAARKGMSSVMKVTKKLEGKSAASALAAKRTQTKNRKQKKSK

SEQ ID NO: 145689 - protein, 139 aa, Oryza sativa
  Clone ID: PAT_MRT4530_46385C.1.pep
MGAIFSRDDDDDLSNTTILCPHTSGSRRLSTRMCADPPAMMMGGADLAASPPHTNLATSSPPSLADPLATVGGVAVSSFGRAGIRQNQLARGHGRKRSKCRERMDEAGGVRWCRRRWHGGSVAERAMRKIERSSRSIQS

SEQ ID NO: 145690 - protein, 36 aa, Oryza sativa
  Clone ID: PAT_MRT4530_46386C.1.pep
GFLLNTTLGWYNGGLRGSYRLIYTWVGRGPTSSMWE

SEQ ID NO: 145691 - protein, 304 aa, Oryza sativa
  Clone ID: PAT_MRT4530_46387C.1.pep
MATALYLSLKSRYDEEVHLKVEMFLRTYGTSKPTRYSFSDVKKITRCFKEQLGQGGFGSVNIVRLLGFCSEGTRHILIYEFMPNESLEKYIFFHDPNTSQELLAPKKMLDIALGIARGMEYLHQGCNQRILHFDIKPHNILLDYNFNLKISDFGLAKLCARDQSIVTLTKARGTMGYIAPELYSRNFGEISYKSDVYSFGMLVLEMVSGRRNSDPSIEDQNEVYFLEWIYEKVITGQDFVLSGEMTEEDRLKVRQMALVALWCIQWNPRNRPSMTKVVNMLTGRLQNIQVPPKPFVSYESHAVP

SEQ ID NO: 145692 - protein, 669 aa, Oryza sativa
  unsure (1)..(669): unsure at all Xaa locations
  Clone ID: PAT_MRT4530_46388C.1.pep
MSSKFLAMYLLLALLSHGTYSYSATTASGWDAVPSGLDSALTKLYLCCSSWPQTKVXREIHMHYPVSRSLDRVTELRAARGLQSCNTSSKHACWASWAKTARSRQDTALPHSFLAPCNVSSINYKEAIISISPLVSSXRLHALQNPVFDKLQHHPYDYHLCKLYSWAPAKIVYXSKEFSRNTSPVDGYAFMNNADYITGPISCPSEASHFSYLVDARLCMYVLPLDCRIVSRGSIPIPGPAYSDIGGPTFKERAEKFINFAETTVSWYSDDEVTINCTECERQKHRCAFSSQRNRTFCMSREHHGSSVKVISATSSAAAFVVLSLIIATVLYISLKSRYDEEVHLKVEMFLRTYGTSKPTRYNFSDVKKIARRFKEQLGQGGFGSVYKGELPNGVPVAVKMIEHTTGNGEEFINEVATIGQIHHINIVRLLGFCSDGTRHILIYEFMPNESLEKYIFLHDPNTSQELLAANKMLDIALGIARGMEYLHQGCNQRILHFDIKPHNILLDYNFNPKISDFGLAKLCARDQSIVTLTKARGTMGYIAPELYSRNFGEISYKSDVYSFGMLVLEMVSGRRNSDPSIQNQNEVYFPEWIYEKVITGQDFVLSREMTEEDRLKVRQMALVALWCIQWNPRNRPSMTKVVNMLTGRLQNIEVPPKPFVSYESHAVP

SEQ ID NO: 145693 - protein, 97 aa, Oryza sativa
  unsure (1)..(97): unsure at all Xaa locations
  Clone ID: PAT_MRT4530_46389C.1.pep
LTERVYPFPTYVPXFMXAPTTTPLVVKVHPGSRSLPTVCPHTGHFCLXLYXXGENSASQEPTVPCRLFLVLNTWSVRSSPLDIDPNVFCLAKKKKKK

SEQ ID NO: 145694 - protein, 87 aa, Oryza sativa
  unsure (1)..(87): unsure at all Xaa locations
  Clone ID: PAT_MRT4530_4638C.1.pep
NICTGFSNELVSKCLEIGNTRCRAPQGPRGPKXQIGHFERGLTRLQPYSXLHEQEERQMQXNXHYYDRRYQTSQYGSGCPNGYDYTF

SEQ ID NO: 145695 - protein, 246 aa, Oryza sativa
  Clone ID: PAT_MRT4530_46390C.1.pep
MAAMAAAAAGTKKKARKPYTITRPRERWSAEEHERFLDALILFGRDWKRIEAFVATKTAIQIRSHAQKHFLKARKFGLAGGLPPPLHPRRATLLRANAAAADMMPPPWLPSAGGGSIGCSAPPSGVQQSMAGRSPACYSTDEASFRPLIHSNDNDCSFIETPSCIGSGGESWIGDDAFFMQDETIRLPISPDDLGFAQVYKFVGDMFGSGERRPVEAHLRRLQGMDPAISETILLVLKNLEANLSA

SEQ ID NO: 145696 - protein, 133 aa, Oryza sativa
  Clone ID: PAT_MRT4530_46391C.1.pep
MPKLCLAQYRIIGQLSSHDMYKRTVLADDSEIQIEKSVGYTDLISQELHNANIRTTGGNKKTKPKRLKWKIIPSKQENHSFLQSRVLFSGNTILNLFRQQQQQMKLKAGNRCCDFGNESCTLKSWELVGMNQG

SEQ ID NO: 145697 - protein, 112 aa, Oryza sativa
  Clone ID: PAT_MRT4530_46392C.1.pep
MALSARASVPPSVAGRVTAPLGKAGRPHQPTSLKAAVAAADIDGFACVASASSLKIPSSPFLDDAPPSSQLLYVLDRLAAKLLPRDDGSKSAATSDETAWGFAMVLGVRGQA

SEQ ID NO: 145698 - protein, 148 aa, Oryza sativa
  unsure (1)..(148): unsure at all Xaa locations
  Clone ID: PAT_MRT4530_46393C.1.pep
RKRLLCHRLEAYTTTPATFXLPSDVTPVLDGYYVTARWLAPPRWPPTPPPGDVILAQGSYFVTAWRPIPPCWLPSPPPGDVVPMLDSYFVAARWLAPPRRPPTPPSDDVVYVQDGYFIASWRLAPPRRPPTPLSGDAVPMLDGYFVTA

SEQ ID NO: 145699 - protein, 119 aa, Oryza sativa
  unsure (1)..(119): unsure at all Xaa locations
  Clone ID: PAT_MRT4530_46394C.1.pep
IGRIPVIHHLMEVDLXGAHAPETRSWACTERSSRLWTVERRCAPHHRDGTGYTYRTPPDTQSDRAXLAAFPSVVRPVTHRSRFSQARSMPHLMQRAWYPQTHITDTKNTCTSNLSDGPT

SEQ ID NO: 145700 - protein, 247 aa, Oryza sativa
  Clone ID: PAT_MRT4530_46395C.1.pep
MDMNQAHLHRMLLMVLWRNWFVRNEIVHDKPAPPTEVSRRFLESYVNSLLVIKQHPHIDLVKGKHVINTSPILPEAQPRMKNDGVCRWEKPIRGWMKVNIDGSYDSRNGIGGIGLVMRDCTGRAFFASSRHLERCNSALEAELQACREGLILGLQYTLLPIVLETDCLEAMLLIQSTEKVMSTEAFIVREIKDLVQGNREIKLNKAQRSQNRISHWLANKARCEHISEIWLENNCNHILQLVNDDAG

SEQ ID NO: 145701 - protein, 82 aa, Oryza sativa
  unsure (1)..(82): unsure at all Xaa locations
  Clone ID: PAT_MRT4530_46396C.1.pep
MSFVISLTPHTILNDDVINLFSSWFGMVNSWFGDRTMQLGXLFRMVGPIQQGMLYSVGLILFIXYSTVLLNSEIFIKCCLCK

SEQ ID NO: 145702 - protein, 110 aa, Oryza sativa
  Clone ID: PAT_MRT4530_46397C.1.pep
MEPSHPVDAPTPINSVRNYRYRPSPMLPELSHGVAEFSRQSTRRHAPWPPSGGHWSSSEPPLVAAGMPSPGLGRTRRASAPLDGRREEEDDGKRKNEKERAAGSTCGILH

SEQ ID NO: 145703 - protein, 179 aa, Oryza sativa
  Clone ID: PAT_MRT4530_46398C.1.pep
MEGNASIQPSCSAKQQGHTGGGEAVACERSASSSPYGQTQLPINLCSMYSTIQAVKLATNSSSRPLEFATAPQPNVLLRDWTNLGEGPAGLIAERLLASDVADYVTFRAVCRPWRLCCADPRAHGVLDRRFHPRRWITLRGTRAPPRAAAASAVCTPPPPARENMIVATASYHMAHRCC

SEQ ID NO: 145704 - protein, 1049 aa, Oryza sativa
  Clone ID: PAT_MRT4530_46399C.1.pep
MAKVAVGQWVPHVEAFVDVSRPPAQHSASVDALSALVNKDKLTLFVLVSKMEMYLTTTDHIVRSRGILLLGEILCRISFKQLDVNAISTLSDFFISRLSDWQALRGALVGCLALLHRKRTVGSIIIADVKRLLETFLQNVQVQSLAAADRKLCFQILNYILDHYPEAVKTMGDELLYGMCEAIDEEKDPECLKLSFNLVEAVMKLFPDPSGLAAQYASEVFEILSKYYPIYFTHGVGDDLDATRDDLSKALMHAFCSTPYFEPFAIPLLLDKLSSSLPLAKLDSLKYLDNCIRCYGADRMGRHVITIWFKLKEVIFSLSIDQILSTSGAKDMEKNKNEIVSEALTCLKTAIIQMGPSDEDRLINLILLDEDIVSSIHSVASEEASGLTSLQNPIQLHALGSVISILAESSAYFCTRVLQAHFARLVDSLEISAGRESQHLNNCSGPSSGAINYGALYLSVQMLSSCREVALTYKEEFSPIKSAKESWWLILEKKLDSLIHILQSLLTIDSQFVQSADRQEYVLCAVKGLIILATFPEPRLPLSASAYEDVLLTLTSVNGRVKCSEYVVNLLECYCGRVLPWLFNFGGVNELALNFAMRLWNEIRDLATSDRIGSQDLLSSLMMGMKLVIGICTEEQQSLIVQKAYDTISSMLSLPVKSMTRHLLAVDEAVPLYSVRDTFLMCMLSSVIVGLRPQTPVPDMLMMINLFTVFLLKGQIPAAHALASIFNKNLHNSEFSHENKLDKVIDTILERCFSTISVRSNMKTSLSCAGRSDDANCSEILSGSIESKDDIISGLAWLGKGLLMRGDEKVKDVSLFLLKCLCSDQSLAGISSHQEEHGISDSSYASLATSAADAFHVMMSDSEVCLNKKFHARIKPLYKQRFFSILMPIFLSKIKESTVMTTKLVLYRAFGHIISNAPVPAVITEAHRILLVMVDSIAKLSQDVKDKDLVYSILLVLSGMLMDEKGKECIVENIHIIVSVLTQLVSYPHMMVVRETALQCLVAMSSLPHSKIYRMRPQILQAAIKALDDKKRRVRQEAVRCRQTWQSFA

SEQ ID NO: 145705 - protein, 344 aa, Oryza sativa
  Clone ID: PAT_MRT4530_4639C.1.pep
MFHGSPAAVAAWAAVAEMRFTTGGSSTRSWEPTVTADTSDLHYWMQWRAAVCALSVLACMAVAACLVWRHEGPGAERRPGGASGGGGGSKERRRPGVLYDDEAWRPCLRDIHPAWLLGYRLISFFVLLSLLIVIVISDGGTIFYYYTQWTFILVTIYFGLGTALSIYGCSKLADENVVTERTDMELGSYVAHGAGTKPNLNGEDDTGEIAGFWGYLLQIIYQTNAGAVMLTDCVFWFIIFPFLTVKDYNLNFLLIGMHSVNAVFLLGEAALNSLVLRRRDHAITMLRGIQTGDQTETPPAHKVVSGFSRKRLIYTISQAVMHHLPPPLPTVYTERAMVKITRKE

SEQ ID NO: 145706 - protein, 55 aa, Oryza sativa
  Clone ID: PAT_MRT4530_463C.1.pep
SFNRCFVGPKKKKKKGKKKKKKKKKKKKKKKKKKKKKKKKKKKKKKKKKKKGGPF

SEQ ID NO: 145707 - protein, 79 aa, Oryza sativa
  Clone ID: PAT_MRT4530_46400C.1.pep
PRGGDTFFRVSAGTRTACLTRHSPRRAVKSCQIKPENFEALIQKLEQLQSMNDEVANKKDHQYIYEILLASGLLHKELS

SEQ ID NO: 145708 - protein, 38 aa, Oryza sativa
  Clone ID: PAT_MRT4530_46401C.1.pep
LLDVYHLYIPFNILHLAVFIFSKKKEVSLFSKLISTQY

SEQ ID NO: 145709 - protein, 64 aa, Oryza sativa
  Clone ID: PAT_MRT4530_46402C.1.pep
RKTSRLRELERPLLMYLYINAQKLSAGTAMVLDHMLAGERLYYPIESCTTSYVLCKTRACEPLT

SEQ ID NO: 145710 - protein, 125 aa, Oryza sativa
  Clone ID: PAT_MRT4530_46403C.1.pep
WPPPPPRARTPSTTRRRCCASRTASSCRRRRPWPSPRSSPSSTTAPATPSEPAAPAAPPSARRASPPAGSSASPRESKASPPASSPASSPPASASPSAPNRSIDHVVVSARHQSRSIGRFHLIII

SEQ ID NO: 145711 - protein, 42 aa, Oryza sativa
  Clone ID: PAT_MRT4530_46404C.1.pep
VLASCLGPGVCSYRFWDYGSSSPGYFVWNSRVAAHQSKINFF

SEQ ID NO: 145712 - protein, 163 aa, Oryza sativa
  unsure (1)..(163): unsure at all Xaa locations
  Clone ID: PAT_MRT4530_46405C.1.pep
MVAITAPSSIEHIPLVRCPKGANAGPQAVIPCIDLSAPGAAAAVADACRTLGFFKATNHGVPAGLADALESSAMAFFALPHQEKLDMSGPARPLGYGSKSIGSNGDVGWLEYLLLSAGAASSGGAALPAALRAAVEAYTXAVRGVGVXVMELIGGGLGLGAGG

SEQ ID NO: 145713 - protein, 116 aa, Oryza sativa
  Clone ID: PAT_MRT4530_46406C.1.pep
WSPFMSFSMSYPILSIVYYPFVHLFWQLFSRQLGQALLTHVSSPSCVTLCFFLSVHFCSFFHEYSWLFVIVCPCMFLCLCLFLLLRALVVGHFHFLVLCDFFSVVLCFLVLNFFKF

SEQ ID NO: 145714 - protein, 65 aa, Oryza sativa
  Clone ID: PAT_MRT4530_46407C.1.pep
MKLPDLHKGSLNADVAWNLRTGDVRANATSPHCEWHDASVCMRLNPLRSPGEISEDRYDIYEAVG

SEQ ID NO: 145715 - protein, 345 aa, Oryza sativa
  Clone ID: PAT_MRT4530_46408C.1.pep
MKPKNGGAAADRRLPPRWILLCAFSFGLGMLFSDQFGSVPEWQKPLAAQRRVQDRKLQILDEDFVAKPKPTDDRDVMSEVTKTHEAIQYLDKSIATLQMELAGEELKKLEEEKGIIIRFMIGHSATSNNVLDKEIDAEDAAHHDFLRLDHVEGYHELSAKTKIFFSTAVALWDADFYVKVDDDVHVNLGMLITTLGRHKLKPRVYIGCMKSGPVLADKNVKYHEPEFWKFGEDGNKYFRHATGQIYAISKDLATYISINRPILHKYANEDVSLGAWFIGLDVEHIDDRDMCCGTPPDCEWKAQAGNICVASFDWKCSGVCNPVERLKYVHSRCSEGDDAIWSASF

SEQ ID NO: 145716 - protein, 89 aa, Oryza sativa
  Clone ID: PAT_MRT4530_46409C.1.pep
MDATVIGNCPLGWEGSGADTKANPIKCKAPVIHGPVETLSLEEAARNVTTRSFKALLQFLDGRIKRFLNAGKYFKRFDTGSPFYLDVIL

SEQ ID NO: 145717 - protein, 76 aa, Oryza sativa
  Clone ID: PAT_MRT4530_4640C.1.pep
PALNCYSSCPNHIVSALGKCNEESVQSSKLSWLRNLDFPFYVALLPIHSNRECCFSFLVFPCAFQIILCNWIGELQ

SEQ ID NO: 145718 - protein, 311 aa, Oryza sativa
  Clone ID: PAT_MRT4530_46410C.1.pep
MGASLQLIQDHNDKRALCENQLQLPRSSRAGGSGGENPSRPHRHSTSSISSPLELAKTQQLDGLHLGATRTGEADELAGSFGGGAEVAEQPGHHGGGSAMLGDGSVALGRGGGSTGRRRRWLAAGNLSRQRRRRSVTVAQGFGGRDGQTHLPCPDSAHSSTFCSGGEAAGCGCVEETGRLAPMWRGRRRLRRLAVAVAEVAAVAVRCAGRWWLKAAGMASAEGACGGGGDVGGGEGVGHGFAGGERRVKTQSGLGRTDNDGSFPLLRALSCCLTPQGALQSSACFVRLYLPAKFQASTPVPLRELNHPESS

SEQ ID NO: 145719 - protein, 46 aa, Oryza sativa
  unsure (1)..(46): unsure at all Xaa locations
  Clone ID: PAT_MRT4530_46411C.1.pep
GYYGDQQHHPGMTRVSLTRXRQYAAQLPSMCRVEPQQCSFFTTGQY

SEQ ID NO: 145720 - protein, 106 aa, Oryza sativa
  Clone ID: PAT_MRT4530_46412C.1.pep
MRGAGCQALPGTPLGLDLAHCRATRRRLFRVGLSPDHFITSPADRDQRRNRKHGNRRVDSRTAVDETRAEAIGSDGELGAPQVLTMMLVGAEDDAAGADNGSKQRT

SEQ ID NO: 145721 - protein, 139 aa, Oryza sativa
  Clone ID: PAT_MRT4530_46413C.1.pep
FKLSEQNLTEGTPNYVVKRTFVPDYMLEKQYLINKAEEELMDDDVDNILKQDRETDQQQELEDSDQEIMSEDELTSSDKPPSCKQIRRRTYIIEDDSEEESNETSMIKCVDAKVRGKMQKALMQNPQRQKSEMTTTAMK

SEQ ID NO: 145722 - protein, 45 aa, Oryza sativa
  Clone ID: PAT_MRT4530_46414C.1.pep
SLPMLKICEVAMNDTASHNLTPFRASSSGEIQPSAPKHGPPGVNH

SEQ ID NO: 145723 - protein, 296 aa, Oryza sativa
  Clone ID: PAT_MRT4530_46415C.1.pep
MRHRNPGSQEFVFTSIVTIDRVQENIQWWYMSCNLCNKIVIQKNDKYHCRNCNKYPENTTPRYRLRLQISDHTTSTSCTIFDDVAQSMLETPVSSLLNLLDGKNDEIPNIIQQLCGKQLIFKFKLSEQNLTEGTPNYVVKKTFVPDYMLEKQYLINKAEEELMDDDVDNILKQDRETNQQEQTSSGPLIKNRSISLLPVKQELEDSDQEITSEDELTSSDKPPSCKQIRRRSYIIEDDSEEESNETSMIKCVDAKVRGKNAKGAHAKSTKAEIRNDTYSHEINKSVVEESIKAGKR

SEQ ID NO: 145724 - protein, 93 aa, Oryza sativa
  Clone ID: PAT_MRT4530_46416C.1.pep
VQAIESQLSSMIMHGYNLHVSSNRHEPIRVSRHNRWQCALNQCIRYDKLRILMTSHSTPNLELEQDPDNINQHDAAAHVMAAHHLAQEGRHGS

SEQ ID NO: 145725 - protein, 493 aa, Oryza sativa
  unsure (1)..(493): unsure at all Xaa locations
  Clone ID: PAT_MRT4530_46417C.1.pep
GYSHVGLRTDPELTTALQKGKRKPKXGPIITGMTWELGRNPKTHRSRLSPGRTPHQQDPLHLLQQXGGDYLYRARLITQPGASHFIHVVALVLCSDEIPRKXRSLSARAGNRTPGXPPVCDFGTGEAADRGQLDPVAAEVAPTWRLCGCHTGRREEEEGTGHEWTAGGGGFSGTPCDDEGRRGVHRDDKGEREGASQRLGFAGGGSTAADCGGGHQRREKRETATTRLGFDSKGLEHLGNLRNPFLAPDXSETLRMRPATRGDYRSRAATAARPQAGEEEEDVRPEXPLPFLARTGSSSTRNGGRRRRTGHGRGGNAVRGGGGGSFEEKEMAQGRGVKRHGQRLARRGCSSASRRWNQAVGRREGEASVRERKAGNGGGERELEPCQFGERARGHGARGQNPRAGARRGEKRGEGERENEGERDGSARRRLTRTHARENRPTKPKGGRIDFSEGFGLGXEIEIWNLNLTMDRRFGIRNGTETXDNTQRNKFRN

SEQ ID NO: 145726 - protein, 108 aa, Oryza sativa
  Clone ID: PAT_MRT4530_46418C.1.pep
MPPQMWMRKEAEDERTSGGCEETAYARTGGGCAEVADHYGWGFLACPTASLPFSIAAPPVVAAPTAGPTSSAPVTFRSRRADCRLDPPALRPLGHVREETERGIEKEE

SEQ ID NO: 145727 - protein, 134 aa, Oryza sativa
  Clone ID: PAT_MRT4530_4641C.1.pep
MENTTKGKVCVTGASGYVASWLVKRLLESGYHVLGTVRDPFNHKKVGHLWNLTGAKERLELVRADLLEEGSFDDAAMACEGVFHTALPVITETDSSKAAVLASAINGTLNALRPCKKNLSLKRVRLTSSSITRE

SEQ ID NO: 145728 - protein, 68 aa, Oryza sativa
  Clone ID: PAT_MRT4530_46420C.1.pep
MTNTLTDVQRRTTAWRTSYGDEETRRGTSKATDHRRPAAATKKIPLPKVGKAAELRQEHAIATGNDRN

SEQ ID NO: 145729 - protein, 94 aa, Oryza sativa
  unsure (1)..(94): unsure at all Xaa locations
  Clone ID: PAT_MRT4530_46421C.1.pep
VRQCQTLDCVRPNTALPNETXFPHIKEKVPMANLNTYRLATWXAKTRNPTRPSPSHQDMWLHDRLRSTAYEVKSLIDQVNLLNYNSTHLNSRLT

SEQ ID NO: 145730 - protein, 43 aa, Oryza sativa
  unsure (1)..(43): unsure at all Xaa locations
  Clone ID: PAT_MRT4530_46422C.1.pep
SKQKYPFTEXVAKPVRSPFXXHFSFHNPRADRIXLPPQYIPTK

SEQ ID NO: 145731 - protein, 326 aa, Oryza sativa
  unsure (1)..(326): unsure at all Xaa locations
  Clone ID: PAT_MRT4530_46423C.1.pep
PKHPPPLKPPLDREPTPLSPARPRTPLSRAPPRPPRXSSPRFVPSSPHPPPIVVALAPPSLPVDXPSGGRKGHEAIKPSLPSSPLSSPXPLPPSSSSPYPPDELPPTPRPNPPPSPPLLHHHPEPKMKRRRCQEPRRPPAAAPRRRGDGPSSPXAPSPSPPATFPPPRRAPLRAPSSTISRPAPPRDGVRPPPAPCAALRRRPPRLARHPQPPSPPPAARRPPPASPPRTXPRPRSAPTAPSRLRPPLSRPSGDAAAAPPTGXPPPPPPPPPPRRGRRPQPLPPPAFDPPSARTPARPPRARSAHAAPPPAPRTWRRRRRRQHVLQ

SEQ ID NO: 145732 - protein, 69 aa, Oryza sativa
  Clone ID: PAT_MRT4530_46424C.1.pep
GTIAQQIRLQLRSTTLLKGGNNSKAEYKHRTQQATPMMHTCKGIQGRFVAICKNAVAKHFIEQNSKTVE

SEQ ID NO: 145733 - protein, 362 aa, Oryza sativa
  unsure (1)..(362): unsure at all Xaa locations
  Clone ID: PAT_MRT4530_46425C.1.pep
SATSCRSSRRRRRRARRCSRRGGATRSPPSTPSPSWSPTPPSSTTTSSPGTAPGGARRPTPTSRRPSPTSSAPPSSPATAAPPSRPCAPSTSPPSGTAEVTPPWWISGSRTPSTRPTPPLASTSTSASTASRSATRPTLSAAAAARARITQTRTPTMTTTTKMRAANGGGGGGRGRGPPMTTTTTTKTSSPPTRSPRGDTTTPRRCTPSRAGSSPARRCARCRSATACSRRRRPSPCRPSRRCSSPASPTPGATSRRRRSSPSSARSSACSPARSTSTSSPPASAPASTTPPQDTSPTTTTTPSTPRXTMILERAPXTWRRCRSSSTRSLSTAATTPCCISRTTKRRSSTTSTSSATTGTAS

SEQ ID NO: 145734 - protein, 118 aa, Oryza sativa
  unsure (1)..(118): unsure at all Xaa locations
  Clone ID: PAT_MRT4530_46426C.1.pep
ERRHDGLGQLARGVVDGYIXPAQQQLEEGSEVGSAQPMAAEVGMTQGGAAGSGGGRLGAAGVAGGGGGDHGARRSCWWVWRGLRRTTASRRGAPVQGSHMSAEVGQWWSIGALAVDSQ

SEQ ID NO: 145735 - protein, 415 aa, Oryza sativa
  unsure (1)..(415): unsure at all Xaa locations
  Clone ID: PAT_MRT4530_46427C.1.pep
SATSCRSSRRRRRRARRCSRRGGATRSPPSTPSPSWSPTPPSSTTTSSPGTAPGGARRRTPTRRRRRSPAPSAPPSSPATAAPPPSPSARSASPWPATPTGSPPRWTSGSPTPSTSPPPTASSSTSASAAPRSATATTPSAAAPPPRSTKMRGRDGGGRCRPRTFSSRALAAERRITPTTRTTTTSSPTTARRIPWPCTGGGSSRRSTACRGGSSPARRCVRCRSAPSGSLCRRRPSRCRPSRRCSWPTSPSPTTRGACSASSPAARASPTXRSRPATQRPTRSPWRGSGAYAGWLSGAATAWTPSSSATTTRRHRRSSRPSSTVAKCRTTSSSSPPRSTGTASLWRRSRSPTARSTSAATRXRRGRSSPCSARSSAASPASSTSTSRPLASAPASTTPPRSRLSRTCRPSAASS

SEQ ID NO: 145736 - protein, 206 aa, Oryza sativa
  Clone ID: PAT_MRT4530_46428C.1.pep
MSSRKVRVKKLNVKTTLPVLREDQIDPNEYEALATDNQIATGVEQAEENEYHLQTILKEAGTSNDQEIPVPPPQESDINYDDLYPVPFHKPSSYIRFSQTVEECITCLYDMTTEDDEFLKQYNSKPPATGVLSEDDFEHIMEVFEDTAPEQTPFAAVDNTVAAYDMMLPGLTHLNQSVSTDVLQHAKPVYEYWKSRRQEAGNKPLH

SEQ ID NO: 145737 - protein, 54 aa, Oryza sativa
  Clone ID: PAT_MRT4530_46429C.1.pep
KRRHRRRLLRRGGLRGHGGRQDRRHRGHPRRRSSPLRRYSLLHSLDGESPPAAR

SEQ ID NO: 145738 - protein, 235 aa, Oryza sativa
  Clone ID: PAT_MRT4530_4642C.1.pep
MAGKSLIPFIGSSSNSTYNLDGEPTWANQLIPVEHYTMEGVNALWAQPLVTVSGSPANLEHFGEYPGRSASAERYVGTLFTKAGDEVLHKYTTSTTTPSTPKEDRFRIQGVRTPGGGYGKGLLRPLTVSKKEGAAESRIPPPIKVKRHLTPPPIVRAAGQYQGDEVKSPEPSVYKLASQVRELRKENIELRACNTELGVELAELRNNVDTLSRGLCAKIKHAFVEMGKENKYYAN

SEQ ID NO: 145739 - protein, 85 aa, Oryza sativa
  Clone ID: PAT_MRT4530_46430C.1.pep
PPWADGGSRLLHAPQRVLWWAPGLGLLPPPGSPPLGLFFLCGLSPPGGVPVLFLPPLSLWVFFSWGDLGSFACFTFLWLRNPKPQ

SEQ ID NO: 145740 - protein, 124 aa, Oryza sativa
  Clone ID: PAT_MRT4530_46431C.1.pep
YQQSDLVKMDILLNGQPVDAMATIVHNQKAQRVGRELVDKLKKFIERQMFEITIQAAVGSKVIARETLSAMRKNVLAKCYGGDITRKKKLLEKQKEGKKRMKRVGSVDIPQEAFHELLKVSNSK

SEQ ID NO: 145741 - protein, 47 aa, Oryza sativa
  Clone ID: PAT_MRT4530_46432C.1.pep
KKGKGILWVQLFFFCNFKKSFRCKVQIFFFGEIYNFYNILINWGSIV

SEQ ID NO: 145742 - protein, 260 aa, Oryza sativa
  Clone ID: PAT_MRT4530_46433C.1.pep
MAEDANAGRKSSTHLAQSPELHASLESHELSDREIPKDASVHQQAIDEPQPLYNIPITRGEGTLITELRKVMEELRVSYYADTDEETREQLKQFWDDEFNAISSGETTIERDLKWMRKEVVDYELEDLSRQCLIFDDCGHCHGCRNSGIDLKHPSNGGYEEGNAYSGLSFDDDEFDAISEETTKEKGIEWMREEVIEAFETYSNANVVDYELEDLSRQCLIFDDCGHCHGCRNSGIDLKHPSNGGYEEGNADSGFSFDPI

SEQ ID NO: 145743 - protein, 208 aa, Oryza sativa
  Clone ID: PAT_MRT4530_46434C.1.pep
MGAAAWWRRSLGQRFNPAGVAAVAAVAASEPRLALPHVSVQDIRWLDWGELRRAGFRGVVFDKDNTLTAPYAPGLWPPLAAAFDQCRAAFPPGSLAVYSNSADIKKPGGEAKEIESYFGCSASNLVLVGDRYFTDVVYGNRNGFLTVLTEPLNFANESYIVRQVRKFEAYLISYWYRKGHRPIKHPLLPDARRIVKFDPYNDPMAPAA

SEQ ID NO: 145744 - protein, 50 aa, Oryza sativa
  Clone ID: PAT_MRT4530_46435C.1.pep
LTSPPHPVSVCFGSLFILVKIRCIGGLLGKRASLQILGTLFWLKVFPGPP

SEQ ID NO: 145745 - protein, 181 aa, Oryza sativa
  Clone ID: PAT_MRT4530_46436C.1.pep
MAPSYVAVGSRDYARRGGGWRPRIEDTSEVIEREPEGSCPDHVEDYINSCQQIQDFIPMAKTAASGGDGGEPRRRGGGAQAELHCGEDGGDHSGGGGRHTRWGTASSAAADQVFDAVTGGQEGRREPPPAAACGSGRTWGAGCGKAALRRLLLMIEGGRGEAAAAAAATGSWRFSSRWTAA

SEQ ID NO: 145746 - protein, 206 aa, Oryza sativa
  unsure (1)..(206): unsure at all Xaa locations
  Clone ID: PAT_MRT4530_46437C.1.pep
PEQLVGKTGRLQGRRQRGASSPAILDGSDETNFDKTAPTRKIFSSVGQSDTPAXPVPRKGSSYTSDQAVTHSLLWGAAPASGPCMSAAXGGRSTVDRDHTSGPPPVHGTDGPDWPVANRTAQAAARHGSARXQSRPAGHGERRRRAWSPAVTGGAGDGGDRRGSGCALPKGGGATAAGGRRGKGKRGGGRPHRGFAGAGGRVKHRV

SEQ ID NO: 145747 - protein, 278 aa, Oryza sativa
  Clone ID: PAT_MRT4530_46438C.1.pep
MDGGHSPDRHAAAAAGEPVRSRWTPKPEQILILESIFNSGMVNPPKDETVRIRKLLERFGAVGDANVFYWFQNRRSRSRRRQRQLQAQAQAAAAAASSGSPPTASSGGLAPGHAGSPASSLGMFAHGAAGYSSSSSSSWPSSPPSVGMMMGDVDYGGGGDDLFAISRQMGYMDGGGGSSSSAAAGQHQQQQLYYSCQPATMTVFINGVATEVPRGPIDLRSMFGQDVMLVHSTGALLPANEYGILLHSLQMGESYFLVRMHTCCLPNIGLRLQPPRKQ

SEQ ID NO: 145748 - protein, 97 aa, Oryza sativa
  Clone ID: PAT_MRT4530_46439C.1.pep
MVEVLEVEEAVAFTPTPSGSGDSGESRGPRHHRRDSPTPPRREPSRREDPTRSGGSALSPPPSGGRPRRVGARRRLVYSDGSSPQGALQAAGALLRH

SEQ ID NO: 145749 - protein, 201 aa, Oryza sativa
  Clone ID: PAT_MRT4530_4643C.1.pep
MGITPSCIPLAPVAGGSSSTACKIIHVDGTVTRLARPVRASELMVDYPGQFVCDSGRLAVGCRVPGVAADELLEPRRAYFLLPMDMLYSVLTDEEMAALSSFHAATAASSSWKRIATGGGRRRDGSHGGRISEPTDHEGDDGSDDGARFFPVLSLQLHAAPDAAAAAAAGVKPSGGGGGVRRHRSWHPRLEAIDEVPCTGG

SEQ ID NO: 145750 - protein, 159 aa, Oryza sativa
  Clone ID: PAT_MRT4530_46440C.1.pep
MPLPRQWEAAGRTDATAAPGDRAWSWDALPYGCIHNSLMPSPPLLLAIEEVMMSLLADDGLVLCLGAEKLISEYFRPAPSSIKFRSERSNSSTSTISDQQQQQCCGFLLLCGGDGVGRRHARQNRDDELEASCGIKAARQTAASSPSRRRQQYVRDMNK

SEQ ID NO: 145751 - protein, 94 aa, Oryza sativa
  Clone ID: PAT_MRT4530_46441C.1.pep
ITVVMVGMVGNTLQLSLGLHLHCPGKTWIQRRRGRFGRTWGWPNQPTFWLVASSAASLRRLVNFGLIHRVKSAFLAHSYKILVLNIVRLIYRLS

SEQ ID NO: 145752 - protein, 687 aa, Oryza sativa
  Clone ID: PAT_MRT4530_46442C.1.pep
MLPDEYVQSSCFIDVHELLAPESQSNLPLSKHVHTDEYILIKSIPTQLLEQSFTNSEVTDDVKFNAYHVCLFKYLQRSSSVTLNVHLYLPEKLACKVSRGSKQLMGSKEAFRRIIFCVLLLLCVSCKCLTSEVNTTQLAVLKVDASPQHARKIPETLFGIFFEEINHAGAGGIWAELVSNRGFEAGGPNTPSSIDPWSIIGNESVISVATDRSSCFSRNIIALRMEVLCGDCQAGGVGIYNPGFWGMNIEDGKNYSLVMYAKSLENTELTVSLTSSDGLQNLSSATIHKQKSEPKYISQGHGFRKELVSMLLDLKPQFMRFPGGCFVEGQWLRNAFRWRESVGPWEERPGHFGDVWGYWTDDGLGYYEFLQDILDSLEFARGSTNSTWGSLRVAMGHPEPFPVKYVTIGNEDCTKKFYHGNYLKFHRAIREAYPDIQIISNCDGSSKPLDHPADIYDFHVYGDSNTLFSMRNKFDSTPRNGTKAFVSEYAVSSNGVGRGTLLASLAEAAFLTGLEKNSDVVQMASYAPLFMNDNDLSWNPAAVVFNSWKQYGSPSYWMQTIFRESSGAVLHPVTINSMYSNSLAASAITWKASNSSFLRVKIVNIGSNPVNLIVSTTGLEALVNMRKSTITILTSKNLSDENSFSKPTNVVPVTRELPNAGEEMFAFLGPYSFTSFDLALGQQKHVS

SEQ ID NO: 145753 - protein, 207 aa, Oryza sativa
  Clone ID: PAT_MRT4530_46443C.1.pep
MAPPEVVAGISPRGALARGKAIPLRSRVSFTRERQLNFAIALSDSDFAMLSHFPGANIGDTDGLFPQIVRYPISSTPISKLMNDLKLMAVTFSRQPSTRVERYEVFSPVPSLSKPPTNKTSSLRLCGERVVATSRVSVDPAARSGASDVSYPTERDDGWMEVKLAEFSNDERMLTEAAVMVDFREVNDHVKKIGLIVEGLEFRPTIH

SEQ ID NO: 145754 - protein, 59 aa, Oryza sativa
  Clone ID: PAT_MRT4530_46444C.1.pep
MAQCTCRIMVAANFTIKRLQDPNLVLANRHSDKRFSTKLSSGVERGWNLDDVLGAVVAA

SEQ ID NO: 145755 - protein, 78 aa, Oryza sativa
  unsure (1)..(78): unsure at all Xaa locations
  Clone ID: PAT_MRT4530_46445C.1.pep
RGPHVKCNRPEKRHNCHNCHEDPPVSPLTKCGGLLGQPRIGRTLAAMPQLGPPRVRLXCTPNDGCREFSNNSNCHNHH

SEQ ID NO: 145756 - protein, 74 aa, Oryza sativa
  Clone ID: PAT_MRT4530_46446C.1.pep
LFWWFVPFCASGFFKFSGLVGVWWQVFCDCHILSGGGSFLFFGQVFILGLLGESCWPCCCGPVFSGCALGSHKK

SEQ ID NO: 145757 - protein, 185 aa, Oryza sativa
  Clone ID: PAT_MRT4530_46447C.1.pep
MKTAMTTSTLLFLLLAGLTAAALGTADDDTTTNTIRLPTDGGSAQQAPTKKKPWKCCDNIERLPTKTNPPQWRCNDELEPSKCVAQCEVCQEAPGPFPGPLICSDVYWGADPGPFCTPRPWGDCCTNTTCTRSIPPICRCNDKVKKCAAACKDCKRVKSSKPPRYVCQDQFTGQPGPKCKHSCEN

SEQ ID NO: 145758 - protein, 52 aa, Oryza sativa
  Clone ID: PAT_MRT4530_46448C.1.pep
VELKQRLGHAPRKEKKNGTLQKHQCSERMDLPSRGRVHAAVGACIQRTNPRR

SEQ ID NO: 145759 - protein, 58 aa, Oryza sativa
  Clone ID: PAT_MRT4530_46449C.1.pep
ATAVRPTGTRSRRGRWAVDPRQHDAQVAVARLDARLCRRLGSGAWYRHRQVEGRRIGS

SEQ ID NO: 145760 - protein, 95 aa, Oryza sativa
  unsure (1)..(95): unsure at all Xaa locations
  Clone ID: PAT_MRT4530_4644C.1.pep
NLRLVLXRLVRLRYGXGVVPRXCAFRXTSXTSPSPXLXXPPPXSAXATAAAAARQXPPQRPHGVRGCVVRSAQSWVVVXGFFCXFVRRANREVCV

SEQ ID NO: 145761 - protein, 137 aa, Oryza sativa
  Clone ID: PAT_MRT4530_46450C.1.pep
LFMRGHVEEAIGRVNLMVENGCLPDLDKLLIALCENDKVMEAHKLADFALDRDFDVSFSTYDRVLEALYTEEKTLPAYSMLCKIKNKGGVVDQKGCDALMDSLKAGGYSKQADILSRILAENASSTSKRGKRVAMGA

SEQ ID NO: 145762 - protein, 134 aa, Oryza sativa
  unsure (1)..(134): unsure at all Xaa locations
  Clone ID: PAT_MRT4530_46451C.1.pep
HGRASWTKVREDMPEMMTMMRSRPSLRKLMPKKRXISRTMKNETSHRVYQTSRQLGTNMHAGVANTVRARLGTTMNLKPMSEETSREGLRDGLGARTVFEEDTTTLAMRHSGPMAWTATSVAIRRKWRNCGPRG

SEQ ID NO: 145763 - protein, 564 aa, Oryza sativa
  Clone ID: PAT_MRT4530_46452C.1.pep
MGYVSGVPLLGAVAISAKKMYPGPDDRTEYKKRYIHLGSYTYPSVREYISRFLRLSSPSPARVSSLDLAVLVLLCSGAGALFHFLPPSLPPSMAPSPLAFPPQLTNPFDPIAGVRSVTRRSETRRCRRCLWSTRLQKTELAHTICVTSQTVYASAYTYEDMEALLSDLQSKMEKEPFKMLIINSVTTLFNTELCNGCAFDGCQIKTLEMMYCLRMIANKFHIGVYVTNHEEMGLTDAKIKRSLKQGLYFKEVKDLRKLNNAVQVTTGNSSLGDMHQGGDMHEDVFLGLQDFRTKIRVSYPNSWFYLDASPDDKIKQLSQMIEKRISLSRESFYLTYLGQTFRMVDGCMEVSQHAVKDLDETSVCEDYKKISKLFLDMLELNKGHPLYLSHLCSKMKNANVTSAKSNTFQLFLRVHPSLMTYSTRSSLLWEMKREIDGLLPPNAKNIQSAIDQILMNRDWTLLAKQEAAFSPTYNRSYKKSSSECFKFIRNWLTHGIENFNTSDPRRFTTEDMDYLLEIVFKDFLADIVWTLLQNNIGNLNRWCLPGLQMYKKITLSRLICGQNN

SEQ ID NO: 145764 - protein, 68 aa, Oryza sativa
  Clone ID: PAT_MRT4530_46453C.1.pep
SFGSESLEKGTQVIGMKEMVVPLTAGILSALRRVLARRVSLKYKNSDRSSTRSKLSVHRYGGETGRSA

SEQ ID NO: 145765 - protein, 94 aa, Oryza sativa
  Clone ID: PAT_MRT4530_46454C.1.pep
QSINCPALGELDDLDWNRPVFLLFFSTRIQNTQLCASLDGFYGENAPEKETTLSTLTNWCYCVHPWRSSSQLVPSKWLHKVVVTCKNFAFALIM

SEQ ID NO: 145766 - protein, 101 aa, Oryza sativa
  unsure (1)..(101): unsure at all Xaa locations
  Clone ID: PAT_MRT4530_46455C.1.pep
MEGVYAIEVGAKRVPLLLVGEPFYSTTASFLAGLTLGSNCLAGQTDIGWPIRPASARSDRPQLGLTEYSSGGSRSATPEHXLSTTRGPVRSAYSRRSDQPL

SEQ ID NO: 145767 - protein, 700 aa, Oryza sativa
  Clone ID: PAT_MRT4530_46456C.1.pep
PDVVAPFVKNDVLCHGQGGLAIYPKLHRSSVSAEEITKQSSKPERLGRSGGGRHVLGLAAGQGHHQEGSQKQLSPLNRIIRSTSTNDNIHSRSPFDSQQQKNLSKLTGHDEANAARKAFGSFLGTLTRTKENIARATRLAIECAKHGVAGEAIDIIVERLEKESNLYKRVDLFFLVDSITQYSRNQKGGAGDVYPSLIQAVLPRLLYAAAPPGNSAWENRRQCLKVLKLWFERKTLPEYIIRHHIRELEVINEASFGSSRRPSRTERALNDPLRDNEGMLVDEYGSNAGFQLPNLISTKVLEDEDGSSSEDRSFEAVTPEHDAPCTDEKEESQMPAEKHHRILEEVDGELEMEDVAPPSDVEASTRCRPEQIDTKCRTSDRHTLGPPLPDDRPPSPPPLPSSPPPVPPPPPAPITQTGQLQRTLPMASDPVGPHPTRATNNIQTQQPNSVVERPGSMNPSVAQLQPPPFCNSGYGGHPNQMPPPPPIAPLNPPGPHGNFPAPPAPYHGNNYHQPPMASVPNEGYHMQPPPPPPPINQCPYRPPEPQQRPRPWSNNSSSYPERYRMMDMIEIITGMIEDIMGMIDDITLMIEDTTMMIEDITMMIEDIILMIEDTILMTEDVPLMRELLGDQCTTKLLTGADFLFLQGLLVQTILKHRQQHQCTTDDHQILHQVLALGGLCLLGHRIILPPDILWSLQFHM

SEQ ID NO: 145768 - protein, 99 aa, Oryza sativa
  Clone ID: PAT_MRT4530_46457C.1.pep
MSIWDAIALPRVGRNIEGRGRADDNLVSDSIIACCSQVENGILSNSFCRVALSSPEAVSDHGGWRWPRIHGDYTDMLQDVDERLLPSETAPNFKIFEYE

SEQ ID NO: 145769 - protein, 240 aa, Oryza sativa
  unsure (1)..(240): unsure at all Xaa locations
  Clone ID: PAT_MRT4530_46458C.1.pep
WGAAAASARRQRKAAVREAAADVSLAGGSGRRRWRAQRVAARAGQREGGRRGAPHRXARWPARRMEXGGDDRXCGGTDGRRRHPRRRWRGVRRGDNDHGGFKHRPKMGWTAXLTGVRGERRSSGIPATXGGGRESSCGGGXHGGGPRSDSTRPEMGGGDGARRARRDGGRGRGSGRLMGEMRERARGXDFYGRFGGRNGRGWPLFGRRRGEWRERERWIRMRIPPIFGRAREREEVEESH

SEQ ID NO: 145770 - protein, 216 aa, Oryza sativa
  Clone ID: PAT_MRT4530_46459C.1.pep
MAPAVEAVEKKTGSAPVKAPALNERILSSMSRRSIAAHPWHDLEIGPGAPTIFNCVIEIPRGSKVKYELDKKTGLIVVDRVLYSSVVYPHNYGFIPRTLCEDSDPLDVLVIMQEPVIPGCFLRAKAIGLMPMIDQGEADDKIIAVCADDPEYKHYNDIKELPPHRLAEIRRFFEDYKKNENKEVAVNDFLPASAAYEAIKHSMDLYATYIVEGLRR

SEQ ID NO: 145771 - protein, 131 aa, Oryza sativa
  Clone ID: PAT_MRT4530_4645C.1.pep
QPESEIKISKSDELKGQNGLEVHPHKFDLSPVRQLPSCFLPQFSLRENKPVYKRGGLRKHILRCADEFTAQKEDRGGGTAVVHQQKNPIARVHCAGGASTGQARRAKSPEAVGKFLIRHSTYILPATASSP

SEQ ID NO: 145772 - protein, 35 aa, Oryza sativa
  Clone ID: PAT_MRT4530_46460C.1.pep
GLMIVKLVSRFKIMCIVMIICDGKSVGICRFYKIG

SEQ ID NO: 145773 - protein, 364 aa, Oryza sativa
  Clone ID: PAT_MRT4530_46461C.1.pep
QHKISVGFGQLHTSDLKVMLYGREGVAVKMIVHKNILAENSTFFADKLSRQSPVSCIEVSDCEDVEIFVETVGLMYCKDVKQRLIKQAVARVLRILKVAESLGFPTCIMSCLNYLEAVPWVGDEEENVLSSIRQLHCENYGVSPLLKRVASDLTNPPSDTLAHIIELVLTRAAGSGPREMKSLVLKLLKENNIWTNGSSDSCVVTFYSSCRNCLESLSNLFRQASEPEFSEQSSDSKEVIFRQITLEADNLLWLAEILADRNAADELTSIWASQGELAKLHCRIPVMHRHLISCVTARLFVAVGKGEALPSKETRQLLLDVWLQPLMDDYNWLQHGCRWFDRKVIEEGIGQTILTLPLEDQQSI

SEQ ID NO: 145774 - protein, 130 aa, Oryza sativa
  Clone ID: PAT_MRT4530_46462C.1.pep
ICDATFTDASMTTSAVWDMHALHYCIWYALHEDMLLDLSKQDFGNNKGGGCQARKVDGFGDKECYTGSGLLIKEVIPYSCPGMIPPSVLLIVCVKRSDPGPPTLSVPPAVAVGGPYATDPPYPNGIWDYR

SEQ ID NO: 145775 - protein, 139 aa, Oryza sativa
  unsure (1)..(139): unsure at all Xaa locations
  Clone ID: PAT_MRT4530_46463C.1.pep
AAQNTPAAPRGRRATRGCWCRSGKPRGQHEGDDGDANHRCQRVERGREARLGHGHRGGADECHDGDVVEQIATAARSAVGGRREGAEGATDAATAGSGARGRREGAEGRWLHASRESAASGAXRKGGGSGRGGGSPPRR

SEQ ID NO: 145776 - protein, 244 aa, Oryza sativa
  Clone ID: PAT_MRT4530_46464C.1.pep
MDDEMLQLWEAAERSCKNQTSKSSSAEHDIEAVEEVKSEYPSSELARGRDLGINKLEVSTSSVEPHEQWSNNVLEKLSSDAQRLQSIQVSIKELKRKMGSPSNGKSPMNSEYNTVSTQLLDTEGCVLEQINYNNKLTKRVENYPALSDSMNAEQEGYPSRRKISGQVQKGSENVGRLELELQKIQYVLLKLEEEHEYRRLKVSDKRTRVLLRDYLYGRKEKRGGAQKKKKRAPFCGCVQSRTET

SEQ ID NO: 145777 - protein, 1001 aa, Oryza sativa
  Clone ID: PAT_MRT4530_46465C.1.pep
MPSQVMDQRHHMSQYSHPTLAASSFSEELRLPTERQVGFWKQESLPHHMGSKSVASSPIEKPQPIGTRMAGRLELLQPYKLRDQGAAFSLEHKLFGQERHANLPPSPWRPDQETGRQTDSSLKSAALFSDGRINPNGAYNENGLFSSSVSDIFDKKLRLTSKNGLVGQSIEKVDLNHVDDEPFELTEEIEAQIIGNLLPDDDDLLSGVVDEVGYPTNANNRDDADDDIFYTGGGMELETDENKKLQEFNGSANDGIGLLNGVLNGEHLYREQPSRTLFVRNINSNVEDSELKLLFEHFGDIRALYTACKHRGFVMISYYDIRSALNAKMELQNKALRRRKLDIHYSIPKDNPSEKDINQGTIVLFNVDLSLTNDDLHKIFGDYGEIKEIRDTPQKGHHKIIEFYDVRAAEAALRALNRNDIAGKKIKLETSRLGAARRRLEHMSSELCQEEFGVCKLGSPSTSSPPIASFGSTNLATITSTGHENGSIQGMHSGLQTSISQFRETSFPGLSSTIPQSLSTPIGISSGATHSNQAALGEISQSLGRMNGHMNYSFQGMSALHPHSLPEVHNGVNNGVPYNLNSMAQVVNGTNSRTAEAVDNRHLHKVGSGNLNGHSFDRAEGALGFSRSGSSSVRGHQLMWNNSSNFHHHPNSPVLWPSPGSFVNNVPSRSPAQMHGVPRAPSSHMIDNVLPMHHLHVGSAPAINPSLWDRRHGYAGELTEAPNFHPGSVGSMGFPGSPQLHSMELNNIYPQTGGNCMDPTVSPAQIGGPSPQQRGSMFHGRNPMVPLPSFDSPGERMRSRRNDSNGNQSDNKKQYELDVDRIVRGDDSRTTLMIKNIPNKYTSKMLLAAIDENHKGTYDFIYLPIDFKNKCNVGYAFINMTNPQHIIPFYQTFNGKKWEKFNSEKVASLAYARIQGKSALIAHFQNSSLMNEDKRCRPILFHSDGPNAGDQEPFPMGTNIRARSGRSRASSGEESHQDISITSVNCDTSTNGVDTTGPAKD

SEQ ID NO: 145778 - protein, 76 aa, Oryza sativa
  Clone ID: PAT_MRT4530_46466C.1.pep
SLLVSSGITSSRCPMPQVLAYIAEKTRLVCRMSSLSTTELLRVCKHGERDVSLKHNQFISNFNVRLFFFSQQRKRK

SEQ ID NO: 145779 - protein, 95 aa, Oryza sativa
  Clone ID: PAT_MRT4530_46467C.1.pep
MAEVRLDPGGEPTQGNQGDVGATASTKQHHDDDDGKFGVLWRKAEQLGPSLLLGWRWWATPRRASSGPSPTSTLLDGDGGRARVDGIVEEIHVSL

SEQ ID NO: 145780 - protein, 154 aa, Oryza sativa
  unsure (1)..(154): unsure at all Xaa locations
  Clone ID: PAT_MRT4530_46468C.1.pep
PPRPPRRRRAWRGRGGAPVRRRPPGAGGSRRGGPGRARRGTRKGDEKTVGMVINGXIDLDLSRIATPVCXSSSCTXSPQQWYRWGAGGWQFACCTTSISTYPLPMTHTEWGACIAGRRKLAGDWXSGEGYNLAIPIDLKTFWAKHGANEFVTIV

SEQ ID NO: 145781 - protein, 186 aa, Oryza sativa
  unsure (1)..(186): unsure at all Xaa locations
  Clone ID: PAT_MRT4530_46469C.1.pep
RVDDVTLATMDTTVAHIMDQQEDIKIKSSKCWNPIRLPVTLSTSNGRQICXQTPFSAREFLMERSRSPLSNRSSLIAKFHSSHLQLRCLGPWPKWGPCGVRPYQVEHDPRDPLVVLPPPXIDRNRVDLHQQDQQPTDRCIDRXGATQRLVHSTHXKIGPTTALSFEWNSRFITLHRYFPCSCGFYL

SEQ ID NO: 145782 - protein, 94 aa, Oryza sativa
  Clone ID: PAT_MRT4530_4646C.1.pep
ARGPTIETAPHFFPNSPLFSDRGPTAAGQAAPRRFHRRRRGLHGPGRHSEAGARLGLRPCVRHGGGVGTEKEDGSGGRREGRGGSCGKLLACLP

SEQ ID NO: 145783 - protein, 74 aa, Oryza sativa
  Clone ID: PAT_MRT4530_46470C.1.pep
KTPRPPHLGRSPQGGNYSKKPKRAPFLKVDRNQKPGGETPKKTGQAGLKMGTNFLRPLLEAPTTLFELTPKGEP

SEQ ID NO: 145784 - protein, 507 aa, Oryza sativa
  Clone ID: PAT_MRT4530_46471C.1.pep
MGEVVSSAVVHETVNKIISGLIDKYEQNSSAEEQMERLEMAHIKLETALETSSKWQITGGPLQRWQKKLKRAAEECDDTLRKCRQRVQEEEQAEQQVRNSSLPTRVAHATKSLISSIFHGNIDEPIRSAVRRFEWFADGANDFLRSVEFGGTPRRYLFFDPLIGRLLAGETLEYKLVQGNNQHLFWIRPNNTAERGVEAKLIFVYNDESVPVNNFFLGMMLQLSECTNIVGTAIKCLQLFAPHFKSTTETVRKELSQLPTQDFSWVPRSHSYHWDSIHSTVTEWFRPNPMCCKHRSQKVCSSGNMEKTYLPDISLESVIDVSLQCQVSLPGLKDQVTVVESKPSLKEFPHLKVHLVYTPHGSSEDLFPAVESSVIEMVNGVDQHCLHTNIALEQMEGIMLPRAVDCFRQNAGTTVYQMVWKSKHGGAYLQAVKVSKNMLRQRTIRGAKKAKLLRRHDHWTQSRIDVISDFLNLWAAHAPVQLQGSILDWTQKEKEAQLAPHLLHLKF

SEQ ID NO: 145785 - protein, 216 aa, Oryza sativa
  unsure (1)..(216): unsure at all Xaa locations
  Clone ID: PAT_MRT4530_46472C.1.pep
MPPDLAEARSGPLPLPPPPGRSHRIWWRRGPAACLHTVRPTTSMTEREREDAAASPAPPDRNRLHAAGSGGGEVRPTSAATTAAPPHHEQRERERKRXAAASPAPPDRSSLHAAGSGGGEVXRPTSAATAAAPPHHEQRERERDDDVASPAPPNRSRTSMPLDLAEARSGPPLLPPPGHSRLHAAPPAAAXRERGEKWRESGRRSGLLAGGKRPAG

SEQ ID NO: 145786 - protein, 56 aa, Oryza sativa
  Clone ID: PAT_MRT4530_46473C.1.pep
MAARSHGPRATATELGLTRPLLYRFFPGCRGPAATSCAYEATIRDSGKIISGLLPI

SEQ ID NO: 145787 - protein, 47 aa, Oryza sativa
  Clone ID: PAT_MRT4530_46474C.1.pep
IMIRGPMFQGKFRNSDPRGPLVLKYCVCQNDSICMIMECKVKLYLCV

SEQ ID NO: 145788 - protein, 179 aa, Oryza sativa
  Clone ID: PAT_MRT4530_46475C.1.pep
MDCFEWGDGYLDRFGLIYVDRKTLTRYRKDSSYWIEDFLKKQKTSNFGSSQMALMVVASLTMALLATATAGSIQVGKCGDLSPAFPGNCGADVCQFRCAVMGGDREKAYCDAATGRCCCPPGSATLCRPLAGCRSRIPACRIKCKSVFRDPGRAFCQDGSPGFGDSCCCPPNNVEDSSN

SEQ ID NO: 145789 - protein, 47 aa, Oryza sativa
  Clone ID: PAT_MRT4530_46476C.1.pep
ECRQMLNLRVETASVHLFYYSVHRVPEWNVEVAMWNVMLLCVKKSRF

SEQ ID NO: 145790 - protein, 48 aa, Oryza sativa
  Clone ID: PAT_MRT4530_46477C.1.pep
KQLFIIVLLGIHFSNVNYTLHTPKLPGCSTLIQSSPNNPITSSRCTIT

SEQ ID NO: 145791 - protein, 137 aa, Oryza sativa
  Clone ID: PAT_MRT4530_46478C.1.pep
MSNDNKKVYTLEEVAKHNSKDDCWLIIGGKVYNVSKFLEDHPGGDDVLLSSTGKDATDDFEDVGHSTTARAMMDEYYVGDIDTSTIPARTKYVPPKQPHYNQDKTPEFIIKILQFLVPLAILGLAVAIRIYTKSESA

SEQ ID NO: 145792 - protein, 103 aa, Oryza sativa
  Clone ID: PAT_MRT4530_46479C.1.pep
RNLVGKLGFLSGPRLFLVNHQGRGLFNFSNQKKVGLVKFQTQKSFFKGSSIWVISKSLFSRGAFLCKALQDCPRSKCANPIFFLFFLQILLSARMGRTPRPGV

SEQ ID NO: 145793 - protein, 125 aa, Oryza sativa
  Clone ID: PAT_MRT4530_4647C.1.pep
MAGVVLRPYWRELAARLETGSREQGAVADDKQRVADGTLSRRRPSHRVVTVLPGLLYLASSPTEGGRSGPIVGGSVPPSPGPDRDGAASVADDWGGADRGGRDGGGARGGKGQTRGEGGVYRLLA

SEQ ID NO: 145794 - protein, 823 aa, Oryza sativa
  Clone ID: PAT_MRT4530_46480C.1.pep
MPAQKRPAPEAASAPAGGDGHVEGGGAGGGGGADEDAHRGGERSPKVMNGGGPEKEKERRDADSDAEEEEEEAGGGGGGGGADEDRDSPSSESDGDMDEFILVKLMDIRKEVQCPICLGIIRKTRTVMECLHRFCRDCIDKSMRLGNNECPACRTHCASRRSLRDDPNYDALILALYPDIDKYEEEIQASIAETFRRQSEALVKKRSVAKATGSTITRRTRGNMRAKRRGRTSSPDIVATDNEDEDRDENGNEGSKESSSVDDRSPDVRQKRVRRWPVPRSSPAKSIGGIDSSFEDIDDLGSGRDIMSTSPLRGEMLAWGKNGTRSQTRHGNSGGSSGRMAKGGRVTKLVEYLRNTDEFDNKFNLYLVLLPLNGQSMPKLEKPYLSCQPTFSVRHLCQFVALQLSRHAKEVEIFIRKNPNNGCFASIDTSADEIKLNHDALERLEEEKSLSELYPSLASGHGDLAPWTRYGALNNEQMVGCRKNREVIKLLLTGAGLTVCHAMLPLKLADWPSTLTQSRCQSNWPMSLEVLSESLLCFGATSVTVDDIAAAGNLDEITITSIFAHGEDVGSCVSSAASSAGLEYNPVYESSVGKQCDWVTVVQETYESTKVIDGLWVIPKWRTPPDPQAINIIINPGLAFGTGEHPTTKLCLLLLRETVKGGERFLDYGTGTGVLGIAALKMGAALSNGIDIDPQAVTSACENMMLNGIDSNKMLVYLVPTNAQSACFPSNIDKSEENRPTGNLELKSSKGSYDIVAANILLNPLLELVEDIVGYAKSGGIVAVSGILSEQVPKVEEAYSRYLENISVSEIDGWACLRGNRRA

SEQ ID NO: 145795 - protein, 137 aa, Oryza sativa
  Clone ID: PAT_MRT4530_46481C.1.pep
VTEEVKKEEEDFVVNPYTISSSTNKEIDYNKLIEKFGCYHITEEQIQRIEKYTKQPAHYFIRRGIFFSHRDLDAILTACETHKDPTIPPFYLYTGRGPSSEALHLGHMLPFIFCKYMQEAFRVPFIIQITDDEKYFH

SEQ ID NO: 145796 - protein, 823 aa, Oryza sativa
  Clone ID: PAT_MRT4530_46482C.1.pep
MSSSASPSVAPSAEYAEHLSNLVATPSLSHEHHYFLGSIGNLDPTEFIIAETNRIPFRLANPNLGHWKNTFKSWPSLDKTSPEKSWAMWYKRVSASKQVHWDELGIGQALALTLANSAKDEPLMASAAYFWSNTLKAFLFNQGPMTPTLLDITMITGLDVTSSANPMSLNTKNQFDFRTKSIGGWSGYVAAYMGKGSVTPREHTAFLLMWLEKFLFCGSSCGLTTNWQFLAEALETKRQFPLGKILLDYLYQMLSNASAKIVTGSVLSAGCESATFDRRRIPKAGADHSFYEGFQRDARVWFPYEDSVNFDLPADFKFEDINSEKFQKSREVFSAAISPCILPVGIHQGRNIQVSYEFYHPMSSARKSGMGQLPIGLFFTDKIQCSGEISSTLMMDLLLNIPGPPLASIENIELARFRSKNFDRWWGEWKQHIFHQSASIYMTDLFPDVVPQTTKSSPPRTSNRGKDIEYAPGLLPNGGRKRKTKASAIDPSALAPKKKTKKNKPKPADDLPTLDPSIEQALDEEEIGEDFDQAAAELSDAGEKTPSASPKQTPPNPAAPAHFSRKKKTAVKKKSATTTLKPAPPQMSSDRTPSATASHNIEEEEQPTAPAIPVLADLFSFDIKDYFDEEAEEETTSKALAPLDETFKKTLEDISLRLESSLDNLVADYGSIRARFAKIQALIPDDLANTITPAVYLEQHQFKLEKAKQRIADRRERKDIKATIQANRQLSNIDWLEARKIDLIAQLEECNAELDLEKQKLANLPNAVEEQKSRLKSAIKNVADMTKSFKAIFATDAQDIQAIEEVDQIRQRAVSAIQRYLSA

SEQ ID NO: 145797 - protein, 238 aa, Oryza sativa
  unsure (1)..(238): unsure at all Xaa locations
  Clone ID: PAT_MRT4530_46483C.1.pep
WWWDCRTRLHELGWAVARKAATASLSCSPSSATPCRPSTPTPTPAPVLEKLEHRQQWTPLPSPQRAAQRWLRELPPPPPPTPRAPLAAGVPSATSTSRAPVAAGTPTPPRAPSPPLHQAPXPSSPAPXLQAPPLSPQAPPSAAPSSVAPSAPSSVRRRLELCPLPSPPPPLLTLPSQAPPPRAXPPPSPPQPTPPAIVPTSXLPPSQAPRSPSSPRALPAVLEVREGEESGFWREMER

SEQ ID NO: 145798 - protein, 116 aa, Oryza sativa
  unsure (1)..(116): unsure at all Xaa locations
  Clone ID: PAT_MRT4530_46484C.1.pep
LENDVEKGKKMKKXGXIFXXEXXXKXDXLRLKRKXEDDEVYXDKVMEKSXRFXVXVKKKVKXXKKKGCPASPNXILQRSSFSSNVSADSVPRKYITLSSSYYLLFLYFLRPPRGYF

SEQ ID NO: 145799 - protein, 154 aa, Oryza sativa
  Clone ID: PAT_MRT4530_46485C.1.pep
MPSRKDMWDALEAMFGVFDTGSELYVMKHCYEYKIVDDRSIVKQAHEFQALPKELENNIYELLDNVIDLIASLGVEEKVIAKNNRDKKFEGAYVHGGDGWHLGGRRGRIRLRGPRDYRIRCHRALNRRIRGHRPRDGLRWTADGSGFLERSGGS

SEQ ID NO: 145800 - protein, 550 aa, Oryza sativa
  unsure (1)..(550): unsure at all Xaa locations
  Clone ID: PAT_MRT4530_46486C.1.pep
PPHTPPHPPPRAITNSINHRPPPPYMPPTPPPTYPPSAPLLMLPKLGGKSPPPPPDATATTKKLAKHPPRTTPPTPPHPPTPTQRPSKQHPPHTHPYPPKHRQPPTQNRLIPPPTRLQHPKTDPPPPNPTPPPVHQSPPPPPHQPRPPNPQPTPHSENPPQXSPRPPIPPSPPPPPTPTSFPPPPPPPPPPEPTPPPPPQRPSHQTLPPPPKKEPPPMPLPPAPLPPPEPHRRRPLLAPPGPXATPPPPPPSPXPRPHPRPPRRPRRPPPPPRPSGRAPPXPPPPPXPPPRRLPPPRRRPPGLPRGPPRPHPPXSPMPAPRCGGPTPPGSPPPSGPSGGPRRKSPASPPPSPPPPPPPSTPPASASAPPPRRPRXPPRSWTPPPPAPPPPRPSSPLPPPCPAPPPPPRRLHRPPPPRLPPPXPTPSAPSFPRSSPSGSTPPSSTPPCAAATTPRSPPPRAPSASSTRTSPTSPPPSRATPPGARAPPPPCHXATATTAPEQQSSRSPGRWPRPSTTPPWRPRPSSWRSPPSPTPRRLRPRLPPRRRGCRH

SEQ ID NO: 145801 - protein, 110 aa, Oryza sativa
  Clone ID: PAT_MRT4530_46487C.1.pep
QTFGLSGTKNRGGSFFLQGKKGATNYRFSWVKKLDETGVKFIHGKRNPGGKNPKSRGKGDQTRASLDPCTLTQCKGWREHPTFGRNCPFCNLGRQRFRLGRRVCRMPLFW

SEQ ID NO: 145802 - protein, 457 aa, Oryza sativa
  Clone ID: PAT_MRT4530_46488C.1.pep
MAGDGEPPALSAAVTTPDGWHPRTAERRLLHLLHHSPPARRRPLELLAFAVRHCLPSSPPSPHHHSLAALLLLSSPPPPALPLLRLVPPHAPPPLPLLNAAIKALSASSPPLAFRLLSSLRRLHAPDRLSFLPLLGCVSSLSLLSAVHALLLRLGFLSHHAISLALLKPYPLHYARVLFDEMTQRNKCTVAYNTLITACFRADDLGAARHLFDEMQRYRRSRRSVVSWNVMIAGCAWCKKDDIAVLCFERMVREGEVAPDDGTLAAVLPVCGRLGNVGVGRWAHEHARKSGLLDRKVHVANAVMDMYCKCGDVHSAREVFKGMRQRSVVSWNTMISGFSLNGHGIEGIELYREMRTHGEMPNEVTFLGVLGCCAHAGAVDVGRDIFQSMQLEHGIEPVIEHYGCMVDLFGRSGLLEEAYALIQGMPMRPNAAIWDSRLFTLLALLLGLGTKRGTERN

SEQ ID NO: 145803 - protein, 422 aa, Oryza sativa
  Clone ID: PAT_MRT4530_46489C.1.pep
MSAATDPTGSPITTSAATHPTRSPMTTSAANHPTGDSSAARSRASKTSKDDSTCTVSDDPVVTGVIDAFRSPPILQKTAVSGLQTQILLSLGDLSSQICETQKMLIKMAHDNTEFQENMNDRMTNVEHIQQLQLQQVTDITHGEQHFPRKRYIEVEYPSTIGKRVRGVNGRAVTYPYDNYEKNISTKIIKAFVKHFGQSRSIKRHKHMYHAYLETPSVVSMLIKYGYYDGVELGNTDENMYKSAGVSYVNNDMIFLPIRTSIDHWYVAVLDCTRKEVCVLDSMDTTEDDLKELKFLMKGIRKCVRLVLDDKIVENPLWDDYNVQAWKIRIRYNLPNKKDRTSSGLYSIKFMELWTGDSLSKQFYQEDIDSYRRKLAAILYMSPSNKLRNNICSTSNGNGTDGGTRAADLNEDILNMSEIHGD

SEQ ID NO: 145804 - protein, 77 aa, Oryza sativa
  Clone ID: PAT_MRT4530_4648C.1.pep
KKTKRGGLFGSWHRIHHTQHLSHKKFFTNISSHIKHPLQASGSSITLLATKTKGINNCGFFLPGLFHTTVGLNFLAL

SEQ ID NO: 145805 - protein, 86 aa, Oryza sativa
  Clone ID: PAT_MRT4530_46490C.1.pep
TRRCLPIPPPKSRAVPATGSRVIAYRSRPRPQSLGSFRGPPSRAVLVTAADSSPPGGMVVTGEWRTWNENFVPWWPWFVPVLLTNV

SEQ ID NO: 145806 - protein, 707 aa, Oryza sativa
  Clone ID: PAT_MRT4530_46491C.1.pep
MDDPDPAAVAAAPRQKATGLDRDSRIRRLRHRRPCRRKEQRYFSSSDLTSPDQIWPLKEVRRVIRGSTGRNERRGEEKKLETGWFWRRPGDWGAAAIFSFGRVLWMEFVFVPPAKFGPVTFDSTVRISGDHGNLSGGLQQFENPLSSGGVRPVPLWKRSTFLGISLLAIKFWDVHETIGSGRFGHLRNFVSVLSFGKTYVYESNLDSGSSYKNTHVVSTTIRPLQTLEILLSGFDLGPGQCSLNIHLMVKSLSGGDKGTINAMVTRPKLKDDAVLDLGNKEVEDSRALVKAGQDLVAAPPADDQAVDVVLQSSSGVNLGPEAHMEGAVLEEEEDAIEVELDKEEVALFEDMGRAWRLRAEMSYKSLKDNLFIVTFNAEGDHKFVLQGGPWIHRGDALIVADFNGLLSPSMVPLESVPIWVRIYDLPLVMMNKARGELYGSKLGKVREEDVQQDGSNKHDFFRIRVDLPVNRPLKRQIAIKIKIKGVEEIRRFNLRYERVPHFCFFCGFIGHSDKECEKRLANEAQPLMFSADLRCSLLKAFERKISKVKANQSAGVQRKLVFRGAGGSLHMSDSTLSRKNQTNKFSAGDELASLPSFEMIPAIRNLGTQQESTEDVSNEATISPIKRKGSDNAQLKIMGKVQQALLEFDQSESQGGSGQGKTGAPARASKRFKKDEKAENTAVDMEATSLGATGKLARPMAGSRQEQ

SEQ ID NO: 145807 - protein, 143 aa, Oryza sativa
  Clone ID: PAT_MRT4530_46492C.1.pep
MRKYDVVSHPVARHVEEQSPPPTKPSSYNEFRLSLGPEPSKTLLTLDLTECSDLFLRQQGAPAAERRSSPLCISSSSSSPGWKMVVPASASRWQPEQRDAYGYFVNLKTCRLSLPEVLIGVGCERITLNTDAQSSGGAHRGML

SEQ ID NO: 145808 - protein, 894 aa, Oryza sativa
  Clone ID: PAT_MRT4530_46493C.1.pep
MCNKYDKGSGLHFEARKPKKPPNENAQMPGFWRRPGDWGVAAIFSFGRVLWMEFVSVPPTKFGSVTFDSAVRISGDHGNISGGLQQFGNPLSSGGKRPVPLWKRSTFLGISLLAIKFWNVHETIGSGRFDHLRNFVSVLSFGKTYVYESDLDSVSSSYKNTPVVSTTIHPLQTLEILLSGFDLGFGQCSLNIHLMAKSLSGGDKGTINAMVTCPKLKDDAVLDLGNKEVEDSRALVKAGQDLVAAPPADDQAVDVVVQSSSGVNLGSEAHMEGVVLEEEEDAIEVELDEEEVALFEDMGRAWRLRAEMSYKSLKDNLFIVTFNAEGDHKFVLQGGPWIHRGDALIVADFNGLLSPSMVPLESVPIWVRIYDLPLVMMNKARGELYGSKLGKVREVDVQQNGSNKHDFFRIRVDLPVNRPLKRQIAIKIKIKGAEEIRRFNLRYERVPHFCFFCGFIGHSDKECEKRLANEAEPLMCSADLRCSPLKAFERKISKVKANQSAGVQRKLVFRGAGSASSSSAGNKQGDRFYTDPPNRIDAYDGFDSREEEGDELVDAQLAEKAGSLHMSDSTLSRKNQTNKFSAGDESASLPSFEMIPAIRNLGTQQESTEDVSNEATISPIKRKGSDNAQLKIMGKVQQALLEFDQSESQEGSGQGKTGIWTALRNISQTSNLPWLVMGDFNETMWQFEHFSRTQRNESQMQAFRDVLQDCELHDLGFQGVPHTYDNRRDGWNNVKLVSVENNQPRQKCLHYEILWEREIDSAQGTVHRTAIAMESMATDYFQEMFAADPTLNPESVSREKKRNQTPTLPPPPGPARRAHHRELRRRRRLIRPVPWRRPPSAGGTQGPPLLTGETQNQGQDHDHLLLDPSLGLQSLTLDLRQGQDQEAARGSLML

SEQ ID NO: 145809 - protein, 315 aa, Oryza sativa
  Clone ID: PAT_MRT4530_46494C.1.pep
MVRPASSSLLGAVCISPLIWLISVLTPLLFAGGDPRAQEVTTSSISRFGAWYSGSPSPYRGNPKSRSRSRSPAARSQSRSPVPDPRSQARSRSRSREREPDAVNHGNTLYVTGLSSRVTERELKDYFSKEGRVTSCHVVLEPHTRVSRGFAFVTMDTVEDAERCIKYLNQSVMEGRNITVEKSRRGRPRTPTPGSYLGHRYDRREPRGRYRSRGGGYGRDEYYGNSYRRSPPPMYPSYRDTRDYPPYRDTRDYSPHRDARDYYDGRGGRGYSPHRSPPYGGGRARRERSRSLPYSPYRMPERGYGRQAGGGGYDR

SEQ ID NO: 145810 - protein, 130 aa, Oryza sativa
  Clone ID: PAT_MRT4530_46495C.1.pep
MEPLFSSPHRQGQMEAVCAGGCRSSDGLDVLFTPFLFSLLASSSSFEASGQAGSYTERQWWHQRAVQAPGFESLVLPTRDYLCIFKDLCCAADFVQSHRRQATGQARMHELGAGRLIFSLLFSASMADRG

SEQ ID NO: 145811 - protein, 361 aa, Oryza sativa
  Clone ID: PAT_MRT4530_46496C.1.pep
MASAASPPRSGDASPSSPLLPSPTSPDRRSGGGGGGGRLLPGLRGAARFLGRTGSRRLMREPSVAVRETAAEHLEERQTDWAYSKPVVVLDVLWNLAFVAVAAAVLAASLPESPSVPLRVWLAGYVLQCLFHVLCVTVEYRRRREARGGGFGADQGAAADGDFKLSIVKHLESANTMFSFIWWIIGFYWISAGGQALSHDAPQLYWLSIVFLAFDVFFVVFCVALACVIGIAVCCCLPCIIAILYAVTDQEGASEEDINNLSKFKFRTMGDADKLVAGIAAPVGGVMTECGTNPPVEHFLSAEDAECCICLCPYEDGAELRELPCNHHFHCTCIDKWLHINATCPLCKFNIIKSNLGPEDV

SEQ ID NO: 145812 - protein, 73 aa, Oryza sativa
  Clone ID: PAT_MRT4530_46497C.1.pep
AADEERFAHHALPQRLQAPQNHLLSLFRSSLYRHINKSASTMIHASMDEHTEHSLYDCIFACFILVVWCCILE

SEQ ID NO: 145813 - protein, 142 aa, Oryza sativa
  Clone ID: PAT_MRT4530_46498C.1.pep
MKAHPCQDPQPQPQCQTERRIEGTKQGSSLAASSPPSPCSPSPQAPPAPWPSSASSPFCASPPRLPPHPLPPRQQESLIPRHDHHQLQLSPVGASEWDSADIKTHLARRKWPRRSSGGAVDAAPSSRGSQAYDACMRRHSSS

SEQ ID NO: 145814 - protein, 128 aa, Oryza sativa
  unsure (1)..(128): unsure at all Xaa locations
  Clone ID: PAT_MRT4530_46499C.1.pep
GSFIEFRSGMVNVSSIGNHCSRDXRAESGKYVKVHIVRPTMVSVFRQKFAHLSLSVCIAGQISFDVFPQEWSXGSCFRYLEEFQEIRFFGGTTGNVVNDYQIFASDRTIVHTVSGGDDPAEQCRFLFM

SEQ ID NO: 145815 - protein, 61 aa, Oryza sativa
  unsure (1)..(61): unsure at all Xaa locations
  Clone ID: PAT_MRT4530_4649C.1.pep
AXRXXGXXFAXXLXMVMRPXXNXFXAPCRPXPXXXXPWWXRPCLPRSAASSSATAAAAGXV

SEQ ID NO: 145816 - protein, 250 aa, Oryza sativa
  Clone ID: PAT_MRT4530_464C.1.pep
AAASGGGKELRGGSWSTGDGNGSSGSAACELWSSGSGDGDSDSGGPNDGGYSISMTAMVEVQDTTPPCDCSASVMHCFLYVDSLHCFVYFLYVDMSPSSGNVGGVGGNSANGGARGNGTIGGENSNTNGSEASTPTLSHLVLESSLAFSLRWWEGCSSMATGPGVAELSAVGPEAMDPYTRAYLLTEPLVEVDLVAISDIFGENNGQVLLDDPDWMLVFNKFYAELNDLLCFILHGYARFRMRTVTNVLL

SEQ ID NO: 145817 - protein, 456 aa, Oryza sativa
  Clone ID: PAT_MRT4530_46500C.1.pep
MREAAECEGGMWTAAGLASRWGTSASGSGGSLERELGNHANAVATSFLHRHHQSLRWEQGDAKRGNTYVGNAFSSEASMSPEYAPSPSIALPSDPPPAASRVACRLYHRSQLCPHGLEPFLLPPARGHACTHALTGPNPGPAVTGPTYRLAGYNRPCDYCRVIASQPNTVRMDSNCEASIRTVVGSTPRQEDTGQTVTGLSPVTFDRTGGCAPMFHPVPNGVGAEGVTGLSPVSGGGRRWGPLEDGRLLSFQAKAQIVVRASCGYWSTRQPLAAATESKQDDDVRTPRRGEHVEHLGCYYYYGVRFNVTVLSTMHIPRPCCLLNSRTSSSMIGSSMSGFSGRFGFSDRQIKKVDYSVTGDQLHVELAWHENFHRWHRRTAAAGGSQPSYVVAESQCGRPNTAAGLHGRTVFSRLVAYYYTCSNYCYLRRCSLYVDKCSRTPLPLRKQRVHLHLSGK

SEQ ID NO: 145818 - protein, 144 aa, Oryza sativa
  Clone ID: PAT_MRT4530_46501C.1.pep
SASGSGGSLERELGNHANAVATSFLHRHHQSLRWEQGDAKRGNTYVGNAFSSEASMSPEYAPSPSIALPSDPPPAASRVAATRGHWPGAVCREKVAKRQYQLETVAKRRRCLEAAYPRALALPRPEALARLPRGEGSEQGGDSG

SEQ ID NO: 145819 - protein, 117 aa, Oryza sativa
  unsure (1)..(117): unsure at all Xaa locations
  Clone ID: PAT_MRT4530_46502C.1.pep
LGLSYIYRVGFIVSEFYLETKATHGIKGTPPEGFRSSNHSANTLTIIYEAGGREAXTRREISSNHLDKGLADXGYYLTRGLNQYNLYLCLXVMSYRIDPRTNVPQYPIYPALEAERK

SEQ ID NO: 145820 - protein, 129 aa, Oryza sativa
  Clone ID: PAT_MRT4530_46503C.1.pep
MAAVTRHASTAPSCTGVGVMWWFTLLPSVVCVLPSVVFATAGVGRRGCLRWGCKSPGQSSSLGEDGTADELKEQLQGALQENGQLKRELQQYTSEKKASAKTTDAADAAAEQAEHWRKDTETAMAAAAV

SEQ ID NO: 145821 - protein, 73 aa, Oryza sativa
  Clone ID: PAT_MRT4530_46504C.1.pep
MGWLLQLWVAAARVKKAPGLVDWFLDLCLCLRWQQQLWEEVRCILGSGEARFTEGGRDQCDMIGIDRFPFVRT

SEQ ID NO: 145822 - protein, 281 aa, Oryza sativa
  Clone ID: PAT_MRT4530_46505C.1.pep
METTAALAAVAVDTGACSMKCPSGTGHALCGCGIGGQARRSARSVPKAVQKDEMFDKVVEAALDCRNVQEWEEDVWRSSSVLSIYHQRGTRGYKQAAFKSKDKFYGSSSRVPAMTLSKKAKQSSTFDHKNGTTGLRSSIEAKKRFSYLVTSKRKCACKKSAAALNIMDGSTVASAEKHKGMASGQSSSDCSRKAIVAKKLPEDQNQDLPYDSASMGIILQRSEDNLVQGQLKKCITCYCCWNPSWSQLCGSINRMFVAFPLRPGINGIVNQYEFSKHRPGM

SEQ ID NO: 145823 - protein, 62 aa, Oryza sativa
  Clone ID: PAT_MRT4530_46506C.1.pep
QRFLDGNLTLIRTICMQIMWQHFSQFTYKLLLKKKKKKKKKKKKKKKKKKKKKIKNLKKKYK

SEQ ID NO: 145824 - protein, 233 aa, Oryza sativa
  unsure (1)..(233): unsure at all Xaa locations
  Clone ID: PAT_MRT4530_46507C.1.pep
LSPSQIPLTSSTGQTVVSGGSRSYSDCSAIAVFCLQATPTPPSLLPIVDNYHDVFAEPLHLPPSRDCDHPIPLVPNAKPVNVRPYRLPHHKKNALEDLIKQLLDSQTIXPSVSPFSSPAILAKKKDGSWRLCIDYRQLNSQTIKNKYHIPAIEDLLDELHGDKYFSKIDIRSGYHQIRMHPDDIXKTAFSTHMGHFEYIVMPFGLTNAXATFQALMNKLLAPFLRKFVLVFWD

SEQ ID NO: 145825 - protein, 65 aa, Oryza sativa
  Clone ID: PAT_MRT4530_46508C.1.pep
KVCPIWFYVLMFWDEDCSIVALQRCAIGRTPIRVSLLAAASSADHGHGAGFLVFLTSDQQRTLVF

SEQ ID NO: 145826 - protein, 48 aa, Oryza sativa
  unsure (1)..(48): unsure at all Xaa locations
  Clone ID: PAT_MRT4530_46509C.1.pep
TLLLSFFLNFIFQFILNSYIWTLDSSCNIPVFFNSEFLXFLIVFLYGL

SEQ ID NO: 145827 - protein, 206 aa, Oryza sativa
  Clone ID: PAT_MRT4530_4650C.1.pep
MVAPATLSLRPFATLAPSRAALPRVGAGFALPPAVSCQPRRRRLSLRAVAVDSDQQGSPEPPDQEAKPKKYHFLVANAKFMLDEEEHFQEQLKEKLRLYGEREKEQDFWLVVEPKFLDRFPNITKRLKRPAVALVSTDGNWITFMKLRLDRVLAEQFEAETLEEALASNPVDLKFDKPEKWTAPYPKYEYGWWEPFLPPKSSNGTA

SEQ ID NO: 145828 - protein, 1151 aa, Oryza sativa
  Clone ID: PAT_MRT4530_46510C.1.pep
MGEAIRVFGATPRRSSEAATPLAIGRGGEDDREYTSRRGLATRISANCLAGGDLGANFEHNKGPKGIHGGGSLGFLAHPCSHGCGYPPSRQLAHLDRHLHHLWGANLRELGFRAGWCKEESGEVSAAAEEWPRVGIGGGESWWRGTIRGDTRRFAKIVRARPPEMAHQGGGWRGRFQPRPAFQARRPAGQVFQGKQGQAGGGVDRQYMVRGEGSKGDQAEIKLKEGSLLQKSLEEKDSAPDLQAQEKPKDEAPMPNPPPQANPKHGLGCILIQNTKAEPAREHINPLAMISVVIGEGLTVAQLEQGFTQQFKWNWNWKAKAMPNGTFQMRFPNKMRFEELSSFDHFSVKGTNVQINVKEWTQESEAIGKMHIVWVRVTGIPDEMKGYLALFEVGSNLGPVMAVDMASLRAHNGVRIKVGMMELEPLPMKLILTTPKGLLFQACFNLEEVVEHGWFREQLFDEGKESDLIPTKEFVGGSSARQAPVEAMIPDKVSQVLRDRELAVQMQEEEMLKDLPSKGVPVMENKKQSEVMLSSNMLVDLGGTKDDKTQDNGDKGKESCVELLEESDMGHLEEEGERVHLGDSEELIDSQESDDNFATKVGVVLAEDITDSQEEDVRRSKRLRDKEDKKPQDLAMERKEAQNAFLDKGQAQIPSIVDESNVSLINMACILGVNLGCALDDVEHNVDLIKKLELARISLFLKEKENAEKNKAESKSGGDFPEHAELAEIYSSDSNSDSELDEIELMIKNIHFSQGKRKLKKGNLDIVKLSRSKKLQLEMALCCRTFRRNWEGLYKREKEDILRKIDAIDIKVESAGMTSSDREERRSLEQKLCYTIREEKLKWFRRSKVKETLEGDCNTKYYHAKANGRRKSQIHSLSQEEGEIEGQSNLLQYITQFYKNLFGHSKENSITIDLNGTCKVSEEDKAKLVQPFCLEEVRTVVFYLKHNKAPGPDGLPGEFYVKFWDLIKNDLLDLINDFQSGTLDTERLNFGIITLVPKCKDAAQIQKFRPICLLNTFKGLRQGDPLSPLLFNLAAEALTLLVKRAEENSLIEGLGINDENKGPSGCKREIWNLENGDGWWQDMLRDKYLKKKPMSVLKTKAGDSHFWQGLMEKQEVDQRRLLLGARLIRQVASDVFNSKFGWRADVRRIGF

SEQ ID NO: 145829 - protein, 962 aa, Oryza sativa
  Clone ID: PAT_MRT4530_46511C.1.pep
MATESARPLSGGTGAGKWPPSKDTGSYDSIPASLSEDELAELAFMPNSGGIFGKWRGSVLERSGSAPPTMEGSLVALGHLTGQPSGNLGAILPNLGTEANNSESKENIYYDSACVKYYMSKVNLNPRFPPPLVSRNQFGKSEERKPFSLDDSSSRSLLLGHPTLPTHKEEPEDEKSPSLDSSSADDAQCDSAQSTSNLGGHSPNLVDSIKENFHRSNGLYDNSSDLLNANSGDGGSIYSGISSLKNSSLYVVQSSDLNGFPPDAHQRSPRPIRTPVSTKLTSDSLPASSPPTSSCSDYSTITEACQQRNPSMAVKPGEPVGTMLDSSDFSLKNLNISPDILSSSYVMQQWQKNAPVWNGLSNVVHGDHVPMIPPGINLPQVPFVDNSGFGHMKFPGDVQLMSQIGMATPFCTPNSFGIPCYPNLQSPSVWVPPFGIGGYGLPGPFVPPVITNFTPQLPGFPSAVNLAAATDLFHPYKMYEHLGVPMPSPVPDQSLTHYFQQPPIHPYGVGNPYDTMVSSNNFVGNPAGVFGSPIIHPSEQKFQIPVTTVAANASTPIKGGKAIGNYETASPYFGVPMPYPAGPTLHGQPASGTSPRDKRNDVKGFQPPRKNMPVSSEIQGQKGREKFDDPKAHFSVEELISSRTHRVELADIKGQIVKYSSDQNGSRFIQQKLENCTIEEKDLLFAEVLPHALELMTDVFGNYVIQKLAKYYLSKISSDCYSIHRIVYSEHQLALEVIDLEQKIVLVGELDGHVLRCVHDQNGNHVIQKCIECIPLEHIGFLVSSFQCQVAKLSMHTYGCRVIQRILERCSNNSECLCIIDEILQSACILAQDQYGNYVVQHVLEKGNEHERGQIITKLAGQVVPMSQNKFASNVIERCFEHGGSAERELLVKEILKQTEGNNYLLVIMKDQYANYVVQKMLTTCNEQHKEILLQSCENPFAIIEEIHLCQAHRQPSRAPLR

SEQ ID NO: 145830 - protein, 37 aa, Oryza sativa
  Clone ID: PAT_MRT4530_46512C.1.pep
DALVHILMDENATPNSYTYYRSSGLSFKDSPDETASA

SEQ ID NO: 145831 - protein, 56 aa, Oryza sativa
  Clone ID: PAT_MRT4530_46513C.1.pep
MACWDVQRCRHLRHEYGIHINDDCCALIISLVDHPGNVFKKLIFSLKLDKNDEIKH

SEQ ID NO: 145832 - protein, 103 aa, Oryza sativa
  Clone ID: PAT_MRT4530_46514C.1.pep
STREMIRAQRAVGGGKALPVIINMNPVFMSEMAASLNIPASHAEPLLPQDMNTEATTIQCVQEAFHRCLCARRRLAVVRTPARMASPAESNKEEASCRIPAAR

SEQ ID NO: 145833 - protein, 96 aa, Oryza sativa
  Clone ID: PAT_MRT4530_46515C.1.pep
MINMINTVTMIETHHNQQPPQYTEQQKPIQANIRQDTPPDIDFRDRHGYFPMVSPDTVRRDESAISDLAGHGFEKEGYPVVDYESDLQTDMSTTVR

SEQ ID NO: 145834 - protein, 62 aa, Oryza sativa
  Clone ID: PAT_MRT4530_46516C.1.pep
APPPAAARSAAARTRPRPRCRPPPPPVSHLRHRPTRRRPPPPPPPPHHQNRFSTGRRRKRKK

SEQ ID NO: 145835 - protein, 112 aa, Oryza sativa
  unsure (1)..(112): unsure at all Xaa locations
  Clone ID: PAT_MRT4530_46517C.1.pep
AMETNGTEKNNCSKELMVPLALFAVELNSKKRLLFDVSSRKIHXVTSTVFPDAFCEFENGGWLLMAQHKPLSFQDQIVFLVHPSTGTHLDLPVLRSPNEGVLGFYVGLMECL

SEQ ID NO: 145836 - protein, 543 aa, Oryza sativa
  Clone ID: PAT_MRT4530_46518C.1.pep
METNGTEKNNCSKELMVPLALFAVMTHGVTGRSGGGGRPPRRAPPTPPTAIGVAVGMEGRKGGELGSAYKVTMRNGVTVAVKRMRDMNRVEFEEHIQMLGDLRHPNVLSPVGYHYRRGEKLIVSEFMPRGSLLYVLHGDQRPDRVVLDWPARMRIAVGVGKRSFYTDTLRPKTKSNPHLFAGADEGRRAPPSAGANSSQSSSSTTAESTARDSSLHTVQVFRCFCARLSHGNKCKKRLLFDVSSRKIHGVTSTVFPDAFCEFENGGWLLMAQHKPLSFQDQIVFLVHPSTGTHLDLPVLRSPNEGFFVFYVGSHGMPLVVAFIEIMSAVPTAHIACPGDVYWSIYKHISDPEMSEAMYKVQSALIVDVVLLGKQAVCVDFHGQILSFSITDMIWRTVSSCPDWSKQDSHFLVASNEQVVAILHPCKTGSAFKFFKLDLQAMEWSLLDDRELDNTSWFLCKGQSYHVKEEGKRRVYLFGPNKCAGSIVNGTEVATFTGSLGPSTLKSITNIYAYDLVDETVETVIPASIVTEVHRWILPSTFAT

SEQ ID NO: 145837 - protein, 42 aa, Oryza sativa
  Clone ID: PAT_MRT4530_46519C.1.pep
GRLSILVISLKTRITLFLLSQLLSDLNTNKECCKRKVVMSKA

SEQ ID NO: 145838 - protein, 97 aa, Oryza sativa
  Clone ID: PAT_MRT4530_4651C.1.pep
VAFLLAVTVAVLLVAATADAIHLDLAIILVAATVTFLIAFAILLAVTALLILAVTSFLLAVAETSRRRPSRPPPSSPPSYPAPWPDRPTRCRPPTTP

SEQ ID NO: 145839 - protein, 702 aa, Oryza sativa
  Clone ID: PAT_MRT4530_46520C.1.pep
MNQDIKAHSGSIWSIKFSPDGHFLASAGEDCVIHVWEVLEWKMIEEKGLEENGVFDPESMLVSTASEGSHREKKLRAKAVHNQRSVSSDRLMVPEHVFALSEKPVITFAGHSEDVLDLSWSKSQGALVGSHKGKCHVYDISGSSSKVIITSADSRIRVIDSFELVCKFKGFRNTNSQISACSAVKGRYLISASEDSHVYMWRCNDDSEPNTKKGIVSITNTHEHFHCEGVTVAVSWPCASSTMTSREWPENGLSGSELDKDQEMPDAQHQSNIIRNTNPNHNGDTSATWSMVYFGNTSIGEVEVWPSGDASLAAAAWAREIRVDRLSPPSERCQPLAVMHTVAVGARCLVMESRLPKAADEPPQPLVAMHAACLKENKTAVVPLGEEELHLVAMTSRRNLTNHACFWGYKVPFGLYNSCLTMLNLRCLGIVFDLDETLIVANTTRSFEDRIDALQRKLSNETDPQRINGMIAEIKRYQDDKSILKQYIEGDQIRDTSVLVRLRPAWEDLRSYLIARGLRKSLLNVFHDGSCHPGMALVIDDRLKVWDEKDQSRVHVVPAFTPYYAPQAEANCSIPVLCVARNVACNVRGGFFKDFDEGLLPRISNVFYEDEINEIPSAPDVGNYLISEDENVAAVNGNRDPLAFDGMADAEVERRMKILTQGEDFLYYNMVKTPEILHLLFQQYLLFKSQFLQFNLMEIGFL

SEQ ID NO: 145840 - protein, 835 aa, Oryza sativa
  Clone ID: PAT_MRT4530_46521C.1.pep
MSLLPPSCSAFLPSSSLYLRLAAELVLSAMLLTLVRLIAVVLFLAWRLKHRDSDAMWLWWISIAGDFWFGVTWLLNQASKLNPVKRVPDLSLLRRRFDDGGLPGIDVFINTVDPVDEPMLYTMNSILSILATDYPADRHAAYLSDDGASLAHYEGLIETARFAALWVPFCRKHRVEPRAPESYFAAKAAPYAGPALPEEFFGDRRLVRREYEEFKARLDALFTDIPQRSEASVGNANTKGAKATLMADGTPWPGTWTEPAENHKKGQHAGIVKVMLSHPGEEPQLGMPASSGHPLDFSAVDVRLPILVYIAREKRPGYDHQKKAGAMNAQLRVSALLSNAPFIFNFDGDHYINNSQAFRAALCFMLDCRHGDDTAFVQFPQRFDDVDPTDRYCNHNRVFFDATLLGLNGVQGPSYVGTGCMFRRVALYGADPPRWRPEDDDAKALGCPGRYGNSMPFINTIPAAASQERSIASPAAASLDETAAMAEVEEVMTCAYEDGTEWGDGVGWVYDIATEDVVTGFRLHRKGWRSMYCAMEPDAFRGTAPINLTERLYQILRWSGGSLEMFFSRNCPLLAGCRLRPMQRVAYANMTAYPVSALFMVVYDLLPVIWLSHHGEFHIQKPFSTYVAYLVAVIAMIEVIGLVEIKWAGLTLLDWWRNEQFYMIGATGVYLAAVLHIVLKRLLGLKGVRFKLTAKQLAGGARERFAELYDVHWSPLLAPTVVVMAVNVTAIGAAAGKAVVGGWTPAQVAGASAGLVFNVWVLVLLYPFALGIMGRWSKRPCALFALLVAACAAVAAGFVAVHAVLAAGSAAPSWLGWSRGATAILPSSWRLKRGF

SEQ ID NO: 145841 - protein, 133 aa, Oryza sativa
  Clone ID: PAT_MRT4530_46522C.1.pep
PRVRGRVGFLASAGEDCVIHVWEVLEWKMIEEKGLEENGVFDPESMLVSTASEGSHREKKLRAKAVHNQRSVSSDRLMVPEHVFALSEKPVITFAGHSEDVLDLSWSKSQVAVGYEIIAGGFNGDKVHLVLQT

SEQ ID NO: 145842 - protein, 65 aa, Oryza sativa
  Clone ID: PAT_MRT4530_46523C.1.pep
FFFCALNVFIFLSSSFPTLDNAYTYVNFLVFLRRLYFHLFQIVNLYKNLLSFSLDFRRHFFVRRY

SEQ ID NO: 145843 - protein, 254 aa, Oryza sativa
  Clone ID: PAT_MRT4530_46524C.1.pep
RVRSDNHQPMTRPVIRLQEKNIILTRINPLIRDTSVLVRLRPAWEDLRSYLIARGRKRFEVYVCTMAERDYALEMWRLLDPDSRLINSVQLNDRMVCVKSGLRKSLLNVFHDGSCHPGMALVIDDRLKVWDEKDQSRVHVVPAFTPYYAPQAEANCSIPVLCVARNVACNVRGGFFKDFDEGLLPRISNVFYEDEINEIPSAPDVGNYLISEDENVAAVNGNRDPLAFDGMADAEVERRMKEASGNAQAFTTTA

SEQ ID NO: 145844 - protein, 172 aa, Oryza sativa
  Clone ID: PAT_MRT4530_46525C.1.pep
AACYTPDGQGALVGSHKGKCHVYDISDNMLKHKKQIDLHIKKRKSSQKKITRIQFVPGSSSKVIITSADSRIRVIDSFELVCKFKGFRNTNSQISACSAVKGRYLISASEDSHVYMCRCNDDSEPNTKKGIVSITNTHEHFHCEGVTVAVFWPCASSPMTFKEWPENGLSGF

SEQ ID NO: 145845 - protein, 449 aa, Oryza sativa
  Clone ID: PAT_MRT4530_46526C.1.pep
MACHLRSVSLPSKRQSNEAEIEDELQSLEASISSPSTTIDGLRRLGDVYNQIEEMIHLPSNQVFSAQQRKMLDGEMECSLELIDLCSAMQENFTELKTIIQDLHAALRRGDSASIQVKIQSFTRLAKKAQKQCKKMSKKTTSDKEDCKLIKLLIKARIAGDGGRWPCGGAAADAPLANHAQVDTIAAQFPFSSYPSPEKRKQEKNIMAFHLRSASAPSSPRSSETNVEEQLQSLKATISSPSSTIRTMNDGLKRLKSIYDSIDEIMCMPSSQVLLCQSQNRKAVEQELECSLVLLDLCKAMQQNFSELKASIQDMMLVIKRGEDAAVQANIPSCIRLAKKAQKQYKKISKKTLSPDQESCRVVKLLAEARETAFSMLEISSHLLSKQTVMPSYSKWSLVSKTFQKRRIICEEEQLQALELDIVDLESGIENLFRKSIQSRVSLLNALSM

SEQ ID NO: 145846 - protein, 61 aa, Oryza sativa
  Clone ID: PAT_MRT4530_46527C.1.pep
GVFGPFCWAFMMIHGLFLCGIIPELLCDNPVVICPFEVMADYPGMPGSPKKDPKGAGRSSG

SEQ ID NO: 145847 - protein, 132 aa, Oryza sativa
  unsure (1)..(132): unsure at all Xaa locations
  Clone ID: PAT_MRT4530_46528C.1.pep
VLTTKFDNLSIGDEDXSKQNLRSRSFQKQSNNRLSLNRLQPXPAEFESDKVSRLSRFRQYDSFGQKSVVKTYGILEFVRDKSHVRHGHILIKSTGTLTNLKASFWTCTGVKQISQVLCFRINSLKTAFIHFK

SEQ ID NO: 145848 - protein, 330 aa, Oryza sativa
  Clone ID: PAT_MRT4530_46529C.1.pep
MKPATSESDMTSLATSSPSRSPKAAAAAYYVQISPSRDSHDDDGDKSPSTQATPVYNNSPLDSPSHHSSSFGRHSRVSSASRFSGNLRSASGRSRLGGGGGRRRLGAKGWRDVDAIIDEEEEGAYDEFDDDDDGGYEPSRCCVLAFRFSLLALAFTLVCLIVWGIARHYKPGVLVKSLTVGNFYAGEGIDRTGVPTKLVTMNCSLQINVHNPSTMFGIHVSSTSIQILFSQIAIANGQLEKFYQPRSSHHVASAIVHGEKIPLYGAGETFALSNAGGAVPLTLDLVVRARGYVIGKLVRVTHTKRVKCPVVIDSGSSKPIRFIQSACSYT

SEQ ID NO: 145849 - protein, 39 aa, Oryza sativa
  Clone ID: PAT_MRT4530_4652C.1.pep
MAAWTHVRTPIRRADRGKAFIKVLEADSISNKCFGYYSV

SEQ ID NO: 145850 - protein, 92 aa, Oryza sativa
  unsure (1)..(92): unsure at all Xaa locations
  Clone ID: PAT_MRT4530_46530C.1.pep
WWFLGVXXRGXYLYRRVGXXEGEVXRGXEAAEMEGSDGEGRRRXGACPSCGRWRRRAARGRVSLSLFLCVCSRTRREEGEEGGGGNGHCGKG

SEQ ID NO: 145851 - protein, 167 aa, Oryza sativa
  unsure (1)..(167): unsure at all Xaa locations
  Clone ID: PAT_MRT4530_46531C.1.pep
QLAAQHQQHKATATVVQPAATAGXSWLVAACRRWATTGDDLDEVTAIDDEDEETVRMSDAMGTGRGAMNGPTXTENDAGESHPVVRVVHHDGAVAGEERVXQRGAEDDAGRQLHRSASSTRRLRRLPPTTPASVPSASWXSDGKDGKCDGKDGKHDGXWYGFNFSKF

SEQ ID NO: 145852 - protein, 39 aa, Oryza sativa
  Clone ID: PAT_MRT4530_46532C.1.pep
LPGMSMFHVSPTKDMPRMIEYHMTNRQENSTKGQLQIQK

SEQ ID NO: 145853 - protein, 595 aa, Oryza sativa
  Clone ID: PAT_MRT4530_46533C.1.pep
MENLISLVNKLQRACTALGDHGEESALPTLWDSLPAIAVVGGQSSGKSSVLESVVGKDFLPRGSALVRKEIADETERATGHKKQISPVPIYLSIYSPNVVDLTLIDLPGLTKVAVVSLTNGLLRCSIEGQSDSIVQDIETMVRSFIEKPNCIILAISPANQDLATSDAIKISREVDPKGERTFGVLTKIDLMDKGTNAVDMLEGRSYRLQYPWIGVVNRSQQDINKSVDMIAARHIEREYFANTTEYKYLAHRMGSEHLAKMLSKHLESVIKSRIPGIQSLISKAIAELEAELHRLGKPIAADAGGKLYTIMEICRMFDGIYKEHLDGMRPGGEKIYYVFDNQFPVALKRLQFDKNLSMENVRKLITQADGYQPHLIAPEQGYRHLIESCLVSIRGPAEAAVDAYGKTIKIKSIESPAYRTLAFVSSFKHELNQFPTLRVEISNAAFESLDRMRNESKKSTLKLVDMECSYLTVDFFWKLPQDVEKGGNPTNSIFDRYNDSYLRRISTNVLAYVNMVCSSLRNSIPKSIVYCQVREAKRTLLDRFFTELGAREIKHISKLLDEDPAVMERRANLAKRLELYRSAQAEIDAVVWAR

SEQ ID NO: 145854 - protein, 47 aa, Oryza sativa
  Clone ID: PAT_MRT4530_46534C.1.pep
QQCGDLYFDRNGARDRAEAAFAAPSRCGIPRRYSGARSTTTPLAGVV

SEQ ID NO: 145855 - protein, 71 aa, Oryza sativa
  Clone ID: PAT_MRT4530_46535C.1.pep
FQLWLFHFETKILSKKTGVRLPKKNLQEPQPKYVYVTIPLLSLHEKNFSLSHFFKLIGSKKKKKKKKKKQK

SEQ ID NO: 145856 - protein, 60 aa, Oryza sativa
  Clone ID: PAT_MRT4530_46536C.1.pep
VLQLDKINPQVASRMVSAFSRWRRYDESRQALAKAQLEMIVSANGLSENVYEIASKSLAA

SEQ ID NO: 145857 - protein, 153 aa, Oryza sativa
  Clone ID: PAT_MRT4530_46537C.1.pep
PTRPPTRPPTRPRVIDQSVVFSAVVARMATFTGRTSLLATLVVVVSAVIMACSVDVCHGAREGAFSRPDPAPADHRPKDDDVYVPGGGGEGGYGPRGPCYDPLIPGHGGGLIPIRPDLPAPGYGRGRYPCFRPLPYHPTPPLPPPQNGDTPPP

SEQ ID NO: 145858 - protein, 106 aa, Oryza sativa
  Clone ID: PAT_MRT4530_46538C.1.pep
MGRSYIEVAGSDTPVTDATGVEHEIKRQLPDRDDVASSIDLDGGNIGGWPLAPIPQQLAGRRGKKRGYGGGKAGLANSDDTGIVMAMDNVDGGKREGTGSAEIGGG

SEQ ID NO: 145859 - protein, 271 aa, Oryza sativa
  Clone ID: PAT_MRT4530_46539C.1.pep
CLAVATPPSTTPRPPDPSRRRRGQIRRPSSSPTPTSRSSRRPRPRARSPAAAGTSRTVLVTGGAGYIGSHTVLQLLAAGFRVVVADSLGNSSELAVRRVAALAGDKARNLSLHKVDIRDKGGLEKVFSSTRFDAVVHFAGLKAVGESVQKPLLYYDHNVAGTIILLEVMAAHGCKKLVFSSSAAVYGSPKNSPCTEEFPLTPHNPYGRTKLIAEEICRDIYHSDSEWSIILLRYFNPVGAHPSGYLGEDPCGIPNNLMPFVQQVAVGRRPS

SEQ ID NO: 145860 - protein, 64 aa, Oryza sativa
  Clone ID: PAT_MRT4530_46540C.1.pep
ALVQLFNPGVIVRYVSRSTYTDYLPVQLCCSADAPWKAQSFHPKKQESCFPAPILTPVHMEYPA

SEQ ID NO: 145861 - protein, 147 aa, Oryza sativa
  Clone ID: PAT_MRT4530_46541C.1.pep
MACGARAGAAFPSPRPARAPWPPGRFRALVPAPPALRLGLLRLPPPMASTIDSPGSSSDFAKRMERAWLISQQPRPNPCSSCQSAGHVECKWCTGTGFFILGNNMLCEVPSKNTKCVICSGKGFATCADCKGTGFRAKWLEDPPVDK

SEQ ID NO: 145862 - protein, 285 aa, Oryza sativa
  Clone ID: PAT_MRT4530_46542C.1.pep
MADAGHDESGSPPRSGGVREQDRFLPIANISRIMKKAVPANGKIAKDAKETLQECVSEFISFVTSEASDKCQKEKRKTINGEDLLFAMGTLGFEEYVDPLKIYLHKYREMEGDSKLSSKAGDGSVKKDTIGPHSGASSSSAQGMVGAYTQGMGYMQPQSNFHILVVLQSFAFPYMYQVAQIYCNKYEVSREQIWDTPQIMELSPWIPYTINRIWKETHGSQDIRIQGRPREAANSALDWQWPSKHSSLASNFYGTRVVGGHHEYQRSTKKDTTHVNFASGLGDLG

SEQ ID NO: 145863 - protein, 82 aa, Oryza sativa
  Clone ID: PAT_MRT4530_46543C.1.pep
DLLFAMGTLGFEEYVDPLKIYLHKYREMEGDSKLSSKAGDGSVKKDTIGPHSGASSSSAQGMVGAYTQGMGYMQPQYHNGDT

SEQ ID NO: 145864 - protein, 50 aa, Oryza sativa
  Clone ID: PAT_MRT4530_46544C.1.pep
SPLAKHQSGDNGVVPQKSVLEPQRKFFPSWRAPVKKNHPGICKWGSVKKP

SEQ ID NO: 145865 - protein, 50 aa, Oryza sativa
  Clone ID: PAT_MRT4530_46545C.1.pep
MPPVGHKVLNMRPEARDIQHTLKEHVMQTHEWQQNVDAQLSNFNNTMQQQ

SEQ ID NO: 145866 - protein, 74 aa, Oryza sativa
  Clone ID: PAT_MRT4530_46546C.1.pep
GRGEERRGEDSSIIINQRHDELLISFPRALSKIACNPLQKELAEWQVNPPSGSVRVSIPQRGIRHRARTLPGHT

SEQ ID NO: 145867 - protein, 61 aa, Oryza sativa
  Clone ID: PAT_MRT4530_46547C.1.pep
QGQQQLNLFMSKCTCHLVQANIACRISLDNPIPINDVNSAMWSVSPIYTLKFAVQLGQPCF

SEQ ID NO: 145868 - protein, 116 aa, Oryza sativa
  unsure (1)..(116): unsure at all Xaa locations
  Clone ID: PAT_MRT4530_46548C.1.pep
IPAPADHCRSRLTPPLCSRAPGACRRARPPPLHSHARPPSLHPPPSRSTAAVPLPRXPPSLPCSPRATAPAPSRLPRPHLPACSAPPACRALLPLTVXPASRSPLAPPPSPPPPSP

SEQ ID NO: 145869 - protein, 128 aa, Oryza sativa
  unsure (1)..(128): unsure at all Xaa locations
  Clone ID: PAT_MRT4530_46549C.1.pep
KASSLRRHHRRCRKDDPSVPSPPPVPRRSAXTPPPSRRSSRSPPPRILSERTRREPKPGTWRTWPPPPAKGWRASAPGTRWGRARSTGRGSSPPPPAAAATSSSSLLEEQEHRPLLRPGRNTPLFSSW

SEQ ID NO: 145870 - protein, 882 aa, Oryza sativa
  Clone ID: PAT_MRT4530_4654C.1.pep
MSAPVGDRSRPPHWRGRRLSPSPPCNRGRQLVVQQVVKEGGSVTYPTLTRSNYSDWAVLMRVNLQAQGLWEAVDTGDVPFHEDRQALSAILRAVPAEMLRPLAEKDNAKDAWDALKYRQMALSIETLIDLTTLSIEDLTGRLLAVDDHPDSNGEDVGQALLGEKEAPARNTKQTGQSSRDTEPQQACGDEEPTLLMAQVCELASVDEPELTNGEVQLNEERALVSLRDEGEPVDPDWILDTGASNHMTGARDAFSNLDTTVRGTVKFGDASRVRIEGRGTVLFACKNGDHCALTGVYYIPKLPNNMVSLGQLDEVGCKTVIEDGILTLRDQRRRPLCRVRRGTGRLYVLQVNIAQPVSLAAKSVEDAWIWHARFGHLNFDALHTLANHGMARGLPEMERVRQSKAPATIKRFKVGVEVETGAKLRVLRTDRGGEFTSIEFGLYCANEGVACQLIAPYSPQQNGVVEHRNQTVVAMARCMMKAKSMPGEFWGEATFGCVAYVKEVRPHLKKLDDRSKAMVFLGYEPGTKGCRVFDPADKRVVVTRDVVFDETTSWPWTDTEEARRVSPSDMFTVHYEVASSSIPVGPLVVNDVTPPASAVPTPPSPRTPASPPPSPSSPVVEFVSLPDATPDGDDDDGAPRRYRTVANILGTTAPVELDSDELYLVAAEEPSNFSEAEHDDLWRQAMLEELNSIEENNTWMLTDLPVSKRPIGLKWVFKLKKDETGAVVKHKARLVAKGYVQRQGIDFDEVFAPVARMESVRLLLAVAAHFGWAVHHMDVKSAFLNGELEEEVYVSQPPGFVDDTHPRKVMRLNRALYGLRQAPRAWNAKLDASLQQLGFKRSNTEHAVYTRGEDSSRLIVGVYVDDLVITGARSEEINNFKG

SEQ ID NO: 145871 - protein, 84 aa, Oryza sativa
  unsure (1)..(84): unsure at all Xaa locations
  Clone ID: PAT_MRT4530_46550C.1.pep
DPRVRKNPDXYDPHRYSPRKEEDTAAGALXYMSFGGGRHRSLREPLAYLQIKAIWTHPVKHFEVELFYAFHGTNWEAIVGRNND

SEQ ID NO: 145872 - protein, 128 aa, Oryza sativa
  Clone ID: PAT_MRT4530_46551C.1.pep
MARVGILLAAALLLGLVSASQAIEGTATFYTVYTPSACYGFQDQGTMIAAASDGLWDGGRACGRMYTVRCVRGTNAVPNPCNGGTVTVKIVDRCPSPGCTSTLDLSREAFAAIGNLDAGRIVIDYNQV

SEQ ID NO: 145873 - protein, 142 aa, Oryza sativa
  Clone ID: PAT_MRT4530_46552C.1.pep
MARVGILLAAALLLGLVSASQAIEGTATFYTVYTRTSPNCSLILNDVFASACYGFQDQGTMIAAASDGLWDGGRACGRMYTVRCVRGTNAVPNPCNGGTVTVKIVDRCPSPGCTSTLDLSREAFAAIGNLDAGRIVIDYNQV

SEQ ID NO: 145874 - protein, 62 aa, Oryza sativa
  Clone ID: PAT_MRT4530_46553C.1.pep
FLLRENSLSFRLHNCRCNKQLFITGYNVRTYYYPWLSYLSVTTCFRSVLPAESTLAPLYDDS

SEQ ID NO: 145875 - protein, 360 aa, Oryza sativa
  Clone ID: PAT_MRT4530_46554C.1.pep
SPITAGMTIRIVLLWPKVHNCTHKAQPNGMLLCPFLLMVSAVSLLGIPENRSLIAMGSTSLIPFSPFPVLPAHRNHFPASLPLSAVAGKLRPPLATALAIATTGVTAPHRTPALTFLPLTVAEIPPPPPTRATSMPTASDRLSPPLPSTPTHAIASLGSARTRRSSVATPPPQIIVGVPFTMRGEPVAVRCRRRWPSGQAAVAALRARATAGCIGQPTAASHWSQPRSIWAIGSASVSIRATRVSAYVAATSVLRRRHVCATWCASPCLRGLGPRGSRPFVLCGRAPDAAATAVSGFITAAHNHATAAAALPTTPSRRRAVHLFPRRLTPLRPPRARAAVADQWENEAGAVVLFLTSPSP

SEQ ID NO: 145876 - protein, 157 aa, Oryza sativa
  Clone ID: PAT_MRT4530_46555C.1.pep
MSALVLLVATHSAVAVYNLVQRARCAAAVFMPAALRRGSGVAEGQRRGSAPPAHLSRRPRLPLSYSHAAALRRGGGVAVLLRLFFLANLHSRRRWRRRASCGMLYTPAALWVAMRSTRADVDGVQEMRRQGWRDEEEGETDEWSPCHFSPWVATLGI

SEQ ID NO: 145877 - protein, 167 aa, Oryza sativa
  Clone ID: PAT_MRT4530_46556C.1.pep
CAVHFPAFPIAENDGKSRTRNVCAWGCRPCSAVVGGLVVSTTFPAEKTRCTFLSKARSFSTPSHIVAMTLTLDLESPATVSIGSGISRSAVWSGPTTVRREAHHRGGTTGSLNARGTTRKRSGWARRVGVVASLFLSASPRPAEKTRCAFLSSAVPFASDGDVDRWT

SEQ ID NO: 145878 - protein, 91 aa, Oryza sativa
  Clone ID: PAT_MRT4530_46557C.1.pep
YSNSFTLARDVPLYPQDTIPHMLPCPEIPPRHCKGGNRDNTLRTTQLTTVHHSWIIITPSINITRGMDSPATPTDFSPLLSLAPNATNDDG

SEQ ID NO: 145879 - protein, 80 aa, Oryza sativa
  unsure (1)..(80): unsure at all Xaa locations
  Clone ID: PAT_MRT4530_46558C.1.pep
DFKPLRQLHLHRPQCRRSNLNSDDVDSSRIHHLSGLLCDTDLVWPNLCXERERRSYDFTEKANLCHQCLPPTVRKRQIYV

SEQ ID NO: 145880 - protein, 174 aa, Oryza sativa
  unsure (1)..(174): unsure at all Xaa locations
  Clone ID: PAT_MRT4530_46559C.1.pep
LLTGTEAMFADLGHFNIRAIQLSFTCVLFPSVALCYMGQAAYLRKFPENVGDTFYRSIPAPLFWPVFVVAIMGAIIASQAMLSGAFAILSKALSLGCFPRVEVVHTSNKYEGQVYIPEVNFLIGAASVAVTLAFQTTANIGNAYGICVVTVFSITTHXMTVVMLLIWKVKLPFI

SEQ ID NO: 145881 - protein, 54 aa, Oryza sativa
  Clone ID: PAT_MRT4530_4655C.1.pep
LETLFFSIFDFKNSQLSILHYKSFFHSTSYIQFLISFLNIGLTLNFFWIPTTVD

SEQ ID NO: 145882 - protein, 83 aa, Oryza sativa
  Clone ID: PAT_MRT4530_46560C.1.pep
VKNPWPNVYAPREVLLNPFGLFEGGYYPVLFGVLRGIGIGSPLFWARAFGFPLEKPKRVPLEWVENPCKKAFVLNYPPLPRWC

SEQ ID NO: 145883 - protein, 135 aa, Oryza sativa
  unsure (1)..(135): unsure at all Xaa locations
  Clone ID: PAT_MRT4530_46561C.1.pep
IPKAPAGSSAPHHIVLADGGRPATGNPVPHPIPPPPPPPPSPPPPFSSPSEQHKPTPXPRTKPPPPXSPRRPGPXPLLPSSPPSPFRFPHFPRAPPLLLPAPSPPPPPPDSPPAFPPPVGSPPRRRARLAVVARR

SEQ ID NO: 145884 - protein, 121 aa, Oryza sativa
  Clone ID: PAT_MRT4530_46562C.1.pep
VFVGAGGSWEGRATNDERADKHSKDEIEESRDTMDTDATADDDIDHVNEDNDSDVPKCIPMHNMRVKTILNCQDLSKAYYLTDLPINTESEARRTISRHKQARENNGTWKCTLQLLGKIHH

SEQ ID NO: 145885 - protein, 360 aa, Oryza sativa
  Clone ID: PAT_MRT4530_46563C.1.pep
MALLLLRRGGGFAAATVLAVVVVALVLSCGGGAEAAVRDLRVGYYAETCPDAEAVVRDTMARARAHEARSVASVMRLQFHDCFVNGCDGSVLMDATPTMAGEKEALSNINSLRSFDVVDEIKEALEERCPGVVSCADIIVMAARDAVALTGGPFWDVRLGREDSLTASQEDSDNIMPSPRANATTLIKLFAGYNLTVTDLVALSGSHSIGEARCFSIVFRLYNQSGSGRPDPNMDPAYRAGLDSLCPRGGDENVTGGMDATPLVFDNQYFKDLVRLRGFLNSDQTLFSDNAGTRLAVRKFGEDQGAFFRAFVEGMIKMGELQNPRKGEIRRNCRVANAPAPPPVEAEVAATSKAVVLVDF

SEQ ID NO: 145886 - protein, 156 aa, Oryza sativa
  Clone ID: PAT_MRT4530_46564C.1.pep
PLPLPLTMWAKKKRKRVPRREGITYGPIDERDRKRFDYLNDKIWKNDIICVNMLWLKRAPYFRFCRLFRDRGLLVDTIYMSVEEQVAMFLHTIGHNVRNKVVGTNFDRSGETVSRYFHVVLRAIGDMRKELIRSPSTTTPSKILGNPRWDPYFKNC

SEQ ID NO: 145887 - protein, 335 aa, Oryza sativa
  Clone ID: PAT_MRT4530_46565C.1.pep
MPSATDPPAALPLTLDLDDFKGDFSFDALFGTLVDELLPEFRGDDAPGAPPPPPPVLGAAPPVFPAVDELLGLFKHSCKELVDLRRQIDKRLQNLKKEVATQDAKHRKTLGELEKGVDGLFDSFARLDSRISSVGQTAAKIGDHLQSAESQRETASQTIDLIKYLMEFNSTPGDLMELSPLFSDDSRVAEAASIALILRSFAEEDVGRHGVPSAVGSANASRGLEVAVANLQEYCNELENRLLARFDTASQRREMSTMAECAKILSQLCRGTSAMQHYVATRPMFIDVDIMSIDIQVVLGEEGPQADHICIADGLSVLYKEIADTVRREATTIMG

SEQ ID NO: 145888 - protein, 133 aa, Oryza sativa
  Clone ID: PAT_MRT4530_46566C.1.pep
MPSATDPPAALPLTLDLDDFKVRTTRPRPSLLRFGAAAAASEGDFSFDALFGTLVDELLPEFRGDDAPGAPPPPPPVLGAAPPVFPAVDELLGLFKHSCKELVDLRRQIDKRLQNLKKEVATQDAKHRKTLGE

SEQ ID NO: 145889 - protein, 57 aa, Oryza sativa
  Clone ID: PAT_MRT4530_46567C.1.pep
MGQSLPAIMVDGRRRRRRPDKAEVVEWAVGLGPMGIWSGHQKMGIGPILKHNGPRRP

SEQ ID NO: 145890 - protein, 706 aa, Oryza sativa
  Clone ID: PAT_MRT4530_46568C.1.pep
MSTCKRKTVDDVLRWFPRTCTRWKAPASADLTVRRYAELESPKRPAIGPSGLGSATRPPDDMLGVAVTVARRRRKLEGPRRLPPDVPGSPSRRPRAADLRSPLDRPSLTCVVAVVIIVHLFIRLELEVLSGRSRDLYGHQEGSSSRTRDVPRGSGGITYFIGRIVVPRQYKPQCVSIGPYHRNMPLRGNVEKKECLNDILRKEAQRRSGDLSSSEIKSEWMNELSRYVDNSPECYYDFNSLNKNEKHMTTEDFLSMLLEDGCYILHKFVVRQDRTAAVGGGGGSGRYREDIDVNVQRDIIYLAENQIPFFILDKINGIIGWSVTGKPLVEVFCSYIEREVLNWYGYAIGQRWNVTPEPIHLLHLLHILLIGCQKPRALTHTHQVATGAAVPTEPHAARSRIEASSANITRQNETAIEMVPVITDASTTQHEQTAAGTRAAHSHGEASSGNHPQQDETAIDVITGASATEHRNEKPPEKKGVRRFLRWRRAKQYEKARVDLTGVDLISIAEGPGGEACGALSILDVKLIGRCGGIRLEFPSLYVDGETWCMLGNLIGLEQSNPDMIPQRVTAYCVLMSQLACTKEDVELLARRRVTDHLMRNDEDCATKFAALCDGVNFNLDDPSRNYLQKECVALDQRYRSRPSQWTAWMLREHCRNPCVAVASVLAIIAIAFGVLQAVYTVLKLVRKGVTDVVLAWSSSIRIEKT

SEQ ID NO: 145891 - protein, 61 aa, Oryza sativa
  Clone ID: PAT_MRT4530_46569C.1.pep
MGKVRASGAYAPARRPPMLRRVSADYWASSAASRAHRTLVSVSSPPNYPRTSTTTTATKTK

SEQ ID NO: 145892 - protein, 47 aa, Oryza sativa
  Clone ID: PAT_MRT4530_4656C.1.pep
MRTHLSTTLLKLEACWAGPGSAEPWRCPVSAGYTVMIGFRKELDNPG

SEQ ID NO: 145893 - protein, 228 aa, Oryza sativa
  unsure (1)..(228): unsure at all Xaa locations
  Clone ID: PAT_MRT4530_46570C.1.pep
MGPRTCGVPDWRAMVKNDQSVTGLTPVTSDWTDNRAPMSHLPPAEWRAVPRVRRGTALAPLKEKLWFSFEAKARVEFRSRFWTIGSIPRFVHRLLSSNSGGLPFFSGAGDTPTPAEGWPWAAEDRRWAVDSGGRRGGGAGGGGSGXRGAAGDGEDGGAGAPHRRHLKERRGGGXGRGLAGAVDPFRPAGEAGGGAVGRWRRWWRGIMRVVAACDLNRGRRRGVRVKMD

SEQ ID NO: 145894 - protein, 124 aa, Oryza sativa
  Clone ID: PAT_MRT4530_46571C.1.pep
MGLNGKWRKAMPYMAMVFLQFGFAGLFLISVASLRQGMSHYVLVVYRNAVAAVVMAPFALWFERKTRPKMTLSVFFKIMALGLLEPVLDQNFFYMGAKNTSASFSSALTNILPAVTFVNAIILR

SEQ ID NO: 145895 - protein, 70 aa, Oryza sativa
  Clone ID: PAT_MRT4530_46572C.1.pep
LIHSRSPMTNEMAERGGDQKPISCLKAQELLFNLHTANCEPYSVLGSPNSNLQRLQVLFTVDPYLIVIIA

SEQ ID NO: 145896 - protein, 50 aa, Oryza sativa
  unsure (1)..(50): unsure at all Xaa locations
  Clone ID: PAT_MRT4530_46573C.1.pep
LIHNTIVFIDXRFRTLLQKYHTYRYQISTLYSNTTNMPYHAEPHEYCSFY

SEQ ID NO: 145897 - protein, 88 aa, Oryza sativa
  unsure (1)..(88): unsure at all Xaa locations
  Clone ID: PAT_MRT4530_46574C.1.pep
GVGSTKGNLSRRVRVQGGCGESFFLVRQGLVSTHGYXNMYTRGLCNLSISINTXSAHHHLLXFNFILSSGGTWHPTWGCIGVQSPAKG

SEQ ID NO: 145898 - protein, 81 aa, Oryza sativa
  Clone ID: PAT_MRT4530_46575C.1.pep
SSGLPRSRPSSPRRTSHHRFFVRGLDTQPMFVLSAPVLPGGLRIWISCASCVAARSSAASCIRVVCPLICFGNTPPLNKTQ

SEQ ID NO: 145899 - protein, 336 aa, Oryza sativa
  unsure (1)..(336): unsure at all Xaa locations
  Clone ID: PAT_MRT4530_46576C.1.pep
MEPRVRRFGARHDDERRNGTSKTVPELSTVGSKSTVGRCTALQRVALVKPHRITHPMRAKLAVPVPSPAPPRPPSVTFRCLRPRTPPTRAPATPARALGNGGGGGGGGSPLGRAWPGVAAALFGAGFVLGPLLDGIHSRVGLQLYHNGAVDVGPLHTHILLLNRGRRAGAXVPPLLGAFYSTVGMLQLFLDERVSPPAAAAGGSKATGSPQKTAASLVFVHVHAASAEMYRAGVPSNVEAYVLFAGAELAWLLLDGTWLGFAVACLVGTACPLAEIPLIKLFDCWSYPNADVQLLGERPPLGIVSWTTTCYFVYTPFLANLARWVKAELAVDDAAR

SEQ ID NO: 145900 - protein, 90 aa, Oryza sativa
  unsure (1)..(90): unsure at all Xaa locations
  Clone ID: PAT_MRT4530_46577C.1.pep
AQPTXXXWPGPGARGAQGRLVLLGXAVKTYNITGYXRSAAPRPHRVPGVGWFLGDCMIKIIDTXFLXPNTXISGFIDVCXINHXLNNYFP

SEQ ID NO: 145901 - protein, 71 aa, Oryza sativa
  Clone ID: PAT_MRT4530_46578C.1.pep
MPGEVSTPAAANRVLVGITKTLAIAVTTSSWLGIQLKSERNNRSTHFRQRRAIAPKASDWDQEELPAGNTM

SEQ ID NO: 145902 - protein, 75 aa, Oryza sativa
  Clone ID: PAT_MRT4530_46579C.1.pep
HLITCITLPQPCFHGLACSHFAGRYYGISFYFLFLWQLICYSSPGCLLPAHESSSQFIRLTDSGIPGSMLISHSL

SEQ ID NO: 145903 - protein, 163 aa, Oryza sativa
  unsure (1)..(163): unsure at all Xaa locations
  Clone ID: PAT_MRT4530_4657C.1.pep
KGLAGWWRCRRKLRDDEAGRRRWRVLXTTRLGGGDGDEPRPACGVLGSGPPLAESGTSTGGGEPMRGXRNGGGQRPSVPTRRRGRAAATTGFSGAASSASTAAPAPAAADLAGXCRPAAARLLPVVAGELLGVVGVACGVGFRCSISLFVGHVVGLLQLGSCV

SEQ ID NO: 145904 - protein, 275 aa, Oryza sativa
  Clone ID: PAT_MRT4530_46580C.1.pep
MGSTRLLVLLAAASLLLATAVPAARAQEETDHEEEFTYISGDEKGPEHWGKLKPEWAQCGAGEMQSPIDLSHERVKLVRDLGYLDDSYRAAEASIVNRGHDIMVRFDGDAGSVVINGTAYYLRQLHWHSPTEHSVDGRRYDMELHMVHESAEKKAAVIGLLYEVGRPDRFLQKMEPYLKMIADKEDREEKVGMIDPRGARGRASVYYRYMGSLTTPPCTQGVVWTIVKRVRTVSRYQLDLLREAVHDEMENNARPLQAVNNRDISIFRPYPHKRY

SEQ ID NO: 145905 - protein, 266 aa, Oryza sativa
  Clone ID: PAT_MRT4530_46581C.1.pep
MGQANSAQGDRLGISYSYCAGQTPANSAQVETLAGISYPAGQTPANAAQVEALGVSYPAGQTPEENLAKALARWREKLRAPGRAGLPPADYSYIKIGDVCDESAAVLSRLRELGASEPACVYYGDVTNAQADLSLGRLSLSGGAAARHIAESFTDDELDGVLDDGYDGDDGLEVPVFDEEGRRYDFRCGYNDDGFTGQYQLVGAGGDYQRLMANNNVVRDVAELGKGVSFLVFTFRSAALLTKHKWEEDHEASGALCMVILFFVSL

SEQ ID NO: 145906 - protein, 962 aa, Oryza sativa
  Clone ID: PAT_MRT4530_46582C.1.pep
MDPRGKGSITSHASDKSSRSGSFDFEHDQDPDRDRRHDDAHRREVVVKIEPEAHVPVDLHAGGSHAANAPGAGGVAVGGVVPGSGSVSSASSSPGGGGNGESFSFKNRPPQSPASPAMSVGGEGSDDPPTRLIGSFLRKQAAAGGELALDPDLEMEEMRRPPRAPTSMNASRELRVSFQDPHKRFSPSTSSASTSSYAGDSRNQACSTAEAAEVIRCTSMSTGNNLLARSKTRSRLMDPPPPTISHPTEAERNDRKSFVGKGPPKSGQLRSGLIGKSGLIGLSGPIGKPGAFDDDDDDPFVDEGLAADLKRDTVDCLLILEWVGLIVIMGALVCSLSIRSLANKKLSGLHLWKWELLVFVLICGRLVSGWVIRICVFFVERNFLLRKKVLYFVYGVRRAVRNVLWLGLALISWHLLFDKDAKRDSHTLVLPYVTKVLCCLLVATVIRLVKTLLLKVLASSFHVSTYFDRIQDALFNQYVIETLSGPPLVDESRMLAEVQRLQSAGINIPSELEATAMPSKPPMPAKSGRLTVNPSKRGGAGGGANKQLQKQKSDRHCDDGITIDQLHRLSQKNISAWSMKRLMKIVRYGALTTMDEQIKHATGEDELATQIHSEYEAKVAAKRIFHNVAKPHSKHIYLSDLMRFMRQEEALKAMDLFEGAQEHNRVSKRSLKNWVVSAFRERKALALTLNDTKTAVNKLHQMANVVVVVIVIALWLSILGIATSRFFVFISSQLLVAVFMFGNTLKTIFEAIVFLFVMHPFDVGDRCEVDGMQVTILFIVLSALYDCFTLSDLVLNCCEIQVVVEEMNIMTTIFLRYDNLKVYYPNSQLAIQPIMNYYRSPDMGDAVDFSVHVATPVEKLALMKERLMHYLDNKKEHWYPGSMVVLRDVDDTNKLKVSIWCRHTINFQDMGMRFERRELLLQEMIKILKDLDIEYRMLPLDINVRNAPMIQSLRMPSTWITY

SEQ ID NO: 145907 - protein, 65 aa, Oryza sativa
  unsure (1)..(65): unsure at all Xaa locations
  Clone ID: PAT_MRT4530_46583C.1.pep
MAEKLLEDMVTVTRLQPDGKKDDRVSGIEARRDQLDMHMQXDVATDVYSMHPGDRSTMDLAPTWD

SEQ ID NO: 145908 - protein, 818 aa, Oryza sativa
  Clone ID: PAT_MRT4530_46584C.1.pep
MTQIINVPRSTLRSFWSSGLFGNNVNAKIFQSESNTPLESGVVLFWPGSFAVPGKSSCLACPKKKNKGQMNMAYLPVLIYLLLISFCKCDDQLTQVNRLISPSGKLVSKSGVFALGFFSPATSNQSLFLGIWYNNIPERTYVWVANRDNPITTPSSAMLAISNSSDLVLSDSKGRTVWTTMANVTGGDGAYAVLLDSGNLVLRLSNNATIWQSFDHPTDTILSNMKILLRYKEQVGMRLVAWKGLDDPTTGDFSCSGDPSSDLQVFVWHGTKPYYRSIVLDSVWVSGKAYGSSTSFMYQTYVNTQDEFYVIYTTSDGSPYMRIMLDYTGTFRLLSWNVNSSSWAIYSQRPAAIGDCDPYGSCGPFGYCDFTSVIPRCQCPDGFEPNGSNSSSGCRRKQQLRCGEGNHFMTMPGMKLPDKFFYVQDRSFEECAAECSRNCSCTAYAYTNLTITGSPGTTASQSRCLLWVGELVDMARNNLGDNLYLRLADSPGHKKSRYVVKVVVPIIACVLMLTCIYLVWKWISKGEKRNNENQNRAMLGNFRASHEVYEQNQEFPCINFEDVVTATNNFSDSNMLGEGGFGKVYKGKLGGGKEVAVKRLSTGSTQGLEHFTNEVVLIAKLQHKNLVRLLGCCIHGDDKLLIYEYLPNKSLDHFLFDPASKFILDWPTRFKIIKGVARGLLYLHQDSRLTIIHRDLKTSNILLDADMSPKISDFGMARIFGGNQQEANTNRVVGTYGYMSPEYAMDGVFSVKSDIYSFGVILLEIVSGLKISLPQLMDFPNLLAYAWRLWKDDKTMDLVDSSIAESCSKNEVLQNNSR

SEQ ID NO: 145909 - protein, 48 aa, Oryza sativa
  Clone ID: PAT_MRT4530_46585C.1.pep
IKANNSVTLTSSPMQENILFLANESWQKKSTTFPKYFFQQTYIYMMQI

SEQ ID NO: 145910 - protein, 832 aa, Oryza sativa
  Clone ID: PAT_MRT4530_46586C.1.pep
MTQIINVPRSTLRSFWSSGLFGNNVNAKIFQSESNTPLESGGSIVLVGSLVLLVTVVLFWPGSFAVPGKSSCLACPKKKNKGQMNMAYLPVLIYLLLISFCKCDDQLTQVNRLISPSGKLVSKSGVFALGFFSPATSNQSLFLGIWYNNIPERTYVWVANRDNPITTPSSAMLAISNSSDLVLSDSKGRTVWTTMANVTGGDGAYAVLLDSGNLVLRLSNNVTIWQSFDHPTDTILSNMKILLRYKEQVGMRLVAWKGLDDPTTGDFSCSGDPSSDLQVFVWHGTKPYYRSIVLDSVWVSGKAYGSSTSFMYQTYVNTQDEFYVIYTTSDGSPYMRIMLDYTGTFRLLSWNVNSSSWAIYSQRPAAIGDCDPYGSCGPFGYCDFTSVIPRCQCPDGFEPNGSNSSSGCRRKQQLRCGEGNHFMTMPGMKLPDKFFYVQDRSFEECAAECSRNCSCTAYAYTNLTITGSPGTTASQSRCLLWVGELVDMARNNLGDNLYLRLADSPGHKKSRYVVKVVVPIIACVLMLTCIYLVWKWISKGEKRNNENQNRAMLGNFRASHEVYEQNQEFPCINFEDVVTATNNFSDSNMLGEGGFGKVYKGKLGGGKEIAVKRLSTGSTQGLEHFTNEVVLIAKLQHKNLVRLLGCCIHGDEKLLIYEYLPNKSLDHFLFDPASKFILDWPTRFKIIKGVARGLLYLHQDSRLTIIHRDLKTSNILLDADMSPKISDFGMARIFGGNQQEANTNRVVGTYGYMSPEYAMDGVFSVKSDIYSFGVILLEIVSGLKISLPQLMDFPNLLAYAWRLWKDDKTMDLVDSSIAESCSKNEVLQNNSR

SEQ ID NO: 145911 - protein, 910 aa, Oryza sativa
  Clone ID: PAT_MRT4530_46587C.1.pep
MRQSGGGGGLPSAKFGRGGGRAAAAEASAEGGGTSCVEAAPAAMASRKMDRSWVHSTLFSTQYVNGVNEFMDFIKEKYAEDDEILCPCTRCLNQKYLHQPTVKKHILMNGMDCTYTRWVHHGEDISVHVNEVPASVSVFDTDEGSIGMAQTDNNVGDRLDSLLSDLQTARGHGSHDSEPENGNNDGNSQTSFLKLLVKEAKRQLYPGCAKFSKFSFVDYSDLDNCPVCGLSRWKDPQRKKIPQKVLRHFPLVPRLQRLFVTKEGSEQAQWHKLKRQPSEKEMSHPVDGEAWQDFDREYPDFAKEARNLRLGLATDGFNPFGNFNTKYSMWPVFVVPYNLPPWACMDQSNLMMALLIPGPCSPGKDFDLFLQPLVEELIELWKGVHTYDAIIDKEFKLRAAVLWCIHDYPALATLSGRTTKGYFACIHCDKNPLSYALRNKIAYIGHYRFLPRGHRLRRNNEYSGLHGTNDPPGKFTKAELLAELEKVRHVKPGIKQKESRKRKRSALDSDKTANVKIWSRRVCLWDLEYWKKLKKNICESLVGTILDIHGKTKNTVNARLDLSDLRIKENLQFRDEGDTSEMPRARYTLSKEQKVAFCNFLREVKFPDGYASNISRCLNADGSKVQGLKTHDCHILLQTILPAALRGFVDKDIYEAVAELGNFFKRLCSKTLNKDVLVQMNEEIIVLLCKLEKIFPPALFDVMMHLPVHLVEEALLRGPVQYGWMYPIERRLYTLKRYVRNGARPRRMFRDELERAEVSNIVKNNSTRNAPKDDGFYKSINVGSLWYKDDSLILATQARKVFYLPDTRFVKTSVPFNGPAYQEEYCCDDQEEGIIRTVVDEPTTEMPLNRDDEPGQMFEASEISRLRKERPTLVCQSECEDGDEVFDDTLEEYCSEEDGDALLEVDSDDE

SEQ ID NO: 145912 - protein, 66 aa, Oryza sativa
  unsure (1)..(66): unsure at all Xaa locations
  Clone ID: PAT_MRT4530_46588C.1.pep
LKTTNTNGVGTLSRRRLSPRVGDRFXRSSTSAVYCDPPVHPXTEAYWGNVFPIGVRRGSYQGKSVA

SEQ ID NO: 145913 - protein, 1072 aa, Oryza sativa
  Clone ID: PAT_MRT4530_46589C.1.pep
MHVQMDRSWVHSTLFSTQYVNGVNEFMDFIKEKYAEDDEILCPCTRCLNQKYLHQPTVKKHILMNGMDCTYTRWVHHGEDISVHVNEVPASVSVFDTDEGSIGMAQTDNNVGDRLDSLLSDLQTARGHGSHDSEPENGNNDGNSQTSFLKLLVKEAKRQLYPGCAKFSKFSFVDYSDLDNCPVCGLSRWKDPQRKKIPQKVLRHFPLVPRLQRLFVTKEGSEQAQWHKLKRQPSEKEMSHPVDGEAWQDFDREYPDFAKEARNLRLGLATDGFNPFGNFNTKYSMWPVFVVPYNLPPWACMDQSNLMMALLIPGPCSPGKDFDLFLQPLVEELIELWKGVHTYDAIIDKEFKLRAAVLWCIHDYPALATLSGRTTKGYFACIHCDKNPLSYALRNKIAYIGHYRFLPRGHRLRRNNEYSGLHGTNDPPGKFTKAELLAELEKVRHVKPGIKQKESRKRKRSALDRHKTANVKIWSRRVCLWDLEYWKNLKVRHNLDVMHIEKNICESLVGTILDIHGKTKDTVNARLDLSDLRIKENLQFRDEGDTSEMPRARYTLSKEQKVAFCNFLREVKFPDGYASNISRCLNADGSKVQGLKTHDCHILLQTILPAALRGFVDKDIYEAVAELGNFFKRLCSKTLNKDVLVQMNEEIIVLLCKLEKIFPPALFDVMMHLPVHLVEEALLRGPVQYGWMYPIERRLYTLKRYVRNGARPEGSIAEAYIADECLTFCSKYMDDVETRFNREARNVGFSNEEAYGADVFGHGVRFTSAAELVYDDGGLDQMVWYVLNNCSQVEEYIKMFRDELEREEVSNIEKTIRQGFQTWFRNLMLRKNTDEEMVDDDIFSLACGPDLRIKKYKSCIVNGVRFNTLDRDKNKKTQNSGVISLGTHNSELIEFYGNIKEIIQIDYNGDDRSVVLFKCDWYKLDGRNALKDDGFYKSINVGSLWYKDDSLILATQARKVFYLPDTRFGNNWQVVQTFDHRHLYNEYCCDDQEEGIIRTVVDEPTTEMPLNRDDEPGQMFEASEISRLRKERPTLVCQSECEDGDEVFDDTLEEYCSEEDGDALLEVDSDDE

SEQ ID NO: 145914 - protein, 360 aa, Oryza sativa
  Clone ID: PAT_MRT4530_4658C.1.pep
MASGALLLLASSGIGEGGEVGAAVEEASKRRGRGIKWQAAASSPEFIYGPCTNLLMESGGCQHHQERQAATAGESAKKLCRVVRAVYLVLVKGLGKHQPKLAALGVHLHQMMSSRRHGGGGHDHGLDDLREHPALLTYLSSTMSCRSMDPAAAVHPYPRGRGAHGAGRRRSGGGISSASGGVSGLSSMSCRSMDPSAAVSQYQYRPREVEFSCSSTPLHRRRRAQRRSQLRLQQHGQWHDRSSAADPYGSAATVSRLFELMDVKEEAAAEAMTTDIDDEDGDVVAWPAVVVPAPRQVRITDSPFPAWEADGDDDEEGRLGVVDRRADEFIMWFHEQLRMQQQQRAAAAAAKERSTYYFVR

SEQ ID NO: 145915 - protein, 91 aa, Oryza sativa
  Clone ID: PAT_MRT4530_46590C.1.pep
ARGHYLNVAFLCVMFLAGTECESIIAELCQSHFTKLRFNMIQTETRFTSVANYYEFYCIHPKEKLVSSFQFAVLQYTAHIWTNNSFHICAV

SEQ ID NO: 145916 - protein, 535 aa, Oryza sativa
  Clone ID: PAT_MRT4530_46591C.1.pep
MAILNHSDAAFPVAATTPLLGRRPLDAGEFRRQGRQVVDFIADYYAGINDYPVRPAVAPGFLAGKLPATAPSTPEPDALTAGLRDVRELMLPGLTHWQSPRHFAHFSATASNVGALGEALAAGLNVNPFTWEASPAATELEVVVTDWLGKALHLPERLLFAGGGGGTLLGTSCEAMLCTIVAARDEKLAEIGEERIGDLVVYCSDQTHFSFQKAARIAGIRRGNCREIPTCRESGFVLTATALQAAVAADEAAGRVPLFLCATVGTTPTAAVDPLRELCAAVEGRGVWVHVDAAYAGAACVCPEFRHAIAGAEAVDSFSTNPHKWLLANMDCCALWVARPAALVAALGTDDDVILKDAAAAARPARGDHHHHAAVDYKDWQVALSRRFRALKLWLVLRCHGVDGLRAVVRSHVRMAAALERMLVGGDELTASNELNRRLLEAVNATGRAYMSSAVVGGMYVLRCAVGNSLTEEHHVREAWSVVQGQAAAVLATAGAAADTARTKDHAAGDDHGADQPHAMTTTTTMGCRSGPWEL

SEQ ID NO: 145917 - protein, 41 aa, Oryza sativa
  Clone ID: PAT_MRT4530_46592C.1.pep
SLCGAVRMVVFDYLNRLFRPVMGVLRTCGNKDPPIWLCCIV

SEQ ID NO: 145918 - protein, 145 aa, Oryza sativa
  Clone ID: PAT_MRT4530_46593C.1.pep
MAGGKPRGLNAARKLRTNRKDQKWADLAYKKRALGTAYKSSPFGGSSHAKGIVLEKVGVEAKQPNSAIRKCVRVQLIKNGKKVTAFVPNDGCLNFVDENDEVLLAGFGRKGKAKGDIPGVRFKVVKVSGVGLLALWKERKEKPRS

SEQ ID NO: 145919 - protein, 96 aa, Oryza sativa
  unsure (1)..(96): unsure at all Xaa locations
  Clone ID: PAT_MRT4530_46594C.1.pep
TFETPTWKYVLLITKKCTXVMSNHSISIIAHQTNPVFINKCSSIHDTVVPKTHYYTHGHLYHFTCGTNYTLHYKLGTTHHLRRDVDYQFSXPWSTI

SEQ ID NO: 145920 - protein, 144 aa, Oryza sativa
  Clone ID: PAT_MRT4530_46595C.1.pep
LSERQDHTAQLPMSHTKPSLHSNNPFSIVNEHGRMLPLDGSEKKRKGGVACSIVSLCPIFSSANSRPRLMTPVLRQCCTTVADAASWTGSPTHPEKERAGAGERNRRSLSLSLPLPLPVCRPPTRLCLSLSLACVSNATRSDER

SEQ ID NO: 145921 - protein, 148 aa, Oryza sativa
  Clone ID: PAT_MRT4530_46596C.1.pep
TLHDYYLAMMAAEPSPAAASAVEDLETLPLDSSYSSAPATDPLLRPPASPSAASAAAGGDHDPFVIDDDFLVDEEDDDDVGPPAPTAIPLVAAAARAPEFARIAVSDPKKHAEPTSGAAGVIPGSGSYFSYLITTRVGEAEVRVRRRF

SEQ ID NO: 145922 - protein, 86 aa, Oryza sativa
  Clone ID: PAT_MRT4530_46597C.1.pep
SNFQLIHRAPMTWYGERSMWDFLRKKKRSFVRYFTKDCNLLCSVRLIREKALHHLGDFLNFSCPSNTNCFYSLSCCDHKWFWLKAA

SEQ ID NO: 145923 - protein, 149 aa, Oryza sativa
  Clone ID: PAT_MRT4530_46598C.1.pep
MPEASLSLLPPLRHRLPATPHPQPLAHAATRPHEPPPPPPPPLDEKLLLLLPPSPASPHHWQRGREREWVPVRDGWLALALAGKPCRCRCRRGGGVVMAACAWGMQRNATKPPASQALATERTGGRKRPWGKNGVPPQVSLSRAPDDDW

SEQ ID NO: 145924 - protein, 65 aa, Oryza sativa
  Clone ID: PAT_MRT4530_46599C.1.pep
SQHLAGVPLFRRTMSDIVTKGSSSDNRTGHWKAPIQIDVRKHKTRIHTSTFTITSREPSGLAREH

SEQ ID NO: 145925 - protein, 105 aa, Oryza sativa
  Clone ID: PAT_MRT4530_4659C.1.pep
MVRKAKVEFDESPPDDFDPKNPYGDPVAMLEYREHLVREKWIQIETAKIIRDRLRWCYRIEGVNHHQKCRHLVDQYLEATRGVGWGKDARPPELHDPKKVVEADE

SEQ ID NO: 145926 - protein, 69 aa, Oryza sativa
  unsure (1)..(69): unsure at all Xaa locations
  Clone ID: PAT_MRT4530_465C.1.pep
PGIILALPILALIVGNLVRSFEMVPPPVRXKLYVIEKGGQFTLHIAKQLRRRLPPLLCMNSTNPFKLWL

SEQ ID NO: 145927 - protein, 130 aa, Oryza sativa
  Clone ID: PAT_MRT4530_46600C.1.pep
MVARSSRSSATSPAPATSAAVCANCHRSRPSSSTASQLACLAWHFALSMDVYISEEYVAKRRAEKRAAAAAAAARMAGGDGEDGKARGGGGGGDSRRTRWTAAWADGSEKGKGSPGHVVGAVASGREDDV

SEQ ID NO: 145928 - protein, 210 aa, Oryza sativa
  Clone ID: PAT_MRT4530_46601C.1.pep
MLGSGLNLVTTVIGFGMSATFIVFVCARLICGRAARADAEADAAEGRVAAARAMAAGPAPFDFDVEFRATDLDRTIEHTRSGLEPFVVAAIPTMKYSYEAFQSKDDAQCSICLGEYNEKEILRIMPKCRHNFHLSCIDVWLQKQTTCPICRISLKDLPSGKPAESPVRSLPQLFSHPESSKRRAFFQQQGSTYTALAQNCKEFVYDRTGF

SEQ ID NO: 145929 - protein, 110 aa, Oryza sativa
  Clone ID: PAT_MRT4530_46602C.1.pep
FGTFLPSVPEGRRPIRGGGRPVPPGHSPVATRRSLERAAACVSACLLVSMFAPHPLAPPRPHLLAAQVARAEDCVRCNDGVSAACWGADGGHGRLALLDLLAGWFGRCWG

SEQ ID NO: 145930 - protein, 89 aa, Oryza sativa
  Clone ID: PAT_MRT4530_46603C.1.pep
TNSLQFCAKAVYVLPCCWKNARRFCNRRYLCCSTEKQNSFINFYRYLASIHPCPQCISCWISMTTSTVSCEAGLLSLPPVRSRWIGSIQ

SEQ ID NO: 145931 - protein, 106 aa, Oryza sativa
  Clone ID: PAT_MRT4530_46604C.1.pep
SAPCCMWQSHQSLSKWQVPLCGCISPCPPPRRWHLLQTVLERCLRWSSSCPSAQLLWTCSTACRMQCQSPSPQGEADRSPANVIIQSACRPCGQGAFIQPPPRNGI

SEQ ID NO: 145932 - protein, 47 aa, Oryza sativa
  Clone ID: PAT_MRT4530_46605C.1.pep
CTVRERRTARYDPAAGKEIPMKKPNTAADNAVKIELAAFIFDLLLLS

SEQ ID NO: 145933 - protein, 34 aa, Oryza sativa
  Clone ID: PAT_MRT4530_46606C.1.pep
HYSHTTRSSPRRYKRLHGGVYLGVVTDTGQTQPS

SEQ ID NO: 145934 - protein, 85 aa, Oryza sativa
  unsure (1)..(85): unsure at all Xaa locations
  Clone ID: PAT_MRT4530_46607C.1.pep
RVFSPSPAPCLTLSNFFWGRLPKKPHLFFKGKVPHKFPFGNPFFFWVKSGKGPNQARLKKKFCRENRVAFXKKKKKKKKKKKKKK

SEQ ID NO: 145935 - protein, 77 aa, Oryza sativa
  Clone ID: PAT_MRT4530_46608C.1.pep
CEEWQLAIDRIPDKVASEGIKTLLTVIHAVVVQQAEEQKQKKRSESAFKELEKKAEELRSLEFKYGPYSGAEGYGDM

SEQ ID NO: 145936 - protein, 163 aa, Oryza sativa
  Clone ID: PAT_MRT4530_46609C.1.pep
PIGLGSRALHGPAPHHDRPPAPQSIASPRPPPSTTPVSSPAAGADLHPASRGGAGVLLLSPPHHRSPAMYIRVKRNKTTYFIQCDPTETTLSIKQKLHSLVDQPPGNQQLILLATTEVVLDDSKTLADQKVENDAVVALTLRKDDNVFEEVSIARPEDFMSSS

SEQ ID NO: 145937 - protein, 157 aa, Oryza sativa
  Clone ID: PAT_MRT4530_4660C.1.pep
MGMPPVHGEVVWQLGGKTGLSTISVATVYLVLDFGAVTGLDVVVKLGVEAELSVLLGNNTAVEVVVVARLDVVVGLAGTSMVARLGAVVWLGAVGVLVATTALGRLVVAGIARVASLALALSFLNLAERTTAMAAASLPDAAAVAAQRDGSPVISIA

SEQ ID NO: 145938 - protein, 218 aa, Oryza sativa
  unsure (1)..(218): unsure at all Xaa locations
  Clone ID: PAT_MRT4530_46610C.1.pep
IMSNENGNMPRAKISLTKTTVGSENSAPKIAAFSSRGPSYIYPEVLKPDIAAPGVAILAASPNTPEFKGVPYHFQSGTSMACPHVSGIIAVLKSLHPKWSPAALKSAIMTTANTFDNNGMPIQANGRVPKIADPFDYGAGFVNPIMAXADPGLIYDINPSDYLKFFNCMGGLGSQANCTXTKGSVIDLNLPSIAIPNLRTSQTAVRTVTNVGDQQEVV

SEQ ID NO: 145939 - protein, 46 aa, Oryza sativa
  Clone ID: PAT_MRT4530_46611C.1.pep
FKFEDLEDGNNGKSKAPTKAAWAKFLARGFSLLFWAPNKFSFSFTG

SEQ ID NO: 145940 - protein, 129 aa, Oryza sativa
  Clone ID: PAT_MRT4530_46612C.1.pep
NSSASARARAGRRSRRCPCSRTHRRRRRRLPLPSSRHQRRLPSSSPPPPLPPPLPSRPRPQQPPPSSPPPPPDPGMRRWTRTRGGRGRGQGGPGGGKARARRRGGGGSSPPWPGSSPRSPVLSLLASLL

SEQ ID NO: 145941 - protein, 318 aa, Oryza sativa
  Clone ID: PAT_MRT4530_46613C.1.pep
MDFPGDAEDFALEFIREHLLGGDAPVLPPAAVPAAAAYLPTSTMFLPQQQRGYAGLTPQEYVVDSAPAADQAAFRDDQPDPAADVMIMFGGERFPAVKPSSSSSPSLTVTVPPSSFGSWAPAAVPAVAATAAAVEDFRKYRGVRQRPWGKFAAEIRDPKRRGSRVWLGTYDTPVEAARAYDRAAFRMRGAKAILNFPNEVGTRGAELWATPPPTNKRKRQPEDDTAAADDVEVIGVANKAVKTEAPTSAYSSSSLSSMSRDTTATTSSAGTSTGSSEPTSFPVVTPSSWSWDQYWDGLPPLSPLSPHPALGFPQLTVS

SEQ ID NO: 145942 - protein, 66 aa, Oryza sativa
  Clone ID: PAT_MRT4530_46614C.1.pep
SHHLLPYDICFLTNESTSYLATPQSHTQGGGELSSDQFLGSYDNLFSCRHHLSHWGCHKRRTPGGR

SEQ ID NO: 145943 - protein, 43 aa, Oryza sativa
  Clone ID: PAT_MRT4530_46615C.1.pep
FYPKCHLGYHGQDDYRRVGITSRGYQNCLWLNSRRTHAAYTIC

SEQ ID NO: 145944 - protein, 95 aa, Oryza sativa
  Clone ID: PAT_MRT4530_46616C.1.pep
MGRRGDEENEERRKRKRWGEEEEEIRYTTKGLRPDLPKPKSLGNKLRPEASGEGRRENRMGWKRPRRMGTRAKAREIIQIDENAPGPYALNIALE

SEQ ID NO: 145945 - protein, 117 aa, Oryza sativa
  Clone ID: PAT_MRT4530_46617C.1.pep
MTAAAGLALDGGELLGLPSSRVPPPPRPRLPRASWLVRERRGSDESRRRTVWQLARSSGDGSSGAARGWPWPWLCHRHRGRRRAALLPRPATRIWRHGTTSERAALRRHALPVPHDR

SEQ ID NO: 145946 - protein, 44 aa, Oryza sativa
  Clone ID: PAT_MRT4530_46618C.1.pep
MSFDMAWSVEDSTAGDKLWRETYQLIPRKYRLIKVKYQNMIPQR

SEQ ID NO: 145947 - protein, 445 aa, Oryza sativa
  Clone ID: PAT_MRT4530_46619C.1.pep
MEEEEYEIPDLNLDLGVQEVLQDEGDGIPDLNLDPAVQGEDAFQYEDEELPDNQCFGAHEDEHPDPAMQAVELSNGRSAQEICHLNMEPANYGEDDIVFDDDRLYVLQDQSNYADEEDFDVYSPYMDVVFDEDLHTSSDEEDTQQDNIKRRKYLPEAENKAIYGALLASTINGKLVDRDTTTIIATMVDVTRRVVQDIWTKAKKCLAAGVEVDFKSKKPDVATLNAEPRFIDMQNIVHIDEKWFNATMKNKTFYLVFNEDEPVRCVQNKNAIDKVMFLSALAKPRYDEEGNCYFDVKIGIWPFVRKEPAQRSSRNRPKGTLVTKSITVSRETSRAFLITKVIPTIASCWPREDVGKTIWIQQDNARTHILPNDEAFALAVAQVGLDIRIMNQRPNSPNMNVLDLGFFASLQSKTYLKNCSNMDELISNVDEEYNEYNSNLVIQHN

SEQ ID NO: 145948 - protein, 36 aa, Oryza sativa
  Clone ID: PAT_MRT4530_4661C.1.pep
FLCEKKNQYYIGRYDIDWGLLISNKPCTSAVTMLII

SEQ ID NO: 145949 - protein, 92 aa, Oryza sativa
  unsure (1)..(92): unsure at all Xaa locations
  Clone ID: PAT_MRT4530_46620C.1.pep
DLACTPSTFLGAPVPRHARRSHLGAHPSVSXCAPLNRSVVVTIAHAHSVTRVHRRQXKQNRIXSPARVSLLSCVEDLTRPNTLAYVHTSPSV

SEQ ID NO: 145950 - protein, 576 aa, Oryza sativa
  Clone ID: PAT_MRT4530_46621C.1.pep
MEEEEYEIPDLNLDPGVQEVLQDEGDGIPDLNLVPAVQGEDAFQYEDEELPDNQCFAAHEDGHPGPAMQAVELSNGRSAQEICHLNMEPANSGAVDLVFDDDEFYVLQDQSNYADEEDFDVYSPYMDVVFDEDLHTSSDEEDTQQDNIKRRKYLPEAEKKAIYGALLASTINGKLADRDTTEIIAAMFDVTRRVVQDIWTKAKKCLAAGVEVDFKSKKPGNCGQKRSDIDLDQVLALPLNSRCSIRSLASALNASKSQVHRLVKEGALRRHSNSIKPYLKEANKKQRLEFCVSMLDAATLNAEPRFIDMQNIVHIDEKWFNATMKNKTFYLVFNEDEPVRCVQNKNAIDKVMFLSTLAKPRYDEEGNCYFDGKIGIWPFVRKEPAQRSSRNRPKGTLVTKSIMVSRETSRAFLITKVIPAIASCWPREDVGKTIWIQQDNALTHILPNDEAFALAVAQVGLDIRIMNQPPNSPDMNVLDLGFFASLQSKTYLKNCSNMDELISNVDEEYNEYNSNLVSRVFLNLQACFIEVMKADGGNGYKIPHMNKDRLERLDMLPTSLTCDIALYNKVMQTLLN

SEQ ID NO: 145951 - protein, 62 aa, Oryza sativa
  Clone ID: PAT_MRT4530_46622C.1.pep
FNICFNLLFLDICWLCIDQIQYTLFKGGKKKKSKKPQKKRGRALTGPQTCARAHDVWFLLKC

SEQ ID NO: 145952 - protein, 86 aa, Oryza sativa
  unsure (1)..(86): unsure at all Xaa locations
  Clone ID: PAT_MRT4530_46623C.1.pep
PSAPSXASAAAXCAVPGHXRGPPRPRSSSSRASVTAALRDCRRPPRPMXHHHEPPALHRRCCRDRIWHGRRKEEEEEERLTCGXQC

SEQ ID NO: 145953 - protein, 584 aa, Oryza sativa
  Clone ID: PAT_MRT4530_46624C.1.pep
LVDPPGCRRTSCSATLHSSWTTPLSPLQLNQYQTTPQLSCSERAASSLRGAAARWRQSRRHEGGGEGEEAEAQQREGRGGGCQEPEQGRARQAPRRRQAFSGVPPRPAYLPLRRQVLLLSLVSIPADWNQEQDGSVFKNENFKNGTDSENKSRSERQVAISTENDPPPGKEESLTKSPQTAVSESEVPKPKSKISCDDKSKDEGFPYARPIVCHLSGDVRVSPATSSVTLTMPLQQGEAAARRIRPYARRDDFLLPLVREVAITSAASEGDAPSCNVSHGVPAVIFSIGGYTGNFFHDMADVLVPLYLTTFHFKGKVQLFVANYKQWWIQKYKPVLRRLSHRAVVDFDSDGDVHCFDHVIVGLVRDRDLILGQHPTRNPKGYTMVDFTRFLRHAYGLRRDKPMVLGETSGKKPRMLIISRRRTRKLLNLRQVAAMARELGFEVVVSEAGVGGGSGGVKRFASAVNSCDVLVGVHGAGLTNQAFLPRGGVVVQIVPWGRMEWMATNFYGAPAAAMELRYVEYHVAAEESSLARRYPREHAVFRDPMAIHGQGWKALADIVMTQDVKLNLRRFRPTLLRVLDLLQD

SEQ ID NO: 145954 - protein, 239 aa, Oryza sativa
  Clone ID: PAT_MRT4530_46625C.1.pep
MDGLLVLHLSLDKFLLHYLKKRWLSPRISPSPSKSRRSMAAAAAGGGGAKWSETAMLVIDMQKDFVDPAMRSPMLVDGGQAVVPTVAEAVAVARERGIYVVWVVREHDPSGADVEIFRRRYYSGGKGPTVKGLKGADLADGLVIKEGEYKLVKTRFSAFFATPLDSVLKTSGIKKLVIVGVQTPNCIRQTVFDAVALDYEKVTVIIDATAAARPEIHLSNIRDMKNIGVETPTLEEWRR

SEQ ID NO: 145955 - protein, 139 aa, Oryza sativa
  Clone ID: PAT_MRT4530_46626C.1.pep
MAFHLLVLATWLLSVRIGRRLTLDRFAYRQKAETARPHRSTFRLRTHMRTYMHPNFTIQSINLDDTPCMTRVMTATAGRPTSRSHKSLRFQFIHLRPSAIMQRTIVENNSENLKYHLKSRGRRASKPAYGEEFDQLRNP

SEQ ID NO: 145956 - protein, 635 aa, Oryza sativa
  unsure (1)..(635): unsure at all Xaa locations
  Clone ID: PAT_MRT4530_46627C.1.pep
QLDGVFTTAYWTTTFSNILVLLLSRLVSDDVPCVVQIETTIQKYTVFGFENHXMQIQGFLDVVQLYCYSDLGISDLAKDLSSKXKILRKGXKWSKNLSKFTKLLGHCNLVLNFLXTRIEPERVDQKIDFGSVKKKKXILELFHYKKLYWKKRCTRRWMLYGDENTNFFHSVATERYRQNTIAHIANDDGVFVQSHEAKAFPFWQSSKYRMGITTLPEMAYNLTDLLTRNVNMDRLVTHFLTQETGDXVRRMPIYKTPGPDGFSGGFIKFCXPLNAQDFYILCAHFHAKILYLRSMNSFYITLVPKMSSLETINDSRPISLNXMSQFFDQCKLLAERLPSXIMEVVHAYQXGFIKTRTIQDXLPWAFEYLHQCQXPKREIILLKLDFEKAFDITKHEFIIEIMRHKGFHAKXLSSVQTTFSTTTTTILLSDVLGRWFECKXGVRQGDPLSSLLFVLGVDLLQSIISKSSSXGLLSKSIGNADMDFSIVQYAVDTLLFVKADAREILCLNAVLNTFPXSTGFRVNYHNSSMIPLNVPEDKPGSLADLLGCSIGELPVTXLGLPLGTTKPKVLDMAPMVSRVERRFSSTARFMTYGGRLTHVNSVLXCHPTYYMXPFKLPRIVIEAFHKYRRHCLWIG

SEQ ID NO: 145957 - protein, 49 aa, Oryza sativa
  Clone ID: PAT_MRT4530_46628C.1.pep
MAVTVGKRQSANLLGIEAKSEAEIEFRNRAGIGWSPDRLRLGSAGSESD

SEQ ID NO: 145958 - protein, 138 aa, Oryza sativa
  Clone ID: PAT_MRT4530_46629C.1.pep
MQARVQACVWAMHAPAVHSPPQSHLHLPYPPTPLFLLFAFEYSRPIEEHQGPAWSFCAGKKKGLQEVSWGRRGLKLKRKKKPGRKCRIRWPQAPRQQIWRWDLVGSSAAESSDEHLGVRRWGASRVASLIQDESYEPY

SEQ ID NO: 145959 - protein, 289 aa, Oryza sativa
  Clone ID: PAT_MRT4530_4662C.1.pep
MEITGEPSLCAATAAASGNDAAAIAVVRSARFRKERARASDATRAAERKKRRALHQAARTLAPAHKQAATPIPATTRRPSAVVATSTPTAPSQTTAPSLATILVPATTSAPKPATASSPTKVPALSVNPILSIIGVPSPTTTSSLATTTTSTAVLFPRSTLSSASTPSFTTTSSPVTAPKSSTKYTVATEIVLSPVFPPSCQTTSPCTGGMPISANRNVAFKKEGSSICATTRAAERKKRIVLQRTFVLPNQATTPNPATMPAAVNRADVISLPNTPSPDVMPTIAATG

SEQ ID NO: 145960 - protein, 372 aa, Oryza sativa
  Clone ID: PAT_MRT4530_46630C.1.pep
MDAKKPYFIAIIIQVIYTGLFVVTKAAFNHGTNTFIFIFYRQAAASLLLLPLAIILERKNAPPMSIRLFAKLFLYALLGNTISFNLYNTGLKYTSSTVASAAASSVPVLTFFFAVLLRLEVIRLRRLSGVAKVAGVGLCLGGVLVIALYSGPALSPLNHHRAFGGGAESGSSGAATRARWVTGTLLMLLSNVTWSLWIVLMSPLLNEYPCKMLATALQSLLSAAQSLVLAAAAAARNPAARRLRLDAGLLAVAYSAVAVTGVSYYLQAWCIQKKGPVFLAMSSPLSFVFTIFCSSFFLGEVVHLGSVVGGVLMVAGLYSVLWGKSKEHDTLTVAAGQQEEDAAAPPAAESSSSSDNESKHQQGRFASADQQV

SEQ ID NO: 145961 - protein, 273 aa, Oryza sativa
  Clone ID: PAT_MRT4530_46631C.1.pep
MGTLGRAIYTVGKWIRGTGQAMDRLGSTIQGGLRVEEQLSRHRTIMNIFEKEPRVHKDVFVAPSAAVIGDVEIGHGSSIWYGSILRGDVNSIHIGSGSNIQDNSLVHVAKANISGKVLPTIIGNNVTIGHSAVLHACTVEDEAFVGMGATLLDGVVVEKHSMVGAGSLVKQNTRIPSGEVWVGNPAKFLRKLTEEEIAFIAQSATNYINLAQVHAAENSKTFDEIELEKMLRKKYAHKDEEYDSMLGVVREIPPELILPDNILPNKAQKAVAH

SEQ ID NO: 145962 - protein, 71 aa, Oryza sativa
  Clone ID: PAT_MRT4530_46632C.1.pep
LTSSEDSYGLVYLSSFLATLDRYGSFLGYALSTVDRRGGRARMIRLLGSSEVLKKTFFWSFLSCRHFVPLQ

SEQ ID NO: 145963 - protein, 59 aa, Oryza sativa
  Clone ID: PAT_MRT4530_46633C.1.pep
TKNFSYKDPGLKTGGVSKGKFVGEGTPFFLPQRPPNFRFGFLVFKNKIWNKRGKLLGVP

SEQ ID NO: 145964 - protein, 58 aa, Oryza sativa
  unsure (1)..(58): unsure at all Xaa locations
  Clone ID: PAT_MRT4530_46634C.1.pep
TDXAXGAXHXPXXRRRGXGXXAPFARERAPXEHPASAXEWKVLEARSGRLGNEXKGNE

SEQ ID NO: 145965 - protein, 250 aa, Oryza sativa
  Clone ID: PAT_MRT4530_46635C.1.pep
MNPKLLMAARHGDIETLKRLLAVNTAQPPPQVVLQVDRPAAAAPSAAANTLLEGVTSEGDSALHVVAAAAVAAACGDDDDDVFLDCAGVIHGAARHLIRARNSNGDTPLHRASRAGSVNMVRRLIAMAKDEAGDDDHDDHDDGGERRRQRAAVELLLRAQNKRGETALHEAIRSNSRDLVVDELLSHDPELARVPGEEGGTSPLYLAISLRRFEVAKKLHERDEQLSYSGPQGRNALHVAVLIGKGLKFG

SEQ ID NO: 145966 - protein, 822 aa, Oryza sativa
  Clone ID: PAT_MRT4530_46636C.1.pep
MPLLFELDKLLRNAGYSLSHFNLPLPDDIGSASADNRLLLDELSYDITSIASTSANDINSLNTNQKEIFNSISNSVINNEGRTFFVYGYGGTGKTFLWTTLLNFVRTQGKIALAVASSRIAALLLPGALDRTLRDILSDIRPNAQHRQFGGITVAFGGDFRQTLPVIQNATRHQILRASIVNSCLWHQCVVLQLTENMRLSSQNLSPSDKEELRVFADWLLRVGNGTEPHISIENETNGTFIEIPQSLLLPSDSRNLDSLISFVYDLGYEPSNITTYFCDRAILSPTNEVVSEINNKIIAQVTAAEMSYYSSDTIDDSCANHSTREALYPTEFLNTISLNGLPDHVLHLKIGVPIMLLRNLDPSRGLCNGTRLIVTQLTTRIIEGEIMTEKAKDLIGVISHVGPYDYAGKTSSKKNRKLKIRNKDEQEQGIVLWGEYGESFDEAFVLQKSTDHKIVVAILVGLTAGTYLGKTEATSSLATQIYFDSDITEIVEYQSRYKLPLTIKDELGTLDAVAFYNVAEDLVEVNATQATQNLKIDATEHAIALDTAIGKTRLFHIAMNTKYSSHFTINYVLKKSYPVENENTSLMLPTLENTKVAKESATKQLATDEGLTTMEHYSSKEDQHPTTPPSLQPPETTLDNNTVNQIIPSAKRALQFEKELHIDQPSPAIANTIQVATNQLYHSQQVDLSKEKQPSTEFSPGQNSKRHKKVMEASTNGEENQLQQPKIADQQPSGHKEQMDQQPEKNRNHEVQLIHTNYLQAVSKIIASKSTAISITLQGKSSTDDLSKLQPTQAHVVNYMKNKLPHMHIILDGENVKNNEI

SEQ ID NO: 145967 - protein, 82 aa, Oryza sativa
  Clone ID: PAT_MRT4530_46637C.1.pep
MTHYEHFQRELDAAKGLHEELVKSVEPTLELFFPSRCKGKDLVQLATELVPEGPTAVRRLSEGGGRECGGRREGDSGSGYLS

SEQ ID NO: 145968 - protein, 1356 aa, Oryza sativa
  Clone ID: PAT_MRT4530_46638C.1.pep
MDHMSSKLVDRSATEKYGCPDLFVTFTSNASWPKILQALAPGQQPSDRPDIVDLVYTVEFQKRGLPHVHIIIWLSKEEPLDAEKVDLRISAQLPNPTLDPIGFEAVTSFMIHGPCGPGISYSPCMSEGRCSKFYPKEFCEHTYILQNGFTQYARPNNQIVTKNGVDIDNRVIVPHNVDLVVKYQDHINLESVNHDGMHKYLFKYVTKVYDCSRAGIRRNSANETINEIDNYLECRCVTPNDVAWRLLQFDIHHTDPSVERLPVHLPLENNVVYTEDDDLEEVIENPGNQKSKLTAWLEANSQFPQAREHTYIEFPEYFTWHASEKYWDIRRGCYNKIGRIAHVDPTKGEKYYLRMLLHIVKGPKTFSEIRNISGQQHPTFRAACEALGLLGDDQEWSHALNDAVHWALPYQLRQLFVTILLFCEVTNPQRLFTEHAQHMSEDFRYRTNQNLSQSNSSFADSFVGNALLFELDKLLRNAGYSLSHFNLPLPDDIGSASADNRLLLDELSYDITSIASTSANDINSLNTNQKEIFNSISNSVINNEGRTFFVYGHGGTGKTFLWTTLLNFHRQFGGITVAFGGDFRQTLPVIQNATRHQILRASIVNSYLWHQCVVLQLTENMRLSSQNLSPSDKEELRVFADWVLRVGNGTEPHISIENETNGTFIEIPQSLLLPSDSRNLDSLISFVYDLGYEPSNITTYFCDRAILSPTNKVVSEINNKIIAQVTAAEISYYSSDTIDDSCANHSTLEALYPTEFRNTISLNGLPDHVLHLKIGVSIMLLRNLDPSRGLCNGTRLIVTQLTTRIIEGEIMTGKAKGSKAYIPRIITTSAQSKWPFKLKRRQFPIRLSYAMTINKSQGCVYMFVDVNTVDIKNKKYIYHHQKYMLQFKSSTKVHHLESRGSSIPNYGFEFCPFDQIPSKSGISKPLIDLIGVISHVGPYDYAGKTSSKKNRKLKIRSKDEQEQEIVLWGEYGGSFDEAFVLQKSTDHKIVVAILAGLTAGTYLGKTEATSSSATQIYFDSDITEIAEYQSRYKLPLTIKDESGTLDAVAFYNVAEDLVEVNATQATQNLKIDATEHAIALDIAIGKTRLFHIAMNTKYSSHFTINYVLKKSYPVENENTSLILPTLENTKVAKESATKQLATDEGLTTMEHCSSKEDQHPTTPPSLQPPETTLDNNTVNQIIPSAKRALQFEKELHIDQPSPAIANTIQVATNQLYHPQQVDLSKEKQPSTEFSPGQNSKCHKKVTETSTNGEENQLQQPKIADQQPSGHKEQMDQQPEKNRNHEAQLIHTNYLQAVSKITASKSIAIYITLQGKSSTDDLSKLQPTQAHVVNYMKNKLPHMHIILDGENVTNNEI

SEQ ID NO: 145969 - protein, 236 aa, Oryza sativa
  unsure (1)..(236): unsure at all Xaa locations
  Clone ID: PAT_MRT4530_46639C.1.pep
MWCTWALGRVVLAVVFLVALAAGDAAPPKVHRNHGKFTAGPWKQAHATFYGGRDGSGTLDGACGYKDTSKEGYGVQTVAVSTPLFGAGAGCGACYEVKCVDSPDGCKVGAAPLVVTATNLCPPNPGQSNDNGGWCNPPREHFDLSMPAFLQIAQEKAGIVPISYRRVPCVKVGGIRYTITGNPYFNLVMVSNVGGAGDVAGLSVKGNKRVKXTPLKRNWWQEWQTSEVLTGESLTF

SEQ ID NO: 145970 - protein, 87 aa, Oryza sativa
  Clone ID: PAT_MRT4530_4663C.1.pep
PCYLLDAASRAELRHGRGGGAGADSAASGKADPIEDAKRGKRKPGQGAEPHEHNWYQRERRPSGHCKLATSTWKEVEISATAKHKII

SEQ ID NO: 145971 - protein, 85 aa, Oryza sativa
  Clone ID: PAT_MRT4530_46640C.1.pep
LINSHRVTRNRNHEAQLIHTNYLQAVSKITASKSIAIYITLQGKSSTDDLSKLQPTQAHVVNYMKNKLPHMHIILDGENVTNNEI

SEQ ID NO: 145972 - protein, 80 aa, Oryza sativa
  Clone ID: PAT_MRT4530_46641C.1.pep
LWVDLFSQIPFQVIHCPISLYIWGALAPSVYVNMIGTSSSFLFELAVFLVLLEMLQEILRGKLKWGVFLWALCMGPPIFN

SEQ ID NO: 145973 - protein, 89 aa, Oryza sativa
  Clone ID: PAT_MRT4530_46642C.1.pep
TIFVVWTHFSVLHSLLSLITFAQFSSSPLWLPGTLFLNVVLFLAVFGPTFCRHHILILLLELSLGLQYSRHFYVDVMAWNLSVFHVYLI

SEQ ID NO: 145974 - protein, 1506 aa, Oryza sativa
  unsure (1)..(1506): unsure at all Xaa locations
  Clone ID: PAT_MRT4530_46643C.1.pep
THEALLCRIILALGKPETIANVFSFISLGGFDSGFRDREDFYYWXLHFAQAIEKKPRFVTKXTAKIMENEAKLDLLLKKMEKTERKREEGEKRQAXEMRLFKEAVESWIPAVEKKVDVLQSTVDLLQMQVNQLESSSANKTEQTTPAGTLDSPGVRPNGSTGLDGHRVQILNREEAEGFTPKPIPANGTYASHNVSPIPFHLDASAMNSFQSALSVGMTGGVAPMTCPKFDGDNPIMWKSNCEAYFDVYGIHPGNWVKVATLNFTGNAAFWLQAVRSQLEGVTWSELCEKICTRFNKDRQQALIRQWIKICQTGSVADYVEQFDCIMHQMMAYDPSLKPVYFVTKFVEGLRHAIRSAILLQRLGDLNVACTLALLQEEALEGDKPKESKKSDGYQKQSVKGAMPLPLPPTTKGGPPIISNDRRGTELSNHSREYDRLSALKSYRRSKGLCFVYGEKWGRDHKCASSIQLHVVQELLDVLQGSSQSEQAVSEPPESDTLMAISXQAINGTDSNHSIRLRGWVQGIEVLMLIDSGSTHSFVYQQIGLKLSGVKAMPVLARVKVADGGFLTCSLHIIDCDWLTQGIHFKSNFRLLALGAYDVILEMDWLERFSPMRVDWVHKWLEFQLNDSMVRLQDTLIPXSKPVFIRPYRHTPGHKDEIERQVQEMLQNGVIQHSSSAFSSPALLVKKKVGSWRVCIDYRQLNNITQKGTYPMPVIDELLDELAGARYFSKLDLRAGYHQIRMAEGEEHKTAFQTHSGHYEYKVMSFGLTGAPGTFQGAMNDTLSPVLRKCALVFFDDILIYSPDLPTHLTHLRQVLQLLSNHQWKVKLSKCAFAQEHISYLGHIISGAGVAKDPSKIQSIVDWVRPTTIKKLRGFLGLAGYYRKFIKNFGAISKPLTQLLKKDAPFNWTAEVEQAFQLLKQSLVSAPVLALPDFQQPFTLETDASDLGIGAVLSQNQHPIAYVSKPLGPRTQGLSTYEKECLAIMMVVDHWRPYLQFQEFLILTDHHSLMHLAEQRLNTPWQHKAFTKLLGLQYKIVYRKGKHNVAADALSRNVPAEVSEFLALSECSPVWLQDIIXGYDQDPVSVKLLTELAVNPASHPQYKLHKGLLKHKGRVWVGNNSSMQQQIISALHDSPMGGHLGFPVTYHRIKSLFSWPHMKDTIQQQLNACSICLQSKPDRAKYPGLLQPLPVPDGAWQIISMDFIEAMDVAKVFMLNVYKLHGLPQAIISDRDKIFTSTLWEQLFIRSGTKLHLSSAYHPQTDGQTERVNXCLEIFLRCFVHATPSKWSEWLHLAEFWYNCSYHSSLYKSPFXEVLYGYPPTHFGIREDACSIPDLAQWLSERKLMAQLLKQHLNRARQVMKYQADKKRSFQEFXVGDWVFLKLQPYVQSSVAKRANHKLSFKYYGPYQIIAKVGQVAYKLQLPLDCAVHPVFHVSQLKGSCGFKHPVQSQLPGPTSSIQFPVQVLDTRLHKKDEATWEDEANLRQRFPAALTWGQVRASIICMSTT

SEQ ID NO: 145975 - protein, 62 aa, Oryza sativa
  unsure (1)..(62): unsure at all Xaa locations
  Clone ID: PAT_MRT4530_46644C.1.pep
VSGGGAARITQSQRANCAACCGGRGDSEAPIIIRIKAXGARSSTSTLGLSFAGLYSQWFDVG

SEQ ID NO: 145976 - protein, 75 aa, Oryza sativa
  Clone ID: PAT_MRT4530_46645C.1.pep
FFFFFSHTVVSAFRMSRRNLSSNRSKNIGFPHHANTTNADCIAKTRRNQQPVNIFVKKKLKLLFSQTNASIVPMV

SEQ ID NO: 145977 - protein, 91 aa, Oryza sativa
  Clone ID: PAT_MRT4530_46646C.1.pep
INKRKVIITIKQLSLISSSSSPSSPTTSFLTATTLIYAIGAGITAAAGTRLALQLILVNGYILHSLFGYIIFLSTIHPHYFLSLPPRFRIG

SEQ ID NO: 145978 - protein, 87 aa, Oryza sativa
  Clone ID: PAT_MRT4530_46647C.1.pep
PPSRTLKGATARPYLLPGCLARSILWCCIPFVGGHRIPCCRLMHSQCSCQVNALLDAVLTCGKNLLLLIEGEWTPTRKSLCKLSRTN

SEQ ID NO: 145979 - protein, 78 aa, Oryza sativa
  Clone ID: PAT_MRT4530_46648C.1.pep
QSSVLTSSVLTTSPRRPAATRPPICAAIRRPPHGCGAGARLRIRHTSPAAALPQPLGPRAAATTALPSHLAPHGARHR

SEQ ID NO: 145980 - protein, 139 aa, Oryza sativa
  unsure (1)..(139): unsure at all Xaa locations
  Clone ID: PAT_MRT4530_46649C.1.pep
MIGMEVEVEDDMVEWYRCGGGGAAAAVEVEVRELRVELEVERRMRRKAEAVSEVLAVELEEXERRRRGAAEAECRRMRGEVGEMRAEVERALEEVDDERRMLRVAELWREERVQMKLADAKAAMEEALREIAAASAATA

SEQ ID NO: 145981 - protein, 77 aa, Oryza sativa
  Clone ID: PAT_MRT4530_4664C.1.pep
GKIYHRCHPCHMWWCMPAHPHQDERASRHISKSVLARPKTTVALRDHLGSRQVSSIEFGASQLSDKHRACCIEITAV

SEQ ID NO: 145982 - protein, 153 aa, Oryza sativa
  unsure (1)..(153): unsure at all Xaa locations
  Clone ID: PAT_MRT4530_46650C.1.pep
SYLSPVLFVRHCTHPSPWLLASQTTGRIDDDTTAFLGISLIDDGELAKLVSSGVLVEGQAFAPGKAVVPKPVDNQTVVFAGFFEAGLRFPCNMLLPEILXGFEPSAELFGAIFFATMNSKMVVTPAGTKKTVFGSVNFNVRPKRSDLWPVNAA

SEQ ID NO: 145983 - protein, 81 aa, Oryza sativa
  Clone ID: PAT_MRT4530_46651C.1.pep
GAYIQGYFTNIGVLPWSDTSGEKNIIHALGLTFGSLMMDDVIVKDLELLQFIMNVQKFQIMDFLSNFGIFHYHPYTIYSSC

SEQ ID NO: 145984 - protein, 47 aa, Oryza sativa
  Clone ID: PAT_MRT4530_46652C.1.pep
MACSDAHREQQHDAENHPSHPRTASGHRCRHACRRHDELRASCCCYQ

SEQ ID NO: 145985 - protein, 125 aa, Oryza sativa
  Clone ID: PAT_MRT4530_46653C.1.pep
MATRAYVRKPPTVRASVNAWVWCPAVRCSVCRTQTENCFVLHWARPRSSAWSSVRHFAAAGDRSILLLARVRPRMETTERLCALPRYVHKTPLFANVQLGFLRGPLDGRWPRTYVCKMEEKVGVA

SEQ ID NO: 145986 - protein, 298 aa, Oryza sativa
  Clone ID: PAT_MRT4530_46654C.1.pep
YSQKLTVGSARFWQRHFFPSLRRHRRWSGRGGGESPRSPAFRRRRRRGGAGVPSSSSSSGGGSEVAARLRRRGCAGVPSSSSSSGGGSEVAARLRRRPRVGGDGGDSSEAFSSASEASPSGSDSAPSSSFSPAVSAASSSASSSPSVSAASSSFSPSVAAASSSFSPSASSASPRSESLPAPSPSTSASFNSSSSFASSSAAPASASISSLLSSPSSPSASASASSSSFSSALSLASTSIASPSLSDAPSSLASSASVSPPLPAAASSSSSSSDLAPSTSTSSTGVASAALPLPFPLP

SEQ ID NO: 145987 - protein, 515 aa, Oryza sativa
  Clone ID: PAT_MRT4530_46655C.1.pep
MPGAAVHAVDPRGGASPPPVAKAEAATAAAAAAGGCEPARKAGAVTMEHVLLALHETEAEREARIREMFAFFDVDGRGQLDYAQIEAGLAALQIPAECKYARELLRACDRDRDGRVGYDDFRRYMDDKELELYRIFQAIDVEHNGCILPEELWDALVKAGIEIDDEELARFVEHVDKDNNGIITFEEWRDFLLLYPNEVTIENIYHHWERVCLVDIGEQAVIPEGISKSVNASKYLIAGGIAGAASRTATAPLDRLKVIMQVQTTRTTVMHSIKDIWSQGGMLAFFRGNGLNVVKVAPESAIRFYAYEMLKEYIMKSKGENKSEVGPSERLVAGGLAGAVAQTAIYPVDLVKTRLQTYSCVDGKVPSLGALSRDILMHEGPRAFYRGLVPSLLGIVPYAGIDLAVYETLKDVSKTYILKDSDPGPLVQLGCGTVSGALGATCVYPLQVIRTRLQAQRANSESAYRGMSDVFWRTLQHEGVSGFYKGILPNLLKVVPAASITYLVYEAMKKNLSLD

SEQ ID NO: 145988 - protein, 60 aa, Oryza sativa
  Clone ID: PAT_MRT4530_46656C.1.pep
MTTMGCAVLPRRSGDDNNDSKPSGGGSGEPGPRRDGSAYVGLWCSRVSTTMVAAARTDLG

SEQ ID NO: 145989 - protein, 67 aa, Oryza sativa
  Clone ID: PAT_MRT4530_46657C.1.pep
IVFSFYRHAPGSGSLTIYMVQGNCTGLGGLLHSIPSRLTNHPCFNPDSKSLILTFNYSVISPEPVSN

SEQ ID NO: 145990 - protein, 678 aa, Oryza sativa
  Clone ID: PAT_MRT4530_46658C.1.pep
MDASALSNPRLQAMLEEEKRKAMANEFVAKLTDVCWDKCITGSIGSSFSNSEASCLSNCAKRFLELKMLTMQRPQEAPASFSLPLPKSPVPIKATPISAAFPTPQHEDESSDQDYKPFCRQKKPTLPKRAKRPQQAEKSNDANIKRRSIRRSLDNEFNLCSSSSDNPKESVEGILMMFDSLRRRVLQLDEKEDASRRADLKAGTLMMQNNLRINNHKMIGHVPGVEVGDIFFFRIEMCIIGLHAPAMGGIDYISSKNKDETLAVCIISSGGYENDDDDTDILVYTGQGGNSRHKEKHDQKLERGNLALMNSKIKKNQIRVVRSAQDPFCNSGKIYIYDGLYRIEDTWTDTAKNGFNVFKYKLRRDPGQPDGISLWKMTEKWKANPATREKAILLDLSSKVEHLPVCLVNDVDDEKGPSHFNYVAGVKYLRPLRKTKPLQCCKCPSVCLPGDPNCSCAQQNGGDLPYSATGLLAKHTPMVYECSSNCQCSHNCRNRITQKGIKLNFEVFWTGDRGWGLRSWDPIRAGTFICEYAGEVIDETKMDIDVEEDKYTFCASCPGDKALSWNLGAELLEEKSTAVTTKNFKKLPIIIRANNEGNVARFLNHSCSPNLLWQAVQYDHGDDSYPHIMFFAMEHIPPMTELTYDYGTRGAPPGFEGKPFKACKLKSCLCGSKHCRGY

SEQ ID NO: 145991 - protein, 43 aa, Oryza sativa
  Clone ID: PAT_MRT4530_46659C.1.pep
DVSHPYKISYIMGRSNRLVIRLALSFSHCFSYYDFYAYLFEYM

SEQ ID NO: 145992 - protein, 59 aa, Oryza sativa
  Clone ID: PAT_MRT4530_4665C.1.pep
MGLKEDHWSCRHHHLGQDYVGVAAITTWGKTTLEQLPPPPLGGKRVGAAAATASHHCWG

SEQ ID NO: 145993 - protein, 29 aa, Oryza sativa
  Clone ID: PAT_MRT4530_46660C.1.pep
NEIILHALSYCHLYATIVFIIVTMQVVFD

SEQ ID NO: 145994 - protein, 843 aa, Oryza sativa
  Clone ID: PAT_MRT4530_46661C.1.pep
MARSMLGWKRVPLFSILLILSITNIATTYAIASQADRFVPRDNYLLSCGAPAAVQLDDGRTFRSDPDSASFLSTPVDIKITAKNSLASGAPSSQLYLTSRVFSDISTYSFFISQPGHHWIRLHFLPIPDDHYNLTTATFSVSTDDMVLLHDFSFIATPPNPVLREYIVATQGDTLKIIFTPKKDSIAFINAIEVVSAPPSLIPNTTTGMAPQGQLDISNNALQVVYRLNMGGPLVTAFNDTLGRIWLPDAPFLKLQAAANAAWVPPRTIKYPDDKTNTPLIAPANIYSTAQQMASTNTSDARFNITWEMVTEPGFSYFVRLHFCDIVSKALNSLYFNVYINGMMGVLNLDLSSLTVGLAVPYYRDFIIDSSSIINSTLIVQIGPGTTDTSNPNAILNGLEIMKISNQENSLDGLFSPKRSSQLGKKTMTGIGLAMAVMAAALAVVMCCRRRHRPGWQKTNSFQSWFLPLNSTQSSFMSTCSRLSSRNRFGSTRTKSGFSSIFASSAYGLGRYFTFVEIQKATKNFEEKAVIGVGGFGKVYLGVLEDGTKLAIKRGNPSSDQGMNEFLTEIQMLSKLRHRHLVSLIGCCDENNEMILVYEFMSNGPLRDHLYGGTDIKPLSWKQRLEISIGAAKGLHYLHTGAAQGIIHRDVKTTNILLDENFVAKVADFGLSKAAPSLEQTHVSTAVKGSFGYLDPEYFRRQQLTEKSDVYSFGVVLFEVLCARPAINPTLPRDQVNLAEWARTWHRKGELNKIIDPHISGQIRPDSLEIFAEAAEKCLADYGVDRPSMGDVLWKLEFALQLQEKGDIVDGTSNQFPMKSLEVTSGDSMEKSGNVVPSYVQGR

SEQ ID NO: 145995 - protein, 135 aa, Oryza sativa
  Clone ID: PAT_MRT4530_46662C.1.pep
LVIVFANDVSAEEVISELTSYDYPSCIGESGANVSQHSIPDHRAHVLINHKGCIPHFTGSKCLIVAYDSPPELIQYENNQDSSGVMSVEFVGPGSKPHLHTDTTKEVDPFLSLFFHHPGRKGVEGCSGVESGKKK

SEQ ID NO: 145996 - protein, 59 aa, Oryza sativa
  Clone ID: PAT_MRT4530_46663C.1.pep
FQHFIMHHPSFNWPRHDDAMHFHFSTICNPFILFTTFQSPAHHQRGAIASSEQCSQSQA

SEQ ID NO: 145997 - protein, 73 aa, Oryza sativa
  unsure (1)..(73): unsure at all Xaa locations
  Clone ID: PAT_MRT4530_46664C.1.pep
WWPCIPVGQIAEIVDRGSSXWVYSCAYRARLRAAYDLPETPCSDCLVTFCCQTCSIAQMHRELKNRGHDPNLG

SEQ ID NO: 145998 - protein, 269 aa, Oryza sativa
  unsure (1)..(269): unsure at all Xaa locations
  Clone ID: PAT_MRT4530_46665C.1.pep
KFFWFPIWFPPXXENFGXXILGVPPLGPQNQFFFWPLGGPQFPLGETAPLVFLXKPKKIPLFPFPXKRAIYLFGNXNXPXPVXFWPFSQGAXSLAPWGVFXKXXXXXXXXXXKTSPKGGGGAPXVXPPNFPPPPKXXWKXPFILNQIFPPXXPVPFFLTKTLSLXNXGGKKXPLGXFFXPHLFKFXPPLGXKKIPPPPFPPXXFXGVFFFPQKKKGXPXPXFXPPXXPKKIFXPPPPXXNXGXKNGGKXFFXXPLLNFFFXFXKXPPXF

SEQ ID NO: 145999 - protein, 34 aa, Oryza sativa
  Clone ID: PAT_MRT4530_46666C.1.pep
EVVIFLFIYICMHDKKTERNAVVVSTPTETLCHG

SEQ ID NO: 146000 - protein, 129 aa, Oryza sativa
  unsure (1)..(129): unsure at all Xaa locations
  Clone ID: PAT_MRT4530_46667C.1.pep
MFTRAINEEPWRPSMSAGSSARAVGDGSGGGVGEALLLPRRHRRRLVTRRHVVTAVAASPPDSRLPYQPPPYPQATLPVKEKKXEREEERWRGERKKRLACGTHVGPXAELAATSNKTGVKTAEGPSLH

SEQ ID NO: 146001 - protein, 99 aa, Oryza sativa
  Clone ID: PAT_MRT4530_46668C.1.pep
MWIRRGGVGEDPWASWHTWRSPDVVDPHGLGDPVAEEDEADPADEEFFQEQAGYDEFRVNLERHGLVPVGTGSGRDNAYNDMVPTLWEELNNNIIGGRP

SEQ ID NO: 146002 - protein, 68 aa, Oryza sativa
  Clone ID: PAT_MRT4530_46669C.1.pep
MRSTTARKDPQHGITSAAALNFTLRADDPGSRAGPSSTLSFRGSSARHGQKGPFPKPHPGGARGSGFF

SEQ ID NO: 146003 - protein, 60 aa, Oryza sativa
  Clone ID: PAT_MRT4530_4666C.1.pep
IIARVSCILHSVASLLGPSLWLSLALPPRLASRRSSRGASGCHVTPFGPSRCLAPRPSPN

SEQ ID NO: 146004 - protein, 86 aa, Oryza sativa
  Clone ID: PAT_MRT4530_46670C.1.pep
FTYSCSLHAMEWADLNVSFDGILTVTFYPFLVKSPHLPDKLSDFCHHVLVFPLLDASWNNRLYSFVVFVFKIIVLDLPVMTFLPYC

SEQ ID NO: 146005 - protein, 59 aa, Oryza sativa
  Clone ID: PAT_MRT4530_46671C.1.pep
MESREDVAAWYRDGLDVAQDDEQMKNSKQPPSLADSTLSCGQPHGARCANVGSVQTINS

SEQ ID NO: 146006 - protein, 300 aa, Oryza sativa
  unsure (1)..(300): unsure at all Xaa locations
  Clone ID: PAT_MRT4530_46672C.1.pep
RKKKNFPPFLGGNSPFNPTPFFPNWGGVWGGPKKPPRLETPWVYLKKKPWPGGPPKPNKNPLNFPFFGPWGKKKAPPKFGSPSLTNLGAHPGWPIGGGPFPSPFGVPWKLGQLGGAPKNKGVFLLTRVFQGGKPGTFLGKIPPPLAQLGGGKTKKPAPPWFFQVPPTLASHPPRGLVNQEQKTLPPKKNFFFPFPRGPFFAFAPPRGXKPPPXXPPFPPLKFCLPKXGGGAPGXPPXFPPPXXXLXISFXXPNFPLGAPSXFFNKPFLXNXGEKXPLXXFFPXPFNFXPFXKXXFPPFFP

SEQ ID NO: 146007 - protein, 79 aa, Oryza sativa
  Clone ID: PAT_MRT4530_46673C.1.pep
TSEIHHSTHLVTNAYGSMHARTNYHTSHSWFEFNHKHLCFYSAPNGLTSYTCILHKKKMQHQEGYIFHRPIIGVTSPNS

SEQ ID NO: 146008 - protein, 390 aa, Oryza sativa
  Clone ID: PAT_MRT4530_46674C.1.pep
MLAVMGAWFQAEYTGTGPIDNLFAHLADPGHATIFQIEKLRPLLSPPNIHVGSAPGATHHGRLRPPRVPAAGIRGLPPPPRAGLRGGGRGRAVAGGVVDKSTRVICQGITGKNGTFHTEQAIEYGTTMVGGVTPKKGGTEHLGLPVFNSVAEAKAETKANASVIYVPPPFAAAAIMEAMEAELDLVVCITEGIPQHDMVKVKAALNKQSKTRLIGPNCPGIIKPGECKIGIMPGYIHKPGRVGIVSRSGTLTYEAVFQTTAVGLGQSTCVGIGGDPFNGTNFVDCLEKFVDDPQTEGIVLIGEIGGTAEEDAAAFIQESKTQKPVVAFIAGLTAPPGRRMGHAGAIVSGGKGTAQDKIKALREAGVTVVESPAKIGSTMFEIFKQRGMLE

SEQ ID NO: 146009 - protein, 68 aa, Oryza sativa
  Clone ID: PAT_MRT4530_46675C.1.pep
FFFFFSKAPSGRACAFSHSSNCIIHKGKLLTGYISKETPNWAWRNFHFISFHFSSFLSSGDGPTSSRR

SEQ ID NO: 146010 - protein, 114 aa, Oryza sativa
  unsure (1)..(114): unsure at all Xaa locations
  Clone ID: PAT_MRT4530_46676C.1.pep
MPRNDTNSGLXXSXGQNPRVNLVPEXXLVGRARENGXVDXGGXYXGSRRAAAWLGXDFARDAPSPTPWHCDXXPARXAGEESAMVDAAIXASLGLGGDGHRCFWNVCLLSXXXS

SEQ ID NO: 146011 - protein, 44 aa, Oryza sativa
  Clone ID: PAT_MRT4530_46677C.1.pep
YSHLTCKMVTTTIGHDSKCWMKRKGRTLRMSPTTKPVGAHHCTT

SEQ ID NO: 146012 - protein, 405 aa, Oryza sativa
  Clone ID: PAT_MRT4530_46678C.1.pep
MAPPPPPCERRPVSLSDDMVAEILLLVPANSVGRLAAVCKQWRRVAADPTFLAARERRAPPLQLLRVSRRPSDSNGRQYDDAELSVVVPAPLISGGAEGEEARRPLARYTASFPGGYTHCTLLASCDGLLLFADHRRRLRVICDPTTRRWSGLPPHLSSAALGFYLHRPSGEYRVLSKGPDPSRKHSSSYFVISAGGGGEPRRRDRRPARGETPVLSPGPQAGRHPHLNPYAPAKLVAFDTVSEAFRLVAPSPETAANNGDDDDVLMFELDGALAVLKGGAMSTLKLWVLDDDVGGGGGGDAGEQWAPVWECKYSCMLPVSTPASVAVWDDDGGGGGDAGGATFTRRRITLYGVDETAARGRALHVFACGARNGGLLQVAFRENTVAHAFFKMHPSPAVRTFGFL

SEQ ID NO: 146013 - protein, 90 aa, Oryza sativa
  unsure (1)..(90): unsure at all Xaa locations
  Clone ID: PAT_MRT4530_46679C.1.pep
HRLPTPPLPHANXGSATAAVQRLRLHPSQQPPLARAALTTTAHGPSASHVARFGGWNPQTRHSPPPHRGLLWKTPSPLSSQLHCSGGGKA

SEQ ID NO: 146014 - protein, 46 aa, Oryza sativa
  Clone ID: PAT_MRT4530_4667C.1.pep
HALLGQALERDARQPLPAPRRRRQMTSSHDLGQALSMAHRSYGGRH

SEQ ID NO: 146015 - protein, 63 aa, Oryza sativa
  unsure (1)..(63): unsure at all Xaa locations
  Clone ID: PAT_MRT4530_46680C.1.pep
RRRLNVFLSLAHSRKVLAGAESXGDGRNGGWKGLALAAKKVMVVSGMGRLKERGHHHPLIPCP

SEQ ID NO: 146016 - protein, 508 aa, Oryza sativa
  Clone ID: PAT_MRT4530_46681C.1.pep
MDTFFSAVLGDLLSRSISFMIDRYKQQQQSVEEESRLQQLHRVLLRIEAIVEEADGRLITNRAMLQQLGMLREMMYRGYYFLDGFRYRIAQPHAQDEVGDLSPFSPLKRFCISTRDRKTTISEILEKKELQEMLGRLKTVVSDMQEFVVLVSGYPRMKRQPYCSYLLLENCMFGRQIEKERIINFLLAPHPLGDEEDIDVLPIIGPGRVGKSTLVEHVCRDERVREYFSTTVFYGPDSIGDGDLAPLTDTGAIKHRNPASSKLSLAIIELVDEMDDETWRRILQSLRSGDHVAPVSKIIITSRSNKIATFGTTKALHLGFLPKEDFWYFFKTVAFGSTNPEEEPKLASICMEIAAVLNGSFMGLNIVASILNSNLSAQFWYSLLKRLKFFTYRHIHLLGEHPRDLYNANSGRTYIWMHENYCGDSDLVTYNYYQVNSARLNGLQTVLTSRDILTGTVKPQAAKYEVLEWQSSIPPYISYITQYEILAQQKLMLPPKRKRSGALSEELV

SEQ ID NO: 146017 - protein, 190 aa, Oryza sativa
  Clone ID: PAT_MRT4530_46682C.1.pep
ILSVLGAVFLRPGMPRQRPKKGERRIDAAIDHFTPMGYATADVRAVVKELLQVYGGNDGWPFLEEDSYRVVQEALFEKQEQEDHQQQPHPHPQQLEEAPLEDKSMSSIEVHNVMPAETEQQVEDADPMLVDLPAVEATLPLPEAKVTYGTRRPCYGWIEEYESESDNEEQPARLICKRKRPSRWDVKPIN

SEQ ID NO: 146018 - protein, 462 aa, Oryza sativa
  Clone ID: PAT_MRT4530_46683C.1.pep
MDISRANEGYTSCGPVVEMSWHRAGVLLLGAQSCLPVPGVPAVGGVGSVLLSMARMGWKLCHVFRPYTVVKKIAPKRKEKALVHYEIIYDRKNGVRQADPKVRHGAAFDSRGMSSGGGGSLSVTLFGLSSFGVWRGEEETFRFRRRLPPLFAMPRQRPKKGERRIDAAIDHFTPMGYATADVRAVVKELLQVYGGNDGWPFLEEDSYRVVQEALFEKQEQEDHQQQPHPHPQLCYRNSTKLELYNRCHVFHPSLPFFFRFLSFFLPSSSRTDEWRDRAWSRFETTLRIGPSMASAAAATTAGAEEELVEEVAMGRVLGFELGDGTTRVGKKGNRLRPWGPRGAPSPVVSPRLNSIQIWYWRVMQQLEEAPLEDKSMSIIEVHNVMPAETEQQVEDADPMLVDLPAVEATLPLPEAKVTYGTRRPCYGWIEEYESESDNEEQPARLICKRKRPSRWDVKPINW

SEQ ID NO: 146019 - protein, 495 aa, Oryza sativa
  Clone ID: PAT_MRT4530_46684C.1.pep
MAPQIHPFCVQTAPPHRCPLLDREFHRIEWQRARVKNSNNLMDILNRIISLLPLKEAARTSVLSNHWKNIWCSRESLVFRFYTVLSMHHHIKRCWTSDGQRLNKELFIERVDSVLKQRSGLGVQTVAILYELENEDADHIDRWLNFVIASKTKQLILDLDPYYPKVAPYNFPFKLFNATNSLQLQALKLISVSLKLPANFMGFRNLQKLKLDCTDISDDDMQTLVSNCNALNFLGILYCGMLTRLQTSQPLNQLKHLQVENCTMLQDIQLNFGLTKLEYEGPLIPLAPPGPLLMTNVMMKLSDIDSALEYIFTKLPSKLFRTQEGYFAREDRKIYVSKAFEIGIDVLPAPLLEILELHMWMPYDNQHYCEDHGVLRSLPNHAHSNLKLAYVTGFYGMKDQLELLRHILINSVMLNAMKIDPRPVVAVPHGTVMLCTEGLNCLNGYRVAMEYLSKADHRNVLDVHEILLEDVQKREIYAIMKDRWIQEPKAMLSYF

SEQ ID NO: 146020 - protein, 73 aa, Oryza sativa
  Clone ID: PAT_MRT4530_46685C.1.pep
STLCLTTHHIQHILSLYTRAYLYKFHLTPGYTWTLAMYFDGNKQLHWPCITCMISYCQFKVAVKPVKALRPEI

SEQ ID NO: 146021 - protein, 364 aa, Oryza sativa
  unsure (1)..(364): unsure at all Xaa locations
  Clone ID: PAT_MRT4530_46686C.1.pep
CRRRRRLPIAVPPPALPGRLRLALPLLSSLSIAVSGWLTSANAEQCLNLFGPNKLKEKKESKFLRFLGFMSNPLSWVMEAAAIMAIALANGVGSXPGWQDFVGIITLLIMNSTISFIEENNAGNATATLMGRLAPRAKFLDLLLPLLVAVMRQVAGGVQAPSPRLFPVAISGIEMLSLGSFKTGAILLGMKLLPMGRKSLFYLTIYGSVVGVGSYAVHYFSTLVASILENFGLSEEMHNPETSRNDLRGEVGVHPQEDDVRVAAAGAKAKKEAEAGGNVSGKQSTAGFDTFGLHTRIFHVIQLAIIHLQCTQFLSLRCATKHFQSTDKIDIKFALANSFMNYVFVEMAGNHAVGGKQLEAIAVS

SEQ ID NO: 146022 - protein, 194 aa, Oryza sativa
  Clone ID: PAT_MRT4530_46687C.1.pep
MTREQGRGVGDGEGSKAVAAAASIAQAQRRALATDEGKTVFLFSTSPQTFLRDQRLVTRRRWRRRRRRRGGDCRHDLALLDKFPFNVDFTSGSDFRWWRRPTSGERSGGRSKKDIARLAASMRRVGRGAEVEMDATAVLNRPINQAAADADCQLRVNSFLRPPPAPRRRPSLQAAATPPLSAAGAPGQAPPPGC

SEQ ID NO: 146023 - protein, 694 aa, Oryza sativa
  Clone ID: PAT_MRT4530_46688C.1.pep
MATKEEDTEEVMFENKFTRYRKGALVGTKSGFAFIVYPMPSVGYFDDPLVARRDQASALGAEGKGKMGKAYMSQKKGVKAGGRARGRGAKAQLLVLGWWDVPWNLCVLVVSKSPTAFTSAFPSLRRLSAERGLRGEHGEREEANTLLHPRRRRRRRRRRLPIAVPPPALAGLLRLAVPLPSSLSIAVSGWLTSTNAEQCLNLFGPNKLKEKKESKFLRFMWNPLSWVMEAAAIMAIALANGGSMAWKLPGWQDFVGIITLLVMNSTISFIEENNAGNAAATLMGCLAPRAKRKKLPVQSATAMAAQPWWRFLALLLPLLIAVMRQVAGGVQAPSPRLFPVAISRWQGCAQRSCLVVLCCTESFLMSFNFACSEGGRISDHVARERWQQRLERCDGEQGRRPASALSVEFTKSQVVTSIPGFFFCIWYSAKKHWLANNVLGIAFCIQGIEMLSLGSFKTGAILLGMKLLPMGRKSLFYLTIYGSAVGVGSYAVHYFSTLVASILENFGLSEEMHNPETSRNDQRGEVGVHPQEDDVRVAAAGAKAEKEAEAGGNVSVRASELGSTTMSTVARTSIDINLISKDSSKVIFFNNVNLSFFRFITNFPCSARNNSSSGNSSLERFSQPYRSVDHNGQGQDWKEGLLDPSSRASRSYRSFRTIGTSFTASVLHEDKKTTKNGFLFLKTVLDYVNRSMRV

SEQ ID NO: 146024 - protein, 212 aa, Oryza sativa
  unsure (1)..(212): unsure at all Xaa locations
  Clone ID: PAT_MRT4530_46689C.1.pep
SSPEKGAEVVKRRRRRRTQPRRRCPRRGPRWRAASRRRRRRXPRRQIRPDEGGGAARRRTEPPPERRRRRPRAHTQKQLVRGEAQAQSPDAVTAAAAQLPDVAARRLGSTTPRSEHRRAGLGRMAASPPERRRRGGRLRRRRRCAPRRAKATRSGSSANASPLQANTRLLDSSARRPPPSSRVPSLAELPPHRQNPVERDAEAAPAPSTRRR

SEQ ID NO: 146025 - protein, 171 aa, Oryza sativa
  Clone ID: PAT_MRT4530_4668C.1.pep
MNRRFSAKCFGAERSQLSAWSTGAEWHATVDGRLTRRANMSKFSTTRLGVEVANLCAIRYGTELRDIKAYPPRPREGALSILSLSRSTKTMMATAAFLSDPNPPLTHGESMGFGGDFMWRLWSKPGNAGKYVVLVNMYVAREMWGSVAGTHEAMWTRPRAHDGICRGVAEG

SEQ ID NO: 146026 - protein, 89 aa, Oryza sativa
  unsure (1)..(89): unsure at all Xaa locations
  Clone ID: PAT_MRT4530_46690C.1.pep
CLNSSLXLPPFFQXSCAIVKEHQPEEDEGFPGKGPNQSESAGGKPTRILLXSPLLSSPSPTCSSRRERSFFFFLSAFRVAFSFFFSFLF

SEQ ID NO: 146027 - protein, 66 aa, Oryza sativa
  Clone ID: PAT_MRT4530_46691C.1.pep
VKSKRWTSWLWGKAEGLFGGGGRWWWIRRRGAAEDGEDDGARAACHHWLDEKERRGRGRRTTGGSY

SEQ ID NO: 146028 - protein, 145 aa, Oryza sativa
  unsure (1)..(145): unsure at all Xaa locations
  Clone ID: PAT_MRT4530_46692C.1.pep
DEARVAVVLDLGQLRHALLLGPPVRPPPPPXPPPPAPPASPASPPPAACSSAPSSSAGSSPRRSPRRATAAAAAPAPAPAKTRSATTRRPPPPLKPPIPVSRRCVVYVLWPPTRTWEKKQWRGRGGKIKPWRGAYLVVVRWLWGR

SEQ ID NO: 146029 - protein, 142 aa, Oryza sativa
  Clone ID: PAT_MRT4530_46693C.1.pep
SKFQASLFSSLLFSCDRFLHRTPPPPPTAAAAGAGAEDHSTGFPRRKLRHCSFSSADFALADLGEVDFALSAAGGSEVSVYSSSCHPPPPHEEVPVKCTAPVAELPGLRGAPPPASQLGQSGSIWCTSSAKSFIVWMRDPRY

SEQ ID NO: 146030 - protein, 76 aa, Oryza sativa
  Clone ID: PAT_MRT4530_46694C.1.pep
MARCWMQISVSTYGLWGYGRPELGLEPQPAPTMDPPLPLTPPPELHAPLLAVAPSCHPLHSTAWVAVCLDNDGFHG

SEQ ID NO: 146031 - protein, 101 aa, Oryza sativa
  Clone ID: PAT_MRT4530_46695C.1.pep
KRPRIIFFSPGALTKGKKGRSCTTFITKKTGDTRDGSHRLPMAGMEKKTFIEGGGGAQEAITCKTATLKDSSINLNLAGGAASRTALAVFLEAREVAKTFF

SEQ ID NO: 146032 - protein, 555 aa, Oryza sativa
  Clone ID: PAT_MRT4530_46696C.1.pep
MSAAATAGTYSPASAAGEKRRERKEELRRHLAEDADWPRADGRSFHDCRPACKSSSSTFSTCSDFSVCSDLVPTLISMERPHSCSGSKDADDVMQTGPTTAASGSAYAEFGKTKGTDNKEYSAMLHKALEGAVMLHTFPKTTVDVFALVLESGGSDLPIIISCASLALADAGIMMYDLVTSVSVSCFGKNIIIDPTSDEEAWQDGSLMVAYMPARKEITQLTLTGEWSDGKITNGFLGGSCATVRSPPPILLWRIWGEVDFALSAAGGSEVSVYSSSCHPPPPHEEVPVKCTAPVAELPEAPESYCWLVLTKLGDSMIKQILGRFPKKPSKSGDKDPIGRSSPSVPNPPLGPRGAERTLTTPPRENKIEAFDVDDEEPVMDPAWSHLQIVYELFLRFIQSPETDAKLAKRYIDHSFVLRLLDLFDSEDPREREYLKTILHRVYGKFMVHRPFIRKAINNIFYQFIYETEKHNGIAELLEILGSIINGFALPLKEEHKLFLVRALIPLHKPKCIGMYHQQLSYCITQFVEKDCKLADTVIRGLLKYWPITNSSKEG

SEQ ID NO: 146033 - protein, 225 aa, Oryza sativa
  Clone ID: PAT_MRT4530_46697C.1.pep
MSAAATAGTYSPASAAGEKRRERKEELRRHLAEDADWPRADGRSFHDCRPAFMQTGPTTAASGSAYAEFGKTKVIVSGTDNKEYSAMLHKALEGAVMLHTFPKTTVDVFALVLESGGSDLPIIISCASLALADAGIMMYDLVTSVSVSCFGKNIIIDPTSDEEAWQDGSLMVAYMPARKEITQLTLTGEWSDGKITNAVELCMDACSKLCDILRERLKDASSLAE

SEQ ID NO: 146034 - protein, 261 aa, Oryza sativa
  unsure (1)..(261): unsure at all Xaa locations
  Clone ID: PAT_MRT4530_46698C.1.pep
TRPDRTRFPVFNRTTLVFVLLNTGNLVIESTTNVVLWESFDSPTDVVLPGAKFGWNKITGLNRQCISKKSLIDPGLGSYSVELDTNGTKGVILMLRNPPKVYWYGLTSPTLIPELRSLLAMDPRTRGLIIPTYVDNSQEEYYMYTLSNESPSSFLSLDMSGQIMLNVWSEANQSWQIIYAQPADPCNPFATCGPFTICNGNSNPVCECXESFTRKSSQDWDLXGDRTGGCSRNTPLDCTISGNRTSSADMFHPIAHVKIAL

SEQ ID NO: 146035 - protein, 709 aa, Oryza sativa
  Clone ID: PAT_MRT4530_46699C.1.pep
MFAPAAAARPHKQAPLARVPTRLVAALCTACFFLGVCVVNRYWAVPELPDCRTKVNSDNPGAVMNQVSQTREVIIALDRTISEIEMRLAAARTMQARSQGLSPSDSGSDQGSTRARLFFVMGIVTTFANRKRRDSIRQTWLPQGEHLQRLEKEKGVVIRFVIGRSANPSPDSEVERAIAAEDKEYNDILRLDHVERNGSLPLKIQMFLSTALSIWDADFYVKVDDDVHVNIGITRSILARHRSKPRVYIGCMKSGPVVDKNESKYYEPDHWKFGTEDCEWKAQAGNPCAASFDWNCTGICNPVERMEEARAHTAIVSLEPSLKPKNRASCATRQYTQFPAMSAAAAATDGTYSPAAAAGEKRRERKEELRRHLAEDADWPRADGRSFHDCRPALTTFIERAHPFVLKGPGILSEIWARGLVLSPHSANRRSGRGVGASGCHVMPLGPLHCFAPRLLPSRRVAGGASKEGAQAELPLMRAAPQLMTGLTPVTSDWTDNRAPTSHLLPAEWRAVPRVRRGTALGPAQGQAVVYLLGEGTGRVPVKIGWVPTRKKIMQTGPTTAASGSAYAEFGKTKVIVSVFGPRESKKAMLYSDTGRLNCNVSYTTFATPIRGQGMDNKEYSAMLHKALEGASCFGKNIIIDPTSDEEAWQDGSIMVAYMPARKEITQLTLTGEWSDGKITNAVELCMDACSKLCDILRERLKDAASLAE

SEQ ID NO: 146036 - protein, 31 aa, Oryza sativa
  Clone ID: PAT_MRT4530_4669C.1.pep
SSSTLVSQQKLLQKEKQKHEFHRSEFILVAS

SEQ ID NO: 146037 - protein, 73 aa, Oryza sativa
  Clone ID: PAT_MRT4530_466C.1.pep
KNFNSIFGEISRVQTTWKVPNPQLRQHLRLVILQQVIPAYRAFVGRFGMLLNSKFIKYTLEDIENNVLDLFEG

SEQ ID NO: 146038 - protein, 33 aa, Oryza sativa
  Clone ID: PAT_MRT4530_46700C.1.pep
MEGFTAQTIQTVSQFLYLIFAEPEYHSIKEWRS

SEQ ID NO: 146039 - protein, 148 aa, Oryza sativa
  unsure (1)..(148): unsure at all Xaa locations
  Clone ID: PAT_MRT4530_46701C.1.pep
GGGGFTCRTAVVEGAAVGAGPVGVLGEVAPQLLLPLPTLFPRGRSRRVGPSGGSRRHRRELGVRRRRRXSSYQPNLSRIGSLSSACVSRFERDWRPANXQRRDGGGGGGGGGERGRGRVGLPQQRRFRWSDSGKGLGREWQLARGIVG

SEQ ID NO: 146040 - protein, 58 aa, Oryza sativa
  Clone ID: PAT_MRT4530_46702C.1.pep
VVLCKNDNAYQLPPVYTISWDVIMNFGSVMIIPGCQQTVGYEVLQLTCMMVYWEDIVH

SEQ ID NO: 146041 - protein, 108 aa, Oryza sativa
  Clone ID: PAT_MRT4530_46703C.1.pep
AGPSAVPRLTRGTTLHSIGSRCDVGARLSVQSDVTGVRPVTDRSLILTISRQFSTPHVCPTALNATGGSWGAARIKGSSAWAPSSLAPPAKRRLGEGLGAKQCKGPRA

SEQ ID NO: 146042 - protein, 84 aa, Oryza sativa
  unsure (1)..(84): unsure at all Xaa locations
  Clone ID: PAT_MRT4530_46704C.1.pep
LPSHPATCPYSLVLPPHSANRRSSRGGXASGCHVMPLGPLHRFAPRPSPSRHLAGGASEEGAQAEPPLMRAAPQLPPVAFNAVG

SEQ ID NO: 146043 - protein, 80 aa, Oryza sativa
  Clone ID: PAT_MRT4530_46705C.1.pep
MKEKFFSRYIENAEGYLYPFRSSSRKNRNGFWYSKPGSHGYLASDNFFGDGGHESEEGDPGDYIKFDTDVLEETRGLYFQ

SEQ ID NO: 146044 - protein, 85 aa, Oryza sativa
  unsure (1)..(85): unsure at all Xaa locations
  Clone ID: PAT_MRT4530_46706C.1.pep
SDRLCTRGXSNRSICPLCRRVQETALHLLAGCWGQFLAPRPAPPYRARVAACRYYNSWSSAQGYALAEVESMRASRPPPSPLAHF

SEQ ID NO: 146045 - protein, 517 aa, Oryza sativa
  Clone ID: PAT_MRT4530_46707C.1.pep
MIKQILGRFPKKPSKSGDKDPIGRSSPSVPNPPLGPRGAERSSNLSSQTPVISSSGLSYGSGMHVGNANSRVNGNSVQPTVELLPSFKDVPNTEKNNLFVKKLNLCCATFDFTDPTKSVKEKEVKRQTLLELVDYIASANGKFPEIIMQEITRMVSVNLFRTLTTPPRENKIEAFDVDDEEPVMDPAWSHLQIVYELFLRFIQSPETDAKLAKRYIDHSFVLRLLDLFDSEDPREREYLKTILHRVYGKFMVHRPFIRKAINNIFYQFIYETEKHNGIAELLEILGSIINGFALPLKEEHKLFLVRALIPLHKPKCIGMYHQQLSYCITQFVEKDCKLADTVIRGLLKYWPITNSSKEVLFLGELEEILEATQPAEFQKCMVPLFRQIAHCLNSSHFQVAERALFLWNNDHIENLIKQNSRVILPIIFPALERNANGHWNQAVQSLTLNVRKLFSDHDVGVYDECQRKYEDEKAKEKETKLKQEVAWKRLEEMASAKATSGAAVLVSRTLPRQSSAV

SEQ ID NO: 146046 - protein, 77 aa, Oryza sativa
  Clone ID: PAT_MRT4530_46708C.1.pep
SLRVVFTLTRHAYRSTFLYILTRTHNADTTRHWHHAYSTNRGWEQPVSLVDTPNWLITDQHRRGTPVYTETPGRCQN

SEQ ID NO: 146047 - protein, 74 aa, Oryza sativa
  unsure (1)..(74): unsure at all Xaa locations
  Clone ID: PAT_MRT4530_46709C.1.pep
WVKTCGGRPPNDPXDGTGHTYLHSAGGRCDMGARLSVQSDVTGVRPVTDWSFLTIARHFSTPHVCXHCIKCDRG

SEQ ID NO: 146048 - protein, 895 aa, Oryza sativa
  Clone ID: PAT_MRT4530_4670C.1.pep
MASSSSKASDSSSQRPKRPDQGPSGKDAAGLVALHGKLAQLKRQVQSTRLAAIKERVEANRKALQVHTCALFDVAAAAEVASRGAEGGNALSRGAAEGHRRFVGWDSASGPGERELVHVQEENLVAGTLVLSSSGGSGASHRTVVQLVKLPVVDKIPPYTTWIFLDKNQRMADDQSVGRRRIYYDPIVNEALICSESDDDVPEPEEEKHVFTEGEDQLIWKATQDHGLSREVLNVLCQFVDATPSEIEERSEVLFEKYEKQSQSSYKTDLQLFLDKTMDVALDSFDNLFCRRCLVFDCRLHGCSQNLVFPSEKQPYGHELDENKRPCGDQCYLRRREVYQDTCNDDRNACTTYNMDSRSSSLKVSATILSESEDSNRDEDNIKSTSIVETSRSKITNSEYADKSVTPPPGDASETENVSPDMPLRTLGRRKISKHASKSNDHSPDKRQKIYSSPFPFAMSVLNKQSVPEIGETCPDSIESAVDQLPSLDDPNKKISTKDMCAGSTTNTTENTLRDNNNNLFISNKEHSISHWSALERDLYLKGIEIFGKNSCLIARNLLSGLKTCMEVASYVYNNGAAMAKRPLSGKSILGDFAEAEQGYMEQDLVARTRICRRKGRARKLKYTWKSAGHPTVRKRIGDGKQWYTQYNPCGCQQMCGKDCACVENGTCCEKYCGCSKSCKNRFRGCHCAKSQCRSRQCPCFAASRECDPDVCRNCWVSCGDGSLGEPLARGDGYQCGNMKLLLKQQQRILLGKSDVAGWGAFIKNPVNRNDYLGEYTGELISHREADKRGKIYDRANSSFLFDLNEQYVLDAYRKGDKLKFANHSSNPNCYAKVMLVAGDHRVGIYAKDRIEASEELFYDYRYGPDQAPAWARRPEGSKKDEASVSHHRAHKVAR

SEQ ID NO: 146049 - protein, 361 aa, Oryza sativa
  Clone ID: PAT_MRT4530_46710C.1.pep
MGPATPLRRRTRARPAATRAEGGSGGDGDDDDVRCEACGSGESAAELLLCDGCDRGLHIFCLRPILPRVPAGDWFCPSCASPSPHSKKSHAAKKPKQFPLVQTKIVDFFKIQRGPAAALAAAAESSEGKKRKRKVGGIRLVSKKKRKLLPFNPSDDPARRLRQMASLATALTATGAVFSNELTYVPGMAPRAANRAALESGGMQVLPKEDVETLNLCKRMMARGEWPPLLVVYDPVEGFTVEADRFIKDLTIITEYVGDVDYLTRREHDDGDSMMTLLSAATPSRSLVICPDKRSNIARFINGINNHTPDGRKKQNLKCVRFDVGGECRVLLVANRDISKGERLYYDYNGSEHEYPTHHFV

SEQ ID NO: 146050 - protein, 220 aa, Oryza sativa
  unsure (1)..(220): unsure at all Xaa locations
  Clone ID: PAT_MRT4530_46711C.1.pep
SPGCRLSHRLRAPPPPKGVSGDSPGAAREARRSGCGGGEKEEGDEGRGAACPLGKRRGGGXVVSAIGPGLLVLVGVHEADTDADADYICRKVLNMRLFPNEKTEKAWDQSVLQRKFEVLLVSQFTLYGILKGNKPDFHVAMPPAKAKPFYASLVEKFQKSYSADAVKDGIFGAMMKVSLVNDGPVTMQVDSSSLQNPAQSSNGDVGSVGDNEAQVPKETS

SEQ ID NO: 146051 - protein, 113 aa, Oryza sativa
  Clone ID: PAT_MRT4530_46712C.1.pep
KKKAFPNFLQKPKGLTQKFPPWVKSQNWWGLKKPPFAPNIPKFLKSGPFEKKKGEPWGKIKRVGPPRGFFKAPKLGEIVSKKSIFYGFLCRVTKTLPPPLKKFSPFSPFFWGA

SEQ ID NO: 146052 - protein, 91 aa, Oryza sativa
  unsure (1)..(91): unsure at all Xaa locations
  Clone ID: PAT_MRT4530_46713C.1.pep
GTPPLPGGTGPPPPPPFPWTPPPLNKXLKTPKFNPPFFFKEKKPGPRKQNPPKKPPFXFSSRKPEKGNKAKKPPGPPFLKSHPEKGAPSLF

SEQ ID NO: 146053 - protein, 139 aa, Oryza sativa
  unsure (1)..(139): unsure at all Xaa locations
  Clone ID: PAT_MRT4530_46714C.1.pep
FFFFFFFIRCLTPWWILKSLFNSELHHGRRRSLSPARLEGPLKLLDAAGLSWLRLRAXAGRLDKELRCEXSLPMSRSTSEKGVTPWHAFKSSAWCAAPPSRTIVPVRAGAFPIPRRAAFPVPXVAIATAGNLAAARMAR

SEQ ID NO: 146054 - protein, 1384 aa, Oryza sativa
  unsure (1)..(1384): unsure at all Xaa locations
  Clone ID: PAT_MRT4530_46715C.1.pep
MHASIYSGRAFSFQLQINHVRTTSGDIVIVDHKSNKYPLRLRFMVQGHASSNTDSRPTITTVPVFPSSDSGTPEPDRLLKERDLNRSNVVIHGFNQAGQEALSTISLVLKLEPLSTYVTFRIIDATTSYNALLGRPWLHENQVVPSTLHKCIKYKDKSGETVRIFADERPFTVAESFYTDAKFYIEPIEKIQKPKAKSLTEHFVTSGSYGESSSNRKIYQYIPSNRRKEGQLAPFEKILSQAQLEALQQDKKLKEKKYGLGYQVCRTSAKLVDATMASPQMEDGNQPTIDELEEIDIGTPDXHRPIFISKHLSEEXRKKYHNFLSANKDVFAWSYEEMPGLSPTVAVHQLAVQEDIPPVKQPQRRFRPELLPKIEAEVDKLIAVGFIREVKYPTWVSNIVPVRKKNNQIRVCVDFIDLNKACPKDDFPIPISEILNDATMGYEIFSFMDGFSGYNQIKLAPEDEELTAFRTPKGIYCYEVMPFGLKNTGTTYQRAMTVVLDGLLYEIVECYIDDIVMKSKREEDHLQHLAIVFETLRKHEPKRNPMKCAFGVLSGKFLGFIVMKQGIRINPTKIQAIVKMPPPVNLHKLKSLQGHLAYIRRFISNLSGRCKPFSRLMKKGVPFQWDQACQNAFQDIKRYLINPPVLSAPVKGRPLILYTAAMPTSLGALLAQNNDDGKKTALYYLSRTLVGAECNYLDVEKIYLALVFAAQKLRHYMLEHTIHLVSGADPFXYILSKMVLSGRLAIWAMFLSQFDIIFVPQKSIKGQALANFLAAHPIPDEFPIDDDLPDEEVFATSIFNPSWKMYFDGARRRSGAGAGVVFVTPNESIIPYSFTLTTAVSNNAAEYEALIIGLEIALNMRLDTLXYDDSQLIINQLAGKYAVKKEGLMAYFTRAKQLMAMFANLNIEHVVRSQNERVDALTSLAASMSVNSYXIMDIQVEQRRVLPVLIEKEEEIPSAAMITDVHEIEAGDWRTPLLEYLLHGYLPLEASERSRIRKRVTRYTCINDTLYXRAYDGMLLRCIAGDEVVDALNKVHAGVCGAHQSGSKLYYQLKHLGYYWPTMFEDSMKFSKKCHEYQIHADFIHQPHELLHPTNMAWPFEMWGXDVVGQIQPPSSKGHKFILAATDYFSKWAEVVPLKEVKAENVENFIRTHLIYRFGIPSRIMSDNGSPFKNALIEKLCAKFKIKHNFSTAYNTAANGQAEAFNKTLCKLLKKVVTKNKRDWHDKLLEALWAYRTTTRTPTGMTPYSLVFGGEAILPIEVQIPSLRVAIHENIAEVEAAKQRGNELEKLEGKRLQALQNLEAYQARASRAFDKRLKRRSFKQGDLVLALIRPMNITHRMXGKFEPKWEGPYVMRKXAYRIISPDGEYYPAPINGKFLKRYYA

SEQ ID NO: 146055 - protein, 82 aa, Oryza sativa
  Clone ID: PAT_MRT4530_46716C.1.pep
HWMQLLHHIHVSESTPFHKRRRPDREAQATRRHSTFPGGYRDHRRHAGLTALRPTVELSLPRRPRPARRMNEPSEPSLIRTR

SEQ ID NO: 146056 - protein, 65 aa, Oryza sativa
  Clone ID: PAT_MRT4530_46717C.1.pep
MPDDQENLGCGGNADDLPQLKTAKLVRHVIPRGMVVPECQGCNKGEKRGGHQLDPHLLGNMERAE

SEQ ID NO: 146057 - protein, 113 aa, Oryza sativa
  Clone ID: PAT_MRT4530_46718C.1.pep
WFFYFCGVSFSFFWVENPNKLGLLAMHKTQLDPSGAPLERGLLTIQQRQPMETASQNPLIMVPNQPSLKRNRQKNTKPKIKLIAHQIYAHESEMAPSHVLKENIPIYAVHFYQ

SEQ ID NO: 146058 - protein, 99 aa, Oryza sativa
  Clone ID: PAT_MRT4530_46719C.1.pep
MVPRHGATRPARSRVQPPSTTLPLSWAAGVRRCRTAILQDCRSHGMEARHRFGPASPSCGEVRKFRSGEKDFPNCFPEVPVFQVRNFLSSFKFKIVSNG

SEQ ID NO: 146059 - protein, 134 aa, Oryza sativa
  Clone ID: PAT_MRT4530_4671C.1.pep
MELTDVRRKLGSGEDWRRRRGGRAADDGCGVGEGDDGMRGQLGRREAAVGGGKGGGGSGVVVEWWCRWWRREMEWRPCSGSGDHGWAWWQQPARWGGNVGAWWGQTGTEIWGKSGGRGGGGGGNAVPPLGREQG

SEQ ID NO: 146060 - protein, 61 aa, Oryza sativa
  Clone ID: PAT_MRT4530_46720C.1.pep
MARSRFSEAREDDKDEFFDSREVMSPTSISSPASSGRHDNDGLRYDGPMFEVWATTQRYCR

SEQ ID NO: 146061 - protein, 66 aa, Oryza sativa
  unsure (1)..(66): unsure at all Xaa locations
  Clone ID: PAT_MRT4530_46721C.1.pep
SDNSTMIQITLPTLLGGASKLMLLVVFFVIXALTCYIYCYKTGRLMVHGRAPKRVSPQEKQITNST

SEQ ID NO: 146062 - protein, 44 aa, Oryza sativa
  Clone ID: PAT_MRT4530_46722C.1.pep
THQWSLMNTLGTRVINILVDPFRDANSINASVLYCVFVNILKKH

SEQ ID NO: 146063 - protein, 68 aa, Oryza sativa
  Clone ID: PAT_MRT4530_46723C.1.pep
TLRCIHSIHMRDANTRRALRAHEKQSRAKPRWQGHKKFTREPNKDYKRMIMMEAPLVIWRNRSWGKDN

SEQ ID NO: 146064 - protein, 484 aa, Oryza sativa
  Clone ID: PAT_MRT4530_46724C.1.pep
MFRSAVAVSQLATTTTVWMDRGFNEMILSESVWNGGGGGGDGDGGAVVLPPEVGGVNAVDGSGMTMLERLVLDEALAAAILELQGIQAPGCGGGGGKVAVVPPPTAGDGGVEAAVAFAAMATGTPAYADVDADVLQRQRQHHHRHQGAMGMAAEYDVAPATPAVTLSAVPPPPPPPAFATAAASVDGGGAMDATVFSGIGNDDVVDAVSATVAMTTATATTSQCERVRGGGGGGGCGRKQRRPGRKRKAAEPTAAAAAADMSSQDNPLCSLLASNTAGADGGIQIAFSTSAPASKRAKPSLSSSSSSISFDGRGPGGNCGGGGGDDPLYEPDTEALAQVKEMIYRAAAMRPVTLGAEDAGERPRRRNVRISSDPQTVAARQRRERISERLRVLQKLVPGGAKMDTASMLDEAANYLRFLKSQIRELQTLDRRNYPNAAMSINTAAATTMATSSSPTYNNSNAAMPAFAFPETLGCGGGGVEQLI

SEQ ID NO: 146065 - protein, 116 aa, Oryza sativa
  Clone ID: PAT_MRT4530_46725C.1.pep
MASSRVPGWRALLCDGERRKTREEGARDKIRRRWVRVCVMSMSSPATPLLAGGAHAMRPPRQDTSAAAAAGATGGGGSYTPVFIVLGVIAALLVISCIVGQVCTKKHLRRGGAQNR

SEQ ID NO: 146066 - protein, 104 aa, Oryza sativa
  Clone ID: PAT_MRT4530_46726C.1.pep
SAHDRSIQGQDYYLQMNLFLTLIKSKEKPTTSWLPASRLRAFGRRRSARASARRLPHSAPSASCRRRPVGIAGLRRCLPHVRGEGRDEERGGGERGGRRGGGRT

SEQ ID NO: 146067 - protein, 308 aa, Oryza sativa
  Clone ID: PAT_MRT4530_46727C.1.pep
MAGLEELKKKLQPLLFDDPDKGGVSSRVPLPEDTCDSYVEQKYRCYIRTLKGCHISGRNRLDSYGQLVPGGLALLARTGTEGRVREVKVSDGGTVNLLSRSLGEYNINEHGFHKRSTGPEESDSGEKAYRCASHDMHIFGPIGNGASSVVQRAVFIPVHRILALKKINIFEKEKRQQILNEMRTLCEACCYIGLVEFQGAFYMPDSGQISIALEYMDGGSLANVIKIKKSIPEPVLAHMLQKGLRYLHEVRHLVHRDIKPANLLVNLKGEAKITDFGVSAGLDNTMAMDIDTVSKPDVLSFLILIIYL

SEQ ID NO: 146068 - protein, 76 aa, Oryza sativa
  unsure (1)..(76): unsure at all Xaa locations
  Clone ID: PAT_MRT4530_46728C.1.pep
CRRHPAYEEMVRNCMNQDLSWKGLQKNWXEMCSLGLGFLRSAPGIEGXDEIAPLRTRENVGWLLGRAWRSDMMGVD

SEQ ID NO: 146069 - protein, 234 aa, Oryza sativa
  Clone ID: PAT_MRT4530_46729C.1.pep
NLRLMSRGKLLLTVESKKYPHLRIQGHIVTRASCEIFQTLLAPHSAESSTKSSGLAWVYLNTDGSLAYNIETEHVNTRDRPNISLIEEQGKRKAKLEDLTPSFNFNQAIGSVEKLGPKVLESLYAGELGVNVATEHETSLIRGRLVPRPVADARDSAEPILLKRQEHTDAQNPHAVGMAWMSIDNECNLHYEVTLNGVPAQDLQLYLEEKPIEAIGAPVTRKLLEEFHCSRTES

SEQ ID NO: 146070 - protein, 699 aa, Oryza sativa
  Clone ID: PAT_MRT4530_4672C.1.pep
MADDQSVGRRRIYYDPIVNEALICSESDDDVPEPEEEKHVFTEGEDQLIWWKERSEVLFEKYEKQSQSSYKTDLQLFLDKTMDVALDSFDNLFCRRCLVFDCRLHGCSQNLVFPSEKQPYGHELDENKRPCGDQCYLRRREVYQDTCNDDRNACTTYNMDSRSSSLKVSATILSESEDSNRDEDNIKSTSIVETSRSKITNSEYADKSVTPPPGDASETENVSPDMPLRTLGRRKISKHASKSNDHSPDKRQKIYSSPFPFAMSVLNKQSVPEIGETCPDSIESAVDQLPSLDDPNKKISTKDMCAGSTTNTTENTLRDNNNNLFISNKEHSISHWSALERDLYLKGIEIFGKNSCLIARNLLSGLKTCMEVASYMYNNGAAMAKRPLSGKSILGDFAEAEQGYMEQDLVARTRICRRKGRARKLKYTWKSAGHPTVRKRIGDGKQWYTQYNPCGCQQMCGKDCACVENGTCCEKYCGCSKSCKNRFRGCHCAKSQCRSRQCPCFAASRECDPDVCRNCWVSCGDGSLGEPLARGDGYQCGNMKLLLKQQQRILLGKSDVAGWGAFIKNPVNRNDYLGEYTGELISHREADKRGKIYDRANSSFLFDLNEQYVLDAYRKGDKLKFANHSSNPNCYAKVMLVAGDHRVGIYAKDRIEASEELFYDYRYGPDQAPAWARRPEGSKKDEASVSHHRAHKVAR

SEQ ID NO: 146071 - protein, 61 aa, Oryza sativa
  Clone ID: PAT_MRT4530_46730C.1.pep
MGPVTASPPLESWEITVTDPDSGAVCSPYTEMIGANVQCYAPCASACRPLGSRDGRTNTRA

SEQ ID NO: 146072 - protein, 104 aa, Oryza sativa
  Clone ID: PAT_MRT4530_46731C.1.pep
WTRAPRPPRHPLPGRRRSARPAPSPARATPRATRPPTLARPPPPPRPPPPAAASASASAGSAARSRTPPRPLLRATTKGPPPPPPPPPPTSRALSRTPPPCCLC

SEQ ID NO: 146073 - protein, 119 aa, Oryza sativa
  unsure (1)..(119): unsure at all Xaa locations
  Clone ID: PAT_MRT4530_46732C.1.pep
MREVTGGAKKFSSPTPPGARVDPIHSAIPAIPLVSPPRPPLAALPPTPPHTPSPPPTPAHTPSPSPCCRPDRFVHSISYRLSARPPXLHIFPSLVVASSHSAAPLIRPNHGRPPQVHAD

SEQ ID NO: 146074 - protein, 107 aa, Oryza sativa
  Clone ID: PAT_MRT4530_46733C.1.pep
IQRRWSGRLRRGYGSSRPGRAMARRRRAATGCKRPDWTATGGGSAARGGRRRGDRGRGRGARAMMRRRRESGGGLLGEARQRWSSGVPRVGIGGQRPEERWLQCRGR

SEQ ID NO: 146075 - protein, 395 aa, Oryza sativa
  Clone ID: PAT_MRT4530_46734C.1.pep
MEGWVATVAYTGTALACAAAATVVALRLVYRHLLHYAEPTHQRFIVRIILMVPSLCADSIIQSRPHGSSCDLSASDTSYMLVYAVMSFLSLVLPGSAIYFNSIREIYDAWVIYNFFSLCLAWVGGPGAVVVSLTGRSLKPSWFMMTCCFSAVPLDGRFIRRCKQGCLQFVILKPILVVITFILYAKGKYEDGNFSVNQSYLYITIIYTISYSMALFALALFYVACRDLLQPYNPVPKFIIIKSVVFLTYWQMLIAAIGHQFAFSYKEYAGSNARPFGGFRGSLFHALKFNDFYHDTVHQFAPTYHEYVLYSNEEEDEPTKYSSASVVSTVQDIQLVEVSVVDSKAPLASVILTHEADKTMPSHGMEETVAPSEPYDLSNLVDVELSNYSAEVPHS

SEQ ID NO: 146076 - protein, 169 aa, Oryza sativa
  unsure (1)..(169): unsure at all Xaa locations
  Clone ID: PAT_MRT4530_46735C.1.pep
DGGHSFPETGWRRLPSNATWPSPEGGRARGRAAVLIVKFGKXQSHHRLRIIIGCNISESADGSYQVANSRIPAIFAGFLTANKGFIGVSADELSRXLHRLTRIASKWFLLDYIIAILYYYRPITFILLFTSSVRIYIGYIADCXNPIAIGWIKLAGMSASHQPLVLHWS

SEQ ID NO: 146077 - protein, 160 aa, Oryza sativa
  Clone ID: PAT_MRT4530_46736C.1.pep
MGGMAAAPFPGKCFLLLQQVPKPSAALAAAHPLLLGRRRLAALPETAAACVAAAGLVGVAASLLVGRAAEGARREEEEEEEEECSECGGTGLCPRCKGEGFVFKQLPEEAASRARKAAKNMATRYTSGMEVGQRWLLIAHSWIYENPFTYDGSHIVEVEA

SEQ ID NO: 146078 - protein, 100 aa, Oryza sativa
  unsure (1)..(100): unsure at all Xaa locations
  Clone ID: PAT_MRT4530_46737C.1.pep
YAVTRDLATFISANRHIWHKYSNEDVSFGSWLIGLDVEHVDERSLCCXTPPDCEWKAQAGNPCAASFDWNCTGICNPVERMEEVHRRCWEGHVPDLQAQF

SEQ ID NO: 146079 - protein, 72 aa, Oryza sativa
  Clone ID: PAT_MRT4530_46738C.1.pep
MLLNAQKAPHGSPQSPQGCSNIHGAQSSPQSLVKRLEPFHPVPCSCPLNVKYVGGVVFKNQYCTCQFQVLFF

SEQ ID NO: 146080 - protein, 122 aa, Oryza sativa
  Clone ID: PAT_MRT4530_46739C.1.pep
MAGRSDRPTPASQTATAWLVRPPLSGRPGSLTARHGWYDIVCDVAIAWRPGLVLQFPPPALSAPTVPAAPTVGVAPSTPTTPSAPTVGKGGSVRRRPPQCSRLRIDHHPPPWPPHPPRTLRS

SEQ ID NO: 146081 - protein, 427 aa, Oryza sativa
  Clone ID: PAT_MRT4530_4673C.1.pep
MASSSSKASDSSSQRPKVRALASVSTPRARFPTPISFPNLIGLAVQRPDQGPSGKDAAGLVALHGKLAQLKRQVQSTRLAAIKASARPPITHLYSFSSQGEERVEANRKALQVHTCALFDVAAAAEVASRGAEGGNALSRGAAEGHRRFVGWDSASGPGERELVHVQEENLVAGTLVLSSSGGSGASHRTVVQLVKLPVVDKIPPYTTWIFLDKNQRMADDQSVGRRRIYYDPIVNEALICSESDDDVPEPEEEKHVFTEGEDQLIWKATQDHGLSREVLNVLCQFVDATPSEIEVFDCRLHGCSQNLVFPSEKQPYGHELDENKRPCGDQCYLRDPKVDPPYSTYTVMNYGSYNVTPPPGDASETENVSPDMPLRTLGRPRNLLSGLKTCMEVASYMYNNGAAMAKRPLSGKSILGDFAEAEQGYM

SEQ ID NO: 146082 - protein, 46 aa, Oryza sativa
  Clone ID: PAT_MRT4530_46740C.1.pep
SHSTQGVQGIPGGPSSSPPPPSSSLPSRSPLSSFPRSPATDPSSPR

SEQ ID NO: 146083 - protein, 110 aa, Oryza sativa
  unsure (1)..(110): unsure at all Xaa locations
  Clone ID: PAT_MRT4530_46741C.1.pep
LARLITMAQASPFCXKLNEDASAHLXQFLEICSIYTIKGVSQDAIQLHMIPFSLIGRAKQWFAGTVHQSDSWNKCSTAILSNFFPMGKTNALCRRISSFQQTRNEIIPEA

SEQ ID NO: 146084 - protein, 110 aa, Oryza sativa
  unsure (1)..(110): unsure at all Xaa locations
  Clone ID: PAT_MRT4530_46742C.1.pep
AAPSTNPYAAPSAEYAEVCIHQLDRFLXQQIDFLLSYIAFFLGHFGFXHLSNLIAVPSLAHEYQYFLGPIGNIDPTEFISADTNRIPFILANPNLSHWKNTFKSWPSLEK

SEQ ID NO: 146085 - protein, 83 aa, Oryza sativa
  Clone ID: PAT_MRT4530_46743C.1.pep
KFSKSQIGIKHRQHSTKFISTNTIHIDNSNDNASYENTRILRTTTLQSAKWYIVKKNYFHYTTALQSDWPPKQPNRKLYPCDW

SEQ ID NO: 146086 - protein, 148 aa, Oryza sativa
  unsure (1)..(148): unsure at all Xaa locations
  Clone ID: PAT_MRT4530_46744C.1.pep
GEGGAGVVGWWRGTNLVTDDDESTADCSSVAAARRGGAGGGRGGREGGAGGCGGGANDWGGGSASKKGGGGGSXGGSSGAGAGADAEGDGVSRQAAATRAERGGGRGGAGEGAVGAGAGAGAEQRATALAAAESPRREGREWLRFGLG

SEQ ID NO: 146087 - protein, 108 aa, Oryza sativa
  unsure (1)..(108): unsure at all Xaa locations
  Clone ID: PAT_MRT4530_46745C.1.pep
MAKRGEVELDAVQDRGKRRRRKVLDNVSXCPAATRLPXWRRRQHGSSSTPSNLQLRPGSLTMVISSGGSNSSCGRRLRFIHWARMGATERAHMGAVAERRLAGAVFPS

SEQ ID NO: 146088 - protein, 375 aa, Oryza sativa
  Clone ID: PAT_MRT4530_46746C.1.pep
IYFLNKTNDSTMSDQECLEANHRLEEKIDLILKKLNEIEANRSKFFEEMSASIKATTTVLTAASHPPLQAPPSSTPTTCLMKCSNDDRPWATSSSGHIDKETAPTVALDLGDGEDKVHDPCIVTKDSSKVTPTMCSMKCSSPDTKPDLTMVAEVTYASAATASMELVTAQETIGAMYSDTSDHSKVMHTKCLTVVLDAIGDTGQAMVVFQTWTDAFKDDPTSVQFMDFFSSSMMANIKWNTPMPTKCSVQCLGHGSMALMPTNPFDVNPWPPLISGWDSQPMAGPKFKLYWARVRRLPPWPPPIEVSCLALVCHDNVMIFTELKDINLHWGELKPWPPPSQTNFKNIMVQPEQCKYWKIRVEMSIFARKEKMMRS

SEQ ID NO: 146089 - protein, 381 aa, Oryza sativa
  Clone ID: PAT_MRT4530_46747C.1.pep
MATVEHVDIQAVASVQLGMGKAATRLGTGTGTGMAAAPTWLGQVGMLSYVDADGVADATIVPATPLSRAAFSTHAGIISVPSRAGARDPSPPRKSTKCFPARRYSSTISCHVIFVYRKASATAAWRKACPAARSAAEDGLHFFSRAGSTSSFSIPIEFNLVAFRWKSADTIYSSYAFAYVSDSNCSFFRVGVEFRLREIAAETLRAAQRWGSALHAMSDTDSSAAAAAEGRKPSPATSPPPARYRHRLLSAIGWNYSIGLLADRLFDLLFTYLVSCRIKLTGTPVCHHIWTCTGAKQISQAGCFRSSNFLTHSPAFSVRKLPKRLNERISVVGYFCKKLLVFIENITEILKPTNNPSCFILKTPCLSVKYNVKKRKFRFKE

SEQ ID NO: 146090 - protein, 601 aa, Oryza sativa
  Clone ID: PAT_MRT4530_46748C.1.pep
MEAKRRCDEKIDRILKKLDEIDANRNKFFEEMGASIKATTAVLTAASHSPLQAPPSSTPTTCSMKCSNDDHPWATSSSGHIDKETAPTIALDLGDGEDKVHDPCIVTKDSSKVTPTTCLMKCSSPDTEPDLTMVAEVTYTSAATASMELVTAQKAIGATYSDTSDHTKVMHAKCLTVVLDAIGDTGQAMVVFQTWTDAFKDDPTSVQFMDFFSSRIMANIKWNIPMPTKCLVQCLGHGNMALMPTNPLDVNPWPPPWLDGVIKGRDLRPSPWPGFNFCGTVEHLVPPWPPPTQISYLALLLTDFAILSTEMLLTVRHWARVHLMLPWPPPNNSDSKHTMIQLEHCWSWEIGVTINQSAWKEQWGLRQIHGCFVIFTEGPWRCLHHVHPFSDNVEFGVGELMVVETTERSGIPLTVASHLTRSILYGPHDFDLNAALEYLWDAYTEGVQIIWARTICKKMSQLSCSVQKFKKLKTFWVKIVLSCTLELGWSVNAHFRSNAKLLENYIKEIYESAQCGDSTIPFFVQLTWDPGGSGNNLHRFEDKPNVKERGLLATQLCCIWAREEVSNRVGGILPCTSGLIDSRMMHEEPIRPRPNQLSIIW

SEQ ID NO: 146091 - protein, 519 aa, Oryza sativa
  Clone ID: PAT_MRT4530_46749C.1.pep
MAAPRTPLPLVLLLVSAALLAAAPLSPAAETGAAAFDVRRHLSTVTRYDVARGSNSVSSAPSMSDECRVIHLNLVARHGTRAPTKKRIKELDRLAVRLKALIDEAKQGPESDSLKKIPSWMKGWESPWKGRVKGGELVSEGEEELYNLAIRVKERFQGLFDEEYHPDVYSIRATQVPRASASAVAFGLGLLSGKGKLGPVKNRAFSVLSESRASDICLRFFDSCETYKDYRKRKEPDVEKQKEPILEHVTSALVNRYHLNFTPKDVSSLWFLCKQEASLMNITNQACQLFNEAEVYFLEWTDDLEGFVLKGYGESINYRMGLPLLKDVVQSMEEAIVAKEENHPDGTYEKARLRFAHAETVVPFSCLLGLFLEGSDFAKIQREESLDIPPVPPQGRNWKGSVVAPFAGNNMLALYQCPGKTDGGKISRDQKSSYFVQVIHNEAPVSMPGCGNKDFCPFEEFKEKIVEPHLKHDYDALCKIRPVAREEPSSFSSRMSNFFLGLFSQKGYRVSAQDVKSEL

SEQ ID NO: 146092 - protein, 1952 aa, Oryza sativa
  Clone ID: PAT_MRT4530_4674C.1.pep
MAERAKAHDLSPSVSGDDGELNPRRRARTPPSPPRPSPKQGEALEKVDKSMASPVAGGAGGRQDGERRLLVYGDGSTPQGALQAAGALLRHPPVVHDPESPAQRWLEDVANLVMTAQQRLGAGGRVSPRHGREDQPSVPPAGGVGCRAFVASLRNVRWPPRFRPTITEKYDGSVNPTEFLQVYTTGIEAAGGDDRVMANFFPMALKGQARGWLMNLPPASVHSWEDLCQQFTMNFQGTYPRPGEEADLHAVQRGDDESLRSYIQRFCQVRNTIPCIPAHAVIYAFRGGVRHNRMLEKIASKEPQTTAELFQLADRVARKEEAWTWNSSSSGVAASAAPGSAAQTGRRDRRRKKRSDRSGDEGHVLAVEGAPRATRKGRPASDKKKEAGTPSKERPAGRWCSVHNTSLHDLADCRAVKNLAERTRKWEEDRRQERREGKSPAVPSGKRRSEAKQKAPAVDIDDGDDDLGFQEPGATIATVDGGACAHVSRRSFKAMKRELLAMAPTHEATRRARWSEVALTFDQTDHPPCIARGGQVAMVVSPTICNVKLGRVLIDGGAALNILSPAAFDAIKAPGMVLRPSQPIIGVTPGHTWPLGHIDLPVTFGGPANFRTERVSFDVADLSLPYNAVLGRPALVKFMAAVHYAYLQMKMPGPGGPISVHGDLKVALACMEQRADRLAAASKPEGGDERPGPSAPTAPRQRIATCDEVPEDALVSFLRANADVFAWRPADMPGVPREVIEHRLAVRPGARPVRQKVRRQAPERQVFIREEVARLLEAGFIREVIHPEWLANPVVVPKANGKLRMCIDYTDLNKACPKDPYPLPRIDQIVDSTAGCDLLCFLDAYSGYHQIRMAREDEEKTAFITPVGTYCYTSMPFGLKNAGPTFQRTTRISLGSQIGRNVEAYVDDLVVKTRNQETLLSDLAETFENLRSARIKLNPDKCVFGVPAGKLLGFLVSARGIEANPEKIRAIERMRPPSKLRDVQCVTGCMAALSRFISRLGEKALPLFKLLKRSGPFTWTEEAEHALTRLKAYLSSPPVLVAPEPNESLLLYLAATPQVVSAALVVERDEDNPHFVHPHSVLTWPGSKQGGEAPESNGGLRPLTTGDGPLPARQTVLGAPDPQEGPEATAGRPHLTPSDPEANPVLTRPGKEQGEEAPEPNGGQRPLTTGVGPLPACPTMPGAPDPQDGPEATEGRPPLSSSDPKVIGTEDKCAPKGHLNEERPGDTAPSREDRPHRRVQRPVYFVSEALRDARTRYPQAQKMLYAILMASRKLRHYFQAHRVTVVTSYPLGQILHNREGTGRVVKWAIELSEFDLHFEPRHAIKSQALADFVAEWTPAPETVSMPEASTNPSQLPHAAHWVMQFDGSLSLQGAGAGVTLTSPNGDVLRYLVRLDFRATNNMAEYEGLLAGLRVAAGLGIRRLLVLGDSQLVVNQVCKEYRCSDPQMDAYVRQVRRMERHFDGIELRHVPRRDNVIADELSRLASSRAQTPPGAFEERLTQPSARPDPLGETDVPDRPPRPVGVQASGPEGSASSSLRLIAWISEIQTYLTDKTLPEDREGSERVQRISKRYVLVEGTLYRRAANGILLKCIPQEQGVELLADIHEGECGAHSASRTLVGKAFRQGFYWPTALNDAVDLVRRCRACQFHAKQIHQPAQALQIIPLSWPFAVWGLDILGPFKRAPGGFEYLYVAIDKFTKRPEAYPVVKIDKHSALKFIKGITARFGVPNRIITDNGTQFTSELFGDYCEDMGIKLCFASPAHPRSNGQVERANAEILKGLKTKTFNILKKHGDSWIEELPAVLWANRTTPSRATGETPFFLVYGAEAVLPSELTLRSPRATMYCEADQDQLRRDDLDYLEERRRRAALRAARYQQSLRRYHQRHVRARSLCVDDLVLRRVQTRAGLSKLSPMWEGPYRVIGVPRPGSVRLATGDGTELPNPWNIEHLRRFYP

SEQ ID NO: 146093 - protein, 62 aa, Oryza sativa
  Clone ID: PAT_MRT4530_46750C.1.pep
IWYGNPNFFQYSEFWMDHIRINTASYKLGKQLEQSSDGQREVAYNGRLGPFHEPRRWNLGWP

SEQ ID NO: 146094 - protein, 300 aa, Oryza sativa
  Clone ID: PAT_MRT4530_46751C.1.pep
MAQDAGDAVLLASRITAERHLSLSRKIMPEDVAVRVGELRPRPRYPERSVHLLSFAMVGLIPPFSRFFHEVLDFYEIHALHLAPNAVMTLAIFAHLCEMFVRPSPQEVGEIGRRIGSTPRCRIIRDFGSLPPPTPERSASWLAVSELGEEYDAVRDRLRGLRNKGLTGAMVFDDYFRRCIAPLQERSRGAWEYTEHNDPMRTHVGERWDWGEEDAKTVIRRVLGLDTAEQTLILDGILPLCSDRDRESILAVMSAVGAAGGGDGAGSSGATAGSSRIGGSRAPGPSRGPGGDSASDLKGK

SEQ ID NO: 146095 - protein, 252 aa, Oryza sativa
  Clone ID: PAT_MRT4530_46752C.1.pep
MVHFNMWHGMMVNGFMDISNLSAKIICQGKMLISVSRSGTGDRLRDYKLIYALDVGKTFGDYDSPAAAAELASDKVHANGDAADAGGGGEEEVVVSSSKAVVEELYRALERGDGDAVRRLLNPDVDWWFHGPRAHQHLVLMRLLTGGGGGAAGLPFKVRGVDAFGETVLAEGTDATGKLYWVHAWTVGPGGRVTGVREYCNTALVVTRLGGGGGGKGAEAAAPCSRSQSEQLWQSRLPDRARKNLPALVLAI

SEQ ID NO: 146096 - protein, 89 aa, Oryza sativa
  Clone ID: PAT_MRT4530_46753C.1.pep
KGKARLEDVGEDSPEDYVSDSPRGSPTYAESGDSSSSDGEANDDVDAVVDVGSEEDHGEPTARGAPVGEQPAPLHPKSTRKRKVSVKVL

SEQ ID NO: 146097 - protein, 488 aa, Oryza sativa
  Clone ID: PAT_MRT4530_46754C.1.pep
MAQDTGDAVLPASRITADRHLSLPCKIMPEDAAVRAGESRPRPRYPERSVHLLSFAMVGLIPPFSRFFHEVLDFYEIHALHLAPNAVMTLAIFAHLCEMFVGVRPTMRLFQHFFVPQLQQGAVVGGCYLQPRLGMAGQYIESHLHKKWEDWKKDWFYTALPDHPRLRLPTSPPAVRRMERSRGALEYTGPNDPMRTHVGVRWDWGEEDAKTVIRRVLGLDTTEQTLIPDGILPLCSDRDRESILAVMSVVGAGRGRSRRSGAGGGGSSAGSSSATTGGGWIGGSGGGGGSRAPGQTEPCRGSFIEPPKWTFKCSPRRGPPYLDRNMIRAFAWKPNHSLPSGGTQRRPPSDTGGSPVIPSLMGEELKTCGGRPLMERASNDPSNGTGHTYLHSTGDRCDVGARGLIQSDVTGDRPVTDRSFLTDRASRACRTSAPTALNAARGSWGAARIKSGSAWAPSPLTPPATWQLGEGLGAKRREGPYLRQAENL

SEQ ID NO: 146098 - protein, 867 aa, Oryza sativa
  unsure (1)..(867): unsure at all Xaa locations
  Clone ID: PAT_MRT4530_46755C.1.pep
MAQDAGDAVPPASLIMAERHLSLIRKIMPEDAVVRVEESRPRPQYPERSVHLLSFAMVGLIPPFSRFFHEVLDFYEIHAXHLAPNAVMTLAIFAHFCEMFVGVRXTMRLFLSFFVPQLLQGVVVGGCYFXPRPGTAGQYIESHLRKKWEDWKTDWFYTALPDHPRLRLPAGPPKRSAAWLAVLELGEEYDAGRGVRRSDXIASGACDPKGKRKVSESRPRSPPRIGRAKRTADHPPAGHKRPATSEAGRKKKRLRKIGQTEPCRGRSLAPDSVLSIHLGLLLLPLLFLLNVIGPGPGRPGATEPSQHPGGAHGPHGGSGSEFATDVSGPGLGWPXGKAGRYRRPPRAIPRARPTRSATREAESWAESSPQYRGGSSSTPSSRGRTATFSSPTPASMEPLLQVLAAADSTVREGLNAQVQALADERAALEAEWAQLAADRTRVDEGRRAMDDMVEVGRKMHQAQLAEIQAREETLDSVMREXQEECQAALIASSVLDETLGDIRLARTAALEAERKALDERARSMQEFEAMIRRRIEVLDRNQREQDGRSREQGLRARELEERARMLDQRETTLATHERTATEAESSLRLREETAAEHNRTTLTAELXVARRAEELWLREEACREQDAALAVHEAEVNRREVAARWLGEQLTKREEVIAGREARHLESARAERAAMAARASELEAREKELMAGGXPGGAELVSQLVAAQDTLADLGRLVQHQAEEIAALRLTNEIGPGQLSYAIERLERAGRRVGISMHFXLDGMAADLERLEEEVGEAVKSSSASLARAAVELVLASHQARDPDFFPXRALEDFPPGTEARAREQVREAADAIVSSFEGSAPRFNLALASDEESGSEDGGGDDGSED

SEQ ID NO: 146099 - protein, 766 aa, Oryza sativa
  Clone ID: PAT_MRT4530_46756C.1.pep
MAQDASDVVLPVSRITAERHLSLIRKIMPEDAAMMVGESRPRPRYPERSVHLLSFAMVGLILPFSRFFHKVLDFYEIHALHLTPNAVMTLAIFAHLCEMFVGVRPTMRLFQSFFVPQLLQGAVVGGCYFQPWPGTAGQYIESHLHNKWEDWKKDWFYTALPDHPRLRLLAGPPERSAAWLAVSELGEEYDAVRYRLRGLRSQGLMGAMVFGDYFRRRIAPLQERSHGAWEYIGHNDPIRTHVGERWDWGKEEAKTVIRRVRGRRANGGPTTNGPQTPRHVRGWMEEEAASKDRANGAVPGEFHRALEVDLQMPPSQYPGGAHGPHAGSGSESATAEVQPATGDGSGGGAPPGGDPEGATHEERHSGVEAKAGRGPEAEAGGGPEPEAEAESARGLEAGGTGATVPLCIWGTLGAGHVLAAADSTVREGLNAQVQALADERAALEAEWAQLAADRAWVDEGRRAVDDMVEVGHKMHQAQLAEIQAREETLDSVMREMEEERQAALIASSVLDEVLGDIRLQYEAHAEDLVKRVEDARGVLDAAAAQERRASEVDALLRARSAVLEAERKALDERARSAQEFEATIHRRIEDQAGEIVALRLTNEIRPGQLSDAVEQLERAGCRVGISVRQDRKLPPTQPALAFRLDGMAADLERLEEEVGEAVKSSSASLARATVELVLTSHQARDPDFLPWHALEDCPPGTKARAQERVREAADAIVSNFEGSAPWFNLVLALNEESGRKVDGGDDGGEDWDEVVSGAGLGGPSTP

SEQ ID NO: 146100 - protein, 183 aa, Oryza sativa
  Clone ID: PAT_MRT4530_46757C.1.pep
MATPAAAAAKEVDKKVQLMKEIQTILYQCYIKFILYMHSKELIIFRFEGDKAERQNCMIFYLSFSWLYYEYHETSNSFLAISKNISSLLYALELTGEAVQYTAVYQKTCNLFFRKSVKSAVTSEQNLLIVPMLRPCCNVIPDLSILLYASRIQLGRIKGLLAAKHILSSFFPFPNACALPHET

SEQ ID NO: 146101 - protein, 733 aa, Oryza sativa
  Clone ID: PAT_MRT4530_46758C.1.pep
MVAHGVLPAKEIIGWRPAFGEAFPTPDTHEVVVFSHFFYGGFALPTSKFFRGILNFYGINLHHLNPNSIVHIANFVHVCEAFLGIRPHFALFRRIFFLKPQPNKSKPCVVRGAGFQLRGTLSQKYFSMPFKTSNKGWHANWFYVQNPEPALPEYSCLPPVYQDTWNSLPMGDEAAQALELMERMLKLKEQGLQGEQITRHFINYSHLLPVVPYNAFNPPPQELALMKSDPPITQRRSPRHQTVQGSGGLKIRSDPQPKTSNPTGQSDSRKRKLALSDDEGDGNKGSPKKQPKHTAPKKKTSSRPIPKFRKSSRKPSDIDPSGKDSDPTNMETNSSKEAGPTSGEDPTGAQASTDNINPSDQPSTGNQSAEAETAASQEPPTGNQSEAGPSQEIPGIETQANAFQEPNADNDPTPGSSDKGQGSPRAHPETSSGPLTGDGEKIPRIKAAADSRPPILIKWWDDNLEPAGIVINRQKEDEEVRQLKKALGEATHIVNRIHLRNEAKTTTLEKLVPHLGTLEAVREQLHETKELAKKTEHDLRDRIAQLQDSNFELSGSSKVQVAKIAQLEKRILTLESDKAELAAQRDSALKEVEDRKIKSQAQFDVLVGKIKRLEGTRDEAMFYNNNGPSTFDASEVFDKLRVAPDTYFKNIKEAGSMGASLALAMTKSLYPKIDIDTVDGFADGTSEEAALDLINDAQKAADKIASDVVDRFQDTNLRPTGSGNSDDEKSDTD

SEQ ID NO: 146102 - protein, 818 aa, Oryza sativa
  unsure (1)..(818): unsure at all Xaa locations
  Clone ID: PAT_MRT4530_46759C.1.pep
MAEEKESFESQWAPSDVTEENLKEMVAHGVLPAKEIIGWRPAFGEAFPTPDTHEVVVFAHFFYGGFALPTLKFFRGILNFYGINLHHLNPNSIVHIANFVHFCEAFLGIRPHFALFRRIFFLKPQPNKSKPCVVGGAGFQLRGTLSQKYFSMPFKTSNKGWHANWFYVQNPEPALPEYSCLPPVYQDTWNSLPMGDEAAQALELMERMLKLKEQGLQGEQITRHFIKSRLAPIKERSRTAFEFDGKHDPNREDPDSLDFKIMKERMYKIFSNAIAVSYSHLLPVVPYNAFNPPPPEFALMKSDPPIAQRRSPRRXTIQGSGGPKIGSNSQSEAPNPTGQSDSRKRKLVLSDDEDDGNKGSPKKLPKHTAPKKKTSSRPMPKFRKSSRKPSDIDPSGKDSDPANTETSXSKEAGPTSEDHPTGVQASTDNVDPSDQPPTGNQSAEAETVAGQEPPTGNQLEAGPDQEIPEVEAQATASQRLDAGNDPMPGSPDKGQGSPHAQPETASGPLTGDEEKIPRIKATADSRPPXILIKWWDDNLQPAGIVINRQKKDEEVRQLKKALEEATRIVNRIHLRNEAKTTTLEKLVPHLGTLEAVREQLHEAKELAKKTEHDLRDRIAQLQDNNFELSGSSKVQAAKIAQLEKRIQTLESDKAELAAQRDSALKEVEDRKIKSQAQFDVLVSKIKRLEGARDEVANATTPLVQAMFFNNNGPSRFDATEVFDKLRVAPDTYFKNIKEAGSMGASLALAMTKSLYPKIDINAVNGFADGTSEEAALDLINDAQKAADKIAGDVVDRFQDTDLRPTGSNNTNDEKTDTD

SEQ ID NO: 146103 - protein, 77 aa, Oryza sativa
  Clone ID: PAT_MRT4530_4675C.1.pep
MDGAGAAGGTARFGGMRAEATCSGGLGVGSVTGSRWRVTGNGGLVAADDRPPPGSGHKWMEFSAMEMDSFMLMPACQ

SEQ ID NO: 146104 - protein, 231 aa, Oryza sativa
  Clone ID: PAT_MRT4530_46760C.1.pep
MAACKPAKAAATVPDPGRLGEDLSCFLGKSLIKESDLASLVASGAIAEGQGFVSGEALVPTPGDSVRLGMSYRAGLAPTAELFDAIFTATILSKTVQTAAGPKMMVFGSANFILRPERSTAPSPAESDANDEEEEDERDEEEEEEVVVVEEAAEEDTEGKNYSPGYTPSPDHPETGVASSSSPLRQKDLEGAKTLAAIVGATSRKGTSAAGKRPAKAVTKGFVKIYIQCYI

SEQ ID NO: 146105 - protein, 76 aa, Oryza sativa
  unsure (1)..(76): unsure at all Xaa locations
  Clone ID: PAT_MRT4530_46761C.1.pep
FWQQPPLLGQQSSXQNINIFQAKRQKLQLHQFGYFPFERNLAQAQTFLPFNAPFKNGISPRYYGAPNTIPPLGGFF

SEQ ID NO: 146106 - protein, 126 aa, Oryza sativa
  Clone ID: PAT_MRT4530_46762C.1.pep
PPTLWRTDPAPGCHFLFPYVAADSQAPPPTSPDCWGGDFSSMRSGFVDPPPPVFHRAASRIMFLLRDMDPAAVAAFPASRPITPGSKRPSFFPNRKPSAAGSSLPKFGKCGFDDCPLLPLTPGGPP

SEQ ID NO: 146107 - protein, 108 aa, Oryza sativa
  unsure (1)..(108): unsure at all Xaa locations
  Clone ID: PAT_MRT4530_46763C.1.pep
AYYGHKTDPRAVXIGLLLIVSAFQYLNQFGRYSTAIXTVKQTPAYKNRLXALEFERTGGISSKKKGHKQIDKKVEEVLSNEVEVQIQGVEKPSLWRLYGVQFILLPYS

SEQ ID NO: 146108 - protein, 100 aa, Oryza sativa
  Clone ID: PAT_MRT4530_46764C.1.pep
MAFMRYHRALPQGETTVEEFRAWLSQFDANGDGRIGREELERALRSLNLWFAWWKAREAMREADANRNGVVDRDEMVRLYAFAQRHLHLKMNDLDDVASY

SEQ ID NO: 146109 - protein, 162 aa, Oryza sativa
  Clone ID: PAT_MRT4530_46765C.1.pep
MGSCASKSVIEQRPPARHYTRKGRRARTNSRSIMPEAPKSRLNDSRGHMTDFSMSEVVHFETSSNHGKSEHSKTFHLTQMQWHHSQRDSNGCCKEDAWFDSVSILEDDSDDEFKSVNGDWPDDDNQMKSENASRFADALSRIGDLCRGVPMTLSVEQYLKET

SEQ ID NO: 146110 - protein, 51 aa, Oryza sativa
  unsure (1)..(51): unsure at all Xaa locations
  Clone ID: PAT_MRT4530_46766C.1.pep
HRTGCILCTTSTMEVVGGFGPSAYSTSKAAIVGMVXTVARQLARDGVRVNA

SEQ ID NO: 146111 - protein, 275 aa, Oryza sativa
  Clone ID: PAT_MRT4530_46767C.1.pep
MASVALIVLLMNKNLYRPGIRSYALIICMVAGMFGVMGAYATGSSMYLRTFIIVLVLVLVAFVGVVFLAINHFNKLHKKKMEKNKRQPAQQQQPPSPKKSSLTTFAMQKDMLKYLMLVGILAATATYLTGLKPPGGLWKDNDDGHSAGNPVLYDIDKKRYNIFFYSNSTYFMASITVIVLLLQRMVLPERSGGKVFWSMHTVMLLDMLALMVAYAAGSVLDWETSKNVFLLLLPVHIFVGGLLFICKQIQPSPQDEAGPNAGANTQEISNPTPSS

SEQ ID NO: 146112 - protein, 97 aa, Oryza sativa
  Clone ID: PAT_MRT4530_46768C.1.pep
MDGCEDNHRTCVVNPRFKAPAGNVVAAPAVTYRGIGRQEGPPPLRRPQEPAAVRRTLMRHTITCGGSVGGGCWRPLRRTWRSRAYSVSFWVSTATCP

SEQ ID NO: 146113 - protein, 162 aa, Oryza sativa
  Clone ID: PAT_MRT4530_46769C.1.pep
MPLMTKFCSFSALNQNRNQFSKLNSSRVHRVLTKQRNGGSEVQGAAETVVVGPRRQKSGVDVAGSTQGANCNFESTGLLEMSHRECMREKSGGNSPEREDSPAAADGRKGGGGGDVPAVQSASARSASVEPRWGRGELADEVHWLGVASVCWLATVDSAVNS

SEQ ID NO: 146114 - protein, 1952 aa, Oryza sativa
  Clone ID: PAT_MRT4530_4676C.1.pep
MESPTWPGTFGDVGPEGEVSALLLISPRGGRVALAPAPRAEVPRPPVGESLRSHPKPPAELAKGGLCGLPVRSHELRHLARQGEALERVEKSTASPVAGDARERRDGERRLLVYGDGSTPQGALQAVGALLRHPPVVPDPESPAQRWLDDVANLVMTAQQRLGAGGRSATTKTSGAATTGSVSSRRRARRAAAVARHSATTPSSAPPTREDQHEEPDARLDIERRRNSRRTPRAAEGASSSRVSPRQGREDQPSVPPVGGVGCRAFVASLRNVRWPPRFRPTITEKYDGSVNPTEFLQVYTTGIEAAGGDDRVMANFFPMALKGQARGWLMNLPPASRFCQVRNTIPCIPAHAVIYAFRGGVRHNRMLEKIASKEPQTTAELFQLADRVARKEEAWTWNPSGSGVAASAAPGSAAQTGRRDRRRKKRSVHSGDEGHVLAVEGAPRATRKGRPASDKKKEAGAPSRERPAGKWCSVHNTSLHDLADCRAVKNLAERTKKWEEDRRQERRENKSPAVLSGNRRREAKQKAPAEDIDGDDDDLGFQEPGATIATVDGGACAHVSRRSFKAMKRELLAAVPTHEATRRARWSEVALTFDQTDHPPCVARGGQIAMVVSPTICNVKLGRVLIDGGTALNILSPAAFDAIKAPGMVLQPSQPIIGVTPGHTWPLGHIDLPVTFGGSANFRTERVNFDVADLSLPYNAVLGRPALVKFMAAVHYAYLQMKMPGPGGPISVHGDLKVALACMEQCADHLAAASKPEGGDERLGTSAPTAPRQRIDTCDEVPEDALVSFLRANADVFAWRPADMPGVPREVIEHRLAVRPGARPVRQKVRRQAPERQAFIREEVARLLEAGFIREVIHPEWLANPVVVPKANGKLRMCIDYTDLNKACPKDPYPLPRIDQIVDSTAGCDLLCFLDAYSGYHQIRMAREDEEKTAFITPVGTYCFTSMPFGLKNAGPTFQRTTRISLGSQIGRNVEAYVDDLVVKTRNQETLLSDLAETFENLRSARIKLNPDKCVFGVPAGKLLGFLVSARGIEANPEKIRAIERMRPPSKLRDVQCVTGCMAALSRFISRLGEKALPLFKLLKRTGPFTWTEEAEHALTQLKAYLSSPPVLVAPEPNEPLLLYLAATPQVVSAALVVERDEDNPHFVHPHSVLTWPGSERGGEAPESDGGLRPLTTGAGPLPACQTVLGAPDPQEGPKATAGRPHLTPFDPEANPDGPEATEGRPPLSSSDPKVIGTEDKCAPKGHLNEERPGDTAPSREDRPHRRVQRPVYFVSEALRDAKTRYPQAQKMLYAILMASRKLRHYFQAHRVTVVTSYPLGQILHDREGTGRVVKWAIELSEFDLHFEPRHAIKSQALADFVAEWTPAPETVSIPEASTNPSQLPHTTHWVMQFDGSLSLQGAGAGVTLTSPTGDVLRYLVRLDFRATNNMAEYEGLLAGLRVAAGLGIRRLLVLGDSQLVVNQVCKEYRCSDPQMDAYVRQVRRMERHFDGIELRHVPRRDNMIADELSRLASSRAQTPPGAFEERLTQPSARPDPLGETDAPDRPPRPVGVQASGPEGSAPSSLRLIAWISEIQTYLTDKTLPEDREGSEREQGVELLADIHEGECGAHSASRTLVGKAFRQGFYWPTALNDAVDLVRRCRACQFHAKQIHQPAQALQIIPLSWPFAVWGLDILGPFKRAPGRFEYLYVAIDKFTKWPEAYPVVKIDKHSALKFIKGITARFGVPNRIITDNGTQFTSELFGDYCEDMGIKLCFASPAHPRSNGQVERANAEILKGLKTKTFNILKKHGDSWIEELPAVLWANRTTPSRATGETPFFLVYGAEAVLPSELTLRSPRATMYCEADQDQLRRDDLDYLEERRRRAALRAARYQQSLRRYHQRHVRARSLCVDDLVLRRVQTRAGLSKLSPMWEGLYRVIGVPRPGSVRLATGDGTELPNPWNIEHLRRFYP

SEQ ID NO: 146115 - protein, 450 aa, Oryza sativa
  unsure (1)..(450): unsure at all Xaa locations
  Clone ID: PAT_MRT4530_46770C.1.pep
MGEESSPAAAPAVEVLSYFVCPISLEIMRDPVTLSTGITYDRESIERWVFTDGHGECPVTKQRLAPADREPTPNHTLRRLIQGWCAVHAVERFPTPRPPVDAARVAAIVDAARPLLRRRRQREELMASLRELADIVAESDRNRRCVQGASGAVEFLLSVVKERASVAGVDDATSAKPEETTCGGVHDPAKASSPEEAALSILHSLKLSEESFKRVLEGSGGEDFLETMACVLRRPSYLSRMQGIHLLKSALPAMAPARLTSARAALVDGVVGVVADRPSAKAVKVALHVLCRLCPWGRNRVKAVDAGAVSALVRLLLDEGCGGGGGDRRACELAAVAIDHICXLRGGAPGSGGAPGGARXVACAATRLPAAAGAESAVRALHAVARHSATSAVLQEMLAVGVVARLLFLVQVGASGERTRARAREMLKMHARVWRDSPCLASHLNASYPR

SEQ ID NO: 146116 - protein, 87 aa, Oryza sativa
  unsure (1)..(87): unsure at all Xaa locations
  Clone ID: PAT_MRT4530_46771C.1.pep
HSDPSSDDEPDFPNFDQHVAHIFGGSTSYSFKRECKKVEREVCSTSRADNFRTKQITFDVAEFHTAYNAIIKRAALAKFMXASHCAY

SEQ ID NO: 146117 - protein, 81 aa, Oryza sativa
  Clone ID: PAT_MRT4530_46772C.1.pep
MAFFFSPFLQGGEGERVHSYSCSCKKSKRLNLRYQIAGHLRFSDPSSMILSLNSLQNSQGQMLVTHTGADGLAKCSILKGM

SEQ ID NO: 146118 - protein, 251 aa, Oryza sativa
  unsure (1)..(251): unsure at all Xaa locations
  Clone ID: PAT_MRT4530_46773C.1.pep
PSSDDEPDFPNFDQHVAHIFGGSTSYSFKRECKKVEREVCSTSRVSMSKMKWSGQKIEFSDNNPXRYPIVVEPTIWNVKVARVLINDGSTINLLFADTLDAIGIPRSELISSKQLFHGVTHXSSSRLLWKIMLLVTFGKADNFRTKQITFDVAEFHTAYNAIIKRAALAKFMXASHCAYXRIKVPGPKGIITIPRNEKMVVQCDKRNLDMIEQTPTTPAATEPPQKVSKPNSVGELGFIGFQFWGFLFRLA

SEQ ID NO: 146119 - protein, 953 aa, Oryza sativa
  unsure (1)..(953): unsure at all Xaa locations
  Clone ID: PAT_MRT4530_46774C.1.pep
MDDLTARPLLDSVVVSATGEIERRRERFSARSLVAWQVGALGDKVELNVFADDVRSAFHIRRADIQFTKFHPEDFFVTCSNQSDRDAILRQPRLATASGRVFLFRPWDESLHGVPVRYRYRARLCIEGVPMHARTDETAAKVIGRKCSIHYVEEYSRRGNYNRTYDMWVWTDEPRAIPRGGSFAITSADKEGLPTDIPLPELEPLRNPPPSEPKKGWSYDVLIHVDTLEDLHARKAWAYKWDYKVQDDGINFREYPLPCRAEPDPARGPDDEDEDGNDPSRGRYRSRSLWDRLSGRSHSRSRDPNRRDTQRRDQERRGRSRDRERSDHRYRAVEILQPDEPLFSQGRVDILDILESHLDPMLHEAAVHHSIYSPDTSSPRVSSPVFVPTSTGHAGADTPSACKAMKIDSFINGLATPVQPPLLPAPDVNARKPSRAKVKIPALVSAQRHSERLLCKRRAGAKLENFAQEILSKKFGIIDESASFDDNIKKLYLQRYKKPLSPASLKIIADLVEKGGCKTIGMKNLKKNAAIMSQDNVALFNWNVRGMNAKAKQDSVNFCIQQHAASIVCLQETKIAVVSDQIILNSLGQRFVRQYAALPADGTKGGIILACDENFFSLSDVRLGNYSISATVTMREERVQWSITVVYGPQIEADKIAFLAKLEDLHLEMKPAWFIVGDFNLIYKAADKNNDRLNRRMMQRFKGLIDKLQVKELHLPGRRFTWVGDGSNPTQTKIDRAFSTSDWDLLFPNLCLFPLSSTCSDHAPIFFVGNEKLSKFPNFKFESYWLHVPGFLDVVQNSWQKTILATNKLAIFRLKLRRLARDLRRWSRYQIGDIKLQLAIASEVILQLEIAQESRILSVDEQNLLTNLKSKFLGLAVLNKLKIRQRSRMTWLKEGDVNSKFFHIKANSRKRKNFIHTLHTPTGIAISAXDKEEELYRRCFRRGTKSHDFCSSP

SEQ ID NO: 146120 - protein, 205 aa, Oryza sativa
  unsure (1)..(205): unsure at all Xaa locations
  Clone ID: PAT_MRT4530_46775C.1.pep
MHFHLVLEAEALYSSXGKKKIKAFQFNHSWLKVRNXNNCPKFQALESLRRPSSQKSLTPTXRADEEDDGSKSTTPNSLQPNXKKRPTCRKQVKENLKNGGEAGPYKEAMKDLLDVKEKXDLREERWKETKEIQERKLSFAKHKIVWEQEQKIMFCDVSTLEXDVRTYVLAMRTQIVASKVAALNGQFGSGSSVFGGEFGSGNEEV

SEQ ID NO: 146121 - protein, 72 aa, Oryza sativa
  Clone ID: PAT_MRT4530_46776C.1.pep
EFDECACVPLGAQLWSGFHLSHDNRVIIAVIALIAGVRCDFCAILDDYHAIIAVIALPWGGDNPGPNDKVNP

SEQ ID NO: 146122 - protein, 67 aa, Oryza sativa
  Clone ID: PAT_MRT4530_46777C.1.pep
CVHVKWACMKHAIFTLSFYVSNPCIIPRFFMSSMYINKKGSAIEHRFRKTIWFTYFTTIHLKINIFY

SEQ ID NO: 146123 - protein, 60 aa, Oryza sativa
  Clone ID: PAT_MRT4530_46778C.1.pep
MASWRCANGLSDRVLSFTSMSKTPLRAPAMELGSLPHPNSALDTQLFNYADVHLHGDHIL

SEQ ID NO: 146124 - protein, 293 aa, Oryza sativa
  Clone ID: PAT_MRT4530_46779C.1.pep
ELPDAAYSRVDPRVRGRVGGRVGCCSGITDDGLEVVSIGCPNLVSLELYRCFNITDHGLENLCKGCHALKSLNLGYCVAISDQGIAAIFRNCPNISTIIIAYCRGLSGVGFRGCPGTLSHLEAESCMLSPDGLLDVVSGGGLEYLNLYNLKSPTGLDGLDRVGYARSLRFLNLRMCRYLTDDSVTAIASGCPLIEEWSLAVCHGVRLPGWSAIGLLCNKLRILHVNRCRNICDQGLQALGDGCVCLQVLHIHGCGKITNNGLASFSIARPNVKQRADEVMCIGPSIEDLFRLQ

SEQ ID NO: 146125 - protein, 1765 aa, Oryza sativa
  Clone ID: PAT_MRT4530_4677C.1.pep
MAERAKAHDLSPSVSGDDGELNPRRRARTPPSPPRPSPKQGEALEKVDKSMASPVAGGAGGRQDGERRLLVYGDGSTPQGALQAAGALLRHPPVVHDPESPAQRWLEDVANLVMTAQQRLGAGGRSATTKTSGAATTGSVSSRRRARRAAAAARHSAATPSSTPSTREDQHGEPDARLNIERRRNSRRTPRATEGASSSRVSPRHGREDQPSVPPAGGVGCRAFVASLRNVRWPPRFRPTITEKYDGSVNPTEFLQVYTTGIEAAGGDDRVMANFFPMALKGQARGWLMNLPPASVHSWEDLCQQFTMNFQGTYPRPGEEADLHAVQRGDDESLRSYIQRFCQVRNTIPCIPAHAVIYAFRGGVRHNRMLEKIASKEPQTTAELFQLADRVARKEEAWTWNSSSSGVAASAAPGSAAQTGRRDRRRKKRSDRSGDEGHVLAVEGAPRATRKGRPASDKKKEAGTPSKERPAGRWCSVHNTSLHDLADCRAVKNLAERTRKWEEDRRQERREGKSPAVPSGKRRSEAKQKAPAVDIDDGDDDLGFQEPGATIATVDGGACAHVSRRSFKAMKRELLAMAPTHEATRRARWSEVALTFDQTDHPPCIARGGQVAMVVSPTICNVKLGRVLIDGGAALNILSPAAFDAIKAPGMVLRPSQPIIGVTPGHTWPLGHIDLPVTFGGPANFRTERVSFDVADLSLPYNAVLGRPALVKFMAAVHYAYLQMKMPGPGGPISVHGDLKVALACMEQRADRLAAASKPEGGDERPGPSAPTAPRQRIATCDEVPEDALVSFLRANADVFAWRPADMPGVPREVIEHRLAVRPGARPVRQKVRRQAPERQVFIREEVARLLEAGFIREVIHPEWLANPVVVPKANGKLRMCIDYTDLNKACPKDPYPLPRIDQIVDSTAGCDLLCFLDAYSGYHQIRMAREDEEKTAFITPVGTYCYTSMPFGLKNAGPTFQRTTRISLGSQIGRNVEAYVDDLVVKTRNQETLLSDLAETFENLRSARIKLNPDKCVFGVPAGKLLGFLVSARGIEANPEKIRAIERMRPPSKLRDVQCVTGCMAALSRFISRLGEKALPLFKLLKRSGPFTWTEEAEHALTRLKAYLSSPPVLVAPEPNESLLLYLAATPQVVSAALVVERDEDNPHFVHPHSVLTWPGSKQGGEAPESNGGLRPLTTGDGPLPARQTVLGAPDPQEGPEATAGRPHLTPSDPEANPVLTRPGKEQGEEAPEPNGGQRPLTTGVGPLPACPTMPGAPDPQDGPEATEGRPPLSSSDPKVIGTEDKCAPKGHLNEERPGDTAPSREDRPHRRVQRPVYFVSEALRDARTRYPQAQKMLYAILMASRKLRHYFQAHRVTVVTSYPLGQILHNREGTGRVVKWAIELSEFDLHFEPRHAIKSQALADFVAEWTPAPETVSMPEASTNPSQLPHAAHWVMQFDGSLSLQGAVDLVRRCRACQFHAKQIHQPAQALQIIPLSWPFAVWGLDILGPFKRAPGGFEYLYVAIDKFTKRPEAYPVVKIDKHSALKFIKGITARFGVPNRIITDNGTQFTSELFGDYCEDMGIKLCFASPAHPRSNGQVERANAEILKGLKTKTFNILKKHGDSWIEELPAVLWANRTTPSRATGETPFFLVYGAEAVLPSELTLRSPRATMYCEADQDQLRRDDLDYLEERRRRAALRAARYQQSLRRYHQRHVRARSLCVDDLVLRRVQTRAGLSKLSPMWEGPYRVIGVPRPGSVRLATGDGTELPNPWNIEHLRRFYP

SEQ ID NO: 146126 - protein, 152 aa, Oryza sativa
  unsure (1)..(152): unsure at all Xaa locations
  Clone ID: PAT_MRT4530_46780C.1.pep
PTKPVTKXRVAAMRAQFKEIDARPAKKVAEAKARKKRVAMKKLDKARQKADAIADQNDINEQSKRKMIDRIYKKAIPKKPQKEYVVAKKGVQVRAGKGKILVDKRMKKDKRASKVKGGKGAKGKGKKGGGQKGGMRGKAGRKAPNCLAIEHD

SEQ ID NO: 146127 - protein, 158 aa, Oryza sativa
  Clone ID: PAT_MRT4530_46781C.1.pep
MGKTKGKQRQDKFYHLAKKQSYQSRAAFKLLQLDAWFRFLPTARTVLDLCAAPGGWVQVAVNHVPVGAFVVGVDLVPIRGAHSLTEDITTTKCRAAVRRLMDSNGVVVFDVVLHDGSPNVGGAWVQEATVQSSLIHNSLPPCRLVLPPSHRCSPPPQR

SEQ ID NO: 146128 - protein, 837 aa, Oryza sativa
  Clone ID: PAT_MRT4530_46782C.1.pep
MGKTKGKQRQDKFYHLAKEQGYRSRAAFKLLQLDARFRFLPTARAVLDLCAAPGGWVQVAVNHAPVGAFVVGVDLVPIRPIRGAHSLTEDITTTKCRAAVRRLMDSNGVAAFDVVLHDGSPNVGGAWAQEATAQSSLVIDAVRLATMFLAPKGAFITKVFRSQDYNAIMYCLKQVRDPLKPDRQKRNRDGYEEGNTTLRKVGLASDFIWSEGQTPLEFLGSFNAISFDDPASLPIKNHELTTDEIKALCEDLYVLDKNSFKHILKWRIRIRKALSSSEVTKKTDDTAVEVNVKDDDQLLQEMEELTSVIDRKKKREKKRQSKRRAKDKARKATGMQIDATGDNYGDPDLFSISAIKGGKELQAIESAELNVEDAQGDSENEDIQTREYSDEEMDSDEEQQRFYNFTAIPKMCNMVIFPTRYDAQLEEMLDEAYERYVTKKGGEVKQVRKRAKRVNTDADEELLEGGEDDGDDVDMDQGSDEEQDQETNPLLLSLDAEKPTKEQMMEQWFSQDVFTEAGTGVVEQSDSEDEREQLTRIAKKKADSGKKEKSAKAKHLQQDDFEIVPAEPVRTEDDSSSSSDESDELDEDLDDDTKAEVLAYARKMLRKKQREQILDDAYNKYMFDDEGLPKWFAEDEKRHNQPMKPVTKEEVAAMRAQFKEIDARPAKKVAEAKARKKRVAMKKLDKARQKADAIADQNDINEQSKRKMIDRIYKKAIPKKPQKEYVVAKKGVQVRAGKGKILVDKRMKKDKRASKVKGGKGAKGKGKKGGGQKGGMRGAAMFKGFNTMIKGEVDRVIQAGASSEVSTSGKEFQEPNISVDQKQTIDNDKHSLDFGPT

SEQ ID NO: 146129 - protein, 190 aa, Oryza sativa
  Clone ID: PAT_MRT4530_46783C.1.pep
MGNMLPCLVQGRTTLPAAMNPKQRLYSLKLLVKALHKLKKKMMMKPNKGKKIGSSKPSSPAAPAEAASATAAAVAGGGVEAAIGSSKPKVSPRRAAQGGQRKGVVRVKVVLTKEEAARLLSLTVVSAGAGAGGGRRKTTAQIIAEIKRMEIRRAMATSSAAVAWRPALASIPEEQHHHSPRRSLGVQQVA

SEQ ID NO: 146130 - protein, 154 aa, Oryza sativa
  Clone ID: PAT_MRT4530_46784C.1.pep
QIVTWYQTLVPKTLATKSDHHRRTGGGEPPASHHHRPPSSLNVFVSKQQACSSSSSPCSCSPVAAAASCGAAPVPTSPPTQPRRRGVHPRCSSRGSFLPPFESRRCGLVNLHQGIKQHQFLAHFLSVSISKPSSSLICSSNNNNSRSPPSRCSS

SEQ ID NO: 146131 - protein, 172 aa, Oryza sativa
  Clone ID: PAT_MRT4530_46785C.1.pep
HWRDVKTSQCDAATRKSSAAGYVHLTRSSSDRTAHAPRTRRLEPLQLLFHLSPILFLPRPARLLLRTQKYQRTQKRREAKNRGDAMNVEEEVGKLKEEIQRLGQKQPDGSYKVTFGVIFNDDRCANIFEALVGTLRAAKKRKIVKYDGELLLQGAHDNVEITLLPPPAVAAA

SEQ ID NO: 146132 - protein, 463 aa, Oryza sativa
  Clone ID: PAT_MRT4530_46786C.1.pep
MEAFVSGGAGGVGAAAVVGVFVAAAVVGGFVAAVALAERAGVIAPRKRPNAPPAVPGLPIIGNLHQLKEKKPHQTFTKWAEIYGPIYTIRIGASSVVVLNSTEVAKEAMVAKFSSISTRKLSKALTVLTRDKSMVATSDYGDFHKMVKRYVMSSTLGTSAQKKFRDTRDMMINNMLSTFHKLVKDDPHVPLIFRDVFKDELFRLSMIQSLGEDVSSVYVDEFGRDISKEEIYNATVTDMMMCAIEVDWRDFFSYLSWVPNKSFETRVFTAEARRTAVMRALIKQQKERIVRGEERLYQEIREVCGDETVTEEHLPRLPYLNAVFHETLRRHSPVPLIPPRFVHEDTKLAGYDVPAGTEMVINLYGCNMNKKEWESPEEWVPERFTGGRLEVADMYKTMAFGAGRRACAGSLQVMHIACTAIARFVQEFGWRLTEGDEEKVDTVQFTAYKLHPLHVHLTPRGRM

SEQ ID NO: 146133 - protein, 91 aa, Oryza sativa
  unsure (1)..(91): unsure at all Xaa locations
  Clone ID: PAT_MRT4530_46787C.1.pep
PLPVAPGRAPPRPWALSXRPARALGWRLLRTIDERAGRPRTCTAAAMQRIAAGDAASLRIRTRSGNSSDLSAMAVLASASGTGDVRIVSRT

SEQ ID NO: 146134 - protein, 508 aa, Oryza sativa
  Clone ID: PAT_MRT4530_46788C.1.pep
MESLLAAGAGGIGVAAAAVGGFIAAATLAVAPPKNRRNPPPAVPGLPIIGNLHQLKEKKPHQTFTKWAEIYGPIYTIRTGASSVVVLNSTEVAKEAMVAKFSSISTRKLSKALTVLSHDKSMVATSDSGDFHKMGKRYIMLSMLGTSAQKQFRDTRDMIINNMLSTFHQLVKDDPHAPLIFRDVFKDELFRLSMIQSLGEDVSSVYVDEFGRDISKEEIYNATVTDMMMCAIEVDWRDFFPYLSWVPNKSFETRVFTTESRRTAVMRALIKQQKERIVRGEARTCYLDFLLAENTLTDEQLMMLVWEALIEAADTTLVTTEWAMYELAKNPDKQARNIERLYQEIREVCGDEAVTEEHLPWLPYLNAVFQETLRRHSPVPLIPPRFVNEDTMLAGYDVPAGTEMVINLYGCNMNKKEWESPEEWAPERFAGGRFKVADMYKTMAFGAGRRVCAGSLQATHIACAAIARFVQEFGWRLREGDEEKVDTVQLTAYKLHPLHVHLTPRGRM

SEQ ID NO: 146135 - protein, 535 aa, Oryza sativa
  Clone ID: PAT_MRT4530_46789C.1.pep
MEAFVSGGAGGVGAAAVVGVFVAAAVVGGFVAAVALAERAGVIAPRKRPNAPPAVPGLPIIGNLHQLKEKKPHQTFTKWAEIYGPIYTIRIGASSVVVLNSTEVAKEAMVAKFSSISTRKLSKALTVLTRDKSMVATSDYGDFHKMVKRYVMSSTLGTSAQKKFRDTRDMMINNMLSTFHKLVKDDPHVPLIFRDVFKDELFRLSMIQSLGEDVSSVYVDEFGRDISKEEIYNATVTDMMMCAIEVDWRDFFSYLSWVPNKSFETRVFTAEARRTAVMRALIKQQKERIVRGEAKICYLDFLLAENTLTDEQLTMLVWEELIEAADTTLVATEWAMQEIFVTLFQLILGIINPNVFFWAFFWSCQERLYQEIREVCGDETVTEEHLPRLPYLNAVFHETLRRHSPVPLIPPRFVHEDTKLAGYDVPAGTEMVINLYGCNMNKKEWESPEEWVPERFTGGRLEVADMYKTMAFGAGRRACAGSLQVMHIACTAIARFVQEFGWRLTEGDEEKVDTVQFTAYKLHPLHVHLTPRGRM

SEQ ID NO: 146136 - protein, 2027 aa, Oryza sativa
  Clone ID: PAT_MRT4530_4678C.1.pep
MAERAKAHDLSPSVSGDDGELNPRRRARTPPSPPRPSPKQGEALEKVDKSMASPVAGGAGGRQDGERRLLVYGDGSTPQGALQAAGALLRHPPVVHDPESPAQRWLEDVANLVMTAQQRLGAGGRSATTKTSGAATTGSVSSRRRARRAAAAARHSAATPSSTPSTREDQHGEPDARLNIERRRNSRRTPRATEGASSSRVSPRHGREDQPSVPPAGGVGCRAFVASLRNVRWPPRFRPTITEKYDGSVNPTEFLQVYTTGIEAAGGDDRVMANFFPMALKGQARGWLMNLPPASVHSWEDLCQQFTMNFQGTYPRPGEEADLHAVQRGDDESLRSYIQRFCQVRNTIPCIPAHAVIYAFRGGVRHNRMLEKIASKEPQTTAELFQLADRVARKEEAWTWNSSSSGVAASAAPGSAAQTGRRDRRRKKRSDRSGDEGHVLAVEGAPRATRKGRPASDKKKEAGTPSKERPAGRWCSVHNTSLHDLADCRAVKNLAERTRKWEEDRRQERREGKSPAVPSGKRRSEAKQKAPAVDIDDGDDDLGFQEPGATIATVDGGACAHVSRRSFKAMKRELLAMAPTHEATRRARWSEVALTFDQTDHPPCIARGGQVAMVVSPTICNVKLGRVLIDGGAALNILSPAAFDAIKAPGMVLRPSQPIIGVTPGHTWPLGHIDLPVTFGGPANFRTERVSFDVADLSLPYNAVLGRPALVKFMAAVHYAYLQMKMPGPGGPISVHGDLKVALACMEQRADRLAAASKPEGGDERPGPSAPTAPRQRIATCDEVPEDALVSFLRANADVFAWRPADMPGVPREVIEHRLAVRPGARPVRQKVRRQAPERQVFIREEVARLLEAGFIREVIHPEWLANPVVVPKANGKLRMCIDYTDLNKACPKDPYPLPRIDQIVDSTAGCDLLCFLDAYSGYHQIRMAREDEEKTAFITPVGTYCYTSMPFGLKNAGPTFQRTTRISLGSQIGRNVEAYVDDLVVKTRNQETLLSDLAETFENLRSARIKLNPDKCVFGVPAGKLLGFLVSARGIEANPEKIRAIERMRPPSKLRDVQCVTGCMAALSRFISRLGEKALPLFKLLKRSGPFTWTEEAEHALTRLKAYLSSPPVLVAPEPNESLLLYLAATPQVVSAALVVERDEDNPHFVHPHSVLTWPGSKQGGEAPESNGGLRPLTTGDGPLPARQTVLGAPDPQEGPEATAGRPHLTPSDPEANPVLTRPGKEQGEEAPEPNGGQRPLTTGVGPLPACPTMPGAPDPQDGPEATEGRPPLSSSDPKVIGTEDKCAPKGHLNEERPGDTAPSREDRPHRRVQRPVYFVSEALRDARTRYPQAQKMLYAILMASRKLRHYFQAHRVTVVTSYPLGQILHNREGTGRVVKWAIELSEFDLHFEPRHAIKSQALADFVAEWTPAPETVSMPEASTNPSQLPHAAHWVMQFDGSLSLQGAGAGVTLTSPNGDVLRYLVRLDFRATNNMAEYEGLLAGLRVAAGLGIRRLLVLGDSQLVVNQVCKEYRCSDPQMDAYVRQVRRMERHFDGIELRHVPRRDNVIADELSRLASSRAQTPPGAFEERLTQPSARPDPLGETDVPDRPPRPVGVQASGPEGSASSSLRLIAWISEIQTYLTDKTLPEDREGSERVQRISKRYVLVEGTLYRRAANGILLKCIPQEQGVELLADIHEGECGAHSASRTLVGKAFRQGFYWPTALNDAVDLVRRCRACQFHAKQIHQPAQALQIIPLSWPFAVWGLDILGPFKRAPGGFEYLYVAIDKFTKRPEAYPVVKIDKHSALKFIKGITARFGVPNRIITDNGTQFTSELFGDYCEDMGIKLCFASPAHPRSNGQVERANAEILKGLKTKTFNILKKHGDSWIEELPAVLWANRTTPSRATGETPFFLVYGAEAVLPSELTLRSPRATMYCEADQDQLRRDDLDYLEERRRRAALRAARYQQSLRRYHQRHVRARSLCVDDLVLRRVQTRAGLSKLSPMWEGPYRVIGVPRPGSVRLATGDGTELPNPWNIEHLRRFYP

SEQ ID NO: 146137 - protein, 541 aa, Oryza sativa
  Clone ID: PAT_MRT4530_46790C.1.pep
MEAFVPGGAGAAAPAVAAVGGFVAAAALAERAGVIAPRKRTNAPPAVPGLPIIGNLHQLKEKKPHQTFAKWAEIYGPIYTIRTGASSVVVLNSTEVAKEAMVAKFSSISTRKLSKALTVLTRDKSMVATSDYCDFHKMVKRYVMSSMLGTSAQKQFRDIRDMMIHNMLSTFHKLVKDDPHAPLIFRDVFKDELFRLSMIQSLGEDVSSVYVDEFGRDISKEEIYNATVTDMMMCAIEVDWRDFFPYLSWVPNKSFETRVFTTETRRTAVMRALIKQQKERIVRGEAKTCYLDFLLAENTLTDEQLMMLVWEALIEAADTTLVTTEWAMYELAKNPDKQARNIVTLFQLIVGILGIINQSFLFLAFFLLSCQERLYQEIREVCGDETVTEEHLPRLPYLNAVFHETLRRHSPVPLIPPRFVHEDTKLAGYDVPAGTEMVINLYGCNMNRKEWESPEEWVPERFAGGRLEVADMYKTMAFGAGRRACAGSLQATHIACAAVARFVQEFGWRLREGDEEKVDTVQLTAYKLHPLHVHLTRRGRM

SEQ ID NO: 146138 - protein, 59 aa, Oryza sativa
  Clone ID: PAT_MRT4530_46791C.1.pep
RVGCTPRAGGRDMGASRWEEANRSTQQASSDARPPAAPPPPTAHLIAPARRRHAPARVR

SEQ ID NO: 146139 - protein, 73 aa, Oryza sativa
  unsure (1)..(73): unsure at all Xaa locations
  Clone ID: PAT_MRT4530_46792C.1.pep
SSPRSSYLHICACLQKSKHKLAKIFRAHTVPILRSLTCLVVNILPMSFLFSKRTNYSLSLGLHLQVFLXSQLK

SEQ ID NO: 146140 - protein, 947 aa, Oryza sativa
  Clone ID: PAT_MRT4530_46793C.1.pep
MAAASPLARLLAALLAVAAAATAATALTDDVLALVVFKTGVADPMGRLAAWTEDDDRPCSWPGVGCDARAGRVTSLSLPGASLSGRLPRALLRLDALASLSLPRNNLSGPVLPGLLAALPRLRSLDLSSNRLAAPVPAELFAQCRSIRALSLARNELSGYIPPAVTSCASLVSLNLSSNRLAGPIPDGLWSLPSLRSLDLSGNELSGSVPGGFPGSSSLRAVDLSRNLLAGEIPADVGEAALLKSLDVGHNLFTGGLPESLRRLSALRFLGVGGNALAGEVPSWIGEMWALERLDLSGNRFSGAIPDAIAKCKKMVEADLSRNALAGELPWWVFGLPLQRVSVAGNKLYGWVKVPADAALALRALDLSSNGFSGGIPPQITAFAGLQYLNMSSNSFARQLPAGIGGMRLLEVLDVSANRLDGGVPPEIGGAVALRELRLGRNSFTGHIPSQIGNCSSLVALDLSHNNLTGSIPSTVGNLTSLEVVDLSKNKLNGTLPVELSNLPSLRIFDVSHNLLSGDLPNSRFFDNIPETFLSDNQGLCSSRKNNSCIAIMPKPIVLNPNSSTNPLSQATPTAPSSMHHKKIILSVSTLIAIAGGGTIIIGVIIISVLNRRARATTSRSAPATALSDDYLSQSPENDASSGKLVMFGKGSPEFSAGGHALLNKDCELGRGGFGAVYKTVLRDGQPVAIKKLTVSSLVKSKDDFERQVKLLSKVRHHNVVALRGFYWTSSLQLLIYDYLPGGNLHKHLHECTEDNSLSWMERFDIILGVARGLTHLHQRGIIHYNLKSSNVLLDSNGEPRVGDYGLAKLLPMLDRYVLSSKIQSALGYMAPEFACKTVKITEKCDVYGFGVLVLEVLTGRRPVEYLEDDVVVLCDLVRSALEEGRLEDCMDPRLCGEFPMEEALPIIKLGLVCTSRVPSNRPDMGEVVNILELVRSPQDSLEDELV

SEQ ID NO: 146141 - protein, 126 aa, Oryza sativa
  Clone ID: PAT_MRT4530_46794C.1.pep
VDEESILKALPADLRRDIKRHLGLDLVCRVPFFSQMDGQLLDAICERLVSSLSTVGTYIVREGDPVTEMLFIIRGKLESSTTDGGRTGFFNSITLKTGDFCGEELLGWALVPKPTVNLPSSTKTVK

SEQ ID NO: 146142 - protein, 73 aa, Oryza sativa
  unsure (1)..(73): unsure at all Xaa locations
  Clone ID: PAT_MRT4530_46795C.1.pep
QEEPSTEQLCQPKISYXPTYPLPRCRTFVKRQCVAPGTVDEQVRRGCCRQLADFGRSXCMCDALNHMLKIIYR

SEQ ID NO: 146143 - protein, 96 aa, Oryza sativa
  unsure (1)..(96): unsure at all Xaa locations
  Clone ID: PAT_MRT4530_46796C.1.pep
SPRLLXLPPPSRRPXPAPPPPRRPSPXXSRRSPXLPAPRIPPGRAXXGCPRRRXRAHLRLRLASPELRXFXGRGNRLVPTNGDGLLLAICSVSVHQ

SEQ ID NO: 146144 - protein, 749 aa, Oryza sativa
  Clone ID: PAT_MRT4530_46797C.1.pep
MELRKQRTVRFHEERAKPTIPTHQKQAGLATSKLGLGISEKNKIFLAGNELWYKKIIDPSSDFILTWNYVLRIACFVALFMDPLYFYVPKIYYGTPNSCIGRDTRLAIIVTVFRSITDLFYVLQIIIKFRTAYINPSSTLGVFSRGDLVTDPGNIAKHYLRSSFVVDLVASLPLPQLKRASALLYLKFEIIIWSVIPSVKYSLSEHDDDILLLIALFQYVLRLYLVFSLNSKIVEVTGAFSKTAWQGAAYNLLLYMIASHVLGALWYLLSVDRQTACWEKYCSKEAGCQNRYLACDIQSDSNWKISTAIFNKCDATNKTIDFDFGMFTPLLSNQAPDQGFLKKFFYCLWWGLQNLSCYGQTLTVSTYIGETLYAIFLAVLGLVLFAHLIGNVQTYLQSITARVEEWRIKQRDTEEWMRHRQLPQKLRERVRRFVHYKWLATRGVDEESILKALPADLRRDIKRHLCLDLVCRVISLPFITTFEWTKEVDTRKINRRGNEKNDRIGTCTFSFFPFLASYTLDTGSFLVTGQLQLPVNVSLMDGQLLDAICERLVSSLSTVGTYIVREGDPVTEMLFIIRGKLESSTTDGGRTGFFNSITLKTGDFCGEELLGWALVPKPTVNLPSSTRTVKTIVEVEAFALRAEDLKFVASQFRRLHSRKLQHTFRYYSHHWRTWAACFIQAAWRRYKRRRLAKDLSIRESFFSRRSFEDDGSPEHSLVLNAVRKGAHIIKELPKFRKPSEPDFSAEHDD

SEQ ID NO: 146145 - protein, 123 aa, Oryza sativa
  Clone ID: PAT_MRT4530_46798C.1.pep
QRGGPVFYAAGPPGFPIGKLAFAARPSSCFCARLGRPRLSLLCVRPVVCVAWAAAPCFPPGPVLSMVAPSFYSPPPRVSCGRLQVLVRYFRVGPGVRPRGRPGVRPAVPVNQTGRPTRPTTRP

SEQ ID NO: 146146 - protein, 985 aa, Oryza sativa
  Clone ID: PAT_MRT4530_46799C.1.pep
MLMFPLARPPGRHYADATLRRGQWRLSHHLRAAAAATSGGGAPDVFDAVPALDDRMRCSALLRERAVGGDHYGCTSLLRWMLARGLRPNRLALAAAVKSSSALPDCRGGAALGRCLHGLAVKVGYADGAVVAKAVMDMYGRIGSLADAHTVFDEMSCSDAVCRNILITASSRAGLYNDVFHLFRAMLASGVDESMPTAVTVAVVLPVCAKLRVLRAGRSIHGYVIKTGLEFDTLSGNALVSMYAKCGGSIAMDDAHLAFSTICCKDVVSWNSIIAGYSENGLFEEALALFGQMISEECLPNYSTLANVLPFCSLVEYGRHYGKEIHGFVVRHGLEMDISVSNALMAHYSKVCEMRAVESIFRSSKMGDIVTWNTVIAGYVMNRYPSRALKLFQGLLFAGMAPDSVSLISLLTACAQVGNLRVGIRVHGYIFRHPELLQETSLMNALVSFYSQCDRFDAAFRSFITIQNKDSVSWNAILSACANSEHHIEQFFRLLGEMWHDVTQWDSVTILNIIRMSTFCGIKMVQESHGYSLRVGYTGDSSVANAILDAYAKCGYLHDAETLFRSLAGRNIVTGNTMISCYLKNNCVEDAEMTFNHMAEKDLTTWNLMSRLYAQNDLCDQAFCLFHQLQSEGLNPDTISITNILSACIHLSSVQLVKQCHGYMLRASLEDIHLEGALLDAYSKCGNIANAYNLFQVSLHKDLVIFTAMIGAYAMHGMAEKAVELFSKMLTLDIKPDHVVLTALLSACSHAGLVDAGIKIFKSIREIYGVEPTEEHCACMVDLLARSGRLQDAYSFALDMPPHVVNANAWGSLLGACKVHGEVKIGQLAADRLFSMEAEDIGNYVIMSNIFAADDKWESVEHVRKLMKSKDMKKPAGCSWIEVEKTRHLFVASDVQHQDRFSIYDVLGSLYQQIRGQQMETSAYNREPVGVSLSAQKKIGSWRCIVLPETEKRVEDLYSDVKKAKMNLMKESKHSVDPEAPLLIA

SEQ ID NO: 146147 - protein, 519 aa, Oryza sativa
  Clone ID: PAT_MRT4530_4679C.1.pep
MAISSALSFLSDRKRPIVVSVFLFLLLSSLFLLFSPAPAALPFFSFPSSHLSSSSSSPIAATPPPLTPVSVPANASSPETPVDASGGSNAGATAPTRDAPQPDRSRSTPPAAVGVRGSAGTNGTSRGVSAGGDGAGAAAAAAAGVAVPSWEVCEVGKGVVAADYIPCLDNVKAVKALKSLRHMEHRERHCPTAPRPRCLVPLPTGYRSPLPWPRSRDMEYLTKSLLCAVWFGCAVIGDTQPKLACLSIQIWYNNVPHPKLVEYKKDQNWVRKSGNYFVFPGGGTQFKAGVTKYIRFIQQLWWILADRNVITMSVAPKDEHEAQIQFALERGIPALLAVIGTQKLPFPDNSFDVIHCARCRVHWYAPLDSCLLLPAVSSSGEGNSWPISWPERLNIKYSTISDNASTQFSQEKFDSDTKHWKDLVSEVYFNEFAVNWSTVRNVMDMNAGFGGCDIIEVAAEIDRILRPGKWFVLQDTEQVIRKMDPVLRSLHYRTAIVKQQFLVATKGFWRPYSAGSESR

SEQ ID NO: 146148 - protein, 307 aa, Oryza sativa
  unsure (1)..(307): unsure at all Xaa locations
  Clone ID: PAT_MRT4530_467C.1.pep
MAAAPPLAAGLRPAMAAAQAPVVAAAWGVGARRGAALSSSARCRALRLSRGGGGGRDGWVPPPVVGRMPPRTLSVXCAASNGRITQQEFTEMAWQSIVSSPEVAKESKHQIVETEHLMXHCWEQRNGLARRIFSKXGVDNTRLLDATEKFIQRQPKVXGEDPGSMLGRDLEALIQRARDFKKEYGDSFVSVEHLVLGFAEDKRFGRQLFKDFQITVQSLKTAIESIRGKQNVIDQDPEGKYEALDKYGKDLTAMARQGKLDPVIGRDDEIRRCIQILSRRTKXNPVLIGEPGXGKTAIAEGLSQRIX

SEQ ID NO: 146149 - protein, 193 aa, Oryza sativa
  unsure (1)..(193): unsure at all Xaa locations
  Clone ID: PAT_MRT4530_46800C.1.pep
FLLIWNKVQSVQLQPRMEDRLPWRWSSNTAFSSSSGYXVLLGRLALRFACAHLLWYVQAPLKCWFFLWLAVQKHCWTTDVMLRQIMNRHSFSPFNTQEQETTNHVIIVCIFAHXVWLQALSSVGWGAVARNRHHMLQDWXLLVRWSLAPDHYCPFDSLVLLVSWQLWKKHNARIFNDMLSSVPLVVVRIIQES

SEQ ID NO: 146150 - protein, 576 aa, Oryza sativa
  unsure (1)..(576): unsure at all Xaa locations
  Clone ID: PAT_MRT4530_46801C.1.pep
MATRARATILLLLAAVLFAAAAAASGEDRRRETSLRRCLQRCEQDRPPYERARCVQECKDQQQQQQERRREHGGHDDDRRDRDRRGEGSSEEEDEGRERGSRRRPYVFGRRSFRQVVRSDQGSVRLLPPFHQASSLLRGIKNYRVAVLEANPRSFVMPTHTDAHCICYVAQGEGVVAIIENGEKWSYAIRQGDVFVAPAGTINYLANTDGRRKLIVTKILHTISVPGQIQFFFAPGGRNPESFLSSFSKGVQRAAFKISEEKLEKLLGKQDKGVIIRASEEQVRELRRHASEGXATARTGRCXPFGESSRGPFNILEQRPRFANRHGXPLRGRRPQLPRPRRARHPRRRRQHHRGIHERAVLQHPVGQGRLRPGRRGGGRDRVPAPVARRPRGESEERRRERGKGKWREEEEEEEEQQKGQEEEEEEQVGQGYETIRARLSRGTVFVVPSGHPIVVTSSRDSTLQIVCFDVHANNNERMYLAGMNSVLKKLDPQAKELAFAASAREVDELXQRAAGVRVPRRPGEERPPRRGIGGRRPPPPPQPPWARRRGGGDAPEDGSRCGVTRSAATSGVASA

SEQ ID NO: 146151 - protein, 230 aa, Oryza sativa
  unsure (1)..(230): unsure at all Xaa locations
  Clone ID: PAT_MRT4530_46802C.1.pep
PTHTDAHCICYVAQGEGVVAIIENGEKWSYAIRQGDVFVAPAGTINYLANTDGRRKLIVTKILHTISVPGQIQFFFAPGXEEPGVILVELQQGRAESCFQGTXRXAGEAAGEAGQGGDHPRVGGAGAGAAAPRVGGRPRPALAAAAVRRVVARPLQHPGAEAQVRQPPRPPLRGRRPQLPRPRRARHPRRRRQHHRGIHERAVLQHPVGQGRLRPGRRGGGRDRVPAPVA

SEQ ID NO: 146152 - protein, 67 aa, Oryza sativa
  Clone ID: PAT_MRT4530_46803C.1.pep
MSTYDRQINTTPGGFKSSNRNRVLPLIERMLLDGDPQAARHRSVLEKYREKAKISIESIQSKVETGE

SEQ ID NO: 146153 - protein, 114 aa, Oryza sativa
  Clone ID: PAT_MRT4530_46804C.1.pep
MGISPPRDAQGQDVSVREEALYATALIAPDKRHELGRDLVVALSYMRDAESRICTLWVSEEHVVTTPSLPMDQFVPTEPCSTDHLSLPSCPFRVLTTVPHVHTWGGTRRRKGEK

SEQ ID NO: 146154 - protein, 49 aa, Oryza sativa
  Clone ID: PAT_MRT4530_46805C.1.pep
MKTAGSSVVFAMGIIRQNAVSAGHASSKSVTEKALEQGKIRDHIQDEHY

SEQ ID NO: 146155 - protein, 124 aa, Oryza sativa
  Clone ID: PAT_MRT4530_46806C.1.pep
LVPSSVPPCERVAYRRCAGGDPLPTPSVAGSAPSGGASADQEEAETIASGNARNTSSTVRRIHFPIHCLLTTLTPPSLLIPGASAQPGFCRSTTVASNGRFDDLGLHLLHRFVASPSPSCMDLA

SEQ ID NO: 146156 - protein, 82 aa, Oryza sativa
  Clone ID: PAT_MRT4530_46807C.1.pep
DKATGPASPTANPHCQTPTTGATRGIREITMLKVPSVRDPKIASTQQTVRRSTLSFLQTGKKVPAGQLQSSTTCHLPQMTDH

SEQ ID NO: 146157 - protein, 101 aa, Oryza sativa
  Clone ID: PAT_MRT4530_46808C.1.pep
FGFFFFFVFFFFFFFFFFFFFFFFFWENQNFIGGGFKNALGINLQGARGLGGDFGFTGPGLPAPKKKPVGGGDPLQQPGGGAKELLDDFLGITASPLGGNP

SEQ ID NO: 146158 - protein, 1663 aa, Oryza sativa
  Clone ID: PAT_MRT4530_46809C.1.pep
MAGSVTRRGLSMTGFVLELRGMCVVLGYPHGVDYQARPLPEQEGEDAEPHAGWEVTAVILSGSPERTSLAVTAGGDSFPAACQNAALLAIGTLHQRYPDELQHSPYRYHPRRGGASDHATFRDASSEDDATVVHLARMVEAYDAARIDFHQMVRRGMVENNMKILELRQENLQLKKDLDALEAQPHQLKVAQGEISRPKRRRVCRSQKITARKSTSRPELVRQSLAWTCFVETPRAEPAPVVPQEGEASGVGSSEGALLLTFRPGPSQRQPPEGSNPNPQGNPPPPPPPDTNAILTQILAQQANMMNAFLHHLQNPPQQNAPPPPPQHSKLAEFLRIRPPTFSSSNNPVDALDWLHAVGKKLDTVQCSDEEKVIFAAHQLQGPASLWWDHFQAAQPEGQPITWTRFTAAFRRTHVPAGVVALKKKEFRELKQGNRSVMEYLHEFNNLARYAPEDVREDEEKQEKFLAGMDPELSVRLVSGDYPDFQRLVDKSIRLEAKHKELESHKRRLANIRNQQGANQRVRYTNPYPGGSSSQQQQQQQQQPRSAPRPQFVVRVPQQQPQQNQQGTRAPRPPTPAGQPVQGRRDASGPQRLCFNCFEPGHFADKCPKPRRQQGQAPPRPNNGGKDVIRGRVNHVTAEDVLTTPDVIVGVVDCARRTVTLYRGPEQPVVFFAPPTSVRSSELHQIGLSEIPIVREFGDVFPEELPGMPPKREIEFRIDLAPGTTPLYKRPYRMAANELAEVKKQLEELKEKGYIRPSTSPWGAPVIFVEKKDKTKRMCVDYRALNEVTIKNKYPLPRIDDLFDQLKGATVFSKIDLRSGYHQLRIREEDIPKTAFTTRYGLYEFTVMSFGLTNAPAFFMNLMNKVFMEYLDKFVVVFIDDILIYSQTEEDHQHHLRLVLGKLREHQLYAKLSKCEFWLSEVKFLGHVISAKGVAVDPETVTAVTEWKQPKTVTQIRSFLGLAGYYRRFIENFSKIARPMTQLLKKEEKFVWSPQCEKAFQTLKEKLVSSPVLILPDTRKDFMVYCDASRQGLGCVLMQDGHVVAYASRQLRPHEGNYPTHDLELAAVVHALKIWRHYLIGNRCEIYTDHKSLKYIFTQSDLNLRQRRWLELIKDYDVGIHYHPGKANVVADALSRKSHCNTLNVRGIPPELNQQMEALNLSIVGRGFLAALEAKPTLLDQIREAQKNDPDMHGLLKNMKQGKAAGFTEDEHGTLWNGKRVCVPDNRELKQLILQEAHESPYSIHPGSTKMYLDLKEKYWWVSMKREIAEFVALCDVCQRVKAEHQRPAGLLQPLQVPEWKWDEIGMDFITGLPKTQGGYDSIWVVVDRLTKVARFIPVKTTYGGNKLAELYFARIVSLHGIPKKIVSDRGSQFTSHFWKKLQEELGTRLNFSTAYHPQTDGQTERLNQILEDMLRACVLDFGKTWDKSLPYAEFSYNNSYQASIQMAPYEALYGRKCRTPLLWDQVGESQVFGTDILREAEAKVRIIRDNLKVAQSRQKSYADNRRRDLEFAVDDFVYLRVTPLRGVHRFQTKGKLAPRYVGPFRIIARRGEVAYQLELPASLGNVHDVFHVSQLKKCLRVPSEQANSEQIEVREDLTYVERPVKILDTMERRTRNRVIRFCKVQWSNHAEEEATWEREDELKAAHPDLFASSSESRGRDSV

SEQ ID NO: 146159 - protein, 49 aa, Oryza sativa
  Clone ID: PAT_MRT4530_4680C.1.pep
MAHGHDRDTVAPMSSIQIIRRCEILNLMKGSLHRTFGEASANPKCSWRL

SEQ ID NO: 146160 - protein, 480 aa, Oryza sativa
  Clone ID: PAT_MRT4530_46810C.1.pep
SDLNLRQRRWLELIKDYDVGIHYHPGKANVVADALSRKSHCNTLNVRGIPPELNQQMEALNLNIVGRGFLAALEAQPTLLDQIREAQKNDPDMHGLLKNMKQGKAAGFTEDEHGTLWNGKREKYWWVSMKREIAEFVALCDVCQRVKAEHQRPAGLLQPLQVPEWKWDEIGMDFITGLPKTQGGYDSIWVIVDRLTKVARFIPVKTTYGGNKLAELYFARIVSLHGVPKKIVSDRGSQFTSHFWKKLQEELGTRLNFSTAYHPQTDGQTERLNQILEDMLRACVLDFGKTWDKSLPYAEFSYNNSYQASIQRAPYEALYGRKCRTPLLWDQVGESQVFGTDILREAEAKTKGKLAPRYVGPIRITARRGEVAYQLELPASLGNVHDVFHVSQLKKCLRVPSEQADSEQIEVREDLTYVEKPVKILDAMERRTRNRVIRFCKVQWSNHAEEEATWEREDELKAAHPDLFASSSESRGRDSV

SEQ ID NO: 146161 - protein, 258 aa, Oryza sativa
  Clone ID: PAT_MRT4530_46811C.1.pep
MFLDLELLGVAAAWRRLEDEEDDWLLDCFLLLVGFGELDGHHEEAAVVYGVIVYGGAGRLLLQPRAAPPHHHRAGCSSVFAGPLLHLRAGRCSCTSAPRCRPPSSDCPGRRVPRRRTTTAPAAALARVRCPTSPATCIRPHSHREFLHQQVLSSDSKEPRLGFRPATTLEGSPPPPPAAPLCAKPASSTGRASRAKPASISAARASRAKPASISAARASRTEPASAAIGCASLRQAGLRPLHQMMPRRPDAAVSHALG

SEQ ID NO: 146162 - protein, 580 aa, Oryza sativa
  Clone ID: PAT_MRT4530_46812C.1.pep
MVAGGDHRGAGASLPSAVPARPPSGAPSRLPGGPGRQPPAPAGAADARDPRRRPPPAACARSTVDRGADAWAPLPVDPMAGSVTRRGLDMTGFVLELRGMCVVLGYPHGVDYQARPLPEQEGEDAEPHAGWEVTAVILSGSPERTSLAVTAGGDSFPAACQNAALLAIGTLHQRYPDELQHSPYRYHPRRGGARDHATFRDASSEDDATVVHLARMVEAYDAARIDFHQMVRRGMVENNLKILELRQENLQLKKDLDALEAQLHQLKVAQGEDSRPKRRRVCRSQKITARKSTSRPELVRQSLAWTCFVETPRAEPAPVVPQGGEASGVGSTEDALLLTFRPGPSQRRNVSTGESNQPEGSNPNPQGNPPPPPPPDTNAILTQILAQQANMMTAFLHHLQNPPQQNAPPPPPQHSKLAEFLRIRPPTFSSSNNPVDALDWLHAVGKKLDTVQCSDEEKVIFAAHQLQGPASLWWDHFQATQPEGQPITWARFTAAFRRTHVPAGVVALKKREFRELKQGNRSVMEYLHEFNNLARYAPEDVQEDEEKQEKFLAGMDPELSVRLVSGDYPDLQRLLGDFRS

SEQ ID NO: 146163 - protein, 41 aa, Oryza sativa
  Clone ID: PAT_MRT4530_46813C.1.pep
LIQYETLRGNICGIMVLALMLHCAGRCGAAVPGRRTVSVVG

SEQ ID NO: 146164 - protein, 1128 aa, Oryza sativa
  unsure (1)..(1128): unsure at all Xaa locations
  Clone ID: PAT_MRT4530_46814C.1.pep
MTSPTAAAARLGRRLGRRTLTGERRRYGTNGGHQRVADGTANTPTTKTTAEKQRTATATRRKRRLPSGCRRRRSSSGFRRLRRGGRGRRRLGDDDGGLPERRRQLERRRSTAEAAAATAKLGHTALELLRRREAKARAATGCDNVIRGRVNHVTAEDVLTTPDVIVELHQIELSEIPIVREFGDVFPEELPGMPPKREIEFRIDLAPGTTPLHKRPYRMAANELAEVKKQLEELKEKGYIRPSTSPWGAPVIFVEKKDKTKRMCVDYRALNEVTIKNKYPLPRIDDLFDQLKGATVFSKIDLRSGYHQLRIREEDIPKTAFTTRYGLYEFTVMSFGLTNAPAFFMNLMNKVFMEYLDKFVVVFIDDILIYSQPEEDHQHHLRLVLGKLREHQLYAKLSKCEFWLSEVKFLGHVISAKGVAVDPETVTAVTDWKQPKTVTQIRSFLGLAGYYRRFIENFSKIARPMTQLLKKEEKFVWSPQCEKAFQTLKEKLVSSPVLILPDTRKDFMVYCDASRQGLGCVLMQDGHVVAYASRQLRPHEGNYPTHDLELAAVVHALKIWRHYLIGNRCEIYTDHKSLKYIFTQSDLNLRQRRWLELIKDYDVGIHYHPGKANVVADALSRKSHCNTLNVRGIPPELSQQMEALNLSIVGRGFLAALEAKPTLLDQIREAQKNDPDMHGLLKNMKQGKAAGFTEDEHGTLWNGNRVCVPDSRELKQLILQEAHESPYSIHPGSTKMYLDLKEKYWWVSMKREIAEFVALCDVCQRVKAEHQRPAGLLQPLQVPEWKWDEIGMDFITGLPKTQGGYDSIWVVVDRLTKVARFIPVKTTYGGNKLAELYFARIVSLHGIPKKIVSDRGSQFTSHFWKKLQEELGTRLNFSTAYHPQTDGQTERLNQILEDMLRACVLDFGKTWDKSLPYAEFSYNNSYQASIQMAPYEALYGRKCRTPLLWDQVGESQVFGTDILREAEAKVRIIRDNLKVAQSRQKSYADNRRRDLEFAVDDFVYLRVTPLRGVHRFQTKGKLAPRYVGPFRIIARRGEVAYQLELPASLGNVHDVFHVSQLKKCLRVPSEQADSEQIEVREDLTYVERPVKILDTMERRTRNRVIXFCKVQWSNHAEEEATWEREDEL

SEQ ID NO: 146165 - protein, 827 aa, Oryza sativa
  unsure (1)..(827): unsure at all Xaa locations
  Clone ID: PAT_MRT4530_46815C.1.pep
TKNLDVILGMNWLAQFQGVVDCARRTVTLYRGPEQPVVFFAPPTSVRSSELHQIGLSEIPIVREFGDVFPEELPGMPPKREIEFRIDLAPGTTPLHKRPYRMAANELAEVKKQLEELKEKGYIRPSTSPWGAPVIFVEKKDKTKRMCVDYRALNEVTIKNKYPLPRIDDLFDQLKGATVFSKIDLRSGYHQLRIREEDIPKTAFTTRYGLYEFTVMSFGLTNAPAFFMNLMNKVFMEYLDKFVVVFIDDILIYSQSEEDHQHHLRLVLGKLREHQLYAKLSKCEFWLSEVKFLGHVISAKGVAVDPETVTAVTDWKQPKTVTQIRSFLGLAGYYRRFIENFSKIARPMTQLLKKEEKFVWSPQCEKAFQTLKEKLVSSPVLILPNTRKDFMVYCDASRQGLGCVLMQDGHVVAYASRQLRPHEGNYPTHDLELAAVVHALKIWRHYLIGNRCEIYTDHKSLKYIFTQSDLNLRQRRWLELIKDYDVGIHYHPGKANVVADALSRKSHCNTLNVRGIPPELNQQMEALNLSIVGRGFLAALEAKPTLLDQIREAQKNDPDMHGLLKNMKQGKAAGFTEDEHGTLWNGKRVCVPDSRELKQLILQEAHESPYSIHPGSTKMYLDLKEKYWWVSMKREIAEFVALCDVARFIPVKTTYGGNKLAELYFARIVSLHGVPKKIVSDRGSQFTSHFWKKLQEELGTRLNFSTAYHPQTDGQTERLNQILEDMLRACVLDFGKTWDKSLPYAEFSYNNSYQASIQMAPYKALYGRKCRTPLLWDQVGESQVFGTDILREAEAKVRTIRDNLKXAQSRQKSYADNRRXDLEFAVD

SEQ ID NO: 146166 - protein, 457 aa, Oryza sativa
  Clone ID: PAT_MRT4530_46816C.1.pep
MATIPEGGSLIMEGDIPGTGLEKIPLIPQKRSELLAHSNSTVNLLEMSRNGRIIAINDTGNPVVPQRIWVEAKYTFVLLLVLTRSSEAQKRPLYNVLDFNATGDGNTDDTKAFLAAWEETCNNEGWPILIIPGGRTFLLKQIKFNGSCKSPIKIQMDGNIVAPNYIWASEADNLITFYSVNNLTLDGNGQIDGKGAIWWTCYTEKKCVYRPVILAFAACNNLSVTNIHLTNSADKHMTVYRCSQVHVHNVTIVAPGDSPNTDGITMAISDHVYISNCSIQSGDDCVSMLSYTTDVNITDITCGPGHGISVGSLGRFETALVERITVSNCNFIGTKNGVRIKSWQGGMGQATGFIFENINMTAVESPIIIDQFYCPQGNCPLKDGGVAISDARFINIRGTSSEQEAIKILCSQSVHCQGIYLSNINLSWENHTALANATILNANGTVEGSVVPKVVFS

SEQ ID NO: 146167 - protein, 1729 aa, Oryza sativa
  unsure (1)..(1729): unsure at all Xaa locations
  Clone ID: PAT_MRT4530_46817C.1.pep
MEPESSARDSSLSGRSFLPPALFKPSPSSALSFPPLAAHSRRRNRPRAVLLLPAVAAVLRLAAAVAPLFLPTRRPLRRLRRIVADPVRRSASPVDRRSTVVIVIPNRAAAFFLSVRRSRRRRCLGDGHVVAYASRQLRPHEGNYPTHDLELAAVVHALKIWRHYLIGNRCEIYTDHKSLKYIFTQSDLNLRQRRWLELIKDYDVGIHYHPXEALNLNIVGRGFXAALEAKPTLLDQIREAQKNDPDMHGLLKNMKQGKAAGFTEDEHGTLWNGKREKYWWVSMKREIAEFVALCDVCQRVKAEHQRPAGLLQPLQVPEWKWDEIGMDFITGLPKTQGGYDSIWVIVDRLTKVARFIPVKTTYGGNKLAELYFARIVSLHGIPKKIVSDRGSQFTSHFWKKLQEELGTRLNFSTAYHPQTDGQTERLNQILEDMLRACVLDFGKTWDKSLPYAEFSYNNSYQASIQMAPYEALYGRKCRTPLLWDQVGESQVFGTDILREAEAKVRIIRDNLKVAQSRQKSYADNRRRDLEFAVDDFVYLRVTPLRGVHRFQTKGKLAPRYVGPFRIIARRGEVAYQLELPASLGNVHDVFHVSQLKKCLRVPSEQANSEQIEVREDLTYVERPVKILDTMERRTRNRVIRFCKGGRRARPPLSLTGGAHLSSSSSCRARRRARALAPPPPRIAPHPAVPARIKERGIIPRDSLSRFPRFPLSLSLGFVRIVAAFVAGAINGGRDLRGRFPSSPAALSPSRCYIFVARAPLFRFRRSPLALAVGIVLAPCSSLSAVAVDLRFAAAAAPDFLLTRRPLRPLRRVVADPVRRSASPADRRSTVALVIPSRAAVFLRSVRRFHRLRRLGVSRRPSRSFPPFLLSLGCHSAAPLVAGGDHRGAGARRSRRPRRRGRPRARPRGCQVGPAVSRPRPRVRLTRGTHGADRRQPRAPGPPWTERLTRGPHFPWTRNACWVISGRDKALPLFKLLKRSGPFTWTEEAEHALTQLKAYLSSPPVLVAPEPNEPLLLYLAATPQVVSAALVVERDEDNPHSAHPHPVPTWPGSKQGGKVPESNGGLRPLTTGVGPLPACQTVLGAPDPQEGPEATEGRPHLSPFGPEANPVLTRPGREQGEEAPEPKGGLRPLTTGAGPLPACPMTPGAPDPQDGPEATVGRPLLSSSDPEVIGTEDECAPRGHLDEERPGGTAPSEEDRPRRKVQRPVYFVSEALRDAKTRYPQAQKMLYAILMASRKLRHYFQAHRVTVVTSYPLGQILHNREGTGRVVKWAIELSEFDLHFEPRHAIKSQALADFVAEWTPAPETVSIPEASTNPSQLPHTAHWVMQFDGSLSLQGAEYEGLLAGLRVAAGLGIRRLLVLGDSQLVVNQEQGVELLADIHEGECGAHSASRTLVGKAFRQGFYWPTALNDAVDLVRRCRACQFHARQIHQPAQALQIIPLSWPFAVWGLDILGPFKRAPGGFEYLYVAIDKFTKWPEAYPVIKIDKHSALKFIKGITARFGVPNRIITDNGTQFTSELFGDYCEDMGIKLCFASPAHPRSNGQVERANAEILKGLKTKTFNILKKHGDSWIEELPAVLWANRTTPSRATGETPFFLVYGAEAVLPSELTLRSPRATMYCEADQDQLRRDDLDYLEERRRRAALRAARYQQSLRRYHQRHVRARSLCVDDLVLRRVQTRAGLSKLSPMWEGPYRVIGVPRPGSVRLATGDGTELPNPWNIEHLRRFYP

SEQ ID NO: 146168 - protein, 455 aa, Oryza sativa
  Clone ID: PAT_MRT4530_46818C.1.pep
PLRWLNDRNNNLTGSIPGSIGNLQFLEQLDLSFNHLKGEIPTKGIFKNATAFRIDGNQGLCGGPPELHLQACPIMALVSSKHKKSIILKVVIPIASIVSISMVKFTVLMWRRKQNRKSLSLPSFARHLPQVSYNMIFRATGGFSTSNLIGKGRYSYVYRGKLFEDDNMVAVKVFNLETRGAQKSFIAECNTLRNVRHRNLVPILTACASIDSKGNDFKALVYEFMGRGDLHALLHSAQNDENTSYLNHITLAQRISIVVDVSDALEYLHHNNQGTIVHCDLKPSNILLDDDMIAHVADFGLARFKTGSSTPSLGDSSSTYSLAIKGTIGYIASECSEGGQVSTASDVFSFGVVLLELFIRRRPTEDMFMDGLSIAKHVEMNFPDRILEIVDPQLQHELDLCQETPMAVKEKGIHCLRSVLNIGLCCTKTTPIERISMQEVAAKLHGIKDSYLRGN

SEQ ID NO: 146169 - protein, 2187 aa, Oryza sativa
  Clone ID: PAT_MRT4530_46819C.1.pep
MGNNRSKLTDFLSSRPPEFSQTVEPVEADDWLKDVDRKLNLVQCTPVEKTLYASHQLRGPAADWWENYCNAHPEPTNIAWDEFATAFRAAHVPESTIDMKKEEFNRLKQGNNSVNEYLSLFNKLARYAPEEVDTDKKKIRKEILPEAHLALAMEKKGTDFSIDDQGTVWCGPRICVPAKKELRDLILKEAHESAYSIHPGSTKMYQDIKAYFWWARMKRDVAEYVALCDICQRVKAEHQRPAGLLQPLPIPEWKWEEIGIDFITGLPRTPSGRRRVRALAPPPPRIAPHPAVPARIKERGITPRDSLSRFPRFPLSLSLGFVRIRPAKFAGVFNGARDLRARFPLSPAALSFPRRYKIVARAPLFRFRRSPLALAVDFVPAPCSALSAIAAELRSAAAAAPDFLLTRRHPRPLRRVAADPVRRSASPVDRRSTVVIVIPNRAAVFLRSVRRFHRLRRLGVSRGPLRSFPPFLLSLGCHSAAPLVAGGDHRGAGARRSRRPRRRGRPRARPRGCQVGPAVSRPRPRVRLTRGTHGADRRQPRAPGPPWTERLTHGPHFPWTRANEGYTSCGPMAGSVTRRGLGMTGFVLELRGMCVVLGYPHGVDYQARPLPEQEGEDAEPHAGWEVTAVILSGSPERTSLAVTAGGDSFPAACQNAALLAIGTLHQRYPDELQHSPYRYHPRRGGARDYATFRDASSEDDATVVHLARMVEAYDAARIDFHQMVRRGMVENNMKILELRQENLQLKKDLDALEAQLHQLKIAQGEDSRPKRRRVCRSQKITARKSTSRPELVRQSLAWTCFVETPRAEPAPVVPQEGEASGVGSSEGALLLTFRPGPSQRSPSLFAGSVWGFQMVTTRRNVNTGEGNQPEGSNPNPQGNPPPPPPPDTNAILTQILAQQANMMNAFLHHLQNPPQQNAPPPPPQHSKLAEFLRIRPPTFSSSNNPVDALDWLHAVGKKLDTVQCSDEEKVIFAAHQLQGPASLWWDHFQATQPEGQPITWARFTAAFRRTHVPAGVVALKKREFRELKQGNRSVMEYLHEFNNLARYAPEDVREDEEKQEKFLAGMDPELSVRLVSGDYPDFQRLVDKSIRLEAKHKELESHKRRLANFRNQQGANQRVRYTNPYPGGSSSQQQQQQQPPRPAPRPQFVVRVPQPQQQQNQQGTRAPRPPTPAVQPVQGRRDASGPQRLCFNCFEPGHFTDKCPKPRRQQGQAPPRSNNGGKDVIRGRVNHVTAEDVLTTPDVIVEIPIVREFGDVFPEELPGMPPKREIEFRIDLAPGTTPLYKRPYRMAANELAEVKKQLEELKEKGYIRPSTSPWGAPVIFVEKKDKTKRMCVDYRALNEVTIKNKYPLPRIDDLFDQLKGATVFSKVDLRSGYHQLRIREEDIPKTAFTTRYGLYEFTVMSFGLTNAPAFFMNLMNKVFMEYLDKFVVVFIDDILIYSQSEEDHQHHLRLVLGKLREHQLYAKLSKCEFWLSEVKFLGHVISAKGVAVDPETVTAVTDWKQPKTVTQVRSFLGLAGYYRRFIENFSKIARPMTQLLKKEEKFVWSPQCEKAFQTLKEKLDGHVVAYASRQLRPHEGNYPTHDLELAAVVHALKIWRHYLIGNRCEIYTDHKSLKYIFTQSDLNLRQSRWLELIKDYDVGIHYHPGKANVVADALSRKSHCNTLNVRGIPPELNQQMEALNLNIVGRGFLAALEAKPTLLDQIREAQKNDPDMHGLLKNMKQGKAAGFTEDEHGTLWNGKRVCVPDNRELKQLILQEAHESPYSIHPGSTKMYLDLKEKYWWVSMKREIAEFVALCDVCQRVKAEHQRPAGLLQPLQVPEWKWDEIGMDFITGLPKTQGGYDSIWVIVDRLTKVARFIPVKTTYGGNKLAELYIARIVSLHGIPKKIVSDRGSQFTSHFWKKLQEELGTRLNFSTAYHPQTDGQTERLNQILEDMLRACVLDFGKTWDKSLPYAEFSYNNSYQASIQMAPYEALYGRKCRTPLLWDQVGESQVFGTDILREAEAKVRIIRDNLKVAQSRQKSYADNRRRDLEFAVDDFVYLRVTPLRGVHRFQKKGKLAPRYVGPFRIIARRGEVAYQLELPASWGNVHDVFHVSQLKKCLRVPSEQANSEQIEVREDLTYVEKPVKILDTMERRTRNRVIRFCKVQWSNHAEEEATWEREDELKAAHPDLFASSSESRGRDSV

SEQ ID NO: 146170 - protein, 1766 aa, Oryza sativa
  unsure (1)..(1766): unsure at all Xaa locations
  Clone ID: PAT_MRT4530_4681C.1.pep
MAEQGKAHDLSPSVSGDDGEPNPRRRARTPPPPPRQSPKQGEALERVDKSVASPVAGDAGERRDGERRLLVYGDGSTPQGALQAAGALLRHPPVVHDPESPAQRWLEDVANLVMTAQQRLGAGGRSATTKTSGAATTGSVSSRRRARRAAAAARHSVATPSSTPSTREDQHGEPDARLNIERRRSSRRTPRATEGASSSRVSPRHGREDQPSVPPAGGVGCRAFVASLRNVRWPPRFRPTITEKYDGSVNPTEFLQVYTTGIEAAGGDDRVMANFFPMALKGQARGWLMNLPPASVHSWEDLCQQFTMNFQGTYPRPGEEADLHAVQRGDDESLRSYIQRFCQVRNTIPCIPAHAVIYAFRGGVRHNRMLEKIASKEPQTTAELFQLADRVARKEEAWTWNSSGSGVAASAAPGSAAQTGRRDRRRKKRSDRSGDEGHVLAVEGAPRATRKGRPASDKKKEAGTPSKERPAGRWCSVHNTSLHDLVDCRAVKNLAERTRKWEEDRRQERREGKSPAVPSGKRRSEAKQKAPAVDIDDGDDDLGFQEPGATIATVDGGACAHVSRRSFKAMKRELLAMAPTHEAMRRARWSEVALTFDQTDHPPCIARGGQVAMVVSPTICNVELGRVLIDGGAALNILSPAAFDAIKAPGMVLRPSQPIIGVTPGHTWPLGHIDLPVTFGGSANFRTERVNFDVADLSLPYNAVLGRPALVKFMAAVHYAYLQMKMPGPGGPISVRGDLKVTLACMEQRADHLAAATKPEGGDESLGTSAPIAPRQRIATCDEVPEDALVSFLRANADVFAWRPADMPGVPRKVIEHRLAVRPGARPVRQKVRRKAPERQAFIREEVARLLEAGFIREVIHPEWLANPVVVPKANGKLRMCIDYTDLNKACPKDPYPLPRIDQIVDSTAGSDLLCFLDAYSGYHQIRMAREDEEKTAFITPVGTYCYTSMPFGLKNAGPTFQRTTRISLGSQIGRNVEAYVDDLVVKTRNQETLLSDLAETFENLRSARIKLNPDKCVFGVPAGKLLGFLVSARGIEANPEKIRAIERMRPPSKLRDVQCVTGCMAALSRFISRLGEKALPLFKLLKRSGPFTWTEEAEHALTQLKAYLSSPPVLVAPEPNEPLLLYLAATPQVVSAALVVERDEDNPHSAHPHSVPTRPGSRQGGEAPESNGGLRPPTTGVGPPPACQTVLGAPDPQEGPKATAGRPHLTPFDPEANPVLTRPGKEQGEEAPEPNGGQRPLTTGVGPLPACPTMPGAPDPQDGPEATEGRPPLSSSDPEVIGTEDKCAPKGHLNEERPGDTAPSREDRPHRRVQRPVYFVSEALRDAKTRYPQAQKMLYAILMASRKLRHYFQAHRVTVVTSYPLGQILHNREGTGRVVKWAIELSEFDLHFEPRHAIKSQALADFVAEWTPAPETVSIPEASTNPSQLPHTTHWVMQFDGSLSLQGAVDLVRRCRACQFHAKQINQPAQALQIIPLSWPFAVWGLDILGPFKRAPGGFEYLYVAIDKFTKWPEAYPVVKIDKHSALKFIKGITARFGVPNRIITDNGTQFTSELFGDYCEDMGIKLCFASPAHPKSNGQVERANAEILKGLKTKTFNILKKHGDSWIEELPAVLWANRTTPSRATGETPFFLVYGAEAVLPSELTLRSPRATMYCEADQDQLRRDDLDYLEERRRRAALRAARYQQSLRRYHQRHVXRARSLCVDDLVLRRVQTRAGLSKLSPMWEGPYRVIGVPRPGSVRLATGDGTELPNPWNIEHLRRFYP

SEQ ID NO: 146171 - protein, 1683 aa, Oryza sativa
  unsure (1)..(1683): unsure at all Xaa locations
  Clone ID: PAT_MRT4530_46820C.1.pep
MDEVGRRWTFSRANEGYTSCGPMAGSVTRRGLDMTGFVLELRGMCVVLGYPHGVDYQARPLPEQEGEDAEPHAGWEVTAVILSGSPERTSLAVTAGGDSFPAACQNAALLAIGTLHQRYPDELQHSPYRYHPRRGGARDHATFRDASSEDDATVVHLARMVEAYDAARIDFHQMVRRGMVENNLKILELRQENLQLKKDLDAVEAQLHQLKIAQGEDSRPKRRRVCRSQKITARKSTSRPELVRQSLAWTCFVETPRAEPAPVVPQEGEASGVGSSEGALLLTFRPGPSQRSSSLFAGSVWGFQMVTTRRNVNTGEGNQPEGSNPNPQGNPPPPPPPDTNAILTQILAQQANMMNAFLHHLQNPPQQNAPPPPPQHSKLAEFLRIRPPTFSSSNNPVDALDWLHAVGKKLDTVQCSDEEKVVFAAHQLQGPASLWWDHFQATQPQGQPITWAHFTAAFRRTHVPAGVVALKKREFRELKQGNRSVMEYLHEFNNLARYAPEDVREDEEKQEKFLAGMDPELSVRLVSGDYPDFQRLVDKSIRLEAKHKELESHKRRLANFRNQQGANQRVRYTNPYPGGSSSQQQQQQQPRPAPRPQFVVRVPQPQQQQNQQGTRAPRPPTPAVQPVQGRRDAQGQQRLCFNCFEPGHFADKCPKPRRQQGQAPPRSNNGGKDVIRGRVNHVTAEDVLTTPDVIVGTFLVHSIPATILFDSGASHSFISVPFVGKNQLGVERLRNPLLITTPGGVMTAKYYSPAVPIEIQGIPFPSDLILLDTKNLDVILGMNWLAQFQGIGLSEIPIVREFGDVFPEELPGMPPKREIEFRIDLAPGTTPLYKRPYRMAANELAEVKKQLEELKEKGYIRPSTSPWGAPVIFVEKKDKTKRMCVDYRALNEVTIKNKYPLPRIDDLFDQLKGATVFSKIDLRSGYHHLRIREEDIPKTAFTTRYGLYEFTVMSFGLTNAPAFFMNLMNKVFMEYLDKFVVVFIDDILIYSQSEEGHQHHLRLVLGKLXEHQLYAKLSKXYYRRFIENFSKIARPMTQLLKKEEKFVWSPQCEKAFQTLKEKLVSSPVLILPDTRKDFMVYCDASRQGLGCVLMQDGHVVAYASRQLRPHEGNYPTHDLELAAVVHALKIWRHYLIGNRCEIYTDHKSLKYIFTQSDLNLRQRRWLELIKDYDVGIHYHPGKANVVADALSRKSHCNTLNVRGIPPELNQQMEALNLSIVGRGFLAALEAKPTLLDQIREAQKNDPDMHGLLKNMKQGKAAGFTEDEHGTLWNGKREKYWWVSMKREIAEFVALCDVCQRVKAEHQRPAGLLQPLQVPEWKWDEIGMDFVTGLPKTQGGYDSIWVIVDRLTKVARFIPVKTTYGGNKLAELYFARIVSLHGIPKKIVSDRGSQFTSHFWKKLQEELGTRLNFSTAYHPQTDGQTERLNQILEDMLRACVLDFGKTWDKSLPYAEFSYNNSYQASIQMAPYEALYGRKCRTPLLWDQVGESQVFGTDILREAEAKVRIIRDNLKVAQSRQKSYADNRRRDLEFAVDDFGYLRVTPLRGVHRFQTKGKLAPRYVGPFRIIARRGEVAYQLELPASLGNVHDVFHVSQLKKCLRVPSEQADSEQIEVREDLTYVERPVKILDTMERRTRNRVIRFCKVQWSNHAEEEATWEREDELKAAHPDLFASSSESRGRDSV

SEQ ID NO: 146172 - protein, 377 aa, Oryza sativa
  Clone ID: PAT_MRT4530_46821C.1.pep
MKREIAEFVALCDVCQRVKAEHQRPAGLLQPLQVPEWKWDEIGMDFITGLPKTQGGYDSIWVIVDRLTKDRESPWLPKKIVSDRGSQFTSHFWKKLQEELGTRLNFSTAYHPQTDGQTERLNQILEDMLRACVLDFGKTWDKSLPYAEFSYNNSYQASIQMAPYEALYGRKCRTPLLWDQVGESQVFGTDILREAEAKVRIIRDNLKVAQSRQKSYADNRRRDLEFAVGDFVYLRVMPLRGVHRFQTKGKLAPRYVGPYRIIARRGEVAYQLELPASLGNVHDVFHVSQLKKCLRVPSEQADSEQIEVREDLTYVERPVKILDTMERRTRNRVIRFCKVQWSNHAEEEATWEREDELKAAHPDLFASSSESRGRDSV

SEQ ID NO: 146173 - protein, 127 aa, Oryza sativa
  Clone ID: PAT_MRT4530_46822C.1.pep
CYREDSIGRVFFFLGKYAILDGVFAANNGFVQKKLSVRTKHWKNACVVIRSIAAPACRPATISRRQKCVPNKTLFFWWRRIIDCPVYFNSRRRKELEKKRNDRAEKIRFWLSFGSHPRCHFFIFFLS

SEQ ID NO: 146174 - protein, 66 aa, Oryza sativa
  Clone ID: PAT_MRT4530_46823C.1.pep
MPEGKQKAKLSGSRAADGVRKAPALTALGPHLAVFYYSRWTAKMKNSNRAHRTTAKTYIGSGKQQP

SEQ ID NO: 146175 - protein, 153 aa, Oryza sativa
  Clone ID: PAT_MRT4530_46824C.1.pep
HKHLILSQCYNLFLNVNYLDLWCTTSCPSTARAFVAIHRTRRRLLRQIHRVRPPPPRTTSSAKSSVPQLIHPLPSSAASPSPPPLVPASTSSSDIKEVPLFSLVCHYRFCYNRSMLLSIYQAGDLKKHRTTVKIERATEIVLLKMSLVPEIVH

SEQ ID NO: 146176 - protein, 62 aa, Oryza sativa
  Clone ID: PAT_MRT4530_46825C.1.pep
TLLRSYDLNLMNAKSCLYSCMHMLYADACIYCYPRCNRIVTYEFVISEVLIWNSTVECFIQC

SEQ ID NO: 146177 - protein, 102 aa, Oryza sativa
  unsure (1)..(102): unsure at all Xaa locations
  Clone ID: PAT_MRT4530_46826C.1.pep
YKWCSXRGSXXXLWXDWXPFPPWWXXSFXVXXEKKKXGGXVPPXXLXVQVIGQVXXXVXXXSDXXVSGGXAQHEQVAQLXXWXXVEXPQXXRVRQRVRXXEX

SEQ ID NO: 146178 - protein, 172 aa, Oryza sativa
  Clone ID: PAT_MRT4530_46827C.1.pep
MSSSMSDGSSSTRESKASPVPYRVGPLEYQPAVMCRCRPPAKAARWISWSTDNPGRRYYKCQNARQGGCDFWAWYDGPTSSFIRELLNDLRDRVNSLRRENEVMRKEVEQSRDKVEVQSKAIDDARGVVAVKNAEIMCLKARNHKLEKERKVFVICVVSCMFVLFVVFFGKK

SEQ ID NO: 146179 - protein, 208 aa, Oryza sativa
  unsure (1)..(208): unsure at all Xaa locations
  Clone ID: PAT_MRT4530_46828C.1.pep
MARARFRWGEGAASGENGGGELGVDVDDVQQCGQPDTPVVVLALTLEAHALEVEVDQGPSAGANTAMTFLDFENALADRVHQIQYWKTKLEVAELERAIVEAKKDQAVETLXGREVWLNSYLKSCCTAMAEVCGEXRGDPEESTAGYISWMKGACAQLEGIGKRIEEALKQECRRASRYAGGHVLACIRDHRPQLHLEFLCEGFSCSR

SEQ ID NO: 146180 - protein, 102 aa, Oryza sativa
  unsure (1)..(102): unsure at all Xaa locations
  Clone ID: PAT_MRT4530_46829C.1.pep
MSDVLFVYVFQFDSLIEPATLSLAAKRLQPLNRTGFNVKKKKKKKKKKKKKIKIACXWLXGXQLXXXXXFFXXSKKKKKKKKKKKKKKKKKKKKKKKKKKKK

SEQ ID NO: 146181 - protein, 129 aa, Oryza sativa
  unsure (1)..(129): unsure at all Xaa locations
  Clone ID: PAT_MRT4530_4682C.1.pep
GERNSGFIRWYQSFRCSRLVRLEFRVLVTFHTTVIAPAVFLLSSGPRKTESSCCRGFVFLVFRSFCRSVLELLXLHQGFVVCIRPCLFLLREEEEREKITDLFLEEVLQTRSIRLVSFHLRPNFPNSPH

SEQ ID NO: 146182 - protein, 92 aa, Oryza sativa
  Clone ID: PAT_MRT4530_46830C.1.pep
MAAKSVVCRCCSLSLSDEQLADLAFQGLSALINDKFFRHEFDSLVHLMQTVLVYESQDKKQQRINFEVIKARQKRFLKHEFPYSKIPGSGFS

SEQ ID NO: 146183 - protein, 174 aa, Oryza sativa
  Clone ID: PAT_MRT4530_46831C.1.pep
MLAPRSLRKAAVPPSLLSEPSPGSLQPTRLAVHVNAAGSSCSAYLASGCRVYKIEIAMEGEMLSKGKESLLIPINAEVISSSVVDRCPHRSEIQSVVLAEGEGDGCLILGTVDSYGHLIVSRLYTVADDIDRASYSVPPRDCGVGEGSWAGLCFSPMHQSTVAVARELWKCIYC

SEQ ID NO: 146184 - protein, 127 aa, Oryza sativa
  unsure (1)..(127): unsure at all Xaa locations
  Clone ID: PAT_MRT4530_46832C.1.pep
FLFPIDVGIIVSPLRLHPSTLAARRRSASSAVLPRPPPSPFVVVASSLLPPPRGVLPAAPPSPVEALPPPPPLLHXPPPAPLALPPLSPPXPPPPPPPSPLHLLHRRCSASFVATLPPLPLCVLHPP

SEQ ID NO: 146185 - protein, 38 aa, Oryza sativa
  Clone ID: PAT_MRT4530_46833C.1.pep
LPTPGVSTPAPARDESQEALIILTGQGEARDRPPVATH

SEQ ID NO: 146186 - protein, 415 aa, Oryza sativa
  Clone ID: PAT_MRT4530_46834C.1.pep
MELLLRRLAVVVAVVALTAATAAEGYNITKILGDHPEYSQFNKLLTETRLAGDINRRRTITVLVVANGDMGALSGGHYTLPTLRHILEMHILVDYYGAKKLHQLARGDTASSSMFQESGSAPGTTGYVNITQHRGGRVSFTAEDAADSATPSSFVKSVKEIPYDLAVLQISKPLSSPEAEAPVAPPAPVNLTELLSKKYCKNFAGLLASNADVYSNINATKDNGLTLFCPVDAAVDAFLPKYKNLTAKGKAAILLYHAVPDYYSLQLLKSNSGKVSTLATASVAKKDYSYDVSNDRDSVLLDTKVNSASVTATVKDADPLAVYAISKFLQPKELFKVTEDLAPAPAPEGPKKKTKKKKPSTTSAAAAPSDDSSAADSPDGTPADDVADKAAAAPSVLARWVTAAATVAAALALAA

SEQ ID NO: 146187 - protein, 137 aa, Oryza sativa
  Clone ID: PAT_MRT4530_46835C.1.pep
MASIGENSGIAGAGGNGGVSGEGGNGSAPGDNTNGGNTNASTSSAPFSCLPGQANWRPRNTGPAASNPTTPHISAANCPLNVHAKKKLSIAYTTLRGCHKLPMPRPGHSMFGAHHELGRGGIWPVWLEGDDGCSSNL

SEQ ID NO: 146188 - protein, 161 aa, Oryza sativa
  unsure (1)..(161): unsure at all Xaa locations
  Clone ID: PAT_MRT4530_46836C.1.pep
SQVLEIQDFQPASLDDIALVHSRSYITGLEKAMSRASDEGLIFIEGTGPTYATQTTFQECLLSAGAGITLVDSVVAASKLGPKPPLGFALVRPPGHHAVPEGPMGFCVFGNNAVAARYAQNQHGLKRVMIIDFDVHHGNGTCDAFYEDPDIFXLSTHQLGS

SEQ ID NO: 146189 - protein, 78 aa, Oryza sativa
  Clone ID: PAT_MRT4530_46837C.1.pep
MEDIPNGPTSTPNPKCPWSERSRASPVCLAPFPCRLLPNADPVLLPSLIWPHHDQIGEDTVAALAVAGAVSTEEAEAQ

SEQ ID NO: 146190 - protein, 413 aa, Oryza sativa
  Clone ID: PAT_MRT4530_46838C.1.pep
VDPRAAGDNGTSISDTNGVRKDLALPDNLLRDAHILYCTSPAMGHNKEAHPETNKRVPAIVDALEKLELTSKHRGSQVLEIQDFQPASLDDIALVHSRSYITGLEKAMSRASDEGLIFIEGTGPTYATQTVMIYAHSLLFLFPQCFSRWKTFQECLLSAGAGITLVDSVVAASKLGPKPPLGFALVRPPGHHAVPEGPMGFCVFGNIAVAARYAQNQHGLKRVMIIDFDVHHGNGTCDAFYEDPDIFFLSTHQLGSYPGTGKIHQVGQGNGEGTTLNLPLPGGSGDYAMRCAFDEVIAPAAQRFKPDIILVSAGYDAHALDPLAGLQFTTGTFYMLAARIREVAAELCGGRCVFFLEGGYNLESLSSSVADTFRAFLGEPSLAARFDDPAMLYEEPTRKIREAIDKAKHLHSL

SEQ ID NO: 146191 - protein, 84 aa, Oryza sativa
  Clone ID: PAT_MRT4530_46839C.1.pep
MAQKAYTYMGSMGREGGREREQVDRWRGLSRAGWGVGGGCRVKLSPRALYMRAQEQLRATSYQQLLLLPLPLQLLHPIQISAGD

SEQ ID NO: 146192 - protein, 108 aa, Oryza sativa
  Clone ID: PAT_MRT4530_4683C.1.pep
GRREGASDASSGVLYWPSASPPGGALVLPLGLADSAEEEGNCVLSARHILLSPPHSGRCSWRFRRSSARLTWSHSRTVAIPASVVDMTNCSQPILIMNPRISQLAAGN

SEQ ID NO: 146193 - protein, 99 aa, Oryza sativa
  unsure (1)..(99): unsure at all Xaa locations
  Clone ID: PAT_MRT4530_46840C.1.pep
PAVVVGGGRVGQALLSMGPPGADVLVGRGEKVPEDAPGPILVCTRNDDLDAVLDATPRSRWXNGMLDPWFESKGLVDANQVLAYFAVSKLGEPPVDGIT

SEQ ID NO: 146194 - protein, 77 aa, Oryza sativa
  Clone ID: PAT_MRT4530_46841C.1.pep
LSRRWLAAADRVALRARAGQDLGSLHGQAAGAVRREGVAGRRRAPRSLVLERMVGASWWLRCGRWKPSSAAGGTLAA

SEQ ID NO: 146195 - protein, 499 aa, Oryza sativa
  Clone ID: PAT_MRT4530_46842C.1.pep
MDVLDHAPPSPLSSDILPHFPPSLADAGAGALDLSFTSTASASTSSFTTATTFSARKLASPCRSFSSSTSLSPRPHSSSSSPHWALLAAARAATPDGVLRLAHLHLIRELGHGHLARVFLCRLKSSPPASPLFALKVVDLRDDDPSRVTHVLAESRVLSSLDHPFVPTLYARLDAGRYACFLMDYCSGGDLHAVLRRRPGGRLPVAAARFYAAEVLLALEYLHALGFVYRDLKPENVLLRGDGHVVLSDFDLALPASVEPAVRRRQVRKLSRRKNRIVPSCFSANGGSGDDGDEVNAKEQFEFVAEPTTANSKDCVGTHEYLAPELVSGSGHGNGVDWWAFGVFLYELVYGRTPFKGHAKDATLKNILAKQVTYPQLDGEADAAQLRDLIGRLLERDPRRRMGSARGAAEIKRHPFFAGVDWALIRCVAPPVVPDKDSAAAGAGDKKAKLGSWNSMGGKKRSSFGRKSNYEERQGVFRKLMSWSQDSRSKKAKTNKVKL

SEQ ID NO: 146196 - protein, 125 aa, Oryza sativa
  Clone ID: PAT_MRT4530_46843C.1.pep
MPQPPPSVCTRSVTSVALPTHGDGGGCCRVLLSPFDADSLEALLPAFYRFAGALVYSPEEEEEEEEGSLSIVVEAGGGVAFVEAEAFVASVVRSPRGMMAARLGPRFAMQQQPMVFASPPPPPPQ

SEQ ID NO: 146197 - protein, 396 aa, Oryza sativa
  unsure (1)..(396): unsure at all Xaa locations
  Clone ID: PAT_MRT4530_46844C.1.pep
SCESGVRNGGGDGGRWTKQRRRTERRRRIVGVKPPHKLWRDSKHGGGVCRRRDAAAAAVGVHKERHLRRAPDAWRWRWLLPRAALPIRRILGRVAGGGRGGGVAVHRRGGRRRRGIRGGRGVRGIGGALAAGDDGGGARAALCHAAAADGLRVASATAAAVARIWLRRVRDWSGASATGDGERCRPSGHRAPCSCRQLPKSLRGCHGRGRQQVQEEKGAVSRRTWSGRGPVSKEEEELQSLLRIMARSTPERSRPVHRHALGRASYCSLSTAATAHLAVDAAAAAHLTAHDTEWGQGAAAGSVLPSPPTHFVARRPRSTAHFKEXLLPRLSPEVHRPSQPPLRHPLADAATEPPPPLPRHAHVNKPFPLPRRIYPASDHEPMMTPPPRPQALALLH

SEQ ID NO: 146198 - protein, 63 aa, Oryza sativa
  Clone ID: PAT_MRT4530_46845C.1.pep
ELAYITYCLIHVRLLEVRVDLVGELSGIGANNQQCRHRLGEPERGQRGPWLASLFAGVIFLFS

SEQ ID NO: 146199 - protein, 451 aa, Oryza sativa
  unsure (1)..(451): unsure at all Xaa locations
  Clone ID: PAT_MRT4530_46846C.1.pep
MGMVVPSGHRASCSCRQLPESLRGRRGRGRRQVQEEKGAVSRRTWSGRGPVSEEEEEFQSLLRIMARSTPERSRPVCRHALGRASYCSLSTAATAHLAVDAAAAAHLTAHDTEWGRGAAAGSVLPSPPTHFVARRPRSTAHFKEELLPRLSPEXGRADASVRPMAERARRPAQRGEMQQSPRRRAARAAAAEGGVGGGRARLRSRQDGRLSPGRSSAPPKKYNATRCSVLFDAVAHADPAARPWSIRMPTEHSAYCIADRLMARMALLAVLRAPSDDLWKGSGMRLALQLCIRRHTSWCMLLYSDTTTYGLTVTAPSGACCSKQRNALTMWSDGVGLPLQAQLSVAPPACSPTVAAGXPRSPIAARRLLRSPPLRLPACPPPALAATLARRRPSCLLRSRASPLPTLLSAAAGPAPRRHGDWCISPRSARPPGPLRRRPHTRICPPAREKL

SEQ ID NO: 146200 - protein, 97 aa, Oryza sativa
  Clone ID: PAT_MRT4530_46847C.1.pep
LAINKSTDPTLATVGIPRQVTKGEPVAAGHRPVHGGPGAPGLTPPGAVGPTHQPHPRARAADGRAPRGGHTARLEAATSARPAGGGARAPMVVGGGH

SEQ ID NO: 146201 - protein, 107 aa, Oryza sativa
  Clone ID: PAT_MRT4530_46848C.1.pep
MADEEKRREARELVSSSYAIRSASRMLSASAVSPRRTREPPPHQRYHSSSCCSPPPPFDLGLCYPDFFLHQLLPRLLFTPTPPASPALVPGPELPPSLTSGTHPDLL

SEQ ID NO: 146202 - protein, 286 aa, Oryza sativa
  Clone ID: PAT_MRT4530_46849C.1.pep
MAVAAAACRSPHSTHTGSRCCSSATTTVRRRRPRTQGLPQGVAPSVLPLRQCAGLLAGGGRGGGVAVHRRGGRRRRGIRGGRGVRGIGGALAAGDDGGGARAALCHAAAADGLRVASATAAAVARIWLRRVRDWSGASATGDGERCRPSGHRAPCSCRQLPKSLRGCHGRGRQQVQEEKGAVSRRTWSGRGPVSKEEEELQSLLRIMARSTPERSRPVHRHALGRASYCSLSTAATAHLAVDAAAAAHLTAHDTEWGQGAAAGSVLPSPPTHFVARRPRSTAHFKE

SEQ ID NO: 146203 - protein, 83 aa, Oryza sativa
  Clone ID: PAT_MRT4530_4684C.1.pep
HILCHGSDKEDVLDGPQLGKLFTHQEVHPSRSPSAGSSHSPSAPLHVGQVMAEQSSRSSKRCSHARSAAVAPAAAEHRIPVRG

SEQ ID NO: 146204 - protein, 156 aa, Oryza sativa
  unsure (1)..(156): unsure at all Xaa locations
  Clone ID: PAT_MRT4530_46850C.1.pep
MSATRXNLYSERILSPFWNVIAHRLVYMIHGLSSVQDVSNYVKTAFDGVLFTCTTYVIIPQHYAAIXNKAKRERCQYIXFKTNPNTFDRHLARKNSIFPALPDDVGANAYQIXRKQARSIKINWGEEHGAFTPRFQQQYYPGFSNESERETYEKCN

SEQ ID NO: 146205 - protein, 119 aa, Oryza sativa
  Clone ID: PAT_MRT4530_46851C.1.pep
WIPRAARGEAASPWSLAGAGAAVALLWLCAWTLQWAWWTPRRLERALRAQGLRGTRYRLFIGDVAENGRLNREAASRPLPLGSHDVVPRVMPFFCNVLKEHGKLSFVWTGPKPFGDYQR

SEQ ID NO: 146206 - protein, 100 aa, Oryza sativa
  Clone ID: PAT_MRT4530_46852C.1.pep
MVQRLTYRKRHSYATKSNQTRVVKTPGGRLVYQYTKKRASGPKCPVTGKKIQGIPHLRPAEYKRSRLSVRERIIRAFLVEEQKIVKKVLKIQKTKDKSAK

SEQ ID NO: 146207 - protein, 118 aa, Oryza sativa
  Clone ID: PAT_MRT4530_46853C.1.pep
MVQRLTYRKRHSYATKSNQTRVVKTPGGRLVYQYTKKRASGPKCPVTGKKIQGIPHLRPAEYKRSRLSRNRRTVNRPYGGVLSGTAVRERIIRAFLVEEQKIVKKVLKIQKTKDKSAK

SEQ ID NO: 146208 - protein, 111 aa, Oryza sativa
  Clone ID: PAT_MRT4530_46854C.1.pep
MGQAATVAQLVGADVGRLISMIMQAALPAQRNKKECEQLARRPGGDAAAGGPAVAGRARRHAPAVTKYKLLDVNTRTSPAALMDLAAACDLGERDFDQLSKVLADAAHAVN

SEQ ID NO: 146209 - protein, 583 aa, Oryza sativa
  unsure (1)..(583): unsure at all Xaa locations
  Clone ID: PAT_MRT4530_46855C.1.pep
MAAPLLLVVVVVWAKFCGRPNSFKAVSGPQFDYGSFLLQGKMNANVLGGDVVADDFNYFSGVSTIFVANIQEVKDRVSQIELLFCSQLFPHVQAMWKAAKDAWMEREAALLSQLEELSSGKRHAEEKALQLGCSLDEMKGKLADAERSVAGHEVEKKRLLGRLEEEIGNKDEVIRRLEREIAEKAADFSRERDAHQRLLQLVELKDKNLLLEQNKRRDAEEMALQLGNSLEDMKGNFERLIARHEVEKERIPGRLEEEMGKKDEVIGRLESEIAEKAADVSRERDAHQRMLQQVELKDKDLLLEQNKRKDLIEDYTKLKTLYKDLKSQYNFLVGKIGQNEGSKSPVVNVVDRKTSGSPPSKRKLKDLVDTKKENNQAVSKTVDEKNGPASSAKAQGTHHASSVRSPFSNSRLCLPSRTTNPPPKNATSNSKTEAASSFXRPSLHWRETRARCQKYDQEXKTPEEAQALAASPPKDMDFNNSDDETQDVNIATQGQKNMPVPKQQSTISIQPPNKGFKYTEPVRKKADRENLKGVECKQCKKFYDAVLPDGRTNGDGVDSTSMRCEHHDGVSRHRYRYARAADT

SEQ ID NO: 146210 - protein, 140 aa, Oryza sativa
  Clone ID: PAT_MRT4530_46856C.1.pep
MGGCEPELVRGVTLLGLKRAPPKLPGVLLVPRPTLLPERPVEPPIHVDETPVLRLQLFRRRNISSWVSVSEVASICGAALPFSPIAGRQTSYGPREEDMAARQQDSYRQAPLSPTVGPPPPPYPGDLLPTHQPAYLRGEK

SEQ ID NO: 146211 - protein, 672 aa, Oryza sativa
  Clone ID: PAT_MRT4530_46857C.1.pep
MNANVLGGDVVADDFNYFSGVSTIFVANIQEVKDRVSQIELLFCSQLFPHVQAMWKAAKDAWMEREAALLSQLEELSSGKRHAEEKALQLGCSLDEMKGKLADAERSVAGHEVEKKRLLGRLEEEIGNKDEVIRRLEREIAEKAADFSRERDAHQRLLQLVELKDKNLLLEQNKRRDAEEMALQLGNSLEDMKGNFERLIARHEVEKERIPGRLEEEMGKKDEVIGRLESEIAEKAADVSRERDAHQRMLQQVELKDKDLLLEQNKRKDLIEDYTKLKTLYKDLKSQYNFLVGKIGQNEGSKSPVVNVVDRKTSGSPPSKRKLKDLVDTKKENNQAVSKTVDEKNGPASSAKAQGTHHASSVRSPFSNSRLCLPSRTTNPPPKNATSNSKTEAASSFTRPSLHWRETRARKEPGVVDPHDDFLDTPLEAVKNMIRNPKTPEEAQALAASPPKDMDFNNSDDETQDVNIATQGQKNMPVPKQQSTISIQPPNKGFKYTEPVRKKADRENLKGVECKQCKKFYDAVLPDGRTNGDGVDSTSMRCEHHDGVSRHRYSLSPFHCPFDHEIQVKIDQDDFTSDLLRNRMHNNKAESCVQNNTLANDKFQNYLPLWQLYICSVARANCLPSPVPSHPCAHVSLSTSAIQITLQFSVKNKVHTKASIKVETGLYVNYVN

SEQ ID NO: 146212 - protein, 224 aa, Oryza sativa
  Clone ID: PAT_MRT4530_46858C.1.pep
MEESDAAAASAKAPNGEASGGGGRPVEVEDTLPGVLRSFVDGVCSQGGGGGGGEPLLRRIRAASCETAPRLREASRNSARDLLEWTRRGSGLRAILVISVGTITLIALTGLLIFMFFLLVATTNAVVVSVLMSLAAAGGFLAMFFACLVAVYIGVVSVAVFVISATVISAIVGVMIATGWLGFFWMIWFAARKSMDLTKHSIGVTNSAIQSYSASRHAKQKPID

SEQ ID NO: 146213 - protein, 72 aa, Oryza sativa
  unsure (1)..(72): unsure at all Xaa locations
  Clone ID: PAT_MRT4530_46859C.1.pep
SFGAAAAAAIKVAKXPXXXXKVGSGCVXELWXXVPFIYPFSVDKRRMSKVDLXHEPXFSVRXIXIVSEISGH

SEQ ID NO: 146214 - protein, 67 aa, Oryza sativa
  Clone ID: PAT_MRT4530_4685C.1.pep
MGWPIRPDYIVTGGRTDRPWLRLWRLWVANREANHRHSTRWSGRLGIIGQTGIMSSVITPFDSMTKL

SEQ ID NO: 146215 - protein, 283 aa, Oryza sativa
  Clone ID: PAT_MRT4530_46860C.1.pep
MWRLAHEEEDWMLVGFEIALPSLLDMAKDLDLDIPYDEPALKAIYAERERKLAKIPRDVLHSMPTTLLHSLEGMVDLDWEKLLKLRCLDGSFHCSPASTATAFQQTGDQKCFEYLDGIVKKFNGGVPCIYPLDVYERLWAVDRLTRLGISRHFTSEIEDCLDYIFRNWTPDGLAHTKNCPVKDIDDTAMGFRLLRLYGYQVDPCVLKKFEKDGKFFCLHGESNPSSVTPMYNTYRASQLKFPGDDGVLGRAEVFCRSFLQDRRGSNRMKDKWAIAKDIPGEVC

SEQ ID NO: 146216 - protein, 196 aa, Oryza sativa
  Clone ID: PAT_MRT4530_46861C.1.pep
MVVYTQEHVYRHPWDRVTAAAWRKFTDPASRTALSHVADVHTLHRRVDPEAGRLQAARSITVRSPPLPFILRRLLPAAASSPSGAALCHCVETSLVDAPRRAMDVVVRNVSLRGLIEVEERSTYRPHPERPEEWTQFRQETTIRCRPLSALAAVAEKVETRCAERFLQNSAKGREVVERICRYLEAEAAGAASSAI

SEQ ID NO: 146217 - protein, 70 aa, Oryza sativa
  unsure (1)..(70): unsure at all Xaa locations
  Clone ID: PAT_MRT4530_46862C.1.pep
VVTVADFGNQIPQAGXNGELSCXTLIFFNKQIKGNKREIIQVGLPLFQPTTEESNCYIEALPLDLQAAIE

SEQ ID NO: 146218 - protein, 136 aa, Oryza sativa
  unsure (1)..(136): unsure at all Xaa locations
  Clone ID: PAT_MRT4530_46863C.1.pep
FGTSGTSSSHFRAXKQGQQLYGAKLLQLQAERKLDKDQLASLSSPKSVQEYLESERENINRIIKPMLAVGEIFKAENLQFSPEQLVKEVENSIEEFKHYNQDYDEGSIKQQVQDVLEAAKVLEWLKENCIIEYIRP

SEQ ID NO: 146219 - protein, 62 aa, Oryza sativa
  Clone ID: PAT_MRT4530_46864C.1.pep
MSEAADVRRILHAAARLPSRGDAASARYGSCRVCGRWSARPWCVRGRVAEKMGRLIGQKQQA

SEQ ID NO: 146220 - protein, 191 aa, Oryza sativa
  unsure (1)..(191): unsure at all Xaa locations
  Clone ID: PAT_MRT4530_46865C.1.pep
EWWAPHGNTSVHGGPGAPAXSPAGAVGPTRQPHPRARVADGRAPRGGHTARPEVATSARPTGGGARAPMVAAGDHRRGRAAAERGEGXGERRRQSNAHPEAMVATEEAAGAEVGGGAARVQGVGGVPAVGDRNGGVDEVXPRKEEVRGDDSGEPELGSGGGERGERRGLDSGGERGRRVAETVVGARGGFI

SEQ ID NO: 146221 - protein, 69 aa, Oryza sativa
  Clone ID: PAT_MRT4530_46866C.1.pep
RRASYTLVKLQHRHFLDIAACYYNGWGIFMTMVVLHPLQFHKVKSLITRTPLLLARYLPIISSQLKPPI

SEQ ID NO: 146222 - protein, 143 aa, Oryza sativa
  unsure (1)..(143): unsure at all Xaa locations
  Clone ID: PAT_MRT4530_46867C.1.pep
CSHPGKRLSSLVPVISVFYPSSLSVVSSRNIIKNVWRAERPTDAFVQHVSLAITVXXGQLVIHGLDRFLYTIEGINYFAVPKEQRRGGGEGITRIDFYPMLRRIPWMFLVVVLFWFRVARIGLSIVSWXVGGEPITAETAVKC

SEQ ID NO: 146223 - protein, 196 aa, Oryza sativa
  Clone ID: PAT_MRT4530_46868C.1.pep
MSGCHVSTIIFPPLLFLFFFRSFLPLAPCSRTGGVPRGRRVVWPATAAPEWRRELASLLIPFVRSAMAAHGCRHLRLNAAAIKSLPSAMAARGSGRRGRRRRDLLTRVNSHPQVLAQCELTLNAMVLADGIQDDAGDVTRFVTKIEREGTSVMFKVLPAFAFRDISLTKIESWPHRHRPIRLIDDTNVGPFLCRAT

SEQ ID NO: 146224 - protein, 146 aa, Oryza sativa
  Clone ID: PAT_MRT4530_46869C.1.pep
MSGCHVSTIIFPPLLFLFFFRSFLPLAPCSRTGGVPRGRRVVWPATAAPEWRRELASLLIPFVRSAMAAHGCRHLRLNAAAIKSLPSAMAARGSGRRGRRRRYARRPSPSSSTSPRRTSSLNAMVLNSAVKSSSAARTCVKFCTKP

SEQ ID NO: 146225 - protein, 127 aa, Oryza sativa
  unsure (1)..(127): unsure at all Xaa locations
  Clone ID: PAT_MRT4530_4686C.1.pep
RAQARHDDPHGVAGDEGPAHQRARHEQRPAGEVRPRHRRRQAQRVRRRRHAAAAALRRXPPSPPPMTRRRRGCPPCRARGGPSPPWSRTPASRRRRRPTAGAGPPRGAGAPRRRGRAPRRSRSWRRT

SEQ ID NO: 146226 - protein, 844 aa, Oryza sativa
  Clone ID: PAT_MRT4530_46870C.1.pep
MGSATGGRLVLAVEANIFNELQSQDILTVSVWNIRNMVLVTASDLLTLPLLPSYIRVGEGAIAHAFTAILASPVLPMFNILLLFNFFGPIVCIGLSSWRLRHRDYQGHWDKSSSSSIITGEASSLANLTPGLDFFYVLVLCQCVLYCFLICLLICEISLAVNFSKQCKFPEEWRMRSVRKYLQYTRKKCVRDPAPLAEKRTFLSYAAGLLESESQEECLWGARILDRLITAGEDASSIILRSKTKIQILVDKLGSTQTGTGSSESESDGNNNKEMRVLAARIVAHLAGGIQLAHFPGAIRSVSSLLETTVQPLWNNNQRDDDQLLPSERRDREWARRKAEMEKKRRERKQRRRERKKPGVGMRQNENDGREEEEEQVGCNELILQGLRILEGLTCDPHNCTDIRAAPGLLDKITVPLYSATLIQDIGRSEPWANIANSSLKVVHHLITHAAPGTRLRHEISSNKQAVTNLQSILDLGTEEQQVRTMEIFTELVLDSSLDITLETRENLVRKQLQTFLLANGGEDEIQLPPVPPAATNPIKKRKKKKLRAPIPIKKKKKMNKTIKATAGETLSILSSKSEAISKFIVREHNDIVDRLIGMLDAKYNTRHRTISAEILENLCTHCKEHVDQTFLQKVLDEIQKTHETKASARTTSARGANEENWGIFSQVDDEEMQRPKQNCWKAHGKASKQKGRRAHDKASDQENDHEEADMKELQEALLSLTLVMRDKLIEPENFALIIEEKISGGGGAFLNMLKAIVDDNCQRQATPVSLRIIKLCGQIAEPIMRRNRCSDQKKEFVKLLTKATNTMANLESCMLFTGTDCGMEKTARPLLSDIEKQLKELVT

SEQ ID NO: 146227 - protein, 86 aa, Oryza sativa
  Clone ID: PAT_MRT4530_46871C.1.pep
QYTTISKEKQRQEYLLVLVVTNNAEDVINLDSFTYPRKPLVLSSFFLIKETTISACSDPTWQINSCLSRRNQFMRLLALCFENSSC

SEQ ID NO: 146228 - protein, 61 aa, Oryza sativa
  Clone ID: PAT_MRT4530_46872C.1.pep
LSVDLVFQYIYIFFSLTVKYDACLMDGTSVSKSEGVEFSLTDGFFCPAFAHAVHTMKEGEE

SEQ ID NO: 146229 - protein, 449 aa, Oryza sativa
  Clone ID: PAT_MRT4530_46873C.1.pep
MDTHAVPRAAATVDLRWLLSVAAGAVFALLLLLAASPPFPLRPASLFTTTSPRRALPPLFVESSSTLSAPPPTPPPSPPRFAYLISGSAGDAPMMRRCLLALYHPRNSYILHLDAEAPDDDRAGLAAFVAAHPALSAAANVRVIRKANLVTYRGPTMVTTTLHAAAAFLWGRGGGRGADWDWFINLSASDYPLVTQDDLMHVFSKLPRDLNFIDHTSDIGWKAFARAMPMIVDPALYMKTKGELFWIPERRSLPTAFKLFTGSAWMVLSRPFVEYLIWGWDNLPRTVLMYYANFISSPEGYFHTVACNAGEFRNTTVNSDLHFISWDNPPMQHPHYLADADWGPMLASGAPFARKFRRDDSVLDRIDADLLSRRPGMVAPGAWCGAAAAADGDSNSTTTGGAVDPCGVAGGGGEAVRPGPGAERLQRLVASLLSEENFRPRQCKVVEAN

SEQ ID NO: 146230 - protein, 239 aa, Oryza sativa
  Clone ID: PAT_MRT4530_46874C.1.pep
MAYDANYQEEFPEEELQRATNIALKILRAADRWVATRTLKAVTSHPIGSPQLVDYCVKTLGGTRTDDGMVVAIRCNSEMNTVEYRLTTETLFPPNNVCTLTQDHLFRDIKFLYDALLYPYTMHPYMPEENYQHAKRSAMILLDCKQFIKHYDLEEDFLPQNPSQLHIWCQVELADQVDDPPCIPAELITLPQAATIADLKGEAARAFRDIYLMLQSFVADQLLDCATASDTTQIKLLFG

SEQ ID NO: 146231 - protein, 194 aa, Oryza sativa
  Clone ID: PAT_MRT4530_46875C.1.pep
MDLVSPSEHLCYVRCTYCNTVLAVGVPCKRLMDTVTVKCGHCNNLSFLSPRPPMVQPLSPTDHPLGPFQGPCTDCRRNQPLPLVSPTSNEGSPRAPFVVKPPEKKHRLPSAYNRFMREEIQRIKAAKPDIPHREAFSMAAKNWAKCDPRCSSTVSTSNSNPEPRVVAAPIPHQERANEQVVESFDIFKQMERSG

SEQ ID NO: 146232 - protein, 118 aa, Oryza sativa
  unsure (1)..(118): unsure at all Xaa locations
  Clone ID: PAT_MRT4530_46876C.1.pep
GFLDQWLYGGGGEDTPLPWQVLMIMLLGTPKGPAYIYDGLSPKAAHGYMLTTSCLLDHQXKGSSVESWCCEAIGXESSDVTTRDTCNXGYMAPEYPSTVMLNERRMANRRGGLIRATI

SEQ ID NO: 146233 - protein, 367 aa, Oryza sativa
  Clone ID: PAT_MRT4530_46877C.1.pep
ILESGTLGPKYDASVVIPLLTENYGASRDPPEKQAPMCTVHSFPHNIDHCLTWARSEFEGLLEKTPNEVNSFISNPAQYAAAMRKAGDAQARELLERVCECLDKERCDGFEDCIACARLKFEDYFATRAWQLTFTFPEDAVTSTGAFFWSAPKRFPRPLQFSTVNSSHIHFILAASILRAVSFGISIPDWAKNTSNLVDAVSKVVVPEFEPKSGVKIETDEKASNISSASVDDASVIEDLLTKLEASAKKLPPGFQMKAIQFEKDDDTNFHMDLIAGLANMRARNYGIQEVDKLKAKFIAGRIIPAIATSTAMATGLVCLELYKVLAGGHPVEDYRNSFANLAIPMFSMAEPLPLEEFCDSDVALDR

SEQ ID NO: 146234 - protein, 207 aa, Oryza sativa
  unsure (1)..(207): unsure at all Xaa locations
  Clone ID: PAT_MRT4530_46878C.1.pep
FHPQSDGQSEVTNKIIAMYLHCLTGDRPRQWLRWLPWAEYCYNTSYQSSLRTSLFRVVDEREPPTLRAYEPGSTRLPAVQQALQERDDFLRAIRDRLEQAQQTYKTAYDGKHRVLELAVGASFASXDQRIGSVAYRLRLPPGAGLHDXPAAEASWVGLDDFHAQYPDFQLADELLLQGGEMSCGDCIMHGAVSEFRRHSRNEEQSSV

SEQ ID NO: 146235 - protein, 76 aa, Oryza sativa
  Clone ID: PAT_MRT4530_46879C.1.pep
HYSQFSLESLDPREKVMELGSRSFFLCPKSSAAVHAPSPSCSSDEASRIRDRDAPAAARAGAAPAWVSYMQFWPMM

SEQ ID NO: 146236 - protein, 125 aa, Oryza sativa
  unsure (1)..(125): unsure at all Xaa locations
  Clone ID: PAT_MRT4530_4687C.1.pep
SWLITHNRGLGYSNTFTLARGAQLYPQDTTHRHVTAPGRTXVTMSIDCDKTLRITPPNQXAPTSSFPPPPPXPSRAAPSCAFGESRSNIDHSMAHPYSITPTLALVRXKGESYTTSPAVAHSCLW

SEQ ID NO: 146237 - protein, 185 aa, Oryza sativa
  Clone ID: PAT_MRT4530_46880C.1.pep
MDSLPLDWPGMVQVLLGRAWAVGVAHEQARSRPVCRSGHAGTIDLGPGPIVPGPCPGQSAKGGNRTEKLTDENFLTPIVQTNRVFSFTFERIIFTFPLFPGGPVTNRGMTKPHEIPIGFIVSNSAVISQWIKEQRRNFDGLFIYTTWGIWLQRNARIFNNDYGTVSHVVDSIINMCKAFDEAQTV

SEQ ID NO: 146238 - protein, 47 aa, Oryza sativa
  Clone ID: PAT_MRT4530_46881C.1.pep
DKNTTYNNNQAVPFIPRYNISRALLNTNTQLYNLASFMMTSIFLDLT

SEQ ID NO: 146239 - protein, 264 aa, Oryza sativa
  unsure (1)..(264): unsure at all Xaa locations
  Clone ID: PAT_MRT4530_46882C.1.pep
VRWLVVCPFLLTPDLLFLATFVLTIYVVSCINSSTSFSGPVCRPRRGRGCGASFASRGXGLLPLASPDVEDDAATTMPLPAKPPKLIALTPAPSRLVAGLXVMPENYTAPQCILVESPHHCKSHGWMARVRLQPGGLPQEVPYVVTLYCPYHGWTNHARCVISPSPSPEYSPATPLYTPTPTEPPLFLLSGTIVMCRGAPPFYMAVGGSNGSVLSPPSPPPAPSFPSRPTPGRQTRAPAFAACPGRDGRWRQIDNDGGLSAATV

SEQ ID NO: 146240 - protein, 40 aa, Oryza sativa
  Clone ID: PAT_MRT4530_46883C.1.pep
PGRNCWADARCSFIPRAAVLEVLLFHTRACDLLGLLLTDL

SEQ ID NO: 146241 - protein, 120 aa, Oryza sativa
  Clone ID: PAT_MRT4530_46884C.1.pep
GGLKVNSLSLISSRMAATVWSIWWVFGGWPLKIFSFRISQMCHQVVTRAPILLLACALFEEEQMFEVHSCMLSCIEWPGIPFILKLGLFRLFGFVSSFSCRSPGNCSAAAGALLLRLIDA

SEQ ID NO: 146242 - protein, 439 aa, Oryza sativa
  unsure (1)..(439): unsure at all Xaa locations
  Clone ID: PAT_MRT4530_46885C.1.pep
MAGELERLRAEREELDSRIRLLESQLGASPTPAGEGDAAGTGAGGGGGGGGATACPIRRRGKGDAAGTGPGGGVGGGGATERPIRRRGNGFAAADGLPADMIYRYSRHLLLPDFGVEGQRKLSQSSILVVGAGGLGSPVALYLAACGVGCLGIVDGDDVELNNLHRQIIHKXALVGKSKVKSAADACREINSSINVMEYXYNGSPCYRCLFPNPPPVAACQRCSDSGVLGVVPGVIGCLQALEAIKVATDVGEPLSGRMLLFDALSARIRIVKIRGSSTVCTVCGENSAFTQDDFQKFDYENFTQSPMSDKSAPSLDILPGSARVTCKEYKRLVDNGERHLLLDVRPAHHFQIASVSQSLNIPLSELEEKLQMLETSLKDTTDASSSDKPPSLYVVCRRGNDSQIAVQLLREKGFLSAKDIIGGLQSWAQDVDPDFPVY

SEQ ID NO: 146243 - protein, 105 aa, Oryza sativa
  unsure (1)..(105): unsure at all Xaa locations
  Clone ID: PAT_MRT4530_46886C.1.pep
MSTSAGPSSAPSAEFPEQSSHQIAIPSLTYPNQYFLGPIGNLDPTXFINAEPKKIPFRLASPNLGIWKNTIKSWPSTVKSWTAWYKRVSASKQGHWEEIGIAQAL

SEQ ID NO: 146244 - protein, 61 aa, Oryza sativa
  Clone ID: PAT_MRT4530_46887C.1.pep
QWWSPGSRNAARAGKAFLLVIQGNLSLSVMQVLTLWNHSPLYELSITKLQVSSRTLVKCNC

SEQ ID NO: 146245 - protein, 149 aa, Oryza sativa
  Clone ID: PAT_MRT4530_46888C.1.pep
MADQLTDEQIAEFKEAFSLFDKDGDGCITTKELGTVMRSLGQNPTEAELQDMINEVDADGNGTIDFPEFLNLMAKKMKDTDSEEELKEAFRVFDKDQNGFISAAELRHVMTNLGEKLTDEEVDEMIREADVDGDGQINYEEFVKVMMAK

SEQ ID NO: 146246 - protein, 323 aa, Oryza sativa
  unsure (1)..(323): unsure at all Xaa locations
  Clone ID: PAT_MRT4530_46889C.1.pep
MARCISFLSTSSSLPCATKPPCCSVSSVLPSSPSSHQCRGRKTSCGSIRALREDWRERSKAIPPGGVYPAKDHCSQCGLCDTYYIAHVKNACAFLGDGMSRVEDLEPLVHGRGRKQDMDEMYFGVYEQLLYARKMKPVEGAQWTGIVTTIAVEMLKANMVDAVXDPDDRLAPMPVLARTPDEVIAAKGVKPTLSPNLNTLALVEAAGVKRLLFCGVGCQVQALRSVEKYLGLEKLYVLGTNCVDNGTREGLDKFLKAASSEPETVLHYEFMQDYKVLLQHLDGHIEGAPYFCLPAKDLVDVIAPSCYSCFDYTNGLAVRFPSF

SEQ ID NO: 146247 - protein, 646 aa, Oryza sativa
  Clone ID: PAT_MRT4530_4688C.1.pep
MDHIFSTNAWLTIALVFIITLAAKVAVIREQHRALGSVFTLRSLGLAVTFLVGPECSDHFFHAPELEIAIDGLYEVTVPIFGKEVGYDIDLDTRNEQHRFFAKMLRPAKLRGHVLPMEYFGKWGECGVVDLMQEVDHVLMLIASRCLLGKEVRENMFDEVASLFHELMGGMHLISMFFPYLPTPGHRRRDKARAKLGEIFSQIVKTRKMSGRVEDDMLQDLIDSTYGDGRATTDTEVTGLLVALLFAGHHTSSTVAVWTALRLLTHPEHLRAVRAEQERLVAAAEQQRSHHGGGGGGGIDYGVLLQMDVLHRCIKEALRLHPVTPMILRRARRGFTVRDKEGGEYSVPAGRLLASPLVVNTLLPNIYKDPHVFDPDRFAAGRAEDKAVAGARDLAYLSFGAGKHACMGEGYAYQQIKVILSHLVSNFELKLESPFPETEDMLSMRPKAAVAPSPSPNPAGGEPVGVWPMEAAGRSSQRGGGGPRRLSGGGQRHGKAIGTRGSQIRRWWWRRPSTVGNAQASTSSPNSPRFAMVSSLQPAPMMELINATFVPLLPSLSVETTVTVGRSCIRRRRQSTPVEDQSPDLFDLIEDYFDGTLHTLNFITALDKSLHRAHDSKLILHLVLQRRYHHHAEASELYASMLGELH

SEQ ID NO: 146248 - protein, 142 aa, Oryza sativa
  Clone ID: PAT_MRT4530_46890C.1.pep
MDLAEWWSRGPLDLIHKSLRTTKSDSHELEGRRIQPVQTAQEQHPPLVISVGCSHNDDYRTMESTFENGAIMRDWRFISTIFPSAMMAADGGPLLGEWMSATASAPPRGPRYLTVFPSLFPVIAADPVDNEKKYKKFHMLDL

SEQ ID NO: 146249 - protein, 513 aa, Oryza sativa
  Clone ID: PAT_MRT4530_46891C.1.pep
MARCISFLSTSSSLPCATKPPCCSVSSVLPSSPSSHQCRGRKTSCGSIRALREDWRERSKAIPPGGVYPAKDHCSQCGLCDTYYIAHVKNACAFLGDGMSRVEDLEPLVHGRGRKQDMDEMYFGVYEQLLYARKMKPVEGAQWTGIVTTIAVEMLKANMVDAVVCVQRHLNNNQILHNCFPLQKDFFHGLEKTVVCLLCSDPDDRLAPMPVLARTPDEVIAAKGVKPTLSPNLNTLALVEAAGVKRLLFCGVGCQVQALRSVEKYLGLEKLYVLGTNCVDNGTREGLDKFLKAASSEPETVLHYEFMQDYKVPYFCLPAKDLVDVIAPSCYRFSPEFPVIIHNELMFLLLPSCSCFDYTNGLADLVVGYMGVPKYPGVSMTQHPQYITVRNDRGREMLSLVEGLLESTPTVSSGVRQPFVIETVKADDEAKQGRGPSQPAPTFVGNVIAFLLNLIGPKGLEFARYSLDYHTIRNYLHVNRAWGKQRAEQHIPSYAKKIVEAYDKDGRIESMLQ

SEQ ID NO: 146250 - protein, 109 aa, Oryza sativa
  Clone ID: PAT_MRT4530_46892C.1.pep
VAPRRVAAEQGRGGDEQSRAGEGRGSWLTIQYPWRGASPSCLPPRPCHVPQNRPADQCSLSYPRLRTLINAEVRKRDRGSIRALREDWRERTKAMPHGGVYPTKDHCCQ

SEQ ID NO: 146251 - protein, 63 aa, Oryza sativa
  Clone ID: PAT_MRT4530_46893C.1.pep
MADLPNRLPDAALVAERRKDDRGRSRRGLVSPILIRIAMRQAASGDREHAKKRTGVADFDSEA

SEQ ID NO: 146252 - protein, 133 aa, Oryza sativa
  unsure (1)..(133): unsure at all Xaa locations
  Clone ID: PAT_MRT4530_46894C.1.pep
MGKDRTPIKIAVIGHDDYCKATTTGHLIYKLGGIYKRKIWRFENEFVNMNKTILKFGRGLXRLKTSRERLITIDIALWKFETTNNYCTDMDASGHRDFIKNMITDTSHGDCALLIIDLNSDEFDAGLYKIEKP

SEQ ID NO: 146253 - protein, 101 aa, Oryza sativa
  unsure (1)..(101): unsure at all Xaa locations
  Clone ID: PAT_MRT4530_46895C.1.pep
MALILHRRSGTSRPLALSGAAASYWNGSKEDNDDTGEEEDDDGDEDRSLDLLVRFLHSVFRKVSRRARRAARSMLPLSVPAERVKFSVNXGVLVLTFLWIL

SEQ ID NO: 146254 - protein, 241 aa, Oryza sativa
  Clone ID: PAT_MRT4530_46896C.1.pep
METSQYRGSKEEGKFKDQSIFNRDALEWLCKSFCLAGRTMMVDEELVCRLKLEDFGQCMHPLKVSKVLDKRGLTMWNLLGFDTKAGIATDRPLIVRTTIGRASKRGTNDNKGHKSRSYQSTAIGEQYRKSSTTAMQGRRAIIQGRFFSLRTNRDYLAHHGKRSLRLWCCGPNFNIYVGESIERLEAIATMRTGGLVSTAPISIAREGEGTERPKATAPRRFGDPVSTADRSDSNIAEIAAT

SEQ ID NO: 146255 - protein, 107 aa, Oryza sativa
  Clone ID: PAT_MRT4530_46897C.1.pep
VRFADHTKMKVSTVAVLVMVAMLMMSVAVYSDDASSHGVTEKQVAAAANAHGSNGGSVVTEAASTDSTAGASGTSSAGASGTNIDSNYYVTMKGYMEYMRKYGGKQP

SEQ ID NO: 146256 - protein, 103 aa, Oryza sativa
  Clone ID: PAT_MRT4530_46898C.1.pep
SEWAAAKRARAATSARDSGEVRVGGGAADAIAHAELQPVCQRAVQPRPRRPLPWRRRCGGGGELFINGQIQPMWLSPLDDVGGSGEPTREHEAGVEDERGERL

SEQ ID NO: 146257 - protein, 413 aa, Oryza sativa
  Clone ID: PAT_MRT4530_46899C.1.pep
MMGLLSLLLVVVSCLAAPATADWYGPLAVYWGRHKDYEGSLREACDTGRYNTVIITFYSVFGYVKGRYGLDISGHPVAAVGADIKHCQSKGVQVLLSIGGQGGGYSLPSSQSAADVADNLWNAYLGGRRAGVPRPFGDAAVDGIDFFIDQGGADHYDELARQLHGRGVALTATVRCSYPDSRLQKALATGLFARIHVRIFGDNQCTMLPLDAWEKWAAAYPRCKVWLALVASWEQDEVGYMFQKDLYYGVLQFILNKPNYGGIAIWDRYYDKKANYSAAAAAAQQREGRWWRCPTLCSIRPSSSCGGTLTSARSGGKGRPSSSCGSTLISARSGGKGGGGALPSARSGGKGGGGGLVMTASHGNDSGGGYLHVFLLAPLLVYNATTGEAGYCVQWCYTLEIGSQGSLIPLWVA

SEQ ID NO: 146258 - protein, 106 aa, Oryza sativa
  unsure (1)..(106): unsure at all Xaa locations
  Clone ID: PAT_MRT4530_4689C.1.pep
FFLVRQGLVFPHGYXNMYTWSHCKXISRSIQLLSEHRHPLYRGFYXSSHGIWHLTRGCIGSVXSPAKGXVLRSAGPGESTGYVGIVLGCNASISWIALFWLIYLPI

SEQ ID NO: 146259 - protein, 49 aa, Oryza sativa
  Clone ID: PAT_MRT4530_468C.1.pep
HSWAEVFLALGAQITQILKDDDKYQCADPGPIRGLLNHYSQFVSFPIYT

SEQ ID NO: 146260 - protein, 66 aa, Oryza sativa
  Clone ID: PAT_MRT4530_46900C.1.pep
DEQKIDEIYIPNAGEQKRAQEQSSHLYIMMALSNPLFFTRKYTFILDYDWNSNKADQEQEIYLGPT

SEQ ID NO: 146261 - protein, 498 aa, Oryza sativa
  Clone ID: PAT_MRT4530_46901C.1.pep
MAVVAVAVVIALLAAFLTPLAVYLARRASPPPPPRRNLPPGSLGLPLIGQSLSLLRAMRRNTADRWLQDRIDRYGPVSKLSLFGAPTVLVAGPAANKVVFHHEALAPKQPRSLAAIIGRRNILELVGDDHRRVRGAILQFLRPDMVRRYVGKIDSEVRRHLAARWAGRRTVAVFPLMKTLAFDVIATLLFGLDRGAIREQLADAFDGMHEGLWTVPVDLPFTPFRRGLMASARARRLVEATVREKAAKLEHGESSPSDDLISCLLSLRDGGRQLLTEEEIVDNSVLALVAGHDTSAVLLTFMLRHLANDPATLAAMAQGKNPTLPSPDEHSEHEEIARGKRDGEALTCEDVAKMKLSWRVAQETLRMVPPVLGSFRRAPVDVEFEGYTIPRGWQIFWSPSVTHMDPAIFHEPTKFEPSRFDGAAAAAAYSFVPFGGGPRICPGMELARVETLVTAHYLVRHFRWKLCLGEEKNTFLRDPMPTPHDGLPVELDHIAPLC

SEQ ID NO: 146262 - protein, 94 aa, Oryza sativa
  Clone ID: PAT_MRT4530_46902C.1.pep
MTKSPVTDETPVTDNPSLTDESSVTCRNYLTVTDDSSLTGEGIPVTGEGIPVTVRGRMAHRYPVRGVRIWRSDVTHKATTQRVISRKFEYIRQI

SEQ ID NO: 146263 - protein, 293 aa, Oryza sativa
  Clone ID: PAT_MRT4530_46903C.1.pep
MASSLSVAVLLCLAAAAAAQLSPTFYDTSCPRALATIKSAVTAAGCDASVLLADTATFTGEQNALPNKNSLRGFNVVDSIKTQLEGICSQTVSCADILAVAARDSVVALGGPSWTVGLGRRDSTTASMDSANNDLPPPFFDLENLIKAFGDKGFSVTDMVALSGAHTIGQAQCTNFRGRIYNETNIDAGYAASLRANCPPTAGTGDSNLAALDTTTPYSFDNAYYSNLLSNKGLLHSDQVLFNGNSTDNTVRNFASNRAAFSSAFSSAMVKMANLGPLTGSQGQIRLSCSKVN

SEQ ID NO: 146264 - protein, 315 aa, Oryza sativa
  Clone ID: PAT_MRT4530_46904C.1.pep
MASSLSVAVLLCLAAAAAAQLSPTFYDTSCPRALATIKSAVTAAVNNEPRMGASLLRLHFHDCFVQGCDASVLLADTATFTGEQNALPNKNSLRGFNVVDSIKTQLEGICSQTVSCADILAVAARDSVVALGGPSWTVGLGRRDSTTASMDSANNDLPPPFFDLENLIKAFGDKGFSVTDMVALSGAHTIGQAQCTNFRGRIYNETNIDAGYAASLRANCPPTAGTGDSNLAALDTTTPYSFDTAYYSNLLSNKGLLHSDQVLFNGNSTDNTVRNFASNRAAFSSAFSSAMVKMANLGPLIGSQGQIRLSCSKVN

SEQ ID NO: 146265 - protein, 81 aa, Oryza sativa
  Clone ID: PAT_MRT4530_46905C.1.pep
MAPISRRIAPLLFLMLLILVASEMGTTRVAEARHCVSQSHRFVGACMRKSNCEHVCMTEGFPWGECRFHGIERKCFCKKRC

SEQ ID NO: 146266 - protein, 69 aa, Oryza sativa
  unsure (1)..(69): unsure at all Xaa locations
  Clone ID: PAT_MRT4530_46906C.1.pep
PIMCQVLVDLQKNPRASQKHLKNPPVMQNTQXLVSAGIAQMTQLTKALTTVRVNVHRSFLFFQGQSLCS

SEQ ID NO: 146267 - protein, 119 aa, Oryza sativa
  Clone ID: PAT_MRT4530_46907C.1.pep
ISDCFEHPLNESQFSVKAPLPCMFFFTEGTIVWFVKVAFFLTGISSCTYTRQALFGLTIAYCCTLSLSRPLFSARTPWPGHLTIAPFPRVLFSSPLGVVLPHIPVHLPFCVPKRLLPKN

SEQ ID NO: 146268 - protein, 63 aa, Oryza sativa
  Clone ID: PAT_MRT4530_46908C.1.pep
NPPQPLSYKKKRGKGYNFKKKRGGPKEKKNLFTTLKIGNWAKKKKFLLKKFFSKNFSKKAGAF

SEQ ID NO: 146269 - protein, 111 aa, Oryza sativa
  Clone ID: PAT_MRT4530_46909C.1.pep
MASAAGSKQQQAMMSLPSSRGGGGGGWTQRQNKQFECALAVYDKETPDRWHNIARYMGGAKSADEVRRHFDHLVEDVSRIESGRVPFPRYSSSSSSRGADDGNRSRYLKYQ

SEQ ID NO: 146270 - protein, 84 aa, Oryza sativa
  Clone ID: PAT_MRT4530_4690C.1.pep
MRGLGGCGKGGSLVGGAANLAAAEGEGGSMSERMNGTMGFAGFDHGKRPESLARGRETTDTGTAVEWSGVQCSAAASHSHAKHR

SEQ ID NO: 146271 - protein, 303 aa, Oryza sativa
  Clone ID: PAT_MRT4530_46910C.1.pep
MSGGQDLQLPPGFRFHPTDEELVMHYLCRRCAGLPIAVPIIAEIDLYKFDPWQLPRMALYGEKEWYFFSPRDRKYPNGSRPNRAAGSGYWKATGADKPVGSPKPVAIKKALVFYAGKAPKGEKTNWIMHEYRLADVDRSARKKNSLRLDDWVLCRIYNKKGGLEKPPAAAVAAAGMVSSGGGVQRKPMVGVNAAVSSPPEQKPVVAGPAFPDLAAYYDRPSDSMPRLHADSSCSEQVLSPEFACEVQSQPKISEWERTFATVGPINPAASILDPAGSGGLGGLGGGGSDPLLQDILMYWGKPF

SEQ ID NO: 146272 - protein, 647 aa, Oryza sativa
  Clone ID: PAT_MRT4530_46911C.1.pep
MPTQHLTSRRHAELLRHLLLDGGAAVKDLRLRRVVPLTSAPLDDSSPDPAGPAAKSGSAETTPPEAQDGRERKPVVQRSKLVHAPASFGYRRLLPFLNQLTNTNQESECPSGKDNSKIDAYAESESEAQPDPVHCSISTTKEEINISSSHLSSTKMCLSRCQRSRFVHHPSSFSYKRMLPFVTENGYHIANLSHHVLLSTFSEITSQEGHRTKIPRLVQEKQSSTDENLILTTGQHHFVMSGDSAEECKTAQVERLVEENESKSDRIHPLGGRLLQPAVSEAAHLELQVSTVEGQNLTQERVLASDAHLLSSDKGECTLKWNDVLPAGQHQPAASEDFSEESNKAGVEAVLEERKSVPDGNSVLDGRQLQTFVSKASPPEGTAEMQKATQKQAVTSDGDDDPLDSCKGGSLAKEQPLLHATELSVKDNAEGDEVHQCQSPELGTSDVCFGGPTKVVIPSVNSHNALEQCDSMASLDEPLLDVEMTCIPLDPCATGVPYSVKETPAGVLCTSDHCSTGTPLTVEETSSSVSVVHIEPMSSKVSPVRQRGSPCLEKRGLSPKKLSPKKGILKRHTRGCKGICMCLDCSTFRLRADRAFEFSRKQMQEADDIIDNLLKEVSSLRNLMEKSAGQFFLHITDGHFHCLKYVD

SEQ ID NO: 146273 - protein, 86 aa, Oryza sativa
  Clone ID: PAT_MRT4530_46912C.1.pep
MAVATDDDEDVEEMQGYRIGRIGSASCKEDRLDQMGSAAGTRSSLAALLMIFGLIGPATGTGRASQVFVDGDGGLRHSCSIPFVHV

SEQ ID NO: 146274 - protein, 76 aa, Oryza sativa
  Clone ID: PAT_MRT4530_46913C.1.pep
FFFFFLYQATNRGCSTENDTSLHHFTNFLSPATPSQAYQFFLNAQGSIISRINWINMPYDQQPALSPRGGRHQLRT

SEQ ID NO: 146275 - protein, 366 aa, Oryza sativa
  Clone ID: PAT_MRT4530_46914C.1.pep
MDSGAAAVCAEKASEIIKIGQVDDVQELQRRLCSATTVPERYIRDGDDRPDHAVVDDERAQERIPVIDVGELQRGSEDELDNLRLACEQWGFFQVVNHGVEEETMEEMEKAAREFFMLPLEEKEKYPMEPGGIQGYGHAFVFSDDQKLDWCNMLALGVEPAFIRRPNLWPTTPANFSKTLEKYSVEIRELCVRLLEHIAAALGLAPARLNGMFGEAVQAVRMNFYPPCPRPELVLGLSPHSDGSAVTVLQQDAAFAGLQVLRGGGGWVAVHPVPGALVVNVGDTLEVLTNGRYKSVEHRAVASGEHDRMSVVTFYAPAYDVELGPLPELVADGEPRRYRTYNHGEYSRHYVTSRLQGKKTLEFAKI

SEQ ID NO: 146276 - protein, 53 aa, Oryza sativa
  Clone ID: PAT_MRT4530_46915C.1.pep
PTPHSGSGLGGSSSLWRIAKKPCRDIATHLLAQEQGEDRAFYPLVRKDDRRCV

SEQ ID NO: 146277 - protein, 317 aa, Oryza sativa
  Clone ID: PAT_MRT4530_46916C.1.pep
MEKEVPKNLLRISVASSTQDTERYHTIFYHVSRDTRKVSYDFNHVSRDTHEVSCDTCRVSDDFYHVSRDTRKVSDDFYHVSRDTCEVSDDTYQVSDEDGDGGGRGQVRDGGGGGWARQWRRGTGTAAVGDGDGGDGTGAGLAGAAAPSRQIRQGREGRRGKGGVVAADGVEVQRRGWWERLPSARSGGPTEGREAVAPSPPPDPAGGEAAAARAAADLPVSALGSGGGGLRRAGASGHGGGSCDNDDDDFDGGCDEDDKRPPPSTAPPASTPTNLGSARVAFQRPPNSRRWIRPPRGSDLSEVYVTFDGLERVTRYK

SEQ ID NO: 146278 - protein, 63 aa, Oryza sativa
  Clone ID: PAT_MRT4530_46917C.1.pep
AENRHTKSSISRARFSHKSLRGCIWSTGPARKTVYPQNHHLEQFIREGKQLGTYLNKPRYCGT

SEQ ID NO: 146279 - protein, 87 aa, Oryza sativa
  Clone ID: PAT_MRT4530_46918C.1.pep
KKNQKRNASALLLPAQQQHHGQVGRFLYSNEVMVRCSDRFLLPFEPSVQRRVEDYLGIDQMCELKVIVVSACCTSSTHIGHFRASNF

SEQ ID NO: 146280 - protein, 103 aa, Oryza sativa
  unsure (1)..(103): unsure at all Xaa locations
  Clone ID: PAT_MRT4530_46919C.1.pep
FFYHNTTMSNVCVLLDALESLALLVSFVGTFVTIPELLPGSPIASNVRVQLQPLAQATMXGIAMASRSIDRLTHLCWHTXRXNTTRALGIHTHCMCTQALVPN

SEQ ID NO: 146281 - protein, 64 aa, Oryza sativa
  Clone ID: PAT_MRT4530_4691C.1.pep
AQAKTYPSSVLLKFCSVPCIAPPPPATTIVAAADRHLARCRRPSRARGVTSIAEQAGGKVEGHI

SEQ ID NO: 146282 - protein, 107 aa, Oryza sativa
  Clone ID: PAT_MRT4530_46920C.1.pep
MLSITHNRYIFVIHIYLKFVFFKKKKKKKKKKKKKKKKKKKKKKKKKKKKKKKKKKKKKKKKKKKKKKKKKKKKRGGPFKRTKFSLGIWRTKDFFKGGPKKKKRAGF

SEQ ID NO: 146283 - protein, 91 aa, Oryza sativa
  unsure (1)..(91): unsure at all Xaa locations
  Clone ID: PAT_MRT4530_46921C.1.pep
CEGRTQVDRDLESLKKDKVLRVFKLNTGQDDHAIMFMDDYLKQMALAVKRSRGKDQDGTEVFGWFERYVIXLKLEVXIDQXDXFXXXXXGG

SEQ ID NO: 146284 - protein, 82 aa, Oryza sativa
  Clone ID: PAT_MRT4530_46922C.1.pep
WPSSASTLATPSPSASASGSAAASPPTSQPPPPLRHRARPPMPPRPAATLPFSRVSAAASPAGRRTSLPQRPPPYRWPACPV

SEQ ID NO: 146285 - protein, 107 aa, Oryza sativa
  unsure (1)..(107): unsure at all Xaa locations
  Clone ID: PAT_MRT4530_46923C.1.pep
HEASCRIRHEVGSVWVFXGRRLIPPPCDRSMTEGREGEGRRGISSCLSVYFLPPSPSHRRGGRSRGHAVPFSPFVARADNLMPSSVNAKSQCLRSGPTLRCHGYATV

SEQ ID NO: 146286 - protein, 310 aa, Oryza sativa
  Clone ID: PAT_MRT4530_46924C.1.pep
MDVAESRDVRMRRQGQGQYGGGADINSMVAAQLHHYQTQQRVQQHPDNNYPGRDPGKAAEEQQYSAPKVRQSQWDRGGPNAPNQIPAYAYNEGQSAQGAQTFYDGQRSDLKVGLEKQPNKESRDRPRNDRFEARREDYNLPRTFEGLEQNFHEDIVILSKELHDAEDAENARHRERLNEINAQYQEKLLALRARQATYREEFLRKESQARQQQYQQASMSSYANNVRPGETHGYTPIAAKPPPPPPAAAATAGGTYGEAHRGYTSAQYDNFRERPDYPEFRGRGRGEGHVLEHRGQFPGGRAYNSGGRRF

SEQ ID NO: 146287 - protein, 151 aa, Oryza sativa
  Clone ID: PAT_MRT4530_46925C.1.pep
MAAVAATSPALTLAVAAAVIAAACLLLCAEAVWLDLPQSGTKCVSEEIQSNVVVLADYALMYESHPSSHPTIAVKVTSPYGNTLHHNENATVDSAEKGSGISINLDWKIGIAAKDWDVIAKKEKIEGVELELRKLEVAVQSIHQNMIYLKA

SEQ ID NO: 146288 - protein, 218 aa, Oryza sativa
  Clone ID: PAT_MRT4530_46926C.1.pep
MAAVAATSPALTLAVAAAVIAAACLLLCAEAVWLDLPQSGTKCVSEEIQSNVVVLADYALMYESHPSSHPTIAVKVTSPYGNTLHHNENATVGQFAFTTSEAGNYLACFWIDSAEKGSGISINLDWKIGIAAKDWDVIAKKEKIEGVELELRKLEVAVQSIHQNMIYLKAREAEMRTVSEKTNARVAWFSILSLSVCIVVSILQLWHLQGYFQKKKLI

SEQ ID NO: 146289 - protein, 182 aa, Oryza sativa
  Clone ID: PAT_MRT4530_46927C.1.pep
EQVSSGAGKQREGRQWAPAYGGAAAAASAAQREEGRGSAGARTGGGACSRRSSAPAFAALREGRLQHVAGGAAELAPAVAAWREEGWAATAAAVWREEGREGQLRRAEGGAATPAHRGKRSSGAGACRGGGGDAWISSGWCGADGETRGPALAVWMECVAVWTEACNACLAQPEAQVLREAL

SEQ ID NO: 146290 - protein, 424 aa, Oryza sativa
  Clone ID: PAT_MRT4530_46928C.1.pep
MAENSVVERVLVVAQQRAHGAGSLAVAASRYRRHPGGGSRSFVVASEASRDAVGRRDRAPAAWSASLYFMYRAWPAGPSCRAGPTVPGQPSVPVGRPRHGPTVGPGQHGPDPSRAVPINIPWQCRVPVSRCRRVWWSAAAAVVAFFFVVFVAAAAAAATASMYNDVEVVWGGDHSFFFMDGDGDALALCLDETHGSGFRSRDAYLYARFDVDMMLVANNSAGTVTTLYLMPDDVPWEYHDEVDLEFLGNVTGEPYTLHTNIFANGVGGREQQFRLWFDPTADFHTYSIVWNPKHIIILVDGVPIRDYRNTAARGGPAFPTWQKMRAHGSLWNADDWATQGGRVKTDWSEAPFFAYYRGLRVTPCAPSPGVAWCGDEPPESPWFDQQEMDAAALSKARQEHLLYDYCEDTKRFKDTGLPVECTIN

SEQ ID NO: 146291 - protein, 142 aa, Oryza sativa
  Clone ID: PAT_MRT4530_46929C.1.pep
MVSEPTLVVSRARVSQLRRHGVHGWCGPGVVTQHGTCAGTGQACLAWSNLGWVTDREILPGCTRLQIEIPYWHLIVHFRPQYWALQPASTYVLVNNDRTLLNARENPAKSVCCKRDLNPLLARSAEASKRKTPNNLNNRIVN

SEQ ID NO: 146292 - protein, 61 aa, Oryza sativa
  Clone ID: PAT_MRT4530_4692C.1.pep
LGASSSMRSLGSRPSPRRRAIEPSRVCICQGFPRIWASDRRSLPPARVLIFLPAGSRVPFA

SEQ ID NO: 146293 - protein, 55 aa, Oryza sativa
  unsure (1)..(55): unsure at all Xaa locations
  Clone ID: PAT_MRT4530_46930C.1.pep
FYYVXFYSYMGSYSTYVDVKPIGGFVXSLCESXFTGRSENLXRPMIFFRVSQIRG

SEQ ID NO: 146294 - protein, 124 aa, Oryza sativa
  unsure (1)..(124): unsure at all Xaa locations
  Clone ID: PAT_MRT4530_46931C.1.pep
XXIRXTIGXIGXXXPPPIFFFFFCXLNXAYLYLXXPNXNXXVLKXQXXYLLNXHXNXXLHXCGKXTXTEKLRXXXXLRXPWGXLCRXXEXNLXXAXXKXXMXXSHKXFSXDXQXXTKKKNXXNX

SEQ ID NO: 146295 - protein, 201 aa, Oryza sativa
  Clone ID: PAT_MRT4530_46932C.1.pep
MRSGEGSTAAAAAAEEEKVKVAAPFRLAELGLRVCAVPLAVASVWEMATNKQVDETYGEVRFSDLSGFRYLVWINAITAAYSVASILLSSCRFITRFDWLIFLLDQASAYLLLTSASAAAEVVYLAREGDREVSWGEVCSYFGRFCGAATVSVALNAAALLCFMALSLISAFRVFTKFNPPSQSNSKQQLSQEQGKPVVSG

SEQ ID NO: 146296 - protein, 471 aa, Oryza sativa
  Clone ID: PAT_MRT4530_46933C.1.pep
MEAAAPASHAAAARGRLRSRQYAVLGLTFAAYASFHASRKPPSIVKAVLSADWAPFSGPRGPHRLGELDVAFLSAYAAAMFAAGHLADRADLRGLLAAAMLASGATSAALGAAYFLGVHSLAFFLAAQVASGVVQSAGWPCVVAVVGNWFGHASSRGTIMGVWNSHTSVGNIAGSVLSAAVLEFGWGWSFLVPAFVIAALGVVVLVFLIAHPMDAGLDIEAIEVEMNGGSGEEVELLGEDKKEDEDVLEVEAVAELPRAIGFLEAWRLPGVAPFAFCLFFSKLVAYTFLYWLPFYIRHNAVAGQFLSHKASGILSVVFDIGGVLGGISAGLLSDKIGARAVTSALFLFLSIPALILYRTYGSISMHHNIGLMFLAGYFVNGPYSLITTAVATDLGTQDAIKGNSRALATVSAIIDGTGSVGAALGPLLTGYISTRGWNSVFFMLIVSISLALVFLIRLAKDEIVSKISARH

SEQ ID NO: 146297 - protein, 67 aa, Oryza sativa
  Clone ID: PAT_MRT4530_46934C.1.pep
LSTLALLASASPFPSAPPIRPPSPPGRAPPPPGRAPPPPSQAPPPPRRAPPPPALPPPPPRRAPPPP

SEQ ID NO: 146298 - protein, 149 aa, Oryza sativa
  unsure (1)..(149): unsure at all Xaa locations
  Clone ID: PAT_MRT4530_46935C.1.pep
LGQVLLLQRRLAVVDRRAAARLGRVVPLQHLVHPGDLVAVVLRPRRRAHLHRTPAACRRSPPPPAAAAVTCTGASWPPLHCSARRGGLHMSRSDADGTRTVSSLQHSNMASMGNGKVKKRQQQQGDDQQGNRKKISCASPSAAHGEIXL

SEQ ID NO: 146299 - protein, 247 aa, Oryza sativa
  unsure (1)..(247): unsure at all Xaa locations
  Clone ID: PAT_MRT4530_46936C.1.pep
LARSGPEGRRQVMESGDVGVLLRHAAGGDEVAARALLHLSLDGDDARVGLVANGTVDALSTTMSSGGXTXTVAATALTSLATVDVNKCTIGAHPSAVPALVGLLRRGGGARERREAATALYELCKLPENRRRAVRAGAAPALVDLAAAGSARAAEVLGLFAKSREGRHELSRIPRVVAVLVGVAGSGNARAIEQALVVLNLICGESNQLAREAIKLGAFHLCEALVNDDNCKIAKNAVELARTLEKL

SEQ ID NO: 146300 - protein, 99 aa, Oryza sativa
  Clone ID: PAT_MRT4530_46937C.1.pep
VILKKTSAGQRETGGGLPDLTGGGGGGHGRSLQPQAARRPLRARAPSRRLAPLSPGAPGGGPSRPRPPARPPPSAALAGGPVDAPAPRAGAAPSTCSRA

SEQ ID NO: 146301 - protein, 137 aa, Oryza sativa
  Clone ID: PAT_MRT4530_46938C.1.pep
GIWMTLKLQRFQMCPTRSLNRIQRPRSGYQELLDSTDTSLGSNQEHRYHPFFWRQTLCGRESLQTEGFECKGILKSHGLEKTMSSGHDHLKSLLRVEATYHFGCMYGDPSALHWRPISTCRLSMACRLGQILNCSVF

SEQ ID NO: 146302 - protein, 834 aa, Oryza sativa
  unsure (1)..(834): unsure at all Xaa locations
  Clone ID: PAT_MRT4530_46939C.1.pep
MSGRSSQLDPSAGAADVATAGSKGEAWGGGGGAPGLEWYIPGLEIELCSRGGCSEWLGLYNRMPRYKPEYLFGVEGFVQELRTMSFVIGFGTAPFYAQIPHDRHEEKCRVKVTLNSNSEEVPSVMFEAGGRNYIHACQEVARIAIGELRDRYRKDRGSYLETEGIENDVTTKHLVEMLWAMDESRAETVLAAQDREDRNRGKICKLEDKVDRLEKELAALKGEAPPQKARIRLTARKRALFVPRYQLAPKMVNTRSNGNGPNNPNNNNNGENPTLAQVLAQQTQLMNMMMQQFQNQQNQGNNQALSLQRSPSVRIEIQGVPFLANLILLKSKDLDVILGMDWLARHKGVIDCANRKVTLNSYDGRVVTVHALSSESLRSRLNQITLEEIPIVREYPDVFPDDLPGMPPKRDIEFRIDLVPGTTPIHKRPYRMAANELAEVKRQVDDLLQKGYIRPSSSPWGAPVIFVEKKDHTQRMCVDYRALNDVTIKNKYPLPRIDDLFDQLKGATVFSKIDLRSGYHQLRIKEEDIPKTAFTTRYGLFECTVMSFGLTNAPAFFMNLMNKVFMEYLDKFVVVFIDDILIYSRTKEEHEEHLRLALEKLREHQLYAKFSKCEFWLSEVKFXGHVISAGGVAVDPXDVKYKWSEECEQSFQELKSRLISAPILILPDPKKGFQVYCDASKLGLGCVLMQDGKVVAYASRQLRPHEKNYPTHDIELAAVVHALKIWRHYLFGTRTEVYTDHKSLKYIFTQPDLNMRQRRWLELIKDYDMGIHYHPGKANVVADALSRKGYCNATEGRQLPLELCKEFERLNLGIVGRGFVAVGDMGPGVLRPEA

SEQ ID NO: 146303 - protein, 44 aa, Oryza sativa
  Clone ID: PAT_MRT4530_4693C.1.pep
KQYTIYLYEMNLSMLLGSTISYPTLNGTFLNGFTRQRFEFNFNH

SEQ ID NO: 146304 - protein, 1745 aa, Oryza sativa
  unsure (1)..(1745): unsure at all Xaa locations
  Clone ID: PAT_MRT4530_46940C.1.pep
RKSAQNLLSLSPGPIPTFPESPFSQEKNLKSSKASKATPGLEWYIPGLEIELYSRDGCSEWLGLYNRMPCYKPEYLFGVEGFVQELRTMSFAIGFGTTPFYAQIPHDRHEEKCRVKVTLNSNSEDIPSVMFEAGGRNYIHACQEVARIAIGELRDRYSDQLADTEYLYHPRXPQGSDRGSYLETEGIENDATTKHLVEMLWAMDETRAETVLAAQDREDRNHGKICKLXDKVDRLEKELAALKGEAPPQKARIRLTARKRALFVPRYQLAPKMVLTRSNGNGPNNNNNNNNGENPTLAQVLAQQVQLMNIMMQQLQNQQNQGNNHAPPQNKLAEFLHVRPPTFSSTTNPVEAGDWLHAIEKKLDLLQCTDQEKVSFASHQLHGLASEWWDHFRLNRTTTEPITWLEFTAAFRKTHIPSGVVSLKKKEFRSLTQGSRSVTEYLHEFNRLARYAPEDVRTDEERHERFLEGLNDELSYPLMTGDYHDFQKLVDKAIRQEGKYNRMEQKKRRIAQFKAQQGNSQRPRLTLGPQSMRQGGSSSVVRPQRQFFNNNAGNNIRNQAPRPVAASTQQQPAKKEQGSKPVVCFNCGDPGHYADKCPKPRRVKVVPAQSNSTVPASKARVNHVAAAEAQGAPDVILGTFLVNLVPATVLFDSGATHSFLSMSFAGNHGMEVEDLRRPLMVSTPSNQALSLQRSPSVRIEIQGVPFLANLILLESKDLDVILGMDWLARYKGVIDCANRKVTITSNDGRVVTVHALSSEPLRSRLNQITLEEIPIVREYPDVFPDDLPGMPPKRDIEFRIDLVPGTTPIHKRPYRMAANELAEVKRQVDDLLQKGYIRPSSSPWGAPVIFVEKKDHTQRMCVDYRALNDVTIKNKYPLPRIDDLFDQLKGAIVFSKIDLRSGYHQLRIKEEDIPKTAFTTRYGLFECTVMSFGLTNAPAFFINLMNKVFMEYLDKFVVVFIDDILIYSRTKEEHEEHLRLALEKLREHQLYAKFSKCEFWLSEVKFLGHVISAGGVAVDPSNVESITNWNQPKTVSKIRSFLGLQEYNXRFIENFSKIAKPMTRLLQKDVKYKWSEXCKQSFQELKNRLISAPILILPDPKKGFQVYCDASQLGLGCVLMQDGKVVAYASRQLRPHEKNYPTHDLELAAVIHALKIWRHYLFGTCIEVYTDHKSLKYIFTQPDLNMRQRRWLELIKDYDMGIQYHPGKANVVADALSRKGYCNATEGRQLPLELCKEFERLNLGIVRRGFVAALEAKPTLIDQVREAQINDPDIQEIKKNMRRGKAIGFLEDEQGTVWLGERICVPDNKDLKDAILKEAHDTLYSIHPGSTKMYQDLEERFWWASMKREIAEYVAVCDVCQRVKAEHQKPAGLLQPLKIPEWKWEEIGMDFITGLPRTSSGHDSIWVVVDRLTKVAHFIPVKTTYSGSWLAELYMARIVCLHGVPKKIVSDRGSQFTSNFWKKLQEEMGSKLNFSTAYHPXTDGQTERVNQILEDMLRACALDFGGSWDRNLPYAEFSYNNSYQASLQMAPYEALYGRKCRTPLLWDQTGERQVFGTDILREAEEKVKIIQERLRVAQSRHKSYADNRRRDLSFDEGDYVYLRVTPLRGVHRFHTKGKLVPHFVGPYKIVNRRGEVAYQLELPQSLAGVHNVFHVSQLKKCLRVPTEEANLEQIEVQEDLTYVQKPIRILEIEERRTRNRVIRFYKVQWSNHSEEESTWEREDELKSAHPHLFASSSESRGRDSV

SEQ ID NO: 146305 - protein, 428 aa, Oryza sativa
  unsure (1)..(428): unsure at all Xaa locations
  Clone ID: PAT_MRT4530_46941C.1.pep
MXRACALDFSGSWDKNLPYADFLYNNRDQASLQMAPYEALLGRKCPTAVLWDQTGERQVFGTDILREAEEKVKIIQERLRVAQSRHKSYAXDNRRRDLSFEEGDYVYLRVTPFRGVHSFXHPKKKLAPRFXVGPYKIVSKRGEVAYQLELPQSLXGIHNVXHVSQLKKCLRVPTKEANIEQIEVQEDLTYVEKPIRILETSERRTRNRVIRFCKVPWSNHSEEESTWEREDELNDGFEFESDRXFPLSKPRVSFAVAVAVGLRRRLRAPLKGPPVSPLPVAALAFASRRRKSSSAPCSAVAPAVAVAREDRRRHRQVAAVLVRPFAAVGTRRSFVAVDNPKVAAASFSSPSPSVASPPSFWSSRRRSPVSVRRPSRLPRRAAAAVGDVIAGVIKAVRREPPWTRSISAKPYADLSFISFFFAQLPVSR

SEQ ID NO: 146306 - protein, 317 aa, Oryza sativa
  Clone ID: PAT_MRT4530_46942C.1.pep
MAHKEPDAPGVSGISSGSTVKLKDLAPAATNNVNTTFIVLDKAARAPPPPPHGRADAREETCLALVADETAAAHFLLWGAERDAFEPGDIVRLTGGIFSYHRSNSLVLRAGRRGRAEKVGEFTMLFVETPNMSEVKWVRDPGDPRRMVQEAVVMAHKEPDVPVVSGINSGSTVKLKDLAPAATNNVNTTFIVLDKAARAPPPPPHGRADAREETCLALVADETAAAHFLLWGAERDAFEPGDIVRLTGGIFSYHRSNSLVLRAGRRGRAEKVGEFTMLFVETPNMSEVKWVRDPGDPRRMVQEAVVSPHSQVFKPLQ

SEQ ID NO: 146307 - protein, 1200 aa, Oryza sativa
  unsure (1)..(1200): unsure at all Xaa locations
  Clone ID: PAT_MRT4530_46943C.1.pep
SVPRRSRPFRRAAAAAVTSSLTSSGSSAVSRSWTRSISAVHLGSIPSFPESPFSPEKSLKSSKASKATPGLEWYIPGLEIELCSRDGCSEWLGLCNRMPRYKPEYLFGVEGFVQELRTMSFVIGFGTAPFYAQIPHDRHEERCRVKVTLNSNSEDILSVMFEAGGRNYIHACQEVARIAIGELRDRYSDQLADTEYRYHPRQPQGSDRGSYLETEGIENDATTRHLVEMLWAMDESHAETVLAAQDREDWNRGKICKLEDKVDRLEKELAALKGEAPPQKARIRLTARKRALFVPRYQLAPKMVNTRSNGNGPNLNNPNNNNNNEGNPTLAQVLAQQTQLMHMMMQQLQNQQNQGNNHAPPQNKLAEFLRVRPPIFSSTTNPVEAGDWLHAIEKKLDLLQCTDQEKVSFASHQLLGPASEWWDHFRLNRTTAEPITWLELTAAFRKTHIPSGVVSLKKKEFRSLTQGSRSVTEYLHEFNRLARYAPEDVRNDEERQEKFLEGLNDELSYPLMTGDYSNFQKLVDKAIRQEDKYNRMEQKKRRIAQFKIQQGNNQKPRLTFVPQSMPHGGSSSVVRPQRQFFNNNAGNNIRNQAPRPVAAPTQQPPAKREQGSKPVVCFNYGDPGHYADKCPKPRRVKVVPAXSNSTIPASKARVNHVAAAEAQDAPDVILGTFPVNSVHATVLFDSGATHSFLSMSFAGNHGMEVEDLRRPLMVSTPSNQALSLQRSPSVRIEIKGVPFLANLILLESKDLDVILGMDWLTRHKGVIDCANRKVTLTSSDGRVVTVHALSSESLRSRLNQITLEEIPIVREYPDVFPDDLPGMPPKRDIEFRIDLVPGTTPIHKRPYRMAANELAEVKRQVDDLLQKGYIRPSSSPWGAPVIFVEKKDHTQRMCVDYRALNDVTIKNKYPLPRIDDLFDQLKGATVFSKIDLRSGYHQLRIKEEDIPKTAFTTRYGLFECTVMSFGLTNAPAFFMNLMNKVFMEYLDKFVVVFIDDILIYSRTREEHEEHLRLALEKLREHQLYAKFSKCEFWLSEVKFLGHVISAGGVAVDPSNVESVTNCKQLKTVSEIRSFLGLAGYYRRFIENFSKITKPMTRLLQKDVKYKWSEECEQSFQELKNRLISAPILILPDPKKGFQVYCDASKLGLGCVLMQDGKVVTYASRQLRPHEKNYPTHDIELAAVVHALKIWRHYYLDTRSV

SEQ ID NO: 146308 - protein, 105 aa, Oryza sativa
  Clone ID: PAT_MRT4530_46944C.1.pep
CSQKPTGHHYRVDNIFQQPSVQFDSEPLIQNGNIKSQRKSIGQVCHFLFHTLRAVSLSFRRHPCPATYFVSVIIASVMPIAKEGLSDPPVQSSSMVIYLLRMYKR

SEQ ID NO: 146309 - protein, 1528 aa, Oryza sativa
  Clone ID: PAT_MRT4530_46945C.1.pep
MDEVGRRWTFSRANEGYTSCGPGSDRGSYLETEGIENDATTRYLVEMLWAMDESRAESVLAAQDREDRNRGKICKLEDKVDRLEKELAALKGEAPPQKARIRLTARKRALFVPRYQLAPKMVNTRSNGNGPNNPNNNNNGENPTLAQVLAQQTQLMNMMMQQFQNQQNQGNNHAPPQNKLAEFLRVRPPVFSSTTNPVEAGDWLHAIEKKLDLLQCTDQEKVSFASYQLHGPASEWWDHFRLNRTTAEPITWLEFTAAFRKTHIPSGVVSLKKKEFRSLTQGSRSVTEYLHEFNRLARYAPEDVRTDEERQEKFLEGLNDELSYPLMTGDYSDFQKLVDKAIRQEDKYNRMEQKKRRIAHFKAQQGSNQKPRLALGPQPMPQGGSSSVVRPQRQFFNNNAGNNIRNQAPRPVAAPAQQQPAKREQGSKPVVCFNCGDPGHYADKCPKPRRVKVVPAQSNSTVPASKARVNHVAAAEAQDAPDMILGTFPVNSVPATVLFDSGATHSFLSMSFAGNHGMEVEDLRRPLMVSTPGNQALSLQRSPSVRIEIKGVPFLANLILLESKDLDVILGMDWLARHKGVIDCANRKVTLTSNDGRVVTVNALSSESLRSRLNQITLEEIPIVREYSDVFPDDLPGMPPKRDIEFRIDLVPGTTPIHKRPYRMAANELAEVKRQVDDLLQKGYIRPSSSLWGAPVIFWEKKDHTQRMCVDYRALNDVTIKNKYPLPRIDDLFDQLKGATVFSKIDLRSGYHQLRIKEEDIPKTAFTTRYGLFECTVMSFGLTNAPAFFMNLMNKVFMEYLDKFVVVFIDDILIYSRTKEEHEEHLRLALEKLREHQLYAKFSKCEFWLSEVKFLGHVISAGGVAVDPSNVESVTNWKQPKTVSEIRSFLGLAGYYRRFIENFSKIAKPMTRLLQKDVKYKWSEECEQSFQELKSRLISAPILILPDPKKGFQVYCDASKLGLGCVLMQDGKVVAYASRQLRPHEKNYPTHDLELAAVVHALKIWRHYLFGTRTEVYTDHKSLKYIFTQPDLNMRQRRWLELSKDYDMGIHYHPGKANVVADALSRKGYCNATEGRQLPLELCKEFERLNLGIVSRGFVAALEAKPTLIDQVREAQINDPDIQEIKKNMRRGKAIGFLEDEHGTRVKAEHQKPAGLLQPLKIPEWKWEEIGMDFITGLPRTSSGHDSIWVIVDRLTKVAHFIPVKTTYSGSRLAKLYMARIVCLHGVPKKIVSDRGSQFTSNFWKKLQEEMGSKLNFSTAYHPQTDGQTERVNQILEDMLRACALDFGGSWDKNLPYAEFSYNNSYQASLQMAPYEALYGRKCRTPLLWDQTGERQVFGTDILREAEEKVKIIQERLRVAQSRHKSYADNRRRDLSFEEGDYVYLRVTPLRGVHRFHTKGKLAPRFVGPYKIVSRRGEVAYQLELPQSLAGVHNVFHVSQLKKCLRVPTEEANLEQIEVQEDLTYVEKPIRILETNERKTRNRVIRFCKVQWSNHSEEESTWEREDELKSAHPHLFASSSESRGRDSV

SEQ ID NO: 146310 - protein, 130 aa, Oryza sativa
  unsure (1)..(130): unsure at all Xaa locations
  Clone ID: PAT_MRT4530_46946C.1.pep
RGPWWHRVLQREAVLPQLELRLAASAVEGPSPHGPRGHLRVGKPPRPRAASSPPRPRANPPTPQGFGRRGCPPRRXATAPSPPRPRATPLLSTLRPXRGSPPPPPRATPPAARGYVASPPRRDTPNPSTR

SEQ ID NO: 146311 - protein, 1732 aa, Oryza sativa
  unsure (1)..(1732): unsure at all Xaa locations
  Clone ID: PAT_MRT4530_46947C.1.pep
PFSLSSAQIPSFPESPFSPEKSLKSSKASKATPGLEWYIPGLEIELCSRDGCLEWLGLYNRMPRYKPEYLFGVEGFVQELRTMSFVIGFGTAPFYAQIPHDRHEEKCRVKVTLNSNSEDIPSVMFEAVGRNYIHACQEVARIAIGEXYSDQLADTEYRYHPRQPQGSDRGXYLETEGIENDATTRHLVEMLWAMDESRAETVLAAQDREDRNRGKICKLEDKVDCLEKELAALKGEAPPQKARIRLTARKRALFVPRYQLAPKMVNTRSNGNGPNNPNNNNNGENPTLAQVLAQQTQLMNMMMQQLQNQQNQGNNHAPPQNKLAEFLRVRPPIFSSTTNLVEAGDWLHAIEKKLDLLQCTDQEKVSFASHQLHGPASEWWDHFRLNRTTAEPITWLEFTAAFRKTHIPSGVVSLKKKEFRSLTQGSRSVTEYLHEFNRLARYAPEDVRNDEERQEKFLEGLNDELSYPLMTGDYSDFQKLVDKAIRQEDKYNRMEQKKRRIAQFKTQQGNNQKPRLTLGPQSVPQGGSSSVVRPQRQFFNNNAGNNIRNQAPRPVAAPTQQQPAKREQGSKPVVCFNCGDPGHYADKCPKPRRVKVVPAQSNSTVPASKARVNHVAAAEAQDAPDVILGTFLVNSVPATVLFDSGATHSFLSMSFVGNHGMEVEDLRRPLMVSTPSNQALSLQRSPSVRIEIQGIPFLANLILLESKDLDVILGMDWLARHKGVIDCANRKVTLTSNDGQVVTVHALSSEFLRSRLNQITLEEIPIVREYPDVFPDDLPGMPPKRDIEFRIDLVPGTTLIHKRPYRMAANELAEVKRQVDDLLQKGYIRPSSSPWGAPVIFVEKKDHTQRMCVDYRALNDVTIKNKYPLPRIDDLFDQLKGATIFSKIDLRSGYHQLRIKEEDIPKTAFTTRYGLFECTVMSFGLTNAPAFFMNLMNKVFMEYLDKFVVVFIDDILIYSRTKEEHEEHLRLALEKLREHQLYAKFSKCEFWLSEVKFLGHVISAGGVAVDPSNVESITNWKQPKTVSEIRSFLGLAGYYRRFIENFSKIAKPMTRLLQKDVKYKWSEECEQSFQELKNRLISAPILILPDPKKGFQVYCDASKLGLGCVLMQDGKVVAYASRQLRPHEKNYPTHDLELAAVVHALKIWRHYLFGTRTEVYTDHKSLKYIFTQPDLNMRQRRWLELIKDYDMRIHYHPGKANVVADALSRKGNCNATEGRQLPLELCKEFERLNLGIVSRGFVTALEAKPTLIDQVRKAQINDPDIQEIKKNMRRGKAIGFLEDEHGTVWLGEKICVPDNKDLKDAILKEAHDTLYSIHPGSTKMYQDLKERFWWASMKREIAEYVAVCDVCQRVKAEHQKPAGLLQPLKIPEWKWEEIGMDFITGLPRTSSGHDSIWVIVDRLTKVAHFIPVKTTYSGSRLAELYMARIVCLHGVPKKIVSDRGSQFTSNFWKKLQEEMGSKLNFSTAYHPQTDGQTERVNQILKDMLRACALDFGGSWDKNLPYAEFSYNNSYQASLQMAPYEALYGRKCRTPLLWDQTGECQVFGTDILREAEEKVKIIQERLRVAQSRHKSYADNRRRDLSFEEGDYVYLRVTPLRGVHRFHTKGKLAPRFVGPYKIVSRRGEVAYQLELPQSLAGVHNVFHVSQLKKCLRVPTEEANLEQIEVQEDLTYVEKPIRILEIDERRTRNRVIRFCKVQWSNHSEEESTWEREDELKSAHPHLFASSSESRG

SEQ ID NO: 146312 - protein, 1709 aa, Oryza sativa
  unsure (1)..(1709): unsure at all Xaa locations
  Clone ID: PAT_MRT4530_46948C.1.pep
PGLEWYIPGLEIELCSRDGCSEWLGLCNRMPRYKPEYLFGVEGFVQELRTMSFVIGFGTAPFYAQIPHDRHEEKCRVKVTLNSNSEDIPSVMFEAGGRNYIHACQEVARIAIGELRDRYSDQLADTEYRYHPRQPQGSDRGSYLETEGIENDATTRHLVEMLWAMDESRAETVLAAQDREDWNRGKICKLEDKVDRLEKELAALKGEAPPQKARIRLTARKRALFVPRYQLAPKMVNTRSNGNGPNNNNNNNNNNEGNPTLAQVLAQQTQLMNMMMQQLQNQQNQGNNHAPPQNKLAEFLRVRPPIFSSTTNPVEAGDWLHAIEKKLDLLQCTDQEKVSFASHQLHGPASEWWDHFRLNRTTAEPITWLEFTAAFRKTHIPSGVVSLKKKEFRSLTQGSRSVTEYLHEFNRLARYAPEDVRNDEERQEKFLEGLNDELSYPLMTGDYSDFQKLVDKAIRQEDKYNRMEQKKRRIAQFKTQQGNNQKPRLTLGPQSVPQGGSSSVVRPQRQFFNNNAGNNIRNQAPRPVAAPTQQQPAKREQGNKPVVCFNCGDPGHYADKCPKPRRVKVVPVQSSSTALALKARVNHVAAAEAQDAPDVILGTFPVNLVPATVLFDSGATHSFLSMSFAGNHGMEVEDLRRPLMVSTPSNQALSLQRSPSVRIEIQGVPFLANLILLESKDLDVILGMDWLARHKGVIDCANRKVTLTSNDGRVVTVHVLSSESLRSRLNQITLEEIPIVREYPDVFPDDLPGMPPKRDIEFRIDLVPGTTPIHKRPYRMAANELAEVKRQVDDLLQKGYIRPSSSPWGAPVIFVEKKDHTQRMCVDYRALNDVTIKNKYPLPRIDDLFDQLKGATVFSKIDLRSGYHQLRIKEEDIPKTAFTTRYGLFECTVMSFGLTNAPAFFMNLMNKVFMEYLDKFVVVFIDDILIYSRTKEEHEEHLRLALEKLREHQLYAKFSKCEFWLSEVKFLGHVISAGGVAVXPSNVESVTNWKQPKTVSEIRSFLGLAGYYRRFIENFSKIAKPMTRLLQKDVKYKWSEXCEQSFQELKNRLISAPILILPDPKKGFQEYCDASKLGLGCVLMQDGKVVAYASRQLRPHEKNYPTHDLELAAVVHALKIWRHYLFGTRTEVYTDHKSLKYIFTQPDLNMRQRRWLELIKDYDMGIHYHPGKANVVADALSRKGYCNATEGRQLPLELCKEFERLNLGIVSRGFVAALEAKPTLIDQVREAQINDPDIQEIKKNMRRGKAIGFMEDEQGTVWLGERICVPDNKDLKDAILKEAHDTLYSIHPGSTKMYQDLKERFWWASMKREIAEYVAVCDVCQRVKAEHQKPAGLLQPLKIPEWKWEEIGMDFITGLPRTSSGHDSIWVIVDRLTKVAHFIPVKTTYSGSRLAELYMARIVCLHGVPKKIVSDRGSQFTSNFWKKLQEEMGSKLNFSTAYHPQTDGQTERVNQILEDMLRACALDFGGSWDKNLPYAEFPYNNSYQASLQMAPYEALYGRKCRTPLLWDQTGERQVFGTDILREAEEKVKIIQERLRVAQSRHKSYADNRRRDLSFEEGDYVYLRVTPLRGVHRFHTKGKLAPRFVGPYKIVSRRGEVAYQLELPQSLAGVHNVFHVSQLKKCLRVPTEEANLEQIEVQEDLTYVEKPIRILEIDERRTRNRVIRFCKVQWSNHSEEESTWEREDELKSAHPHLFASSSESRGRDSV

SEQ ID NO: 146313 - protein, 58 aa, Oryza sativa
  Clone ID: PAT_MRT4530_46949C.1.pep
INLRCACTRTQVSTQENKLRRFLIMPAVFYFIVFEVLLLVSFASWGLESFPSFFLAYV

SEQ ID NO: 146314 - protein, 151 aa, Oryza sativa
  Clone ID: PAT_MRT4530_4694C.1.pep
MMVKSALRNWLITSVHFFPLLIVGMAESSMPVMSMNTLVEKPSLVGRPDFTIVPIVLKTGTFHAPPWLTCFCVHGAMQMAVTAALNGLGLALQIPTIYTFVADSFDGTSRGVVFGLLMVAGMVGTIEAEWRNAASLARALYIGIAVPWVMD

SEQ ID NO: 146315 - protein, 1283 aa, Oryza sativa
  Clone ID: PAT_MRT4530_46950C.1.pep
PGLEWYIPGLEIELCSRDGCSERLGLCNRMPRYKPEYLFGVEGFVQELCTMSFAIGFGTAPFYAQIPHDRHEEKCRVKVTLNSNSDEIPSVMFEAGGRNYIHACQEVARIAIGELRDRYCDQLADTEYRYHPRQPQGSDRGSYLETEGIENDATTRHLVEMLWAMDETRAETVLAAQDREDRNRGKICKLEDKVDRLEKELAALKGEAPPQKARVRLTARKRALFVPRYQLAPKMVLTRSNGNGPNNNNNNNNNNGENPTLAQVLAQQTQLMNIMMQQLQNQQNQGNNHAPPQNKLAEFLRVRPPTFSSTTNPVEAGDWLHAIEKKLDLLQCTDQEKVSFASHQLHGPASEWWDHFRLNRTTTEPITWLEFTAAFRKTHIPSGVVSLKKKEFRSLTQGSRSVTEYLHEFNRLARYAPEDVRTDEERQEKFLEGLNDELSYPLMTGDYPDFQKLVDKAIRQEDKYNRMEQKKRQIAQFMAQQGNSQRPRLTLGPQSMPQGGSSSVVRPQRQFFNNNAGNNLRNQAPRPVAAPTQQQPAKREQGSKPVVCFNCGDPGHYADKCPKPRRVKVVPAQSNSTAPASKARVNHVAAAEAQDAPDVILGTFLVNLVPATVLFDSGATHSFLSMSFAGNHGMEVEDLRRPLMVSTPSNQALSLQRSPSVRIEIQGVPFLANLILLESKDLDVILGMDWLARYKGVIDCANRKVTLTSNDGRVVTVHALSSESLRSRLNQITLEEILVVREYPDVFPDDLRGMPPKRDIEFRIDLVPGTIPIHKRPYRMAANELAKVKRQVDERTTVAIGVIRGFVAALEAKLTLIDQVREAQINDPDILEIKKNMRRGKAIGFLEDEQGTVWLGERICVPDNKDLKDAILKEAHDTLYSIHPGSTKMYQDLKERFWWRVKEEHQKPAGLLQSLKIPEWKWEEIGMDFITGLPRTSSGHDSIWVIVDRLTNVAHFIPVKTTYSGSRLAELYMARIVCLHGVPKKIVSDRGSQFTSNFWKKLQEEMGSKLNFSTAYHPQTDGQTERVNQILEDMLRACTLDFGGSWDKNLPYAEFSYNNSYQASLQMAPYEALYIRKCRTPLLWDQTGERQVFGTDILREVEEKVKIIQERLRVAQSRHKSYADNRRRDLSFEEGDYVYLRVTPLRGVHRFHTKGKLAPRFVGPYKIVSRRGEVAYQLELPQSLAGVHNVFHVSQLKKCLRVPIEEANLEQIEVQEDLTYVERPIRILEIDERRTRNRVIRFCKVQWSNHSEEESTWEREDELKSAHPHLFASSSESRGRDSV

SEQ ID NO: 146316 - protein, 2209 aa, Oryza sativa
  Clone ID: PAT_MRT4530_46951C.1.pep
MTRLLQKDVKYKWSEECEQSFQELKSRLISAPILILPDPKKGFQVYCDASKLGLGCVLMQDGKVVAYASRQLRPHEKNYPTHDIELAAVVHALKIWRHYLFGTRTEVYTDHKSLKYIFTQPDLNMRQRRWLELIKDYDMGIHYHPGKANVVADALSRKGYCNATEGRQLPLELCKEFERLNLGIVGRGFVAALEAKPTLIDQVREAQINDPDIQEIKKNMRRGKAIGFLEDEHGTRVKAEHQKPAGLLQPLKIPEWKWEEIGMDFITGLPRTSSGHDSIWVIVDRLTKVAHFIPVKTTYSGSRLAELYMARIVCLHGVPKKIVSDRGSQFTSNFWKKLQEEMGSKLNFSTAYHPQTDGQTERVNQILEDMLRACALDFGGSWDKNLPYAEFSYNNSYQASLQMAPYEALYGRKCRTPLLWDQTGERQVFRTDILREAEEKVKIIQERLRVAQSRHKSYADNRRRDLSFEEGDYVYLRVTPLRGVHRFHTKGKLAPRFVGPYKIVSRRGEVAYQLELPQSLAGVHNVFHVSQLKKCLRVPTEQANLDQIEVQEDLTYVEKPIRILETTPGLEWYIPGLEIELCSRGGCSEWLGLYNRMPRYKPEYLFGVEGFVQELRTMSFVIGFGTAPFYAQIPHDSHEEKCRVKVTLNSNSEDIPSVMFEAGGRNYIHACQEVARIAIGELRDRYSDQLADTEYRYHPRQPQGSDRGSYLETEGIENDVTTKHLVEMLWAMDESRAETVLAAQDREDRNRGKICKLEDKVDRLEKELAALKGEAPPQKARIRLTARKRALFVPRYQLAPKMVNTRSNGNGPNNPNNNNNGENPTLAQVLAQQTQLMNMMMQQFQNQQNQGNNHAPPQNKLAEFLRVRPPVFSSTTNPVEASDWLHAIEKKLDLLQCTDQEKVSFASHQLHGPASEWWDHFRLNRTTAEPITWLEFTAAFRKTHIPSGVVSLKKKEFRSLSQGSRSVTEYLHEFNRLARYAPEDVRNDEERQEKFLGGLNDELSYPLMVGDYPDFQKLVDKAIRQEDKYNCMEQRKRRIAHFKAQQGSNQKPRLTLGPQSMPQGGSSSVVRPQRQFFNNNVGNNIRNQAPRPVAAPAQQQPAKREQGNKPVVCFNCGDPGHYADKCPKPRRVKVVPAQNNSAVSASKARVNHVAAAEAQDAPDVILGTFLVNSVPATVLFDSGATHSFLSMSFAGNHGMEVEDLRRPLMVSTPSNQALSLQRSPSVRIEIQGVPFLANLILLESKDLDVILGMDWLARHKGVIDCANRKVTLNSYDGRVVTVHALSSESLRSRLNQITLEEIPIVREYPDVFPDDLPGMPPKRDIEFRIDLVPGTTPIHKRPYRMAANELAEVKRQVDDLLQKGYIRPSSSPWGAPVIFVEKKDHTQRMCVDYRALNDVTIKNKYPLPRIDDLFDQLKGATVFSKIDLRSGYHQLRIKEEDIPKTAFTTRYGLFECTVMSFGLTNAPAFFMNLMNKVFMEYLDKFVVVFIDDILIYSRTKEEHEEHLRLALEKLREHQLYAKFSKCEFWLSEVKFLGHVISAGGVAVDPSNVESVTNWKQPKTVSEIRSFLGLAGYYRRFIENFSKIAKPMTRLLQKDVKYKWSEECEQSFQELKSRLISAPILILPDPKKGFQVYCDASKLGLGCVLMQDGKVVAYASRQLRPHEKNYPTHDIELAAVVHALKIWRHYLFGTRTEVYTDHKSLKYIFTQPDLNMRQRRWLELIKDYDMGIHYHPGKANVVADALSRKGYCNATEGRQLPLELCKEFERLNLGIVGRGFVAALEAKPTLIDQVREAQINDPDIQEIKKNMRRGKAIGFLEDEHGTRVKAEHQKPAGLLQPLKIPEWKWEEIGMDFITGLPRTSSGHDSIWVIVDRLTKVAHFIPVKTTYSGSRLAELYMARIVCLHGVPKKIVSDRGSQFTSNFWKKLQEEMGSKLNFSTAYHPQTDGQTERVNQILEDMLRACALDFGGSWDKNLPYAEFSYNNSYQASLQMAPYEALYGRKCRTPLLWDQTGERQVFRTDILREAEEKVKIIQERLRVAQSRHKSYADNRRRDLSFEEGDYVYLRVTPLRGVHRFHTKGKLAPRFVGPYKIVSRRGEVAYQLELPQSLAGVHNVFHVSQLKKCLRVPTEQANLDQIEVQEDLTYVEKPIRILETSERRTRNRVIRFCKVQWSNHSEEESTWEREDELKSAHPHLFASSSESRGRDSV

SEQ ID NO: 146317 - protein, 88 aa, Oryza sativa
  Clone ID: PAT_MRT4530_46952C.1.pep
STNPLVGCRLAHSSSAVAGLRFIPHRQLWFQKWTTAAGACFGTARPEQQGGPTFLTFHNRSSARWRLSLPASLALLEANNCVMGCDLS

SEQ ID NO: 146318 - protein, 3783 aa, Oryza sativa
  Clone ID: PAT_MRT4530_46953C.1.pep
MVNTRTGTGSGSGSGSGSGATNNGGDPTLAQILAQQTQLINLLVQQAQNQQANNQNQNPPPPPQNKLADFLRVRPPTFSSTTNPVEAGDWLHAVEKKLDLIQCTEQEKVSFASHQLHGPAAEWWDHFRQGRAEGELITWQEFTTAFKKTHIPSGVVALKKREFRALNQGSRSVTEYLHDVNRLARYAPEDVRTDEERQEKFLEGLNDELSYALMSTDFRDFQQLVDKAIRQEDKYNRMEQKKRRAAQFKAQQGSNQRPRLVTGPQAPSYPQGGSSSVVRPQRQFYNNNTGNRGNDNRNMVARPAATPAQNQPVRKEQGSKPVICFNCGDPGHYADKCPKPRHVKNAPAPNNSNVLAPKARVNHVAAAEAQNAPDVVLEIEEVLFPSSLILLESKDLDVILGMDWLSRHRGVIDCANRKVTLTSSNWETVSFFVSSPKYHGVNLNQVALQEIPIVQDYPDVFPEDLPAPGLEWYIPGLEIELCSRGGCSEWLGLYNRMPRYKPEYLFGVEGFVQELRTMSFVIGFGTAPFYAQIPHDRHEEKCRVRVTLNSNSEEVPSVMFEAGGRNYIHACQEVARIAIGELRDRYSDQLADTEYRYHPRQPQGSDRGSYLETEGIENDVTTKHLVEMLWAMDESRAETVLAAQDREDRNRGKICKLEDKVDRLEKELAALKGEAPPQKARIRLTARKRALFVPRYQLAPKMVNTRSNGNGPNNPNNNNNGENPTLAQVLAQQTQLMNMMMQQFQNQQNQGNNHAPPQNKLAEFLRVRPPVFSSTTNPVEASDWLHAIEKKLDLLQCTDQEKVSFASHQLHGPASEWWDHFRLNRTTAEPITWLEFTAAFRKTHIPSGVVSLKKKEFRSLSQGSRSVTEYLHEFNRLARYAPEDVRNDEERQEKFLGGLNDELSYPLMVGDYPDFQKLVDKAIRQEDKYNRMEQKKRRIAQFKTQQGNNQKPRLTLGPQPMPQGGSSSVVRPQRQFFNNNAGNNIRNQAPRPVAAPAQQQPAKREQGNKPVVCFNCGDPGHYADKCPKPRRVKVVPAQNNSAVPASKARVNHVAAAEAQDAPDVILGTFLVNSVPATVLFDSGATHSFLSTSFAGNHGMEVEDLRRPLMVSTPSNQALSLQRSPSVRIEIQGVPFLANLILLKSKDLDVILGMDWLARHKGVIDCANRKVTLNSYDGRVVTVHALSSESLRSRLNQITLEEIPIVREYPDVFPDDLPGMPPKRDIEFRIDLVPGTTPIHKRPYRMAANELAEVKRQVDDLLQKGYIRPSSSPWGAPVIFVEKKDHTQRMCVDYRALNDVTIKNKYPLPRIDDLFDQLKGATVFSKIDLRSGYHQLRIKEEDIPKTTFTTRYGLFECTVMSFGLTNAPAFFMNLMNKVFMEYLDKFVVVFIDDILIYSRTKEEHEEHLRLALEKLREHQLYAKFSKCEFWLSEVKFLGHVISAGGVAVDPSNVESVTNWKQPKTVSEIRSFLGLAGYYRRFIENFSKIAKPMTRLLQKDVKYKWSEECEQSFQELKSRLISAPILILPDPKKGFQVYCDASKLGLGCVLMQDGKVVAYASRQLRPHEKNYPTHDIELAAVVHALKIWRHYLFGTRTEVYTDHKSLKYIFTQPDLNMRQRRWLELIKDYDMGIHYHPGKANVVADALSRKGYCNATEGRQLPLELCKEFERLNLGIVGRGFVAALEAKPTLIDQVREAQNNDPDIQEIKKNMRRGKAIGFLEDEHGTVWLGERICVPDNKDLKDAILKEAHDTLYSIHPGSTKMYQDLKERFWWASMKREIAEYVAVCDVCQRVKAEHQKPAGLLQPLKIPEWKWEEIGMDFITGLPRTSSGHDSIWVIVDRLTKVAHFIPTDGQTERVNQILEDMLRACALDFGGSWDKNLPYAEFSYNNSYQASLQMAPYEALYGRKCRTPLLWDQTGERQVFGTDILREAEEKVKIIQERLRVAQSRHKSYADNRRRDLSFEEGDYVYLRVTPLRGVHRFHTKGKLAPRFVGPYKIVSRRGEVAYQLELPQSLAGVHNVFHVSQLKKCLRVPTEEANIEQIEVQEDLTYVEKPIRILETTPGLEWYIPGLEIELCSRGGCSEWLGLYNRMPRYKPEYLFGVEGFVQELRTMSFVIGFGTAPFYTQIPHDRHEEKCRVKVTLNSNSEDIPSVMFEAGGRNYIHACQEVARIAIGELRDRYSDQLADTEYRYHPRQPQGSDRGSYLETEGIENYVTTRHLVEMLWAMDESRAETVLAAQDREDRNHGKICKLEDKVDRLEKELAALKGEAPPQKARIRLTARKRALFVPRYQLAPKMVNTRSNGNGPNNPNNNNGENPTLAQVLAQQTQLMNMMMQQFQNQQNQGNNHAPPQNKLAEFLRVRPPVFSSTTNPVEASDWLHAIEKKLDLLQCTDQEKVSFASHQLHGPASEWWDHFRLNRTTAEPITWLEFTAAFRKTHIPSGVVSLKKKEFRSLTQGSRSVTEYLHEFNRLARYAPEDVRNDEERQEKFLGGLNDELSYPLMVGDYPDFQKLVDKAIRQEDKYNRMEQKKRRIAQFKTQQGNNQKPRLTLGPQSMPQGGSSSVVRPQRQFFNNNAGNNIRNKAPRPVAAPVQQQPAKREQGSKPVVCFNCGDPGHYADKCPKPRRVKVVPAQSNSAVPVSKARVNHVAAAEAQDAPDVILGTFLVNSVPATVLFDSGATHSFLSMSFAGNHGMEVEDLRRPLMVSTPSNQALSLQRSPSVRIEIKGVPFLANLILLESKDLDVILGMDWLARHKGVIDCANRKVTLNSYDGRVVTVHALSSESLRSRLNQITLEEIPIVREYSDVFPDDLPGMPPKRDIEFRIDLVPGTTPIHKRPYRMAANELAEVKRQVDDLLQKGYIRPSSSPWGAPVIFVEKKDHTQRMCVDYRALNDVTIKNKYPLPRIDDLFDQLKGATVFSKIDLRSGYHQLRIKEEDIPKTAFTTRYGLFECTVMSFGLTNAPAFFMNLMNKVFMEYLDKFVVVFIDDILIYSRTKEEHEEHLRLALEKLREHQLYAKFSKCEFWLSEVKFLGHVISAGGVAVDPSNVESVTNWKQPKTVSEIRSFLGLAGYYRRFIENFSKIAKPMTRLLQKDVKYKWSEECEQSFQELKSRLISAPILILPDPKKGFQVYCDASKLGLGCVLMQDGKVVAYASRQLRPHEKNYPTHDIELAAVVHALKIWRHYLFGTRTEVYTDHKSLKYIFTQPDLNMRQRRWLELIKDYDMGIHYHPGKANVVADALSRKGYCNATEGRQLPLELCKEFERLNLGIVGRGFVAALEAKPTLIDQVREAQNNDPDIQEIKKNMRRGKAIGFLEDEHGTVWLGERICVPDNKDLKDAILKEAHDTLYSIHPGSTKMYQDLKERFWWASMKREIAEYVAVCDVCQRVKAEHQKPAGLLQPLKIPEWKWEEIGMDFITGLPRTSSGHDSIWVIVDRLTKVAHFIPVKTTYSGSRLAELYMARIVCLHGVPKKIVSDRGSQFTSNFWKKLQEEMGSKLNFSTAYHPQTDGQTERVNQILEDMLRACALDFGGSWDKNLPYAEFSYNNSYQASLQMAPYEALYGRKCRTPLLWDQTGERQVFGTDILREAEEKVKIIQERLRVAQSRHKSYADNRRRDLSFEEGDYVYLRVTPLRGVHRFHTKGKLAPRFVGPYKIVSRRGEVAYQLELPQSLAGVHNVFHVSQLKKCLRVPTEEANIERIEVQEDLTYVEKPIRILETNERRTRNRVIRFCKVQWSNHSEEESTWEREDELNFGIEFDSDRFSLSPSRRFPSPLPSPWAFAVASEPL

SEQ ID NO: 146319 - protein, 195 aa, Oryza sativa
  Clone ID: PAT_MRT4530_46954C.1.pep
MQWQFPASKVSVHVLQVIVVVGGGEGGGFQGGGGVRPLLPLRVPPTAAPVSPGDAFDGAAAASTMKQRQFGFDGRQQYAAAEQHGHREQGVDSYGVAAPHHFPSPSPRHAVQFSQANPSTLRGSVDERFPVFVLLAVSAVPEADGGRRRVRLPAGSPRRGGRRRQEAHRLPRQTGMIRAIIQCMPRKQNHGKTRL

SEQ ID NO: 146320 - protein, 91 aa, Oryza sativa
  Clone ID: PAT_MRT4530_46955C.1.pep
MLHDLLTWFPFGASSNASQPVTQSVVWFAKQSLSGETTVGTMHSVLSVTVDGQLALTEVDGRMLWRAPVSRLMRGSILVLRDSDSLRPVRR

SEQ ID NO: 146321 - protein, 44 aa, Oryza sativa
  unsure (1)..(44): unsure at all Xaa locations
  Clone ID: PAT_MRT4530_46956C.1.pep
AGNNCSGFGWELGXWGFDNXLSVKXVIKYCLDELYGWYWFLFQL

SEQ ID NO: 146322 - protein, 144 aa, Oryza sativa
  Clone ID: PAT_MRT4530_46957C.1.pep
MGYLRLRAGPAQPDEFDVGLITVDMSINVTYPNLKPHLHELAELIAKELDIDSRQGIIYRLTQHHVQLPENLGSYQLLEWNVQPLSKRSWFRDHVVSILLGILLVVLLTLSALLVLIVWRKKFRGQAAYRPVDSAVPEQELQPL

SEQ ID NO: 146323 - protein, 77 aa, Oryza sativa
  Clone ID: PAT_MRT4530_46958C.1.pep
NLLCPDAKKVKGHQKCFPIFIKNAWFHEQFRKIVHPLMLQCIFYLSKTCKKNLGNLNQSWLSLVYIDIIKIRVVSYI

SEQ ID NO: 146324 - protein, 75 aa, Oryza sativa
  unsure (1)..(75): unsure at all Xaa locations
  Clone ID: PAT_MRT4530_4695C.1.pep
QQLRMIAQQFYCQAIRSVQAIVQQLWLKQFARVYLDKSQAQAQVMLALNMRSIWGIYPRXNIAPPPLPTVGGIWY

SEQ ID NO: 146325 - protein, 331 aa, Oryza sativa
  Clone ID: PAT_MRT4530_46960C.1.pep
MEQPLYLQRLVQEDWRMTCRRNRFCFYCWLSFCDHCCKEHWDHHHPEEGLPRVATVGSKEDFFFFFFFFFFFFFFFVFFFFFFFFFDRASCVSSYSRSQVELLAENPAVLARYPVGTEYDWEGIQRLRGDEQTNWILLRPWVPPMYGRKKDFSSCVDCHQRIKKPTNALYCCTMCKLNQVQEEDQGRDMVEALATGDYSTQALLHDNFCVLCTSSFSSDCCTYHMELHHPDVEDIGVWLVLIEVVYVDGWAAVAPSELVSENVLAGVQVLQVQADDETVLYPLRRTVAAAVDRLGHVPGWHGCGAPGCHEMIPAQALFCCLRCKAAVHWAA

SEQ ID NO: 146326 - protein, 107 aa, Oryza sativa
  Clone ID: PAT_MRT4530_46961C.1.pep
MSLFTPQLTLLPWLQYVKSDNSSSIRSAIGVGSSFIGGYAAVSAMQQLPNSLVHEKDHNGWSLMKPSSLGASITNVRFAGVSVEACRHRLDAGCSPTIRPCKGGDGR

SEQ ID NO: 146327 - protein, 140 aa, Oryza sativa
  Clone ID: PAT_MRT4530_46962C.1.pep
MTGAGDAAKEYAAGCAAGIAQVAVGHPFDTVKVKLQAHNTTAHGKVYRNAFHCTRRILVEEGMRGLYKGASSSFIGIALESSLFFGTYSQAKQLLKGKSEDGRPQLQVIIPSAACSGALISCILTPTELMKNASSREACI

SEQ ID NO: 146328 - protein, 130 aa, Oryza sativa
  unsure (1)..(130): unsure at all Xaa locations
  Clone ID: PAT_MRT4530_46963C.1.pep
FWNVDAHSLVFIVQAACSSTQTRHTLERPLLNGCFTIQPILMIIAHHYVALKNAXYERCQYIXFKTNADYMPSHFAXYRYSIXRAMLPDVTANAYRILRWHAPSLRNNTXEELDAFTRIYHQQTYLGILN

SEQ ID NO: 146329 - protein, 111 aa, Oryza sativa
  unsure (1)..(111): unsure at all Xaa locations
  Clone ID: PAT_MRT4530_46964C.1.pep
GCRGLTDAILAVLAARXALESLQIRPDPLEHISSDALHQVAFYCLRLHHLHLSGLHDADAEVAIGALMRYCLLLEGVAFLDCGSVDKAANAGIQSGNXLRFLSVAGCRHRG

SEQ ID NO: 146330 - protein, 369 aa, Oryza sativa
  Clone ID: PAT_MRT4530_46965C.1.pep
MAASPSAPPPPAAAAGVGVWSPAPQSPSPNLANFFVWREFVWGAIAGAFGEGMMHPVDTLKTRLQSQAIITGAKAQKNIFQMIRTVWVSDGLKGFYRGISPGVTGSLATGATYFGVIESTKTWLEHSNPNLSGHWSHFIAGGIGDTLGSFIYVPCEVMKQRMQVQGTKKSWALTATKGNISQTPGAPMYNYYNGMFHAGCSIWRDHGLKGLYAGYWSTLARDVPFAGLMVTFYEAMKELTEYGKRKYLPESNLHASSSFEGLLLGGLAGGFSAYLTTPLDVIKTRLQVQGSTTSYNGWLDAITKTWANEGMSGLFKGSIPRIIWYIPASAFTFMAVEFLRDHFNEKIDTDARELTGLSMDTRSEVEEAA

SEQ ID NO: 146331 - protein, 550 aa, Oryza sativa
  Clone ID: PAT_MRT4530_46966C.1.pep
MAGEEGGWWCELAAAAEATRFKTCFSLLRSFFIISRILAHYAKSHLDHLLLSPDRAWLGMEILISAVAGELISRFISSLQQYYSNHTSEEDDRTRLQRILLRMHSVVEEAEGRHITNQGMLLQLKGLIEGFYHGYHILDKVTFQPPEEESIKDEVIHEINSSALITSNSAKRFRFADALRKHTPISFASRSTTNLKGVVEDLETKIADMREFVMLLGSYPRLPRQPYSTYLFMDKCMFGRRVEKEKVIDFLLCSDLPDTYVSILPIIGPHRIGKKTLVQHACQDDRVKSCFSHIFFFKEDDLKMGELLLNSKASPGKYLFVIEFICDVNEAAWTKFQSYLQNMPSTEIKVVIIGRTDDVTKFGTTQPIRMKRLSEEEYWYYFKALSFGSMNPDEHPKLASLGMQLATEMNGSFLGANILGELLRANPNTQFWQSILLSLRGFVQKNLCWFGVHPEDLLERNTPVDFTRMAFLGAQVHGCLVYDLRVAGPAQNQLPKLTSREVLLGGNIPVEQKFDVLVWKSGIPPYCDYIATFEKQKPRRVVGKRNTIYH

SEQ ID NO: 146332 - protein, 95 aa, Oryza sativa
  Clone ID: PAT_MRT4530_46967C.1.pep
MAPAKPLLLDFVSAVLSRIKTKSRSKAKPETSSSNPGTNSLEEDANLRMDFVSAVLSKTKTKSRSNAKPETSSSNPGAAMEIEKPEEAARPVTME

SEQ ID NO: 146333 - protein, 537 aa, Oryza sativa
  Clone ID: PAT_MRT4530_46968C.1.pep
MVGGRALLPLLLLSALLVQIRASDPLFYEPFDESFEGRWVLSGKDDYKGVWKHEKSDGHEDYGLLVSEKAKKYAIIKELDEPVTLKDGTVVLQFEVRLQNGLECGGAYLKYIRPQDAAWDAKEFDNETPYTIMFGPDKCGSTNKVHFILKHKNPKTGKYVEHHLKFPPSVPYDKLSHVYTAILKPDNEVRILVDGEEKKKANFLSADDFEPSLIPSKTIPDPDDKKPEDWDERAKIPDPDAVKPDDWDEDAPMEIEDEEATKPEGWLDDEPEEIDDPEANKPEDWDDEEDGEWEAPKIDNPKCEEAPGCGEWKRPMKQNPAYKGKWHAPLIDNPNYKGIWKPQEIPNPEYFELDKPDSDPIAAIGIEIWTMQDGILFDNILIADDEKVATSILEKSWKPKYEVEKEKEKAEEAAAAAGDGLSEFQKKIFDVLYKLADIPFLEPYKTKIIDVIEKGEKQPNITIGILVSIVVVFVTVLFRILFGGKKPAAPVKPVAEVKKPKSTESEAAGSSGGKEDEKEEEEKDGAAAPRRRSRRET

SEQ ID NO: 146334 - protein, 80 aa, Oryza sativa
  Clone ID: PAT_MRT4530_46969C.1.pep
MAAIGGEDNVAINNGGRVHQPWRQRRSSVAVAPAVYVKRQKQSLISIKKINLVDAAALVPCGSHESADDPSALLRRLTCA

SEQ ID NO: 146335 - protein, 56 aa, Oryza sativa
  Clone ID: PAT_MRT4530_4696C.1.pep
LFYRMFCGILRGLRFRSPEAHQFFLDLVVCPRLSYARNAVPPLVLFFQTLAQKTCF

SEQ ID NO: 146336 - protein, 175 aa, Oryza sativa
  unsure (1)..(175): unsure at all Xaa locations
  Clone ID: PAT_MRT4530_46970C.1.pep
MAAARKEKEEEEEASKLQLKPAGSKVFSKLLSRESAAAAPSFRVYYGVASAGSVPFLWESQPGTPKNAMSDAVLPPLTPPPSYYTAGKVSAGGGGGGGGRKYGKHGILRLFVLPKIRLRRGGRPVSGSPTSSCASSTSSSSSSASFYSSYSLSFRSTQSPTCSSMRSLQGXGGGG

SEQ ID NO: 146337 - protein, 217 aa, Oryza sativa
  Clone ID: PAT_MRT4530_46971C.1.pep
MSRSTAATAAVVVAVAVVAAMAMPAAGQGAPSGSPAPPYKNHTVAGADGWFFNATSNTTSGNYSDWAAGETFYLGDYLIFKTDDSSSVVQTSNATAYSLCDAEGPETLIYSPGHGDAASASPRAATIAVPLTVEGANYFFSEAGDGAQCEEGMRFEIKVAHGRGLPPDLAHPPPPPKPRVLAPPPDGTSMSPGVAGAGAGAAGDLTEGKSGGSRAGV

SEQ ID NO: 146338 - protein, 84 aa, Oryza sativa
  Clone ID: PAT_MRT4530_46972C.1.pep
HSSRTLAPLVYSVTWVSEPGPARVSVVAAWDAPSPSSPGRPGADTSVGSIRRIGDGVGGQPGWVWRPTAYLTITPPRVAAKSSA

SEQ ID NO: 146339 - protein, 84 aa, Oryza sativa
  Clone ID: PAT_MRT4530_46973C.1.pep
ASSGGFIKILGSGDQKQGSLSSLKQSGAGMTKSGGPPPPQRRPTPTKTPATGYHKIFPGRFYAGGPFLQPPFSKVTPPIRFNPP

SEQ ID NO: 146340 - protein, 194 aa, Oryza sativa
  unsure (1)..(194): unsure at all Xaa locations
  Clone ID: PAT_MRT4530_46974C.1.pep
PLVLLLMAAIDLYKYQLSSSSSSSSSDQELMKALEPFIRSASPTSTSTSTSTSTPLFYSSSSISTTTTTPFSYSSPLPQESYYLPASSSYAAIVPPPTTTTNTTTSFSELXSPASLLLVQAGAAAAAAAGGKMYRGVRQRHWGKWVAEIRLPKNRTRLWLGTFDTAEDAALAYDKEALRLRGDYVLLTSALFAL

SEQ ID NO: 146341 - protein, 2155 aa, Oryza sativa
  unsure (1)..(2155): unsure at all Xaa locations
  Clone ID: PAT_MRT4530_46975C.1.pep
MAEERESFERFFRGTLNFYGISLHHLNPNSIVHIANFIHACEAFLGIRPHFALFRRIFFLKPQPNKSKPCVVGGAGFQLRGTLSQKYFSMPFKTSNKGWHANWFYVQNPEPALPEYSCLPPVCQDTWNSLPMGDEAAQAVELMERMLKLKEQGLQGKQITRHFIKSRLAPIKERSRTAFEFDGKHDPNREDPDSLDFKVMKERMYKIFSNAIVVSYSHLLPVVPYNAFNPPPPEFTLMKSDPPITQHRTPCGKTSQTSGGPKIRSDSHPTTTQSANQSDFRKRKLVLSDDDDAEKAGSKGVTGKHPRQANPKKKTSSRPMPKIRKSSRKPSDIDPSRKDSEPTGMETGFSKETEPTAGDRLSDEQPATDNVGPSNEPPTGNQSAEARVDANQEPPTGNQSGTERNKDILEVEAQVDNPPKKDANVDLGSSSPAKVQGPARPRPEIITAPGLEWYIPGLEIELCSRGGCSEWLGLYNRMPRYKPEYLFGVEGFVQELRTMSFVIGFGTAPFYAQIPHDRHEEKCRVKVTLNSNSEEVPSVMFEAGGRNYIHACQEVARIAIGELRDRYSDQLADTEYRYHPRQPQGSDRGSYLETEGIENDVTTKHLVEMLWAMDESRAETVLAAQDREDRNRGKICKLEDKVDRLEKELAALKGEAPPQKARIRLTARKRALFVPRYQLAPKMVNTRSNGNGPNNPNNNNNGENPTLAQVLAQQTQLMNMMMQQFQNQQNQGNNHAPPQNKLAEFLRVRPPVFSSTTNPVEASDWLHAIEKKLDLLQCTDQEKVSFASHQLHGPASEWWDHFRLNRTTAEPITWLEFTAAFRKTHIPSGVVSLKKKEFRSLTQGSRSVTEYLHEFNRLARYAPEDVRNDEERQEKFLGGLNDELSYPLMVGDYPDFQKLVDKAIRQEDKYNRMEQKKRRIAQFKTQQGNNQKPRLTLGPQPMPQGGSSSVVRPQRQFFNNNAGNNIRNQAPRPVAAPAQQQPAKREQGNKPVVCFNCGDPGHYADKCPKPRRVKVVPAQNNSAVPASKARVNHVAAAEAQDAPDVILGTFLVNSVPATVLFDSGATHSFLSMSFAGNHGMEVEDLRRPLMVSTPSNQALSLQRSPSVRIEIQGVPFLANLILLESKDLDVILGMDWLARHKGVIDCANKKVTLTSYDGRVVTVHALSSESLRSRLNQITLEEIPIVREYPDVFPDDLPGMPPKRDIEFRIDLVPGTTPIHKRPYRMAANELAEVKRQVDDLLQKGYIRPSSSPWGAPVIFVEKKDHTQRMCVDYRALNDVTIKNKYPLPRIDDLFDQLKGATVFSKIDLRSGYHQLRIKEEDIPKTAFTTRYGLFECTVMSFGLTNAPAFFMNLMNKVFMEYLDKFVVVFIDDILIYSXTKEEHEEHLRLALEKLREHQLYAKFSKCEFWLSEVKFLGHVISAGGVAVDPSNVESVTNWKQPKTVSEIRSFLGLAGYYRRFIENFSKIAKPMTRLLQKDVKYKWSEECEQSFQELKSRLISAPILILPDPKKGFQVYCDASKLGLGCVLMQDGKVVAYASRQLRPHEKNYPTHDIELAAVVHALKIWRHYLFGTRTEVYTDHKSLKYIFTQPDLNMRQRRWLELIKDYDMGIHYHPGKANVVADALSRKGYCNATEGRQLPLELCKEFERLNLGIVGRGFVAALEAKPTLIDQVREAQINDPDIQEIKKNMRRGKAIGFLEDEHGTVWLGERICVPDNKDLKDAILKEAHDTLYSIHPGSTKMYQDLKERFWWASMKREIAEYVAVCDVCQRVKAEHQKPAGLLQPLKIPEWKWEEIGMDFITGLPRTSSGHDSIWVIVDRLTKVAHFIPVKTTYSGSRLAELYMARIVCLHGVPKKIVSDRGSQFTSNFWKKLQEEMGSKLNFSTAYHPQTDGQTERVNQILEDMLRACALDFGGSWDKNLPYAEFSYNNSYQASLQMAPYEALYGRKCRTPLLWDQTGERQVFGTDILREAEEKVKIIQERLRVAQSRHKSYADNRRRDLSFEEGDYVYLRVTPLRGVHRFHTKGKLAPRFVGPYKIVSRRGEVAYQLELPQSLAGVHNVFHVSQLKKCLRVPTEEANIEQIEVQEDLTYVEKPIRILETNERRTRNRVIRFCKVQWSNHSEEESTWEREDELKSAHPHLFASSSESRGRDSV

SEQ ID NO: 146342 - protein, 178 aa, Oryza sativa
  unsure (1)..(178): unsure at all Xaa locations
  Clone ID: PAT_MRT4530_46976C.1.pep
MTSSPAATRPRTLAGERRRGGTNEEHLRDAGDAAILTEARTAADGXGRRRRRGXSGDEDRVDDDGDVPAVLGVDGGVDEVGGNSANTAVVFPSDDDDRSDGGARLDLRRRWPTATGDGKERLGGGRKRPNLEGDRRLHGKARARLRRLEEEDDLTGFGTAYPVVSDNSLDSVGASAAI

SEQ ID NO: 146343 - protein, 751 aa, Oryza sativa
  Clone ID: PAT_MRT4530_46977C.1.pep
MADSNAGGNNSSGAANNAEVQIPIPAPSKAEAAAAPETPAGKPFRWWAMVAVDVFFLIAGQTSATLLGRYYYTQGGRSKWISAFVRTAGFPILFFTLFFFPSKSPSSCTNTPMAKLAVIYIVLGLIIAADDMMYTGGLKYLPASTYSLICASQLAFNVVFSYVLNSQKVTPLIFNSVVLLTMSASLIGVSKESQGVTGVSGGKYLLGFVLTLGASCTYSLILALMQLTFETIIKKHTFSAVLNMQIYTALVATAASVVGLFASGEWRSLRGEMNAFRSGQFSYLMTLLWAAVSWQVANIGVLGLIFEVSALFSNVISTVSLPVIPFFAVVVFHDRMNGVKIVAMLIAIWGFISYLFQHYLDGKKAKKASSGDSVRGQEDVVAESDKSTSRADGTAAAAAAAAPLPPVSSQRLRWWAVVLANIVFVLGGQSVATLLGRIYYDQGGGSLWLATVVQSCGAPLAVPLLLYFRRPEASPVARPPLLKIAAIYAGLGVLLAGDNLMYSYALLYLPLSTYSLVCATQLCFNAVFSYFLNKERFTALVLNSVVLLTFSAALVGVSHSSEETNSSVPEGKFALGFVLALSASAAFALILSLMQLTFDTVLRSNAAHAVLELQLWSNAAASCVSVAGLFISGEWSSLTAEMDGYKKGEVAYGMTLAWTAISWQLATMGMVGLVATVSSLFTNVISTVGMPLSPIMAVIFLGDRMDGAKVIAMLIGIWGFLSYVYQHYLDDAKSKNTAGSADVTQTSEAKL

SEQ ID NO: 146344 - protein, 208 aa, Oryza sativa
  Clone ID: PAT_MRT4530_46978C.1.pep
MIKSARNVGFDACKCGDGRVGVIHDAALVTMTKVEGLHSSQKCYHLASKHNCHLFGGTLLMWLFRVIRCFNTKSDMYAIFYAGDANGVMEGEIRPQSQSSLCLKAYRLFPSCLHPGKTMFNLISLVSVKLFPLSMHPISIHVTFGKRTFWHFVELLNATSDGEIRPQIQLSLCPQTCANPQLFTAQIHPNKTMFNLVSSLLARKKHVI

SEQ ID NO: 146345 - protein, 104 aa, Oryza sativa
  Clone ID: PAT_MRT4530_46979C.1.pep
SCQPNGGWPVIAQHDRIGVHRILLANPQTGRALLEHIEVRGLPAHGGNHVVLDLWRSAADCCVAASATGRPFRPSIARPAVHPSLAPPVEGPQLQRPNFVLVRA

SEQ ID NO: 146346 - protein, 621 aa, Oryza sativa
  Clone ID: PAT_MRT4530_4697C.1.pep
MAHATLGSPEPAAKPRLRCADGRHRRRLIVVLCIVGVALAVGVAVAVAIAVLGRSRMTSSSGGGRAPRGRAPTEAIARTCGVTLYPELCVGELMAFPGAAGAGDAELVPMSLNATHRRVVDALYNATALGGAAALLAGARSGAAYGDCVEMLDAAEELLARSVGAIAAPPPPPDSVDADTAGRDDDDIMTWLSAALTSHDTCMDSLQEVGAGGDAGDDDGGRIKPQMLGYLGNLGEHLSNSLAIFAARGRPGGELSDVPVHNQLHRRLLTIDDDDDDDGSFPRWVRHNDRRLLQAAAAEIEADMVVAKDGTGTHRKIRDAIKAAPEHSRRRVVIYVKAGVYTENVKIGSKKTNLMLVGDGAGKTVVVGYRSVHDNYTTFHTATLAVAGAGFIMRDMTVENRAGAARHQAVALLLSGDHAVVYRSAVLGYQDTLYAHAQRQFYRDCDVAGTVDFVFGNAAVVLQNCTLWARRPLPGQENTVTAQGRRDPNQSTGISVHGCRLLPSPELELAPAARRGRAATYLGRPWKPYSRAVYMMSYIAGHVHAAGWLAWDASGRAPDTLYYGEYRNSGPGAAVGGRVPWPGHRVIKLPEEAMEFTVGRFIGGYSWLPPTGVAFVAGLTV

SEQ ID NO: 146347 - protein, 815 aa, Oryza sativa
  unsure (1)..(815): unsure at all Xaa locations
  Clone ID: PAT_MRT4530_46980C.1.pep
MGPAAPSAEIPYSQWKLERKYTSSDFAQLVEVTSPNMMQWFADLGANMERSDMSFSVRTQLDACGECEWASSNGISGLLAKRSNALSPSFWRMISETLKFKRDALXFPICGWMWSCPSQRVLGFSASSVLSFXLFSRTQPLIVNGRSQSYFNKVREDLESRSCRIKTNCHVKSISSFDRGYRVLEVDGSEEMYDRIIVGIHALDALKLLGAEATHEESRILGAFQYVSRHLSVIVYQGAIPISTRKHVHLCIGEDSGSGGSGKFKVVLPPLALVVDGCGGDDWIGETREGREGSFPALTLVDDVDRNMGKPLNIESTNHFLVTLNPSYVPDHVLLKWNTNHFVPTVAASKASLELDQIQGKRGSGFHEDGFQAGKAAAQSLLGNKIDPLTNPKQMVLSWTETGARLLVLRFLKQYISVGNLILFEEGGTMFSFGEACEKCNKKSVLQVQDPLFYWQILIASRDAHRSSCRNSSRRGWWTPLLFTAGVASAKYFLRHISRKNSVTQTRQNVSQHYDLSNDFFSLFLDKSMTYSSAIFKDEEESLEEAQLRKINLLIHKAKVGQDDEVLEIGSGWGSLAMEVVKQTGCKYTGVTQSVEQLKYAQRRVKEAGLEDRITFLLCDYREIPCHKYDRIICCEMIEEVGHEYMDEFFGCCESLLAENGIFVTQFISIPEERYDEYRRSSDFIKEYIFPGGCLPSLTRITSAMSAASRLCIEHVENIGYHYYTTLIRWRDNFMANKDKILALGFDEKFIRTWEYYFIYCAAGFKSRTLGDYQASTVLLLYSLVLGTPRWDLASKLKIDLCPRARANLFIFAIV

SEQ ID NO: 146348 - protein, 221 aa, Oryza sativa
  Clone ID: PAT_MRT4530_46981C.1.pep
MEEASDRNKLVSGCLTLPCPERMLSSSTPPYSSSAFHRTPCWRQPIVVAAREPPPPVSPRPPAVDAAAAAGQPASCRRRLARELPPQPVDTAARAPLPPPSPVLPSPPRAPAAADAACRHCVPPSAATADVWAPELSVDNRVALLLESVPGEIRDSTFVSPDSIRRHRRVLAVLIPEVDIRRRVLVDIGFYVMASMSIVLGVDPFMVGVDRLMVMGVPLSS

SEQ ID NO: 146349 - protein, 41 aa, Oryza sativa
  Clone ID: PAT_MRT4530_46982C.1.pep
GRLPLTCMSKIYQLGVHVTAHKKFAIAYAIMSIQSLVRAPQ

SEQ ID NO: 146350 - protein, 63 aa, Oryza sativa
  Clone ID: PAT_MRT4530_46983C.1.pep
RGYRDRLGPAPRETDQLAPGGGVGSSPSPMYSRAVQQPAAALNVLRLSPSHCERACVCLAFSL

SEQ ID NO: 146351 - protein, 126 aa, Oryza sativa
  unsure (1)..(126): unsure at all Xaa locations
  Clone ID: PAT_MRT4530_46984C.1.pep
DRKWYFPLKKLANEVRGSXTYILGHLPFHNQYRTIQQTPPXHIGVSQPFTAPSPLSPQSXLANEIVNXPFSPQKLANEVRDSLTYILGPLPFHNQCETIQQLLNIYLLLQQCSRKNNFSACLVVSA

SEQ ID NO: 146352 - protein, 162 aa, Oryza sativa
  unsure (1)..(162): unsure at all Xaa locations
  Clone ID: PAT_MRT4530_46985C.1.pep
XMRNTTEGKGWVGIIERGPELGTSDNNGDCGKGRVMVANNGLSSGSVIQAIMLHVSCGGWRSDTGHLRPATARRLPPPRGADRLRPVAARRCTSPTTAEGRGPPPSRRRMPPPIAEGHGLPPSRRRTPPISPLRGMQDDGEKARSSCWDPVNSGGGGTSLAS

SEQ ID NO: 146353 - protein, 62 aa, Oryza sativa
  Clone ID: PAT_MRT4530_46986C.1.pep
LVCLSHVVPWPFVVFSALLCCLSRLHKAFDSLVFLVSWQLWKERNARVFESSLAGLTVVGIH

SEQ ID NO: 146354 - protein, 192 aa, Oryza sativa
  unsure (1)..(192): unsure at all Xaa locations
  Clone ID: PAT_MRT4530_46987C.1.pep
TRSPALRRAQRNRTPSSTGRRRRRGRGRPPLLPAAGARGKRLRQLLKSSSPCRPAAAVELAPAPLAPSSPTPPPXRTAAVGDHSPGTRPATPPPCVPSSPMPLAPMTSGKGDRAPAVEKVMLISCTGTTADVLWQDGTLRRGVPSLELVSFDILNNHEFFPGQHVDVDTMAVATTTTARRVGFVEVHDGATS

SEQ ID NO: 146355 - protein, 78 aa, Oryza sativa
  Clone ID: PAT_MRT4530_46988C.1.pep
PLYLGRPALFFWGESGRYRHKINTINLCKHCTEERTQRMGHKIKPKRDSTSAAMGRRQKVENLTRTAREHQSKQNTPK

SEQ ID NO: 146356 - protein, 132 aa, Oryza sativa
  Clone ID: PAT_MRT4530_46989C.1.pep
MAVLATACWLVIRLVFVKGNTDRRPCEADGMRMVPGSRGLPIIGETLEFLALSPSLQIPAFFQRRFDMIIGTDSLIRTHGLLHRHIKNLALRLFGPENLRREIIHDVQKTVEASLSSWLNQPSIELKEAVSS

SEQ ID NO: 146357 - protein, 145 aa, Oryza sativa
  Clone ID: PAT_MRT4530_4698C.1.pep
MKIVLKVPITCKKCKSCILQIVSRNKGVKSLTFDDEKSTLTVIGEVDVVVIVDKLRHPKKGKEKREGYMVEVMAVSDEKKEAEEKKKKDEEEKKKKEKEKEEEEKKKKECAEKLKQCAELQQCCRACRPYYVAVDDHPGYSCTIV

SEQ ID NO: 146358 - protein, 371 aa, Oryza sativa
  Clone ID: PAT_MRT4530_46990C.1.pep
CPLTLLVRINEFVGTKHDPLIPTKRRRHRSCRLFRWIGSKLCICISCLCYCCKCSPKCKRPRCLNCSCSSCCDEPCCKPNCSACCAGSCCSPDCCSCCKPNCSCCKTPSCCKPNCSCSCPSCSSCCDTSCCKPSCTCFNIFSCFKSLYSCFKIPSCFKSQCNCSSPNCCTCTLPSCSCKGCACPSCGCNGCGCPSCGCNGCGCPSCGCNGCGLPSCGCNGCGSCSCAQCKPDCGSCSTNCCSCKPSCNGCCGEQCCRCADCFSCSCPRCSSCFNIFKCSCAGCCSSLCKCPCTTQCFSCQSSCCKRQPSCCKCQSSCCEGQPSCCEGHCCSLPKPSCPECSCGCVWSCKNCTEGCRCPRCRNPCCLSGCLC

SEQ ID NO: 146359 - protein, 119 aa, Oryza sativa
  Clone ID: PAT_MRT4530_46991C.1.pep
MDRNARIGVSVSVFLSLACLPCRPPPPQPVTTTTTTAIPFRRRPCRPPWLDWTISVSVSLYERIPADTAIRYGVIRACAMVHVIIQCYKDQGTRRERCKGAQSPPESFLVAPNDWQQLE

SEQ ID NO: 146360 - protein, 57 aa, Oryza sativa
  Clone ID: PAT_MRT4530_46992C.1.pep
LQQKKQKNLYCSNSRIRPTKNYTTDSRHILLSVHTTVSNYETKRWGIADKDDNREFG

SEQ ID NO: 146361 - protein, 73 aa, Oryza sativa
  Clone ID: PAT_MRT4530_46993C.1.pep
RPSAPFMRPASIALQFQHKHAHCGYGHPPAWVDPRKQARCRRVPTISQLPPLSKEALPRGDIPNQTGIRGPSF

SEQ ID NO: 146362 - protein, 60 aa, Oryza sativa
  Clone ID: PAT_MRT4530_46994C.1.pep
VFKKLGGYHLGLSNFKTGKVKVSVGKCDVRPLKVFVCSPEHKMGYGYGSHLVFQCAHFFP

SEQ ID NO: 146363 - protein, 548 aa, Oryza sativa
  Clone ID: PAT_MRT4530_46995C.1.pep
MKMSRFCSVVGIVCGSPSSSGDEAFASHGEQQQATTTTTAQSSGKSSSSRRKTAPEASGEHKAGGEAPPPASKKTALLDKGKEKVSEMDTSVRRTSKGISGNPSEDSNEPVAKSPTLKTVIGSIRNYIATKKGRKIKILAFEVANTIAMGSNLMNFLSEENIRYLKRVVLQNQGVQSLISDDQSQLLALVGDEIRQQFKDFAASVARLGNMCRDPKWHNLEGHFSGLEYGPITQEYSHEKAASKMEDLMELVTKTKILFEALRRLGVSEKMYREAKQTGMPLETFQNAVNIEKEIVQSAKKKALWVKKIEKIVEELVYIVHYLPSEINCVFYKEHEEDRSVKANGSPQQTLGSADLQLNYARIVIAIQVLVSVASSVPQCAVDSLFHALPYRIRSVLLPRMRHGDFDDQRTETQIADEMTRRLEWLYPMAEFTIRLSQHTGMIRECLVSGSLSDRDQRKMLKVQTLYHADKMKTDGCIIDMVMDLHLLIKAARLRADAPHHSGPLDQPVSTSGSSTSSASTGISGSTSFGNISTTWSDIDEDFIAVID

SEQ ID NO: 146364 - protein, 309 aa, Oryza sativa
  Clone ID: PAT_MRT4530_46996C.1.pep
MDVHPPNAAASSLEELFPHQPATESDRSGIEWLSVYVEDCLSTSASCTNPVSAELPPITMASQGAAKPKLPPRSSTNARKKKRSLASVISDTDDQHCITLFVEPPLLLLDHKDWLAESELILPKKDKDEELVQEQEQEEEENYKMSAGMQFQQEQLVITCSYCLSSQSPQWWDGPSGPTCDACRLRIEARNGHTTSSKKRYGQEIDKEQDIGKRRDKKKIKKAVYVNDELLSEEPMKRCTHCLSYKTPQWRTGPLGPKTLCNACGVRFKSGRLLPEYRPANSPTFVSDIHSNSHKKVMQLRNSVPHPRK

SEQ ID NO: 146365 - protein, 153 aa, Oryza sativa
  unsure (1)..(153): unsure at all Xaa locations
  Clone ID: PAT_MRT4530_46997C.1.pep
MNIIFVFAVLAIAACSRXARLDVYRQXYTAYQRASPDLLQRRSVXPYNEPSKARSAGLLVSPFLLQLPIKLRNNRVWQRACAAXAQQSHYQDINIVHAIAHQLQLQQFEDLYSDRNXAQAQALLAVNVPSRYGIYPTNYGAPGTITTLGGVLE

SEQ ID NO: 146366 - protein, 101 aa, Oryza sativa
  Clone ID: PAT_MRT4530_46998C.1.pep
KPNYVKFPEQFFQLVGVGGPFVFDTPLWAGPVALPPDTPLWDLDRRFSVALRGLNSGFAPDPGIEVCQFALGGGIPFCPPLVWGGDRALSDHYILGFGGIN

SEQ ID NO: 146367 - protein, 61 aa, Oryza sativa
  Clone ID: PAT_MRT4530_46999C.1.pep
MAWQRGGGREVERSHMRMDDEDITPLDTQNTSHVFVQATRSIGFDMVDNQRRRGAAIIGFG

SEQ ID NO: 146368 - protein, 145 aa, Oryza sativa; identical to SEQ ID NO: 146357
  Clone ID: PAT_MRT4530_4699C.1.pep

SEQ ID NO: 146369 - protein, 52 aa, Oryza sativa
  Clone ID: PAT_MRT4530_469C.1.pep
FNTNARILDLVFAFQTPGELPNHLPTILHTRMLILTKNTVVAAHYYMIHESP

SEQ ID NO: 146370 - protein, 103 aa, Oryza sativa
  Clone ID: PAT_MRT4530_46C.1.pep
GEEARKLPERTNEMAGVYPSQCIELAREMNIHCIDIWSKMQETAGWQKLYLSDGLHLTPEGNAVVHKEVVQTLRSFCLKAEEMPYDFPHHSRIDGSCPEKAFQ

SEQ ID NO: 146371 - protein, 59 aa, Oryza sativa
  Clone ID: PAT_MRT4530_47000C.1.pep
MSDQVGIQGKRGWISNWLEREALGTLAGQRHGQPCWLLAHGIFSFIDVLDDAECERLGR

SEQ ID NO: 146372 - protein, 74 aa, Oryza sativa
  Clone ID: PAT_MRT4530_47001C.1.pep
MWACGTGGVGAGSGETGGVGGGTAVGWRWKKGLTGKRTSGRNMESADKYASHRRKRRILDALRVRMLAARKRKT

SEQ ID NO: 146373 - protein, 109 aa, Oryza sativa
  Clone ID: PAT_MRT4530_47002C.1.pep
INDGSSQPRRGRGGATGGGGGYAAGAVMAVLRPIPPRRSQPPFLRRRVWHAGADQPRGVRSEEVAVRYDGRRPQSVGRPFTRAFSLVGGGLMRPGLVDSKGTPGDITFT

SEQ ID NO: 146374 - protein, 98 aa, Oryza sativa
  Clone ID: PAT_MRT4530_47003C.1.pep
EDGSFLSMPPGVNPWLLLARSVSFGLHFLILYGPFLAQVFGFVPLSFNKWLLVKPVAFPVVFIDGVLKFVGRGLPARARNPSGKPKEDLMLVPRVLDF

SEQ ID NO: 146375 - protein, 114 aa, Oryza sativa
  unsure (1)..(114): unsure at all Xaa locations
  Clone ID: PAT_MRT4530_47004C.1.pep
RRRRWAGRCGSGGTCSSSTKPSTPSTASAPGTPTRATSRTSPPPPPPSPPSSEPTXAPRRARPLPPPPPAEVARVPPHVPSLGHAPPRRPRKVEVSASQEKTCHAAAAEQIVRG

SEQ ID NO: 146376 - protein, 432 aa, Oryza sativa
  Clone ID: PAT_MRT4530_47005C.1.pep
MRRAVAVAATSEDGGGGGFYPTVLSVCHVWTHELIMDTMRKRVQAFTEGVVLMVCPVLLAVSLKKADLKSNGNGSLVGGGISPLAAITLEAGLLAVLFLGINDSLPASHGLLLRASKLLVHLCALLLMALAFVILLLIDMDRHMYCLAGLVLAPLVPLTLFRCYRGARDGGDDHAAGGGDAAATLEDSVNFSAAVTTLLFLGLEGLALEGQSSAACRGMERLFTASLGVTYLTCVLGVFVMLVGTVPDPAMASTDDQGDRSAKVCYFAELLNATLSVAFAVVVVLITAAPLREQAWLVFVPLILSFVTWMYRAIVGDGVGEIKPAASLELTKVTFTGFLAVAVPTFSNTPVGISTRGFVALSAAAVMSDLGWRLLMTGRMDRNDQRRASPAMVSVANVASLCAHLCVAAAVLPFATLAVNAVSSSEPGSGCH

SEQ ID NO: 146377 - protein, 469 aa, Oryza sativa
  Clone ID: PAT_MRT4530_47007C.1.pep
MEGRMQGKAPLSDSNRRIMDADAPPRRVYQGWKGSNIFFLGGRLIFGPDVRSLILTVCLIVIPVILFAAVISGQLDHEYHNQIGGWVASVAIIFTAYIIVLLLLTSGRDPGIIPRNAHPPEPEDVGESSNLSEWPGGQHGSTGLPLTKDVLVNGVLVKVKYCHTCMLYRPPRCSHCSICNNCVERFDHHCPWVGQCIGKRNYRFFFMFVSSTTLLCVYVFAFCWVDLRIIMDTHRCKLGRAIMKSPVSGILILYTFIAVWFVGGLTSFHLYLISTNQTTYENFRYRYDRKTNPHNRGLVQNFIEILCSRIPSSRNNFRAKVKEDSATFPSSLGMGRALSPPKMSVDLEMGMKRQTVAMEELEDLHSQIGSAMGLERCGTEPPHIVGRKGCSEIATDIEAFAEEFGLEQRHGEALKPKVLLYFWNAGSMYYKNHQVIFKDFIFFSLKGLQEEDFEAEEEDAPLHKDFLSN

SEQ ID NO: 146378 - protein, 135 aa, Oryza sativa
  unsure (1)..(135): unsure at all Xaa locations
  Clone ID: PAT_MRT4530_47008C.1.pep
SCRRSRARRPPRRSPPLRAPAATRPPRPPPPPPTTXAPPPPPHGLGHDGPPRRVAPXTAPTPTRPTTSSALTPPTTTASPTTPPPPRGCSAVPTPAPTTTCGASRGRLRRHRRPPPPLSATPELSQPRGTVTHDS

SEQ ID NO: 146379 - protein, 459 aa, Oryza sativa
  unsure (1)..(459): unsure at all Xaa locations
  Clone ID: PAT_MRT4530_47009C.1.pep
RWRSKQVRNNEPINIWKSRYSNLFXAIGVNGRXFVSAVPENSSTGYLLIGTSGGLNQQRIGITDAVVVARILNATLVVPELDHHSFWKDDSDFSDIFDVDWFISYLSKDVTIVKRIPYEVMMSMDKLPWTMRAPRKSMPDFYIDEVLPILMRRRALQLTKFDYRLTNELDEELQKLRCRVNFHALRFTNSIQTLGEKLVRKLRSMSSRYVAVHLRFEPDMLAFSGCYYGGGDKERRELGEIRKRWDTLPELSAEDERSRGKCPLTPQEIGLMLRALGFSNDTYLYVASGEIYGGEETLQPLRDLFPNYYTKEMLAGNDLKPFLPFSSRLAAIDFIVCDGSDVFVTNNNGNMAKVLAGRRRYMGHKRTIRPNAKKLNLLFKRRKQMGWDIFSQKVKKVHSGHWGEPEVIRPGREDCNEFPTDCICQSPVSPRPSTDDDGDVDALERLSLVTRRHHTCPKC

SEQ ID NO: 146380 - protein, 67 aa, Oryza sativa
  Clone ID: PAT_MRT4530_4700C.1.pep
RGRARGQAPRRRRRRRKSPFRSKRNRRRRRAPPSLSRGKAWAPPLCRRRWQRRRTTGRRLPYYSPPP

SEQ ID NO: 146381 - protein, 39 aa, Oryza sativa
  Clone ID: PAT_MRT4530_47010C.1.pep
MELELELCQTSSKILRRSWLFEETCDYKIQPPEALLSIP

SEQ ID NO: 146382 - protein, 229 aa, Oryza sativa
  Clone ID: PAT_MRT4530_47011C.1.pep
MATSMELAPGDARFAKLAKELDDKAPPKAAAAPPAASEDQAAASSGKPKYKHDFYNGASEVVVTVFAKSVAAEHVILPSKIEVRLAKADEQVTWTSLEYTSKANNKLAATATTTTRKKVDWDKLEAEVKKEEEEEEVDTATPVVNRFFQQMYGNGDEDMRRAIMKSYVESYVLSTDWKDVGSKKIEASAPEGMELPSFHPEKSLEVELNEGSSSNAFKKVNGAQGRRRC

SEQ ID NO: 146383 - protein, 62 aa, Oryza sativa
  Clone ID: PAT_MRT4530_47012C.1.pep
FTNNTLTPLISMLFRRLTSDTPSSLIVFNACMHGLKDHKDGTQNPCITANTTLHSITWSFLS

SEQ ID NO: 146384 - protein, 140 aa, Oryza sativa
  unsure (1)..(140): unsure at all Xaa locations
  Clone ID: PAT_MRT4530_47013C.1.pep
PEKTLEVELNEGSSSNAFKKVNGAQGRCAGSGQXEPDPAVPLTTNAGRRLEGRRRTPVAAAGCQPIPGRLPRPSKREETRSALPPPSLRPRGLAGGRSGDSEAEKGGGVGGRGVAGSPPEPPLGRADSGGDLLYLSPSSS

SEQ ID NO: 146385 - protein, 439 aa, Oryza sativa
  Clone ID: PAT_MRT4530_47014C.1.pep
MVTKNVQQQQQHRVDVVVPVPAMVVAAMASPCPANKLLRGAIQLAFGFALGIAVAIYLIGSATPAAVPGGSSLELFFPLPPPAAASTANLSAVRQKQPPTPSPEAEKTTTAIKSQSWPADDASGGNSTADQAGGGFVDISDEELMKLAAAAPREVRTGGGGGPRPKVAFLFLTRWDLPMAPLWEKFFEGHRGLYSVYVHTDPAFNGSDPGEASVFYRRTIPSKEVKWGEISMVEAERRLLAHALLDQANARFILLSESHVPLFDFPTVYSYLINSTTKIYLESYDLPGVTGRGRYKRSMSPVVTAAQWRKGSQWFEVDRGLAADVITDDVYFPVFARHCSRNCYADEHYLPTFLGIRHPSRVTNRSVTWVDWSHGGPHPARFTRMEVTPDFLRWLRAGAGTTCDYNGATTTVCFLFARKFLPNSLTRFLRFAPKVMGFG

SEQ ID NO: 146386 - protein, 129 aa, Oryza sativa
  Clone ID: PAT_MRT4530_47015C.1.pep
RAARSPLVPCACLLHTLASSSRRGGGGCCSRSATPAKDVSLSRPRRLPSCPNFPALRSRTEGFSLQRLWFFPERRCLGRELSARQWSLAEKLQSFAIFLVSAVLLRSQAIGFNLWMIFCLRILFCHLFH

SEQ ID NO: 146387 - protein, 230 aa, Oryza sativa
  unsure (1)..(230): unsure at all Xaa locations
  Clone ID: PAT_MRT4530_47016C.1.pep
MWVPRGFHPEKTLEVELNEGSSSNAFKKVNGVQGSHQMSPAHRGYLRYSHHLHDDRTPTTPFPPEDAPDLGKEPDPAVFLSTNAGRRLEGRRRTPVAAAGCLRALATTGRRRIRVRHRRIRGLHHCHPNAVTIPAAITHNTTPRNSPRPPPSPVPAAXHPVRSGRNGADLADTAVATPGGSPGRPSARRRGAPRRRRPCGCAASPAAARATARRRRGWGWGRGAAGSLPP

SEQ ID NO: 146388 - protein, 560 aa, Oryza sativa
  Clone ID: PAT_MRT4530_47017C.1.pep
VSIGTLCLPPPYPRLELEKGGRRMAPAPCSGAITTMGGLSTDALSLSFSTVARPREEETEREKEEGRKRNRKEDSSRGVRKTSDRSRTEGFSLQRLWFFPERRCLGRELSARQWSLAEKLQSFAIFSTTAASKAVAVAAIMGEKGGATWGLWRTMAVRWCGLGGEVLRRCSRGGRGCSAHEPRDVISLPTHVLFFATSLRGVLFFLPHLLGAWANGFSGVVALPGDRFQPLDDFLSENPFLSPIPLGRLYENIDPAKPYMLEDPIRRAVWSGSLAPYIANKVKMSLSHILTKENVGVHKDFGLVVFKDVPKKREGISDSSENYQHYSSFLTETIQRLHGSESLNALPVEMDIYLKDLTDPNVKEDDIVDHPIALPGRVFGDVSVEAYRLLCKQYPVVKNGKEISADRIIEAVGAKFKDALTVSLDSGLLPKFLPLKWQKLYPANKYPWIPKPQLIISQEEAGKIVIEIHRHGSVHSVEVGVDTIVTSNFPGFSGDKFTRMEVLALIRHIFPEYLNTIFKEFKMDNLYEDLQIRERNPIPSLYSAQGDGVYAEVIVKFIGF

SEQ ID NO: 146389 - protein, 738 aa, Oryza sativa
  Clone ID: PAT_MRT4530_47018C.1.pep
MAMTVEALMYVLVPMPCLFFGGGSTQFLTSRDGGGWFNAAKFLTGASAMGSIAIPAILRHAGLIETGAMFIEFTSFFILVCTVMCFHRATLDEDWKTPEEVKREDLEKKNVRERRKTETLGGNGVEATQRVFLYPQSPKVSSIVSKGYRTGYHFQPPKNWINGPMYYNGIYHEFYQYNPNGSVWGNIVWGHSVSTDLINWIRLEPAIEGNTPSDINGCWTGSATILTGDQPVIIYTGADTEKRQVQNIVLPKNRSDPYLREWTKPKNNPLIEPVGPALLYKSKDFMQWTRVDHPLYSSNASNMWECPDFFAVLPGKNNGLDLSAAIPNGAKHVLKMSLDSCDKYMIGVYDLKHDMFVPDTVLDDRRLWLRIDYGNYYASKSFFDSKKGRRIIWGWTNETDSTSDDVAKGWAGIHADVEIDFELTSIDAADPFDPSWLLDTEKHCREADASVHGGLGPFGLVVLASDNMDEHTTVHFRVYKSEQKYMVLLCSDLRRSSLRPGLYTPAYGGFFEYDLEKEKKISLRTLIDRSAVESFGGGGRACIMARVYPAAVVDGATHMYAFNNGSSTVKVSQLKAWSMTRAQGRLGRRPGRPSSPYPTPRSRAAARTAAAGRSSSPRARTAWGATRGWAGDGVGGGGGGDGRRWLLRHPAAATGVLRRPSRRRPALVVRGTAGSGSLAQIRRVLEWGRGGLASGRRAGDVHIAGVCYWSPRSTPLQEFSLGENLDSLGSDDDVVLSA

SEQ ID NO: 146390 - protein, 152 aa, Oryza sativa
  Clone ID: PAT_MRT4530_47019C.1.pep
MAVSPWHSPVPYLFGGLAAMLGLITLALLILACSYWKLNSYLGTGHSSSAAAAAAAGDGGDGDGGSKSPATAVAAFPVVYGDLVAVVMAGERMPTFLAAPIVRRPPSTDTSSSAVAEVASPENGCDAAEGGAASRPPPQPVAARQAVQLAQL

SEQ ID NO: 146391 - protein, 158 aa, Oryza sativa
  Clone ID: PAT_MRT4530_4701C.1.pep
MLQFSNDIIQPRDPAFRGVHGRLLQSRFSPQFINCIGVIDGTHIPVIIPQEECMTYMCRHGYTSQNVMVVCDFDMRFTFVAAGMKGRCHDMAVFNRVVRGDKSDLFPHPPHNKYYLVDTGYALAPRYMAPYRGEWYHVPDFRGCNPELLQENFNYLHA

SEQ ID NO: 146392 - protein, 223 aa, Oryza sativa
  Clone ID: PAT_MRT4530_47020C.1.pep
MATSMELAPGDARFAKLAKELDDKAPPKAAAAPPAASEDQAAASSGKPKYKHDFYNGASEVVVTVFAKSVAAEHVSVDFGEQMLSVSVEVVPAKCRYSILPSKIEVRLAKADEQVTWTSLEYTSKANNKLAATATTTTRKKVDWDKLEAEVKKEEEEEEVDTATPVVNRFFQQMYGNGDEDMRRAIMKSYVESYVLSTDWKDVGSKKIEASAPEGMELHKWEY

SEQ ID NO: 146393 - protein, 100 aa, Oryza sativa
  unsure (1)..(100): unsure at all Xaa locations
  Clone ID: PAT_MRT4530_47021C.1.pep
MNLGFHPEKSLEVELNEGSSSNAFKKVNGAQGRRAGSGQXEPDPAVFLSTNAGRRLEGRRRTPVAAAGCLRALATTGRRRIRVRHRRIRGLHHCHPNAVT

SEQ ID NO: 146394 - protein, 199 aa, Oryza sativa
  Clone ID: PAT_MRT4530_47022C.1.pep
MYYNGIYHEFYQYNPNGSVWGNIVWGHSVSTDLINWIRLEPAIEGNTPSDINGCWTGSATILTGDQPVIIYTGADTEKRQVQNIVLPKNRSDPYLREWTKPKNNPLIEPVGPGLNSNQFRDPTTGWIGPDGLWRIAVGAELNGYSAALLYKSKDFMQWTRVDHPLYSSNASNMWECPDFFAVFAGKNNGLDLSAAIPNG

SEQ ID NO: 146395 - protein, 122 aa, Oryza sativa
  unsure (1)..(122): unsure at all Xaa locations
  Clone ID: PAT_MRT4530_47023C.1.pep
TPKTKPLRRLRRQRRHRPILTNLGFHPEKTLEVELNEGSSSNAFKKVNGVQRGRAGSGQXEPDPAVFLSTNAGRRLEGRRRTPVAAAGCLRALATTGRRRIRVRHRRIRGLHHCHPNAVTIP

SEQ ID NO: 146396 - protein, 65 aa, Oryza sativa
  Clone ID: PAT_MRT4530_47024C.1.pep
MSAQAELSREENAYMAKLAEQAERYEAMVQFMEKVAKTGDSEELTVEERNLLAVAYINVIGARRA

SEQ ID NO: 146397 - protein, 179 aa, Oryza sativa
  unsure (1)..(179): unsure at all Xaa locations
  Clone ID: PAT_MRT4530_47025C.1.pep
TPKTKPSKRLCRQNGDIVRSYNESSFHPEETLEVELNEGSSSNAFKKVNDAQGRRRCXHREKPDPAAPLTTNAGRRLEXRRRTPAATAGCLRAHATAGRRAAAPTPXAITHNTTRCTXPRPPPSPVHAAXHPARSGRNGADLAVTAVTTPGGSPGRPSARRRGAPRRRPCGRAALPAAA

SEQ ID NO: 146398 - protein, 1130 aa, Oryza sativa
  Clone ID: PAT_MRT4530_47026C.1.pep
MSHAPRFLLFLLQLLAASVVARPPPPERADSAAVLRSFLASLPPPSRRVLRPSWRRGGGGGAPHCAFLGVTCDAAGAVAALNLSGAGLAGELAASAPRLCALPALAALDLSRNGFTGSVPAALAACSCIATLVLSFNSLSGAVPPEILSSRRLRKVDLNSNALTGEIPTTGLAAGSSVLEYLDLCVNSLSGAIPPELAAALPELTYLDLSSNNLSGPMPEFPPRCGLVYLSLYSNQLAGELPRSLTNCGNLTVLYLSYNKIGGEVPDFFASMANLQTLYLDDNAFVGELPASIGELVNLEELVVSENAFTGTIPEAIGRCRSLTMLYLNGNRFTGSIPKFIGDLTRLQLFSIADNGITGEIPPEIGKCRGLVEIALQNNSLSGMIPPDIAELNQLQKLSLFDNILRGPVPLALWRLSNMAVLQLNNNSFSGEIHSDITQMRNLTNITLYNNNFTGELPQELGLNTTPGLLHIDLTRNHFRGAIPPGLCTGGQLAVLDLGYNQFDGGFPSEIAKCQSLYRVNLNNNQINGSLPADFGTNWGLSYIDMSSNLLEGIIPSALGSWSNLTKLDLSSNSFSGPIPRELGNLSNLGTLRMSSNRLTGPIPHELGNCKKLALLDLGNNFLSGSIPAEITTLGSLQNLLLAGNNLTGTIPDSFTATQALLELQLGDNSLEGAIPHSLGSLQYISKALNISNNQLSGQIPSSLGNLQDLEVLDLSNNSLSGIIPSQLINMISLSVVNLSFNKLSGELPAGWAKLAAQSPESFLGNPQLCVHSSDAPCLKSQSAKNRTWKTRIVVGLVISSFSVMVASLFAIRYILKRSQRLSTNRVSVRNMDSTEELPEELTYEDILRGTDNWSEKYVIGRGRHGTVYRTECKLGKQWAVKTVDLSQCKLPIEMKILNTVKHRNIVRMAGYCIRGSVGLILYEYMPEGTLFELLHRRKPHAALDWTVRHQIAFGVAQGLSYLHHDCVPMIVHRDVKSSNILMDTELVPKLTDFGMGKIVEDDDLDATVSVVVGTLGYIAPEHGYYTRLTEKSDVYSYGVVLLELLCRKMPVDPAFGDSVDIVTWMRSNLTQADRRVIMECLDEEIMYWPEDEQAKALDLLDLAMYCTQLACQSRPSMREVVNNLMRMDK

SEQ ID NO: 146399 - protein, 957 aa, Oryza sativa
  Clone ID: PAT_MRT4530_47027C.1.pep
MAAGAVVVTAALCKRSNRVARVLAYALLEWILIALLLANGVFSYLISRFAAFFGLAPPCALCSRLGVDSLFEPRGEGQGAGAEPLCRVLCDSHAAEVSRLGYCRAHRRLADAGDMCEDCVSASAAAAASSWMRRSELGERDLACACCGVALESGFISPPFLFPAPAACDVDCGHRRDAAMANLNRDLVFVSEEGPVIELFDEKPLEEDPIGAMAGLAAQCAEIVGNVLQLVPLESADLSNVRKSAVSYESRGEGNDAMDHVTSKQRNVVLKNMANTSEDKSAVSSDDDDKVGDMVSKMIDEEITALVLSQDCIEDGFSCEIDGETTESLAADHQQFCEKHSGLKDNNQEISIGSEIPENEQGAVKQELLCVLTNPRGNEFGIDNLEGNTETVHQADLNNGWNSMPVEAGVHASETSTENNEEWIQPGELSQKSNLMPIYSREHADEEIKEDRISLTEIKQGLDSVTIDSWEEVHLISNDGTKENQAEQPELNHQSTFMTVRAIEYVTDLFDANISAGNVNPTEAALPSLHQFSYGPSTSLNKLCPDYNDVESESAPDTPIHIEDIDGLHELPDHKAMTSDTKSVDLESIELVSVDQLKSALASAHKSLSTLYTELENERSAAAIAADETMAMINRLQEQKAAMQMEAIQYQRLMEEQSEYDQDALERLNELVVKREKEKQDLERELELYRRKVHLFEVKERRKMSRHKADDHNGSSSASSSAEDSDDHSQSFYEGDESAHGLNGSNGSIPTDAVLQETARHLGTLGCSLADFEEERLSILEQLKLLEERLFDLEDEDSDSVKMDKRLSEENHLMGASNGFSDDDSNFKLHDKRKGVSYRGKKLLPLFDDTTVEDGNDLLTRQDPEADHSTENVVLEPANEQDKLAIAHEIDQVHERLHALEADKEFIKQCVRSLKKGDKGFDLLQEILQHLRDLRRIEQRTRNSGELSPHYLHPYTD

SEQ ID NO: 146400 - protein, 59 aa, Oryza sativa
  Clone ID: PAT_MRT4530_47028C.1.pep
MVSLFVPCVGDSRCWESICGDGLGVGLGIKRCPWWSEIMRDTKARVQCTWMVKFPYGIR

SEQ ID NO: 146401 - protein, 157 aa, Oryza sativa
  Clone ID: PAT_MRT4530_47029C.1.pep
MGLRDGLSNNKLLDDFEPGRYNLARVRPPMRSESSSSTNLIYRDQSRCRKPWTHMPTPTRSCGAHWWAAELARSLWRSSLPFSGRRAACSIHSKALFYAYYVILLAVAVFGVAEVAVGCWVSASPSDRRRGVGKVVVWASVMAIVVVAGLGCFAVLK

SEQ ID NO: 146402 - protein, 65 aa, Oryza sativa
  Clone ID: PAT_MRT4530_4702C.1.pep
IRSILYGFVAFFSTCNRHRLSGYNHIQVFLRRLSRVLTGAQHTTSCEGTRRYSSQNHPQRKTHTR

SEQ ID NO: 146403 - protein, 1794 aa, Oryza sativa
  unsure (1)..(1794): unsure at all Xaa locations
  Clone ID: PAT_MRT4530_47030C.1.pep
MDQKWMYADRRSKEFIDGVHFFLRVTETNKHKGFICCPCNKCKNXKEYSASRTIYFHLFEPGFMPSYNCWTSHGEQGVEMEEDEVEDENISDWAQYAGIKENQTGEVDRDADDNDGADDLGQMLQDAKEDCESEKEAHKLERMLEDHRTSLYPGCEQGHKKLDTTLEFLQWKAKNGVSDKAFGDLLKLVKNILPEGNKLLETTYEAKKIVCPLGLEVXIIHACPNDCILYRGEEYENLEACPVCKALRYKIRQDDPGEVDRQPTKKRNPAKVMWYFPIIPRLRRLFRNKGNARMMRWHAEERQQDGMLRHAADGSQWRNIDRTFQDFGEDTRNIRFGLSTDGMNPFGETSSGNSTWAITMCIYNXPPWLCMKRKYIMMPIIIQGPKQPGNDIDVYLRPLVEDLKLLWKKEGVPVWDEDKQEEFNLQALLFVTINDWPALSNLSGQFNKGYKACTHCMDETESVYGKSKDTLEVCNDLKHMEQRRDLHPEPKEKXSHYLSPASYTLSKAEKESMFECLESIKVPSGYSTNIKRIISTKEKKFTNLKPHDCHVLMTQLLPVIIRGILPDNIRATITKLCAFMNTISQKVIDLDRLEALQNNVRYMGVLKKYVRNRARPESSIAKGYGTEDVIEFCVEFIEDLRPIEVLESHHEGRLREKGTLRRKAIMTVDNNLFHKAYFMVLQQSSLVTPYIEEHLALVRAKNIGKSDAWITRPHIDTFPAWLQQHLMGNETINQQLAFLAMGPSGSIATFQGYEINGYTFYMRAQDIKSTNQNSAVRIDAIGHDGTTGTYYGAIEDIWELDYGSLKVPMYRCQWIRLTGGGVTIGDSGMTTVDLNKVGYSDEPFVLANDVTQVFYVKDTSSKGKKGKGPDEPKRHVVLPCKRKIVGVEDKTDEDYDQFDRQPPFTVTIDPSILLSNEDAPYSRNDNKEGTVYLNEEGNMERDAEGKEEGKEEEEASGSXPFAGQKRAHEXRGAAKKIEGRHIITEVDEDGXPSAPAEAAKNYIRYSGWVVRDNVPVSKVYWHRTRARGDYDKFVPESEKEMLWTTMLETFTLPAGTENIVKQWTLKKMAEQFQSFKGDLYKKYILKGLTPNFDIFPKLRDHXNWDEFVAYKTRQQGQALMERNKENAAKKKYHQHLGSGGYSVAMPKWEEMEASLIERGIKPATAKWPDRSKFWYYAHGGTLNPVDGSLVFSDQIRDAASRLTHAVEASSQGTFRPDREKDKLSRMRSKRDTEAKIADLEYRVSSYELSMQEEVARKVDERMAAHRSQDPQPYIPPVMVSPLGNRSSYASTGQVVSGMAIPTDPSGTYHCRPIPPGYSRVEIELVEAAYEDLELDYPGGDGETHLRDTSHAIILXRKRYIILPGQQAASPAPSPPAPPSPPPPPPPPPTPPQAPAPCPPAPSKSRSHQAPPPARTRATKKAEVDAIENKEPPYDCTQEELDAYVAAEVKRQLKPRSPEKQIPIDPSTKNFFKKMSGPVKEALKLTDYERTLRKAYYGXSKPVPQLGEQPNQEVKPLVTVEEIGIKQFISDTGLTKAQLLKGAPIPKAEVKYQFELGKPLVKPEQLQSVPTXMYQFYERYMEMSANGREMFGARIGDSDFFQGEDVLWIHFKGIYELYQLDALDVSLLSARILMEIQRARRRGVFNTGFIDPRKVNVEMIDKFPKDTEDNLIHLLMKQHYKTKILLPYNTEVNVYDSMNKKVSTFDQVFELIDRAWDRFRQLVRGTWKEKLSRRFNFPVIHMRDNLTHKEFIAAVREQLMGFINEQVLDPEGEFYYDGSTIHKSLSSEITPTSKP

SEQ ID NO: 146404 - protein, 101 aa, Oryza sativa
  Clone ID: PAT_MRT4530_47031C.1.pep
MHAVYGKLVYSELILVSFGMCYTNAEIREKHKLELENLTLTKHPFRTLRFFMLAMLQYLKRLATYILSKGALFVVLIVLVLAPGILLAVTDGLHKKVCYFL

SEQ ID NO: 146405 - protein, 1792 aa, Oryza sativa
  unsure (1)..(1792): unsure at all Xaa locations
  Clone ID: PAT_MRT4530_47032C.1.pep
MDRQWMYADWRSKEFIDGVHYFLRVAEANKHKGFICCPCNKCKNQKKYSASMTMHFLLFESRFMPSYNCWTSHGEKGVEMEEDEVEDKSIPDWAQYAGFEGNQMGEVDRNADDNDVVDDLGQMLQDAKEDCESEKEAHKLGRMLEDHRTSLYLGCEQGHKKLDTTLEFLQWKXKNGVSDKAFCDLLKLVNNILPEGNKLPETTYEAKKIVCPLGLEVQKIHTCPNDCILYRGEEYENLEACPVCKALRYKIRRDDSGEVDGQPTKKRIPAKVMWYFPIIPWLRRLFRNXGNARMMRWYAEERQQDGMLRHPADGSQXRNIDRTFKVFGKDAXNIRFGLSTNSMNPFEEMSSGHSTWSVTMCIYNXPPWLCMKRKYITMSIIIQGPKQPGNDIDVYLRPLVEDLKLLWKKEGVPMWDEDKQEEFNLRALLFVTINDRPTLSNLLSGQSNKGYKACTHCMDETESVYGKSKDTLEARSDLKHIEQRGDLHPEPKEKGSHYLSPTSYTLSKAEKESMIECLESIKVPFGYSTNTKRIISTKEKKFTNLKSHDCHVLMIQLLPVIIRGILPDNVQATITKLCAFMNAISQKVIDPDRLEALQNDVRYMGVLKKYIRNHARPEASIAKGYGTXEVIEFCVEFIEVLRLIGIPESRHEGRLRGKGTLGRKAIMTVENNLFHKAHFMFLQXSSLVAPYIEEHLALVRARNIGKSDAWITRHHIDTFPTWLRQHLMGNETINQQLAFLARGPSGXIATFQGYEINGYTFYTRAQDMKGTNQNNVVRIDTIGHDGTTGAYYGAIEDIXELDYGPLKVPLFQCQWVRLTGGGVTIDDSGMTAVDLNKVGYLDKPFVLANDVTQVFYVTDMSSKGKKGKGPYEPKRHVVLLGKRKIVGAEDKTDEDYDQFDGQPPFTVTIDPSILLSNEDTPYSRSDHKEGVIEGNKEGNVERDAEGNEEGNEEEEASGSQHSARQKRARGQQGAAKKIEGXHIITEVDEDGRPSAPAEAAKNFVRHSGWVLRDNVPVSKVYWRRTRERGDYDSFVPESEKEMLWTTXLETFTLPAGTENIVKQWTLKKMAEQFQSFKGDLYKKYILKGLTPNFDVFPKLWDHWDEFVAYKTGQQGQAMMDRNKXNAAKTKYHHHLGSGGYSIAMPKWEEMEASLIEKGIEPATAKWPDRSKFWYYAHGGMLNLVNGSLVFSDHIREAASXLTDAVEASSQGTFRPDRENDKLSRMRSKRDTEAKIADLEYRVSSYKLSMQEEMARKVDERMAAHRSQDPQPYIPPVMVSPSGNSSSCASTGQVGSQSMDAMQTQAAYSLKKLINQGMLVLLXLVEAAYEDLELDYPRGDGETHLRDISHAIILWRKRYIILPGRQAASRAPSPPVPPPPPPAPSPLAPLPPLCPPAPPKTRSRQAPPPTRTRATKKAKVDATKNKEPPYDCSQEELDAYVVEEVKRXLKPRSPKKKIPIDPSVKNFFKGMPTTNKEVLKLSDYDRTLKKAYYKKSKPVPXHGEQPNQEVEPLVTGEEFGITXFISDTGLTLDQLIGGAPIPKAEVAYKFKLGKSLVTPEQLQSLPTQMXKFHERYMEMSAKGREMFGARISNSDFLQGEGVLWIHFKDVFELYHLDALEVSVLRAWILMEIQRARRRGVYDTGFIDPRKINTEMINKYEKDTEDNLVHLLTQXHFKTFILLSYNTEVTVYDSMNKEEWTFDKVFQLIDRAWDRFRQLVXRTWKEKLGQRFHFPRIHMRENLPHKDFITAVQEQLMGFINEEVLNPEGEFYYDGSTIHNVGPFSSDITLTSKS

SEQ ID NO: 146406 - protein, 1773 aa, Oryza sativa
  unsure (1)..(1773): unsure at all Xaa locations
  Clone ID: PAT_MRT4530_47033C.1.pep
MDQQWMYADRRSKEFIEGVHYFLRVAKANKRNGFICCPCNKCKNQKEYSVSRTIYFHLFKSGFMPSYNCWTSNGEQGVEVEEDEAEDENIPDWAPYAGFEGNXMGEVDRDAGDNDAADDLGQMLQDAKEDCESEKEAHKLERMLEDHRTSLYPGCEQGXKKLDTTLEFLQWKAKNGVSDKAFGDLLKLIKNILPEGNKLPETTYEAKKIVCPLGLEVQKIHACPNDCILYRAEEYENLEACPVLKALRYKIRREDPGEVDGQPTKKRIPAKVMWYFPIIPGLRRLFRNKGNARMMRWHAEEHQQDGILRHPADGSQWQNIDRKFKDFGKYTRNIRFGLSTDGMNPFGEMSSGHSSWPVTMCIYNLLPWLCMKRKYIMMPIIIQGPKQPGNDIDVYIRPLVEDLKLLWKKEGVPVWDEDKQEEFNLRALLFVTINDWPTLSNLSGQSNKGYKACTHCMDETESVYGKSKDTLEARNDLKHMVQRGDLHPEPKEKGIHYLSPASXTLSKAEKESMFECLESIKVPSGYSTNIKRIISTKENKFTNLKSHDCHMLMTQLLPVIIRGILPDNVRAKITKLCFMNGISQKVIDPDRLEALQNDVRYMGVLKKYVRNRARPEASIAKGYGXFIEDLRPIGVPESRHEGRLRGKGTLGRKAIMTVDNNLFRKAHFTVLQHFSLVTPYIEEHLALVCTKNIGKYDAWITRHHIDTFPAWMRQHLMGNETINQQLAFLARGPSGSIATFQGYEINGFTFYTRAQDMKSMNHNGAVRIDAMGHDGTTGTYYGAIEDKWELDHGPLKVPLFRCQWVRLTGGGVTIDDSGMTTVDLNKVGYSDEPFVLANDVTQVFYVKDMSSKEKKGKGPDEPKRHVVLLGKRKIVGVEDKTDEDYDQFFGQPPFTVTIDLSILLSNEDTPYSRSDHKEGTIYLNEERNVERDVEGNEEEEASGSQPSAGQKRARGQRGAAKKLEGRHIITEVDEDGRPSAPAEVAKKYIRHNGWVVRDNVPISTVYWRRTRARGDHENFVPDSEKEMLWTTMLETFTLPAGTENIVKRWTLKKMAEXFXSFKGDLYQKYILKGLTPNFNTFPKLRDHWDEFVAYKAGQQGQAMMDRNKENATKKKYHHHLGSGGYSIAMPKWEEMEASLVERGIEPATGKWPDRSKFWCYAHGGTLNLVDGSLAFSDQIRKAASRLTDAVEASSQGTFRPDREKEGKGRMRSKRDTEAKIADLEYRISSYELSMQEEVARKVDERMATHRSQDLQPYIPPAMVSPSGNRSSCASTGQVASGMAIPTDPSGTYHCRPIPAGYSKVKVELVQAVYEDLELDYPGGGGETHLRDTSHAIILXRKRYIILPGRQAVSRAPSPPALPSPPQAPAPSPPQAPTPSPPXAPPAPFKSRSHQAPPPARTRATKKAKVDAAENKPPPYDCMQEELDAYVAAEVKRQLKPRSSEKKIPIDPTARKFFRGMSAPAKEAIKLSDYERTLKKTYSGKSKPVPQLGEQPNQEVEPLVTGEEFGIKEFISDTGLTTDQLLRGAPIPKAEVKYKYELGKPLVKPEQLQSLPTQMYKFHKLYMEMSDTGREMIXQDILWINFKGIYEVYQLDALDVCIMSCWILLEIQRARWRGVFDNGFIDPRKVNVSMIDKYPQATEDNLVYFLKAQHYKTYILLPYNTQVNVYDSMDKKESTFDQVFELIGRAWYRFHHLVHGNWKEKLRRKFKFPVIRMRDNLTHKEFIAAVQEQLMEFINEKVLDPKGEFYYDGNTIHRSGFSTSDINPLRKKKQ

SEQ ID NO: 146407 - protein, 1100 aa, Oryza sativa
  unsure (1)..(1100): unsure at all Xaa locations
  Clone ID: PAT_MRT4530_47034C.1.pep
MDRQWMYADRRSKEFIDGVHYFLRVAEANKHKGFICCPCNKCKNQKEYSASRTIHFHLFESGLMPSYNCWTSHGEQGVEMEEDEVEDENIPNWAQYAGFEGNQTGEVDRDADDNDVVDDIGQMLQEAKEDCESEKKAHKLERMLEDHKTSLYPGCEQGHKKLDTTLEFLQWKAKNGVSDKAFGDFLKLVKNILPKGNKLPKTTYKAKKIVCPLGLEVQKIHACPNDCILYRGEEYENLEACPVCKALRYRIRRDDLGEVDGQPMKKRIPAKVMWYFPIIPRLRRLFKNKGNARMMRWHAEERQXDGMLRHPADGSQWRNIDRTFKDYGKDARNIRFGLSTDGMNPFGEMSSGHSTWPVTMCIYNLPPWLCRKRKYIMMPIIIQGPKQPGNNIDVYLRPLGEDLILLWKKEGVLVRDEDKQEEFNLRALLSVTINDWPALSNLSGQSNKGYKACTHCMDETESMYLKHCRKVVYMGHRQFLAANHPVRKKGKHFEHKADHHTKPKHRSGKIVFAMVKDLNVVFGKGPGSQPIESEDGHAAMWKKNSIFWELPYWEFLDVRHAIDVMHLTKNLCVNLLGFLGVYGKSKDTLEARNDLKHMEQRGDLHPEPKDKGCHYLSPASYTLSKAEKESMFECLESIKVPSRYSTNIKRIISTKEKKFANLKSHDYHVLMTQLLPVIIRGILPDNVRVTITKLCAFMNVISQKVIDPDRLEALQNDVLQCLVSFELIFSPSFFNIMTHLLCHLVKEIGILGPVYLHNMFPFERYMGIPKKYIRNRARPEASIAKGYGTEEVIEFCVEFIENLRPIGVPKSRHEGRXRGKRTLGRKAIMTVDNNLFRKAHFTVLQQSSLVAPYIEEHLALVRARNIGKSDAWITRHHIDTFPAWLRQHLMGNETINQQLAFLARGPFGSIATFQGYEINGYTFYTREQDIKSTNQNSDVRIDAMGHDGITGTYYGAIEDIWELDYEPLKVPLFRCQWVRLTGGGVTIDDSRMTTVDLNKVGYSDEAFVLANDVTQVLYVKDMSSKGKKGKGPDEPKRHVVLRSKRKIVGRRISGVRRALSLSLQTAIDAHAAAAAAAAPRRHRRASTPRAAPADGHAAAR

SEQ ID NO: 146408 - protein, 463 aa, Oryza sativa
  Clone ID: PAT_MRT4530_47035C.1.pep
IGFKEDIHMYRSRMRSERDTEAKIADLKYRVSSYELSMQEEVARKVDERMAAHQSHDPQPTIPPAMVSPSGNCSSCASTGQVASGMAIPTDRSGTYHCRLIPAGYSKVEVELVEGAYEDLELDYPGGDGETHLRDTSHAIILWRKWYIILPGRQAVSRAPSPPAPPSPPQAPAPTPPQAPAPAPSKSRALQAPPPAPTRATKKAKVDAAKNKDPGYDCTQEELDTYVASEVRRQLKPRSPEKKIPIDPSARNFFRGMSTPAKEAIKLSDYERTLKKASSGKSKPVPQLGEQPNQEIEPLVTGEDFGIQEFINDTGLTTDQLLRGAPIERAEVKYMYELGKPLVKPEQLQSLPTQMYKFHQLYMEMSATGREMIGARIRDTDFLQGDDILWINFKAGAAAPSLPRLPGHVAHVATHARVPRAHSLSLPPALRSRRPGFEFLPTSPHSAGEIAAIPATIDPRGCI

SEQ ID NO: 146409 - protein, 1926 aa, Oryza sativa
  unsure (1)..(1926): unsure at all Xaa locations
  Clone ID: PAT_MRT4530_47036C.1.pep
MDRQWMYADRRFKEFIEGVHYFLRVAEANKRNDFICCPCNKCKIQKKYSASRTIHFHLFESGFMPSYNCWTSHSEQGVEMEEDEAQDENIPNWAQYARFEGNQTGEVDRDAGDNDAVDDLGQMLQDAKEDCESEKEAHKLERMLEDHRTSLYPGYEQGHKKLDTTLEFLQWKAKNGVSDKAFGDLLKLVKIILPEGNKLPETTYDAKKIVCPLGLEVQKIHACLNDCILYRGEEYKNLEACPICKALQYKIRREDPGEVDGQPTKNIISAKVMWNFPIIRRLRRLFRNKGNARMMRWHAEERQQDGMLRHPADGSQWRNIDRKFKDFGKDARNIRFGLSTDGMNLFGEMSSGHSTWPVTMCIYNLPPWLCMNRKYIMMPIIIQGPKQPGNDIDVYLRPLVEDLKLLWKKEGVPVWDEDKQEEFNLRALLFVTINDWPALGNLSGQSNNGYKVCTHCMDETESTYLKHCRKVVYMGHRRFLAANHPVRKKGKHFEHKADYRKKTKHRSGKTVFAMVKDLKVVFGKGPXEALQNDVVQCLVSFELIFPPSFFNIMTHLLCHLVKKIGILGPVYLHNMFPFERYMGVLKKYVRNRARPEASIAKGYGTEEVIEFCVEFIEDLRLIGVPESHHEGRLRGKGTLGRKAIMTVDNNLFRKTHFTALQQSSLVAPYIEEHLGLVRARNIGKSDAWITRHHIDTFPAWLRRHLMGNETINQQLAFLVRGPSGSIATFQGYEINGYTFYTRAQDMKSTNQNNAVRIDAMGHDGTTGTYYGAIKDIWELDYGPLKVPLFXCQWVRLTGGGVTIDDSGMTTVDKVGYSDEPFVLANDVTQVFYVKDMSSKGKKGKGPDEPKRHVVLPVRHRLLHQHLEDFSPISASPSPPQPRASPRRXAIVSRRRLAVIVVAAAANVAAASLSISISISLSKPXRLVADAAADDAADPDSASWNDRELNENEREXKRERNVNEREXNVNEIVYVERDAEGNEEXEASGSQPSAGQKRARGQXGAAKKLEGRHITTEVDEDGRPSAPAEAAKNXVRHSGWVVWDNVPVSTVYWRRTWARGDHDSLVPDSEKEMMWTTMLERFTLPTGTENIVKRWTLKKMAEQFQRFKGDLYQKYILMGQTPNVNTFLKLRDHXDEFVAYKTGKQGQAMMDRKKENAAKKKYHHHLGSSGYSVVMPKWEEMEASLVERGIEPATAKWPDRSKFWYYAHGGTLNPVDGSLVFSDQIHEAASRLTNAVEASSQGTFRPDREKDELSLNLQTPEHPGRTRGKGVIPWKIGFKENIHTYRSRMRSKRDTEAKIADLXYRVSSYELSMQEEVARKVDERMAAHRSQDPXPYIPPAMVSPSGNHSSCASTGQVGSQSMDAMQTQDETTCPVDEITQRTPCELHIPFKNLSIKVASGMAIPTDPSGTYHYRPIPVRYSKVEVELVEAAYEDFELDYPGGDGETHLRDTSHAIILWRKQYIILPGRQAASRAPSPPQAPAPSLPQAPAPTPHQAPAPTLPQAPPTQASTVTPQAPAPTPPQAPRPAPSKSRSHQAPPPARTRATKKAKVDAAGNKQPAYDCTQEELESYVAAEVKRXLKPQITEKKIPIDPSVRNFFRGMSAPAKEAIKLSDYDRTLKKAYSAKSKPVPQLGEQPNQEVEPLVTGEEIGIKDFISDTGLTTDQFLRGAPIPKAEVKYKYELGKPLVKPEQLQSLPTQIYKFHQPYVEMSATGREMIGARIRDMDFLQGEDILWINFKGIYELYELDALDVSIMSCWILMDIQRARRRGVFXTGFIDPRKINVAMIDKYPQATEDNLVHLLKEQHYKTFVLLPYNTQFHWVLLLFDLEACVVNVYDSMDKKESTFDQVFEHIDMAWYRFCHLVRGNWKEKLRRKFKFYVIRMRDNSXHKEFIAAVQEQLMGFINEQVLDPXGEFYYDGNTIHRSLA

SEQ ID NO: 146410 - protein, 1067 aa, Oryza sativa
  unsure (1)..(1067): unsure at all Xaa locations
  Clone ID: PAT_MRT4530_47037C.1.pep
MDLQWMYIDWRSKEFIEGVHYFLRVAEANKXYGFICCPCNKCKNQKEYSASRTIHFHLFESGFMLSYNCWTSHGEQGVEMEEDEVEDENIPNWAQYVGYEGNQMGEVDRDAGDNNAADDLGQMLQDAKEDCEGEKEAHKLERMLEDHRTSLYPGCEQGHKKLDTTLEFLQWXAKNGVSDKAFGDLLKLVKNILPEGNKLPETMYEAKKIVCPLGLEVQKIHTCPNDCILYRGEEYENLEACPVCKALRYKIRREDPGEVDGQPTKKRITAKVMWYFPIIPRLRRLFRNMGNARMMRWHAEERQQDGMLRHLADGSQWXNIDRKFKDFEKDARNIRFGLSTDGMNPFGEMSSGYSSWPITMCIYNLPPWLCMKRKYIMMPIIIQGPKQPGNDIDVYLRPLVEDIKLLWKKEDVPVWDEDKQEEFYLRALLFVTINDWPALSNLSGQSNKGYKACTHCMDEIESTNLKHCRKVVYMGRHRFLATNHQVQKKGKHFEHKADHRTKPKHCSGKTVFAMVKDLKVVFGKGPGNQPIESKDGHAAMWKKNSIFWELPCWGFLDVRHAIDVMHLTKNLSVNLLGFLGVYGKSKDTLEARNDLKCMEQRGDLHPEPKEKGSHYFSPASYTLSKAEKESMFECLESIKVPSGYSTNIKRIISTKDKKFTNLKSHDCHVLMTQLLPVVIRGILPDNVRATITKLCAFMNAISQKVIDPDRLEALQNDVVQCLVSFELIFPPLFFNIMTHLLCHLVKEIGILGPVYLHNMFPFERYIGVLKKYVRNRARPEASIAKGYGTKEVIKFCVKFIXDLRLIGVPESRHEGRLRGKGTLGRKAIMTVDNNLFRKAHFTVLQXSSLVAPYIEEHLALVRAGNIGKSDARITRHHIDTFPAWLRQHLMGNETINQXLAFLARGPSGXATFQGYDINGYTFYTRAQDMKSTNQNSVVRIDAMGHDGTTGTYYGAIEDIWELDYGPLKVPLFRCQWVRLTSGDVTIDESGMTTVDLNKVGYLDEPFVVANDVMQVIYVKDMSSKGRKGKGPDEPKRHVVLPGKRKIVHQHLEVFSPIDLGFSFAATA

SEQ ID NO: 146411 - protein, 121 aa, Oryza sativa
  Clone ID: PAT_MRT4530_47038C.1.pep
MWVGNGRPRVTVEVNEGEDMPRSEVAGGFKSSGLIDVRHDEPDGMAPPVDLVDLPSHPVHCRMHWQSHGGGSCQQEEQEQWQMAPRQRSEGKGLPAIAKQPSVVEVTATVQPPATAPLHQW

SEQ ID NO: 146412 - protein, 343 aa, Oryza sativa
  Clone ID: PAT_MRT4530_47039C.1.pep
MAMELSNLTRCHLPLLLLFLLAGSSSMALPVHPAMDRVRWQVDKVNRRGHSIGLVMSYIDEATALESSGYFRPWHVLPFVDLYGRRYHIGSIRGVNVIYALTGQRRLNAAVTVQTLIDVFTVSGIVHYGTAGSSNDSMSFGDVSVPKFVAYTSAWTWKKFKSPKESDTELSFGDFTVPNGGENLLGALKFRNEELYSVGKPMKEVFWLPVDSAWFKIAEGLKVSLERCNDTFCLPTTPKVVCGLKGSSADMFLDNAEYRKFLFREFGVSTVDEESAAVVMTTTSPGIPVIVFRGVSDLAGGEPTWSSTSLMNLASINALKVAVEFIATVGKQKSTMSAGSANN

SEQ ID NO: 146413 - protein, 71 aa, Oryza sativa
  Clone ID: PAT_MRT4530_4703C.1.pep
VSKLDSCCSDIKNIGKSFYIKTGLAFTYHRATCSSIVPCTAGWAFNNTVDREKLPQQLEVELWIPQVEAMA

SEQ ID NO: 146414 - protein, 108 aa, Oryza sativa
  unsure (1)..(108): unsure at all Xaa locations
  Clone ID: PAT_MRT4530_47040C.1.pep
PQANGRNPSRAXRPKPKXRRQGAAAXXXXXXXXEHGGAAPALLFSRSSSGRRRAAAPLHILLPVRALARGGVRRRRAVVLRPRSRLPSPSLARGVEDGRRHGMTPARV

SEQ ID NO: 146415 - protein, 103 aa, Oryza sativa
  unsure (1)..(103): unsure at all Xaa locations
  Clone ID: PAT_MRT4530_47041C.1.pep
GDTCRPDIESIGVRWYKNLRNTTSNKQKTKIILVQAPXEVIALIQLVWDYMMGITGYKGNXELDGSGEIVIEQAVGVMLALRFDPLGPPXGGPFYITGRAVSK

SEQ ID NO: 146416 - protein, 134 aa, Oryza sativa
  Clone ID: PAT_MRT4530_47042C.1.pep
MAVATDPGCDWQQRIDDDGEMQWMSRFVLEATLVKSIQLPQGNKRKYFAKAQQSVRKDVEQAFGVLQARFAISRCGVCSHGIKTGIAAVFTAECKATTSRRGTTAISWAVEAACSPSGLGTPPAASTSLPAWER

SEQ ID NO: 146417 - protein, 138 aa, Oryza sativa
  unsure (1)..(138): unsure at all Xaa locations
  Clone ID: PAT_MRT4530_47043C.1.pep
SLRSTLTGRIMTLEVESWDTIDMVKAQXSMDKEGIRPDQQCLMFAGKQLEDGRTLSEYNIQMEFTLHLALMLTGGMQIFHKTLTGKTITLEVELSDTIDNVMAKIQDKEGIPPDQHGLIFTGEQLEDGRTLPDYNIQK

SEQ ID NO: 146418 - protein, 124 aa, Oryza sativa
  Clone ID: PAT_MRT4530_47044C.1.pep
MPLAVAMKREREGEGESGEDRVHGAGDLAERRWQRKEDKTAMRGDNSSIMKSTGGEEDGDASDEENPSSFLLPGQTHGLQVWNDGEPNNPLNPTLTCASVRLWAPAVRLWGPGQRLDRDATVAQ

SEQ ID NO: 146419 - protein, 524 aa, Oryza sativa
  unsure (1)..(524): unsure at all Xaa locations
  Clone ID: PAT_MRT4530_47045C.1.pep
MASRDLAESLLPVGGGAATATATATAHDEYDERAYDSDDKVSIAVSDSDSEDGGGGGGDAMRPAFSWRKLWRFTGPGFLMCIAFLDPGNLEGDLQAGAAAGYQLLWLLLWATVMGALVQLLSARLGVATGKHLAELCREEYPPWATRALWAMTELALVGADIQEVIGSAIAIKILSAGTVPLWGGVVITAFDCFIFLFLENYGVRKLEAFFGVLIAVMAVSFAIMFGETKPSGKELLIGLVVPKLSSRTIKQAVGIVGCIIMPHNVFLHSALVQSRKIDTNKKSRVQEAVFYYNIESILALIVSFFINICVTTVFAKGFYGSEQADGIGLENAGQYLQQKYGTAFFPILYIWAIGLLASGQSSTITGTYAGQFVMGGFLNLRLKKWLRAMITRSFAIIPTMIVALFFDTEDPTMDILNEALNVLQSIQIPFALIPLITLVSKEQVMGSFVVGPITKVMXWIVTVFLMLINGYLILSFYATEVRGALVRSSLCVVLAVYLAFIVYLIMQNTSLYSRLRSAMTKST

SEQ ID NO: 146420 - protein, 258 aa, Oryza sativa
  unsure (1)..(258): unsure at all Xaa locations
  Clone ID: PAT_MRT4530_47046C.1.pep
TLYESQISDIPQVSQLENNSLVDEFTENEIKDAISQMEHNKATGPDGFSAKFYQVFWNVIKPGLVDLFKDFHRSLNLXSLNFGTIILLPKCKEAIKIQQYRPICLLNANFKIFTKVATNTISGVAQKVISPTXIPFIPGRNITKGVVILHETVHELHQKKNEWXVFKIDFEKAYDKVEWSSCVQQTLRMMGFLQKWCDWIASFIQGGHIGIKVNNQVGAIFQTLVHLVDDCLSILQYTDGTIIFHEHDLEKAKNMKLL

SEQ ID NO: 146421 - protein, 54 aa, Oryza sativa
  Clone ID: PAT_MRT4530_47047C.1.pep
IGCSPIYEYEYIYKYIYIYMFKQSYYDSYRSDKYYSPCIIPTTTACNQVLFSPM

SEQ ID NO: 146422 - protein, 559 aa, Oryza sativa
  Clone ID: PAT_MRT4530_47048C.1.pep
SAEVARSREGKMSEDSPATSPSGLSHIALLQTPSMEEDEEEDSELLVVDMEMTGEDELLSLNGGGVGHEGQFCLITRWRSENDFENTQKGQNGKVANNHVKIAVVADPQLMDSTSLGLPPSSIALQAAEFYTDLNMRRSFQSVVLPFKPDMLLFLGDHFDGGPYMSNEEWHESLSRFKHIFSMNEHITNPNIPIYYLSGNHDIGYSAFHKIHPEVISRYEKEFGSRNYQFLAGKVDFVVVDAQTLDAKELLIYAAGAKESKERSSSWEFIKALSPGNKTNPKVLLTHIPLYRPDNSPCGPHRSSPVINQRVSNAAMDQGITYQNYLSKETSDLLLHLLKPVLVLSGHDHDQCTVVHPTPFGPVTEVRKFKLYAAICFKFASHEMINAAAYPWYIFQFVVTLLLLILWPTNGLRSLPYVNSFVSFMRSVAAELFSRTKEKDDEEDGEYEMVWDAEGSMHLVKKAVARTPSTSSDSRTTGRGNVVARPTARKNQPEPDSSVLVEMSSEMISEDGGKVPRSSKLKIRRVLQRLFRVIQSIVVIAALNVPLYMMLLFKDWIDR

SEQ ID NO: 146423 - protein, 169 aa, Oryza sativa
  unsure (1)..(169): unsure at all Xaa locations
  Clone ID: PAT_MRT4530_47049C.1.pep
RGSPMASPVTEAKGDAMERQQQLLASLAGEGGGEGRCGEAAAAASELERKPPLPRGHLGDLASAFVVPYGGGGQGQPPPARPRGCRRRRRRRFVYKHRRVLHLDDLASASSSIPAIDIGTLVGVGVRHPGHRHGRHHRXASSSADRASSSAVWRSCISLRCGVAMPASP

SEQ ID NO: 146424 - protein, 788 aa, Oryza sativa
  unsure (1)..(788): unsure at all Xaa locations
  Clone ID: PAT_MRT4530_4704C.1.pep
MPLTSAQGGGGVGVMESGGKRHFFPLTSLQIGDLQSYLAELTIFLCPHTKKFLILLDNRPWLQDQDTKPAHLWQLMVTKSRLSPFANTRTRRKGDETGKKLVFSKDPRHGSHLWNPSSRWYTLIDDAMRNKKLHVNRLKDSRLLNKELHRTLYGFIIFEVDWADVRGMNYFNELQTDTSMAVEAKTMKRWEFESVNQASSLITSWFSGNYSECQLLQDYLNSISPKDHLYACCTGNVFYDAQNYFSTPEGDSENVQSDDDDSGPSQCMRESSSFTSSSYTPPPCSGPYKRRKIIRSDAGYNMTVESYSEXSPDENIEVFYLPPAAKMMIVERICSTLTHIWQVTTSFXEPMALDIKRINLIIHTRSTGXPSKTTCLELEESCTGLYRMFHHVAIIXVLSGFYDLYKNVPMLKATASRLFGPFFDWIETWEMISRLKYLGTMLFLHNFQQAFTWSLXLLTATKSALSVLTKPIMGPILEVLEFTLPLWNLCAETVGHLSSVIMLAMETSCSVVISTMQMIIWPFWLVFSVVLNVANSVLYPFVWLLGEILAAPFRLVVAIASFVADSFVDIVGVLRETWSTLSSLYQVGSASGSTGLASETTIWGSLWKDLLYQIFRAIRSILYGFVAFFSTCNRHRLSIYNHIQVFLRRLSRVLTGAQHTTSCEGTRRYSSQNHPMLSYVELRNVYRINKGKLTRDNSGPGNLTCQESFDVMEKLEKFEQETFTNTEAYPVDWTDLQNNLLGIGRVMYRFIPNVSSHSFNHVSYLYQRASSETKRRNCTYAESVVCSF

SEQ ID NO: 146425 - protein, 80 aa, Oryza sativa
  unsure (1)..(80): unsure at all Xaa locations
  Clone ID: PAT_MRT4530_47050C.1.pep
HESATPIDETSTDEHNDGNIFPYLHVNIGSGVRVIEVIGYGKFERIIGSYLGGGTILGLARLSTXCXXYDEXLEXSQKRN

SEQ ID NO: 146426 - protein, 449 aa, Oryza sativa
  Clone ID: PAT_MRT4530_47051C.1.pep
MVFRKLLHQTGREIRREVNLKVLKVPEIEQKVLDATSDEPWGPHGSDLADIARATKSYGDSEIIMNVLWQRLGNTLANWRHVYKALAVIEYLLANGTERAADGIVDNSSRIAKLTRFEYLEPNGKDVGLNVRKKAEAVLAILDDREKLQEVREKAAVTRDNGSYSSGSHYGSTGGSREVGSFKDIHTGTEWKKNKKETVSNYSSNREGLSSADSFTSDTEFSVREFSVHDPTSKSSQGKTPTPEHSSTAAFDPFAAIPLKSFDGSESFGTFSSNTASNITELPRDSSGGPKSSDHGPLEDANFDAFTSHLGSSTTSATESMNKPIKKLGQDSMSASKSVAKKETFQVKSGIWADSLSRGLIDLNITSSQKKVDLSDVGIVGPLSGGSEDKGPGATMGTAPGLASLSTLPLRSATLPVSERACRAGGRVLLALSRSRFAGVGGGGGDGKP

SEQ ID NO: 146427 - protein, 109 aa, Oryza sativa
  Clone ID: PAT_MRT4530_47052C.1.pep
FFFFFFKEKTKPLCLSNFYRNHAQKNYTYLTHQKNLQTTGPMSLFELQGIDQTPFMKNYKCSHVWQSYKKLYTKHFDVLSKARTMFRSKKRMTTMIVQIKLRQCMCLGK

SEQ ID NO: 146428 - protein, 308 aa, Oryza sativa
  Clone ID: PAT_MRT4530_47053C.1.pep
MAGCLEYAPRHDAKRSKTIIIPSTELVRTRIIASARGGCGPSAPKAGPTRQPKGKGGAPWTGTTGWSTGGAPKVAEGVGWLASPPGKTAAADGRTPAGDGGTTRRRTREAEGKRGGGRRPHRAPGGEGRRARRRAPRDDGGTALPWRLHGRDAADEGGRDLGMEGEGLGGGEVAHGGVIRRPEMRGDGRCSPQAKGTEFRRRLTKREGWPSCGSTPRRRRGCRRCRTWLRAPEASGWRHQTQHRPRVHGGGGVSVMIGGGGVDGKRQGMAKPVGPTVACGGGGQLEAVEAAVARVGGGSGAQGVERGK

SEQ ID NO: 146429 - protein, 76 aa, Oryza sativa
  Clone ID: PAT_MRT4530_47054C.1.pep
MGESSYYGNGCGYCYGGGGACRCGSCAGGNKPMAGGYYGVASVMASYDHQGWYYGNWQPGYQQKQCYEVPNAGCSM

SEQ ID NO: 146430 - protein, 67 aa, Oryza sativa
  Clone ID: PAT_MRT4530_47055C.1.pep
GLNPSFSELCEGSDPGLFGYPKGGGFGLAPPSQVGPPPGLRFWGGGVPFLNLTFFAKNKIESVVVLF

SEQ ID NO: 146431 - protein, 339 aa, Oryza sativa
  Clone ID: PAT_MRT4530_47056C.1.pep
MLVRSASTPVLGALLPSGSHSPAVSSPAVHFFADSSPTVSYHPPTISCRLTPGGSDAHDRSLGGLRRACSDGNLASLGASGDDDHHHHLPPSGKCAPRSKPTTLETIQSFTQRGGASTDEEEEEDDDDGDHESAEQELSFGKFRFSGSSTFAQVEHPLFLARGLGIDRLGSGLLSADGGSGGSDGGGGGGAGGSYLVTSDNGGNRSDIEMHYKKMIEEDPCNGLFLRNYAQFLYQIKGDSRKAEEYYSRAILADPNDGELLSEYAKLVWDVHRDEDRASSYFERAARASPQNSHVLAAHAAFLWDTDDGDGPEGSSSDALGYAGFAAAAAHSSLASATT

SEQ ID NO: 146432 - protein, 57 aa, Oryza sativa
  unsure (1)..(57): unsure at all Xaa locations
  Clone ID: PAT_MRT4530_47057C.1.pep
ANQVVKEVEEAKKGVPXGFGRINGFEKVRQVQVIRFIGXKPPGCEEFGGKLSGHGNI

SEQ ID NO: 146433 - protein, 130 aa, Oryza sativa
  Clone ID: PAT_MRT4530_47058C.1.pep
MRRRACSRLHREPPAASVDAPPACSRLHREPSSARRREPPSPPPSVDHGFGLSPVSYDSDDARDGEIIAPSWLTGAGTVKYFHHGDGDASMTPDEQDATNIEKLVACDNPPKNAGVDLTLYRLSSTSNSG

SEQ ID NO: 146434 - protein, 130 aa, Oryza sativa
  unsure (1)..(130): unsure at all Xaa locations
  Clone ID: PAT_MRT4530_47059C.1.pep
MYYLRYNCLASLTGRCIGVGIMFIRMIALSHDDDCRVVFGSISEVLRLLNIIIWGYMLRVSRGGPLIVIAQYKYSSILVYNPKLLFXGGYFSVFSTGWMAIMGCRKKLGNQEWSLETPGGHLQENASSLP

SEQ ID NO: 146435 - protein, 252 aa, Oryza sativa
  Clone ID: PAT_MRT4530_4705C.1.pep
MNQCVPSWDLDDPVGGGGIGGGGGGGHRVVSGGGGGFMPVAVPTSDQYNEVAELTWEKGNISSHGLLLNRPAPPKFPPHQQLQAAMGGGGGGGVVGDRETLEAVVGEAAARSSSSSHLAARARPVPAPWLGSVGVVAAADALVPCDADAAEGRSKRPREVVGEDGRRACASQGSAAPGRRGESTLLTLDACCGTAADDVCGFTTTTNNSTSLEDRTEDKGSPETENTSIAGGASDSRCFSRRSQSQASTDSS

SEQ ID NO: 146436 - protein, 51 aa, Oryza sativa
  unsure (1)..(51): unsure at all Xaa locations
  Clone ID: PAT_MRT4530_47060C.1.pep
DILRAGPTALSLETNHLQMSHQTTITGFXNISPYMGGGFSXFXLDDIYSKL

SEQ ID NO: 146437 - protein, 96 aa, Oryza sativa
  Clone ID: PAT_MRT4530_47061C.1.pep
MRESEKATYAQLAHRSHAREPTAIPLALSLAYSAILTALSLAHRARPLRDPRASDGPRRYGLTRADRDTAHAIAHSKCETASWPECVRRRRPAGPR

SEQ ID NO: 146438 - protein, 423 aa, Oryza sativa
  Clone ID: PAT_MRT4530_47062C.1.pep
MAVDVLLCAVPIWAAVMIGLVIGWAWRPRWTGLLYLGFRSRLRLLYVPPGLGARRLWLACTALSAFSVAPRLLSTAFGSRGKHQRKDAALADDDDAADASGDAGDCVDGRTFFEGGHHVVTEKDLEHLVQLLDNKESGDTTWQHLMERTTSNMTYKAWRREPEVGPIMYCSRTIFEDATPELVRDFFWDDEFRLKWDPMLAYFKILEEFPQNGTMIIHWIKKFPFFCSDREYIFGRRIWESGKTYYCVTKGVPYPALPKKEKPRRVELYFSSWRIRAVQSPKQDGQQSACEVTLVHYEDMGIPKDVAKVGVRHGMWGAVKKFQSGFRAYQQMRDTENTLSRSAIMARVTTKTSIASSSCPLDQEPSNAAKTIDESENSRAVQPGFDWKWVVFGGAVAAVCVLNTGLVGKALLIGAASRRQAKK

SEQ ID NO: 146439 - protein, 42 aa, Oryza sativa
  Clone ID: PAT_MRT4530_47063C.1.pep
ISYKGEIWGFTHINCITCQRDRKCSNKKIPLRIRYHILPLAY

SEQ ID NO: 146440 - protein, 397 aa, Oryza sativa
  unsure (1)..(397): unsure at all Xaa locations
  Clone ID: PAT_MRT4530_47064C.1.pep
MPRAVGCGVGDELHSWPRGRRAQQKWRRCPDAAAAAGGGGRAGAGEGGSGRRAQAEADAAVGGWRRQAEADATGGCGGRIPPPPRRQASPSLPPLAVDPVAACLTRCAVVAHSRRLGRRPPPPSPTTIAASCYVGSDVARHPTAAPSEEGGQGRATAAGEESGNHRSQWMPCGVAAHWRPKRASSAYQPCQPSQPKDDGAMSPPTSPLGPRLRCDLEPAAPHLRHLLRVHTCYFGLDPHRPHRRCRRRGGLRPHLFPLSGGAGAGGGFLHGAPPGSPRGMAVGTRLAVQQQQPTKTQQQRQRGIGCGGADAAGVAPPPSPRGMPMAPGPRLAIDQQPSTILAPSPTTTLQKQQGIGLGGAAAAVAPPPSPRGMPMAPXPRLAIQPASTILAPPTTTL

SEQ ID NO: 146441 - protein, 104 aa, Oryza sativa
  Clone ID: PAT_MRT4530_47065C.1.pep
AKTELVSYVSHVDRNLGLHLHRSTEPVSVITFDLFELTTFFVLLLFFWSLDYMAMMINLRLVSHNIRSCRLRAFALPGLRANAVNSFLGCLSHFLHASLFVVLL

SEQ ID NO: 146442 - protein, 88 aa, Oryza sativa
  Clone ID: PAT_MRT4530_47066C.1.pep
ISTNQYKKPNTFYIKLMCIFLLHFFCRNDRRRSFNVIKIGRKCYKKSFTSTAGCRGRMCTRAHAPNHVPLLQLLNQNNHNMQQLSIWS

SEQ ID NO: 146443 - protein, 148 aa, Oryza sativa
  unsure (1)..(148): unsure at all Xaa locations
  Clone ID: PAT_MRT4530_47067C.1.pep
VTLFDQICFRPRSSQAGPNLGWPIFGKPSQFDGPQAEQLSAAHLCGDGPMHFRGPFCAAGKTLAPKSLSPHPISLPRRACGTTAKAAMTVRLGGRANGNERRAAXTSSAGGATPXDNGGVLQDSARTGNXVTVXGGEGAVVPLPGKLW

SEQ ID NO: 146444 - protein, 36 aa, Oryza sativa
  Clone ID: PAT_MRT4530_47068C.1.pep
MEYFNIGKYIQGPVPCTHASCVNRKFNRNNTECFSL

SEQ ID NO: 146445 - protein, 53 aa, Oryza sativa
  Clone ID: PAT_MRT4530_47069C.1.pep
MARQSGNEDGRWSTAVVEAEAAEVEERRAELVVNAEVIGEEGKDRVEVGADAG

SEQ ID NO: 146446 - protein, 136 aa, Oryza sativa
  Clone ID: PAT_MRT4530_4706C.1.pep
MADNDSPVTLRTRKFIRNPLLGRKQMVVDILHPNRANISKEELREKLGSLYKAQKDQISVFGLRTQFGGGKTTGFALVYDSPEAMKKFEPQYRLVRVGLATKAERASRQQRKQRKNRQKTLRGTAKVKGAKAKKEK

SEQ ID NO: 146447 - protein, 324 aa, Oryza sativa
  Clone ID: PAT_MRT4530_47070C.1.pep
MYKNQLQELAQRSCFNLPSYACIREGPDHAPRFKATVNFNGETFESPAFCSTLRLAEHAAAEVALNELSKRGPSSSLAAKVLDETGIYKNLLQETAHRAGLKLPVYTTIRSGPGHTPVFTCTVELAGMTFTGNPGKTKKQAQKNAAMAAWSELKQLGEPSSSSCPPDHDDDDQEQIIVARTLASLNQTNGGKTPQQKEKQQSSNRPSSRRPSYPKSNASFYGRLHLQKHAYPSVPPEQAMYHMWHQVQATQQKPHFPMVPTMGSTGFPPPPTVLHMYPPPRGQFTMPSSQDAASVTIRTTIPVCSARPNVVNSSAVQQLQKKHE

SEQ ID NO: 146448 - protein, 58 aa, Oryza sativa
  Clone ID: PAT_MRT4530_47071C.1.pep
MAQEYSWYIMVIEFIRKRTDITMVAFHPRVFQGISFAHLIATFLSVSLASNITMVPNH

SEQ ID NO: 146449 - protein, 153 aa, Oryza sativa
  unsure (1)..(153): unsure at all Xaa locations
  Clone ID: PAT_MRT4530_47072C.1.pep
HFFQRFAEHSVDLPAMGLPQVNPAEEAPTPSSRPVSSPRSFEGGGACDLDGLLGGSSSSRVFEYPSIGDSDRKTALDIPNGSTEYSRDSHCFDRPAGLRGLRIDSRDADSRSSHKLDPTVHVPTMRVVGFESGSVGGSXXXETDXWXTSFRSA

SEQ ID NO: 146450 - protein, 384 aa, Oryza sativa
  Clone ID: PAT_MRT4530_47073C.1.pep
MAKLAVLLTLLALVGSVTCQGYTGNASPPTPITYPSPPSLSPSTPPTYPPPSSTPPSLAPVSPSPPTTYLPPSPTPPSPAPASPSPPSLGLRVGYYSSSCPKAEQIVKDTVKNAVYTNRGIGAGLVRLFFHDCFVEGCDASVLLDPTTANSRPEKLGVPNFPSLRGFEVIDAAKAALESACPGVVSCADVVAFAGRDAAYFLSNANIDFAMPAGRYDGRVSLADETLTNLPSPFAGLDQLKKNFADKGLDADDMVTLSGAHSIGVSHCSSFSDRLASTTSDMDAALKANLTRACNRTGDPTVVQDLKTPDKLDNQYYRNVLSRDVLFTSDAALRSSETGFSVFLNVVIPGRWESKFAAAMVKMGGIGIKTSANGEIRKNCRLVN

SEQ ID NO: 146451 - protein, 340 aa, Oryza sativa
  Clone ID: PAT_MRT4530_47074C.1.pep
MASMAANKLVVFVLLALLGSSNGDGYTSPGSIAGGLTVGHYKGTCDRAEEIVRDAVKNAIRGGRGDRGVGAGLIRLFFHDCFVQGCDASVLLDPTPASAAAPEKAGIPNLSLRGFEVIDAAKAALEGECPGVVSCADVVAFAGRDAAYLLSGNKVYFDMPAGRYDGRVSLASETLPNLPPPFAGVDRLKQMFAAKGLDTDDMVTLSGAHSIGVSHCSSFSDRLASTTSDMDPELAASLQQQCSSSSSNGGASGDNTVAQDVETPDKLDNKYYRNVVSHRVLFKSDAALLASPETRSLVSSYAESQRQWEEKFAAAMVKMGGVGVKTAADGEIRRQCRFVN

SEQ ID NO: 146452 - protein, 401 aa, Oryza sativa
  unsure (1)..(401): unsure at all Xaa locations
  Clone ID: PAT_MRT4530_47075C.1.pep
MCPFLFCTPSHFLLLLLLLLWFLESGPVTASKGRIYHETYGCQMNVNDMEIVLSIMKNXEQKVWQRLNYFWFLKRXWKANVAAGRSRSLRPPKIAVLGCMAERLKEKILDSDKMVDVVCGPDAYRDLPRLLQEVDYGQKGINTLLSLEETYADITPVRISDNSVTAFVSIMRGCNNMCSFCIVPFTRGRERSRPVSSIVREVGELWKAGVKEVMLLGQNVNSYNDTSEVEELEPGKNWELSEGFSSMCKVKNMGLRFADLLDQLSLEYPEMRFRFTSPHPKDYPDELLYLMRDRHNVCKLIHMPAQSGSSAVLERMRRGYTREAYLELVQKIRSIIPDVGLSSDFISGRSLFRDHHCMTLWSIFYLFPAFQSCNIFYKVLAMWLFISCLAASRKGDKPYMS

SEQ ID NO: 146453 - protein, 262 aa, Oryza sativa
  unsure (1)..(262): unsure at all Xaa locations
  Clone ID: PAT_MRT4530_47076C.1.pep
PTRPPTRPAAPLTAAAALRLGRGLSHRRAFLLRRRYSPAPLAPSPCAAPRCLSSAAHPPPPPPRRLARSGPSRPLAASAATAVSEAQTDLESGPVTASKGRIYHETYGCQMNVNDMEIVLSIMKNEGYDEIVPDPESAEIIFINTCAIRDNAEQKVWQRLNYFWFLKRQWKANVAAGRSRSLRPPKIAVLGCMAERLKEKILDSDKMXXDFVCGPDAYRDLPRLLQESXDMGQKGINTLLSLEETYADITQXRISDNSVTAF

SEQ ID NO: 146454 - protein, 101 aa, Oryza sativa
  unsure (1)..(101): unsure at all Xaa locations
  Clone ID: PAT_MRT4530_47077C.1.pep
MHCLCYPTSWSFNSLSFRPVILPDSACLELXIPDDAXRSNAWVSFDGQRRQPLSRGDSVHISLSQHPLPXTVNKSDPTGDWFRSLIXRCLNWNERLDQKAL

SEQ ID NO: 146455 - protein, 53 aa, Oryza sativa
  Clone ID: PAT_MRT4530_47078C.1.pep
NKAKKGECESVHNFGGGRKGSKSDSATMMPPFFCPQWHLKLETTPAVKNWGIT

SEQ ID NO: 146456 - protein, 56 aa, Oryza sativa
  Clone ID: PAT_MRT4530_47079C.1.pep
MRQWLAKMVSQQKKGDLDDSDLHGDGLGGMMVLAGWSCDTISGWRMRIFPSLIQFL

SEQ ID NO: 146457 - protein, 81 aa, Oryza sativa
  Clone ID: PAT_MRT4530_4707C.1.pep
VIAGQFYATLCFSLTNHPVTYEDDRYSKEMYETFFVLLIYEAAEFCRNAREQTFKHPIETSYQHYTEDDRYYHSYSPIQGS

SEQ ID NO: 146458 - protein, 131 aa, Oryza sativa
  Clone ID: PAT_MRT4530_47080C.1.pep
MGLPAATCPFLIVPAGGRGTLAAVVKGISGQEASPAWTTVSPGGRPLRGIGDRGAEGEARQDERHGGRRSVTAAARVGDGDMAVDGVAIGTWAVAGALAGGVDDDNAGAARPADSETRRSTTTTKCSPASR

SEQ ID NO: 146459 - protein, 85 aa, Oryza sativa
  Clone ID: PAT_MRT4530_47081C.1.pep
FLLWRRQRHHLHYSQANFHRPELVSPQIGIGLSMMEMSEGSDLLTCYCVERGDREVTTKWFPRSMVTRASVIISQEGEPETDFSW

SEQ ID NO: 146460 - protein, 446 aa, Oryza sativa
  Clone ID: PAT_MRT4530_47082C.1.pep
MTSVSDLPPELVCLIGRRLHTAINVVRFHAVCSDWRQSLRHIPPSPPPAAALLPWLPAPSSGDDADAAAGVACRCVFSKTSYHAPGLCFRDRRVAHADGTASWFINDKLVNPLTGWINVGRVKKYPWMWTDGSKGFFHCVVSGDGSLLVYRLSPRWRSPDRLSITPTTAAPPATVLASPHAPMPLPDEPRKVRRHSYLLELRGELLLASVLQDDDDDDRLSVSVHAFDVDAAVHALDPDAAEPPPVAARQRRRWWKRCPPDGTTREEQEEDAAARAYQQRRQHQQRDLRIHVSDLSPQVDSCRLREMYSEHGKVVRAGEGRVRQAGGDREGLGWLAVGCNLIPVGQILLPTRFPNRHYEDGIDEDSKVTGIFEEDLPGELLPMPDPSWERPLKPHPLREPSPTPHPPASDAVAHAATDTAGSIFACCHYRLSRSKGKGAEEERRRG

SEQ ID NO: 146461 - protein, 52 aa, Oryza sativa
  Clone ID: PAT_MRT4530_47083C.1.pep
PHCTNFVRCTDCVRHYYIQDEQLNQHISYGVLSFGHKIITKLHCSMDASYNI

SEQ ID NO: 146462 - protein, 130 aa, Oryza sativa
  Clone ID: PAT_MRT4530_47084C.1.pep
KGVKLPTFEKKGGRANPFEKVNGNHTFSFTPILAKKQDLGKRLKGLHTGPDTRPLPLVIAHDFYFSNKGRGEKATGANFSNFTNNGDNQWSSSTPDLPGDDFPGLGGALAPLSKGEGGALGDPPGVLVPG

SEQ ID NO: 146463 - protein, 61 aa, Oryza sativa
  Clone ID: PAT_MRT4530_47085C.1.pep
LFLNLVRPLLQIKTLAKRVSGDMVSRFMKRNFSSYGLRRALLGIEEPAECYNIHMVIDRND

SEQ ID NO: 146464 - protein, 558 aa, Oryza sativa
  Clone ID: PAT_MRT4530_47086C.1.pep
MAVLLMLNCFVKATAPPPWPPSASSASFLDDLGDLGIAPLIRADEAGTARASADFGNLSVAGVGAPRLAAAAAVLYPSRPADIAALLRASCARPAPFAVSARGCGHSVHGQASAPDGVVVDMASLGRLQGGGARRLAVSVEGRYVDAGGEQLWVDVLRASMAHGLTPVSWTDYLHLTVGGTLSNAGISGQAFRHGPQISNVLELDVITGVGEMVTCSKEKAPDLFDAVLGGLGQFGVITRARIPLAPAPARARWVRFVYTTAAAMTADQERLIAVDRAGGAGAVGGLMDYVEGSVHLNQGLVETWRTQPQPPSPSSSSSSSFFSDADEARVAALAKEAGGVLYFLEGAIYFGGAAGPSAADVDKRMDVLRRELRHERGFVFAQDVAYAGFLDRVHDGELKLRAAGLWDVPHPWLNLFLPRSGVLAFADGVFHGILSRTPAMGPVLIYPMNRNKWDSNMSAVITDDDGDEVFYTVGILRSAAAAGDVGRLEEQNDEILGFCEVAGIAYKQYLPYYGSQAEWQKRHFGANLWPRFVQRKSKYDPKAILSRGQGIFTSPLA

SEQ ID NO: 146465 - protein, 87 aa, Oryza sativa
  Clone ID: PAT_MRT4530_47087C.1.pep
MLGVPSSRPSPNGSCRIEGIRINDFRGDFNRSEPINDIECSNGKCHLLVVCIISPAGVIIDFDQQLTSTYLHLTFFRVEGLIFMTDL

SEQ ID NO: 146466 - protein, 86 aa, Oryza sativa
  Clone ID: PAT_MRT4530_47088C.1.pep
MRRRRRGRLELREASASSSPHEINKRRLGTRAGVQRRGYAAGTRAWQAASQQAAGAMWEAEGKQQQQDSMHIYPLPDSIDYCLAEY

SEQ ID NO: 146467 - protein, 44 aa, Oryza sativa
  Clone ID: PAT_MRT4530_47089C.1.pep
FVLKNSFIKIADSTVLINILKGIRYESYVLKAVSLSKTTFFMSM

SEQ ID NO: 146468 - protein, 76 aa, Oryza sativa
  Clone ID: PAT_MRT4530_4708C.1.pep
TTKQPYKPMILLGNKRGKNEKTLKGKKVAGRANAFTAIYTSKANVVEGGGVSESRSSAPRCMSSRWTQTRASRLPT

SEQ ID NO: 146469 - protein, 75 aa, Oryza sativa
  Clone ID: PAT_MRT4530_47090C.1.pep
LEQFKFNFGSMPTSSSLSSLFVVTFLKEKEILTSSSRIKSIATFVVELLYVIYFFCEACPYGLYPYNHYDLFVMY

SEQ ID NO: 146470 - protein, 171 aa, Oryza sativa
  unsure (1)..(171): unsure at all Xaa locations
  Clone ID: PAT_MRT4530_47091C.1.pep
MVYHSSFVDDTGITKACGCPLLPLKTHIRGPAPAFDQDKADIVDEAITFFRANVFFKNFNVKSPADKLLIYLTFYINIALKRLEGCRTLAVGTKAIINLGLEKVPVPGEPGFPFPGLFTLPQSQEEAELLRNYLKQIKEETSXGRLLNCAYRAKGTXPNKWGVGFCQEGNS

SEQ ID NO: 146471 - protein, 187 aa, Oryza sativa
  Clone ID: PAT_MRT4530_47092C.1.pep
MVYHSSFVDDTGITKACGCPLLPLKTHIRGPAPAFDQEPCQAADLCRAITDKADIVDEAITFFRANVFFKNFNVKSPADKLLIYLTFYINIALKRLEGCRTLAVGTKAIINLGLEKVPVPGEPGFPFPGLFTLPQSQEEAELLRNYLKQIREETSGRLLNCAYRANGTPNKWWLAFAKRKFMNIVIL

SEQ ID NO: 146472 - protein, 90 aa, Oryza sativa
  Clone ID: PAT_MRT4530_47093C.1.pep
MRRSTRSTPTMGQRINTQHNRHRSHNIEAYIRQDTPLDINFRDTHGVSSDTVRRDESAISDLAGHRFKEEGYPVVDYESDRQTAMSTTVR

SEQ ID NO: 146473 - protein, 151 aa, Oryza sativa
  Clone ID: PAT_MRT4530_47094C.1.pep
KHSVELQIMVILPWEAGDGWLLKAWGPTGGRRSSWHYFFGQGLSWSQNNQILQMAFKLGAPTGTARSSYLGKGGRILLPRLPHSFGLKGTKKRDGEFFPTVFQGIYAVSYKRARSSWWPALQAVVGEPSAWGSQKLQLLQTRSSHDDLELE

SEQ ID NO: 146474 - protein, 357 aa, Oryza sativa
  unsure (1)..(357): unsure at all Xaa locations
  Clone ID: PAT_MRT4530_47095C.1.pep
PRVRPRVRLIIAFDAKSXTAISKCMIMGAAVSTVYYNLKLKHPTLDMPVIDYDLALLIQPMLMLGISIGVLFNVIFPDWLITVLLIILFLGTSTKAFLKGVETWKKETILKREAAKRLEQIGVSAEEPEYSPLPTGPNATAESKAPSDASLWQNVYWKEFGLLAFVWIAFLVLQVTKIPVSVGVTMYEGLGLMQGRRVISSKGDEQTNLKFHQLLVYCFFGMMAGVVGGLLGLGGGFIMGPLFLELGIPPQVSSATATFAMMFSSSMSVVEYYLLDRFPVPYALFFTVVAFFAAIIGQHIVRKLINWLGRASLIIFILSFMIFISAISLGGVGISNMIGKIARHEYMGFDNICNYDV

SEQ ID NO: 146475 - protein, 71 aa, Oryza sativa
  Clone ID: PAT_MRT4530_47096C.1.pep
ATKSRQPNAVITWNSEILTIQILSFTCCHLGPKIVLSVIEECQVRRYKCITLSYAFEITMLFMSIIHQKIN

SEQ ID NO: 146476 - protein, 476 aa, Oryza sativa
  unsure (1)..(476): unsure at all Xaa locations
  Clone ID: PAT_MRT4530_47097C.1.pep
MGRKWHHVAAALAVACAATAAATVAAAADRGLWSAAAAAVAEEGEEASHLRKVANFLWRSGGENSYHHVWPPMEFGWQIVLGSFVGFIGAAFGSIGGVGGGGFFMPMLTLIIGFDARRRFLMXKSSVAISKCMIMGAAVSTVYCNLKRKHPTLDMPVIDYDLALLIQPMLMLGISIGVIFNVIFPDWLVTVLLIILFLGTSTKAFLKGIETWKKETIIKREAEKRSEQTSEELEYRPVPASESKPPSDEAVSILQNVYWKEFGLLAFVWIAFLVLQVTKNYMPTCSTWYWVLNFLQIPVSVGVTMYEGLGLMQGRRVISSKGDEQTNLKFHQLLVYCFFGMMAGVVGGLLGLGGGFIMGPLFLELGIPPQVSSATATFAMMFSSSMSVVEYYLLDRFPVPYALFFTTVAFFAAIIGQHIVRKLINWLGRASLIIFILSFMIFISAISLGGVGISNMIGKIARHEYMGFDNICNYDV

SEQ ID NO: 146477 - protein, 149 aa, Oryza sativa
  unsure (1)..(149): unsure at all Xaa locations
  Clone ID: PAT_MRT4530_47098C.1.pep
LFLGTSTKAFLKGVETWKKETILKREAAKRLEQIAEEPEYSPLPTGPNATAESKAPSDEAASLWQNVYWKEFGLLAFVWIAFLVLQVTKNYMPTCSTWYWVLNFLQIPVSVGVTMYEGLGLMQGRRXISSKGDEQTNLKFHQPXGDCFF

SEQ ID NO: 146478 - protein, 85 aa, Oryza sativa
  Clone ID: PAT_MRT4530_47099C.1.pep
RKKENRCKCTQHVIHNVSKDVFVHDEVVLKIEKSRKRVFLQIIDVFIIHFAVVRFVLAKDLLFITTECCAVGRLPYFISPGRRGD

SEQ ID NO: 146479 - protein, 433 aa, Oryza sativa
  Clone ID: PAT_MRT4530_4709C.1.pep
MAAIDEQQPLHILFLPFLVPGHLIPIADMAALFAARGVRCTILTTPVNAAVVRPAVERANEDSLRGDAGGALVPIDIAVVPFPDVGLPPGVENGAALTSEDDVRRFFHAIRRLREPFDRFMAEHRPDAVVSDGFFTWSADAAAAHGVPRLVFLGTSVFARLCNEIMVFNSFHELEPECVEHHRAALGRRAWLVGPVALASKDVAARGAAELSPDVDGCLRWLDTKPDGSVVYVSFGTVSSFSPAETRELARGLDLSGMNFAWVISGADEPEPEWTPEGFAELIPPRGDRGRTIRGWAPQVLVLNHPAVGVFVTHCGWNSTLEAVSAGVPMVTWPRYSDQFYNERHVVEVLGVGVGVGARDFGSNLESHHRVIGGEVIAGAIRRVTGDGEEGEAILRKAAELAAKARAAPEKGGSSYDDVGRLMDELMARRTFR

SEQ ID NO: 146480 - protein, 672 aa, Oryza sativa
  Clone ID: PAT_MRT4530_470C.1.pep
VLGTPGREGGLVLRASGSGEGVPLAPAAGGASLAAELSFDPTRAPFYLSFLLTDASGAEIRTHRKTSFRVPVGVGPGSPAPLGMSISGDGAVNFAVYSKNANAVSLYLYAAAVGGGGGDEPALEIDLDPYIHRTGNVWHVSLASVDGYVSYAFCCGGIRRPLLDPYAKVIGDFVSSNSVYDEGVTAPSMRCFASLAIAPSYNWGRDRHPRLPLEKLVVYRANVALFTKDRSSGLPDDAAGTFTGLSAKVEHFRSLGVNAILLEPVFPFHQVKGPYFPYHFFSPMNLYSSKGLSVSAIKSMKDMVRVMHRNGIEVLLEKLILDSLRHWVLDFHVDGFCFINAPFLVRGPGGEYLSRPPLLEAITFDPVLSMTKIIADPWSPLDISNVQFPFPHWKRWAEVNTRFSIDVRKFLKREALISDLATRLCGSGDLFSTRGPAFSFNHVSRNSGLSLVDLVSFSNDDLLSESSWNCGEEGPSENSAVLQTRLRQIRNFLFILFVSLGVPVLNMGDECGHSAAGSVSYKDRGPLNWRGMKTTFVKEVTGFISFLTALRSRRGDIFQRREFLKLENIHWYGSDLCEPGWDDPTSNFLCMHINAEVDEMAADSVRGDLYICFNANEESVSAALPALAEGSVWLRLVDTSLAFPAPEQRCGLPALGSMFEGVPIASLSFFPQ

SEQ ID NO: 146481 - protein, 332 aa, Oryza sativa
  Clone ID: PAT_MRT4530_47100C.1.pep
VKLRSKHCKTCDRCVDGFDHHCRWLNNCIGRRNYASFILLMFFVLLMLVIEGGTAIAIFVRCFTDSKGLKMEMEHRLHIRLPKGAHAALSMVFVIFTLYSTVALGQLFFFHVVLIRKGMRTYDYILAMREAAQAFDPFDDSDSSSDESIDFDSPERPSFLSRIFCRKDELSESTRKLSIRIENEPSDGTRRKDDIQINPWTLIKMSKEKAMAAAERARERIRNKLPSTTTSPMKPLPVETKRGPLNQERKHIMTGKEIVPVFTKSWLSGSPTARLSSPRRRFSGSPSPKPQRHRSNFDLRLAEVSRELESHISKQVLCSVVMKGVEDEDSPS

SEQ ID NO: 146482 - protein, 57 aa, Oryza sativa
  Clone ID: PAT_MRT4530_47101C.1.pep
FHVQHLTCLKVVWSGLHGYYDQIYEDLVKGEIARRVFALCDDGCLLFNCIIPLCFRL

SEQ ID NO: 146483 - protein, 50 aa, Oryza sativa
  Clone ID: PAT_MRT4530_47102C.1.pep
MCQKLAVGHSDQLAYPHSRTLSFYVSRAAVLKKIWVTPLTSNSVLFALLS

SEQ ID NO: 146484 - protein, 131 aa, Oryza sativa
  Clone ID: PAT_MRT4530_47103C.1.pep
GIPGSTTRAVRRTLHRHSWEMALLVTSGHYFPAMDADAGSFSLARRAPMMSSYARRGTMHRKRALQPNRTKDVNKGWRIGSTHRRSALQRLRTRASEPMRSPGSTLSAARDPHFLKNDKTLFLEISVKMSK

SEQ ID NO: 146485 - protein, 530 aa, Oryza sativa
  Clone ID: PAT_MRT4530_47104C.1.pep
MAQRRVQYYRDIRTPTGQWFHVVRAPPCHARYATGEAGFGELDVGETSVGMVEQQCSSSPVMYALVQCTPDLLPADCRSCLAGIASQMPRWFSSNTSYRLGGRILGVRCNLRYEVDRFFLESNETIKIHMPKPKGSLSAGKIVGIVLGVVAFVILIFSLIILALLKRLREVIQESERQKKLAKLETEIIDEIGPLFSRYTLQQIKEATRDFSNEIGKGGFGHVYKGKLPSGTDVAVKRLAVSSSGQGFDQFMNEIKLMATLQHRNLVRLLGFCIQNEENILIYEYMENGSLDDVFSDPERKSRLLDWSTRLRVIDSIAQGLLYLHRLAKQNTCIVHRDIKVNNILLDASMNAKISDFGIAKIFCPNLMESATTKGCGSFGYIAPEVLLTGTFSDKSDVYSLGVLILEIISGTKVNSACFFQQGRSDNLLTCAWQLWDAQRYKDLVDRSLISAGENIEDAVLIRYVQMALLCVQANPEHRPNIDKIVAMLSNTEALDVPKEPPAYYNVQVPTSSNHSGAVTPTMFYTSISS

SEQ ID NO: 146486 - protein, 153 aa, Oryza sativa
  Clone ID: PAT_MRT4530_47105C.1.pep
MCTGQPHQSRPRMHGRTATNRGGTRGDAITRSRLPHDARRTMQRVPAVTCAYGQATPDPTQPNHGRTFASETESINQSTHAHASTTPTTPARASARTRGTQGRDEAVGTPLGRADAARSRRRIKKCETSNKFGAIGAGSAPVRSPAIETRFRQ

SEQ ID NO: 146487 - protein, 102 aa, Oryza sativa
  unsure (1)..(102): unsure at all Xaa locations
  Clone ID: PAT_MRT4530_47106C.1.pep
SKTARMFSGAQEKCAPCSKTGYPLKKVTVXGQAFPKSCFKCFPGGWALLPSNYAALEGILYCKPPFFPLFKEKGSFHPLVKWASVKGAEGQPAPPPGGADSS

SEQ ID NO: 146488 - protein, 568 aa, Oryza sativa
  Clone ID: PAT_MRT4530_47107C.1.pep
MASPMPTPTHRVKRRRLDLSPPPHLNDLADELLFLILDRAAAHDPRALKSFSLVSRACHAAESRHRRVLRPFRPDLLPAALARYPALSRLDLSLCPRLPDAALAALPAAPSVSAVDLSRSRGFGAAGLAALVAACPNLTDLDLSNGLDLGDAAAAEVAKARRLQRLSLSRCKRITDMGLGCIAVGCPDLRELSLKWCIGVTHLGLDLLALKCNKLNILDLSYTMIVKKCFPAIMKLQSLQVLLLVGCNGIDDDALTSLDQECSKSLQVLDMSNYYNVTHVGVLSIVKAMPNLLELNLSYCSPVTPSMSSSFEMIHKLQKLKLDGCQFMDDGLKSIGKSCVSLRELSLSKCSGVTDTDLSFVVPRLKNLLKLDVTCCRKITDVSLAAITTSCPSLISLRMESCSLVSSKGLQLIGRRCTHLEELDLTDTDLDDEGCRLLSKLDIKKCFEINDMGMIFLSQFSHNLRQINLSYCSVTDIGLISLSSICGLQNMTIVHLAGVTPNGLIAALMVCGLRKVKLHEAFKSMVPSHMLKVVEARGCLFQWINKPYQVAVEPCDVWKQQSQDLLVQ

SEQ ID NO: 146489 - protein, 432 aa, Oryza sativa
  Clone ID: PAT_MRT4530_47108C.1.pep
GCNGIDDDALTSLDQECSKSLQVLDMSNSYNVTHVGVLSIVKAMPNLLELNLSYCSPVTPSMSSSFEMIHKLQKLKLDGCQFMDDGLKSIGKSCVSLRELSLSKCSGVTDTDLSFVVPRLKNLLKLDVTCCRKITDVSLAAITTSCPSLISLRMESCSLVSSKGLQLIGRRCTHLEELDLTDTDLDDEGLKALSGCSKLSSLKIGICLRITDEGLRHVSKSCPDLRDIDLYRSGAISDEGVTHIAQGCPMLESINMSYCTKLTDCSLRSLSKCIKLNTLEIRGCPMVSSAGLSEIATGCRLLSKLDIKKCFEINDMGMIFLSQFSHNLRQINLSYCSVTDIGLISLSSICGLQNMTIVHLAGVTPNGLIAALMVCGLRKVKLHEAFKSMVPSHMLKVVEARGCLFQWINKPYQVAVEPCDVWKQQSQDLLVQ

SEQ ID NO: 146490 - protein, 60 aa, Oryza sativa
  Clone ID: PAT_MRT4530_47109C.1.pep
MKYIVGGQSLLRKKKKKKKKKKKRLWLKRAKKPKTTRKQHNLCKKKGQKKKKKKKRGGAV

SEQ ID NO: 146491 - protein, 68 aa, Oryza sativa
  Clone ID: PAT_MRT4530_4710C.1.pep
FGRRRNSQGLPFLTTTPPRFSPRSLPPIWRKIFQSHLIPFPSIENLNFLLSFLLWSTTLIPCNYKFIF

SEQ ID NO: 146492 - protein, 164 aa, Oryza sativa
  unsure (1)..(164): unsure at all Xaa locations
  Clone ID: PAT_MRT4530_47110C.1.pep
MADKTLREFAAPSANNVATGPQINMGDVDFDLKSSLITMAQASPFCGKPNEDANAHLQQFLEICNTFTMKGVSPDAVRLQLFPFSLLGKAKQWFYANRATINTWDKCSTSFLSKFFPMGKTNALXGRISSFQQTRDESIPEAWERLQEYMAACPHHGMDDWLIL

SEQ ID NO: 146493 - protein, 94 aa, Oryza sativa
  Clone ID: PAT_MRT4530_47111C.1.pep
MAVVVAGGGYARRGPRLSVSIEEDRLEARERDGLGRLIVKLGLRHLVTEAKLVEDKEGGSGGLGVGAAESEEEEAASRLPMARRTGRIWTLPDK

SEQ ID NO: 146494 - protein, 45 aa, Oryza sativa
  Clone ID: PAT_MRT4530_47112C.1.pep
SLSPTALLLLLALQEEDRPSSGEERIPTGRLTRSLSHFFHFLVMI

SEQ ID NO: 146495 - protein, 83 aa, Oryza sativa
  Clone ID: PAT_MRT4530_47113C.1.pep
SEQGRVDPCCCNFCHEKEGRLRNDTDMSHRSRGSPRTDCKGKVCARARISFIRFRESLIITDVPCIDLHLAVHVLPQCISLST

SEQ ID NO: 146496 - protein, 63 aa, Oryza sativa
  unsure (1)..(63): unsure at all Xaa locations
  Clone ID: PAT_MRT4530_47114C.1.pep
MTRPYPFAEGXTTVTTIQAGFEGYLVSVRGPNDVLASHRIVFSLDDASFVSDAGSVDVLFIFA

SEQ ID NO: 146497 - protein, 103 aa, Oryza sativa
  Clone ID: PAT_MRT4530_47115C.1.pep
MGGGYDGDEREIVRWIDHLEMDGGCCFTDFACMLTGGWEAEQASEAGCPSSGGDGTEWTATRIPKTMDNDAGDGSLNRGRGGAAMARAGVVGARVGALDRGLR

SEQ ID NO: 146498 - protein, 125 aa, Oryza sativa
  unsure (1)..(125): unsure at all Xaa locations
  Clone ID: PAT_MRT4530_47116C.1.pep
SVKDLKRKAREITGLSPLHTETNEVSIXSLTVNSDTDDTTVAGNHTTLYINACIMXHDRPDLIAVITHAFHGLRLRSGIAXMTSVRGREQLVVISSWEECIAGQESHMLLNEAERRDLCYDGSHE

SEQ ID NO: 146499 - protein, 64 aa, Oryza sativa
  Clone ID: PAT_MRT4530_47117C.1.pep
TSYTCFSIFYTYIILNYYTNVWTFYTYTHNSGHSSPHKTLNNKSTINLSHTSAHSCWPAPYWGL

SEQ ID NO: 146500 - protein, 79 aa, Oryza sativa
  Clone ID: PAT_MRT4530_47118C.1.pep
PRVRAAFVVAFLIRSLYGGMQIVTKFAFNEGMSTSVFVFYRHVIAILFLVPVAFVLERKTAPPLTFKVSLKLFLHALYG

SEQ ID NO: 146501 - protein, 54 aa, Oryza sativa
  Clone ID: PAT_MRT4530_47119C.1.pep
LSCRAVFFLWETVQQPLQLVGYLGSWILLRPFLWWSCLAVLTLKLLQTGFSDEL

SEQ ID NO: 146502 - protein, 102 aa, Oryza sativa
  Clone ID: PAT_MRT4530_4711C.1.pep
VVWIMLSYDLFKYCLLFISVQYIILHVNKSHSDLLHHFYSLHPYFTPILVAYADMIFDRVGKERSEGIQGCSSQVYRRAPCCFPRTHGRRGSLQCARSTTSG

SEQ ID NO: 146503 - protein, 838 aa, Oryza sativa
  Clone ID: PAT_MRT4530_47120C.1.pep
MSLASLARALSRRSAPSSSRARQASLRPLPLIIPDSSATASGLGSHCGTPTRPPRPSSPRPALQRGEAGRLALLLLRGYLSAALGSPGAEKAAADGRSVLANPQCRGGWCDGFKKNYENYYPKGKKEAPKGDGSNKSDSKQDSSTDDQWNFQETASKQLQNFLAPLLFLGLMLSSLSSSSSDQKEISFQEFKNKLLEPGLVDRIVVSNKSVAKVYVRSSPQSNSQGQNTDAIITTNDVPSKHTPSRYKYYFNIGSVDSFEEKLEEAQEALGVDPHDFVPVTYVAEVNWFQEVMRFAPTVFLVGLIYLMSKRMQSGFNIGGGPGKGGRGIFNIGKAQVTKMDKNSKNKVFFKDVAGCDEAKQEIMEFVHFLKNPKKYEELGAKIPKGALLVGPPGTGKTLLAKATAGESGVPFLSISGSDFMEMFVGVGPSRVRNLFQEARQCAPSIIFIDEIDAIGRARGRGGFSGSNDERESTLNQLLVEMDGFGTTSGVVVLAGTNRPDILDKALLRPGRFDRQITIDKPDIKGRDQIFRIYLKKLKLDNEPSFYSQRLAALTPGFAGADIANVCNEAALIAARSEETQITMQHFESAIDRIIGGLEKKNKVISKLERRTVAYHESGHAVAGWFLEHAEPLLKVTIVPRGTAALGFAQYVPNENLLMTKEQLFDMTCMTLGGRAAEEVLIGRISTGAQNDLEKVTKMTYAQVAVYGFSEKVGLLSFPQRDDGFEMTKPYSNQTASIIDDEVREWVGKAYKKTVELITEHKEQVAKIAEMLLEKEVLHQDDLVRVLGERPFKASEPTNYDLFKQGFQDEEDSKNQEAAKTPQPDDDGTPSLGEVVPT

SEQ ID NO: 146504 - protein, 126 aa, Oryza sativa
  Clone ID: PAT_MRT4530_47121C.1.pep
MHGTLSLSLSLSLNLSVCACFAKSWLSGLGFVSGCLEASRIPLCRTDVDQTCCILICQVVRIMSPGWVGVLRIGMGRGRIHGLDGGWGGVKDGVDLKAATKYEGEGVRNWSEGGGRFEGGDKVRFG

SEQ ID NO: 146505 - protein, 125 aa, Oryza sativa
  Clone ID: PAT_MRT4530_47122C.1.pep
TWTRGRTRGVDDSPTIPNKRVSLCGGTSFNDRLTAWVNSITTNTFRITIEDENEKKKKENYHWNTDNDYGEHAMDLQNCMAPAPRALKISESSAKGHCKMKRSTFNHLSRLWQEDHIFGKSIIVG

SEQ ID NO: 146506 - protein, 62 aa, Oryza sativa
  Clone ID: PAT_MRT4530_47123C.1.pep
SRVSTHHFTGNKKPHLGGLCWQRDHRQGRIKWRITGKIVWGKTQGPKQDRGTQFNLHVVAGV

SEQ ID NO: 146507 - protein, 265 aa, Oryza sativa
  Clone ID: PAT_MRT4530_47124C.1.pep
MGIGASDELLGTFVPIAVYWLYSGLYLALDGVERLDVYRLHPREEEAAKNVVSRGTVVRGVLVQQAFQVAVSLTLFAVIGDESDIEQKQPSALVILLQFAIAMFVMDTWQYFMHRYMHINKFLYKHIHSKHHTLVVPYSFGALYNHPLEGLILDTIGGALSFLVSGMTPRTSIFFFSFATIKTVDDHCGLWLPGNILHALFNNNSAYHDIHHQLYGNKYNFSQPFFVIWDKILGTYMPYSIEHRKGGGFESRPVKLNIAEQTKTD

SEQ ID NO: 146508 - protein, 224 aa, Oryza sativa
  unsure (1)..(224): unsure at all Xaa locations
  Clone ID: PAT_MRT4530_47126C.1.pep
VQIWFRSFSCQHNRIVIHITLKSSTLVVSESNQANEEEKNGREKIDLSIAPCILEXLIDQAPIISEDENKEDNNGATSTQGTHSYDVLNMSTTCATLEQPVVEIIVEIHLSQKNLLDISYDKEQLCDVSLISMPQLVNGHVSSMVELPYVEFKHDIHIASENEELKLLSSLNTWGYIQFDDFCPLICLEKKLFAGSKLPRPSDVIFHVIRNYDSKGEYNVHRVY

SEQ ID NO: 146509 - protein, 387 aa, Oryza sativa
  Clone ID: PAT_MRT4530_47127C.1.pep
MDQRKGSGSDANGGLAEATASRLRFEDPDEVMEENPAAAAATVGAEEEGGEGGGGEEVIGSDKTSADYYFDSYSHFGIHEEMLKDVVRTKSYQNVITQNSFLFKDKIVLDVGAGTGILSLFCAKAGAKHVYAIECSQMADMAKEIVKTNGYSNVITVIKGKVEEIELPVPKVDVIISEWMGYFLLFENMLNTVLYARDKWLADGGVVLPDKASLHLTAIEDAEYKEDKIEFWNNVYGFDMRCIKKQAMMEPLVDTVDANQIVTNCQLLKTMDISKMTPGDASFTVPFKLVAERNDYIHALVAYFNVSFTKCHKMMGFSTGPRSKATHWKQTVLYLEDVLTICEGETITGSMTVTPNKKNPRDIDIKLCYALSGHRCQVSRTQHYKMR

SEQ ID NO: 146510 - protein, 43 aa, Oryza sativa
  unsure (1)..(43): unsure at all Xaa locations
  Clone ID: PAT_MRT4530_47128C.1.pep
RGAQRFXYVRAKNFRVEXKHGLILNVDNHLSDRSKKCLYFEMK

SEQ ID NO: 146511 - protein, 330 aa, Oryza sativa
  Clone ID: PAT_MRT4530_47129C.1.pep
MSFGAVDVDDGGAAATAAASGGEEVRAMPAEVSWEMLDKSRFFLLGAALFSGVSAALYPAVVLKTHLQVSPPPAAAASTTAAAILRRHGPRGFYRGFGASLAGTVPARAVYMAALEATKSAVGSAAVRLGVAEPAASAAASAAGGVSAAVAAQVVWTPVDVVSQRLMVQTAAAGPPYRGGADALRRILRADGVRGLYRGFGVSVLTYAPSSAAWWASYATAQRLIWRALGPAHHDSRASVVAVQGASAAAAGGAAALVTMPLDTVKTRLQVMDGGGASLASEARALVREGGWGACYRGLGPRWASMSLSAATMVTAYEFLKRLSTKDTSL

SEQ ID NO: 146512 - protein, 54 aa, Oryza sativa
  Clone ID: PAT_MRT4530_4712C.1.pep
IIATYHHARHNFVSEWAEAAYTTPKRMHRINDLIQSDKSKAACVDADNEELARY

SEQ ID NO: 146513 - protein, 95 aa, Oryza sativa
  unsure (1)..(95): unsure at all Xaa locations
  Clone ID: PAT_MRT4530_47130C.1.pep
MPIMPCATHMLHWAVQRVGEFVKDHELVEDLAXCCTEDSDYFISMLTFFGAIIEVCMRKLAFYPEISGFLEEDEDHFPYVGARYVYGCSTKLIML

SEQ ID NO: 146514 - protein, 234 aa, Oryza sativa
  Clone ID: PAT_MRT4530_47131C.1.pep
MASRPSAAASLGLAAAVAAAAAAGFLTHVDRFGENTLVGAPPSRDAAVQLMLLRLLVAAAAMGAFNTAVALIYARLYNAGGGGVNGRITRGVYLVLFASSGVLHVFLVPQLEPGVIVDGAQELLPPLAVAVAHVLLPTAAAATFFLSMMLIYAHVGAGGGAVGDMMAIPTTTVKLLTKLWRKLFRPEEESKLKTKGGTDEANDDKIKTSKSRSGIVVMFAFPVYSCCRSSTGCV

SEQ ID NO: 146515 - protein, 45 aa, Oryza sativa
  Clone ID: PAT_MRT4530_47132C.1.pep
CSHQHQHQFHSRPSMDRSHFVPMNRPHVCSIAELGISFVWHRFPM

SEQ ID NO: 146516 - protein, 79 aa, Oryza sativa
  Clone ID: PAT_MRT4530_47133C.1.pep
GCGNLIGLPTVEIAADYFITATGMDAVVVTDDHTVVAGDATGMIYQRKLGGSKYGRRLPSQCAMSASARPKVCWKTPKP

SEQ ID NO: 146517 - protein, 138 aa, Oryza sativa
  Clone ID: PAT_MRT4530_47134C.1.pep
MTDVELERPAVLYRAMSRRYDDLDRARLGLQGRNAAVWLARGGRRRQCDTGRRSEQAGWWACTCWGKQPLGEGNRPHRISRTRTGVEEKRARWARGIRIYGGPTVQLAWAHAGRRKSAHLAAAEKGEDRAPRLDRRLD

SEQ ID NO: 146518 - protein, 64 aa, Oryza sativa
  Clone ID: PAT_MRT4530_47135C.1.pep
MTAPGVAGGTMDISGDTLYLSVNYFGTNPWTYMDRRGQRLETSAANADAPGAWVSMPWCLVLTH

SEQ ID NO: 146519 - protein, 95 aa, Oryza sativa
  unsure (1)..(95): unsure at all Xaa locations
  Clone ID: PAT_MRT4530_47136C.1.pep
MALLPPPSPSHCWSPPXRSPPPTPERGGSPDHQSPAXLLHESPLPPHPLCRHQSSPPSPERQDSPPPDLSPVRRSCRHRSPPPPLPFXSSPEPPP

SEQ ID NO: 146520 - protein, 34 aa, Oryza sativa
  Clone ID: PAT_MRT4530_47137C.1.pep
LIKSSTMWDKCVICDCSYMSQCLKIGTSYGDVLR

SEQ ID NO: 146521 - protein, 298 aa, Oryza sativa
  unsure (1)..(298): unsure at all Xaa locations
  Clone ID: PAT_MRT4530_47138C.1.pep
MAEEAKNLETARADRSVWLMKCPTVVSRAWQEAATAAASSSSSSDAAXGNSNPRDNPVVAKVVLSLDLLRSEEPSLQASLPRPLPLPCGFECYIIHYNMVLLAWQFKMEMAQTNTGNTPKSYSLNMSKDFVPMCVFSESNQGKLSCEGKVEHKFDMKPHSDNLVNYGKLCRERTQKSMIKTRKVQVIEDHRMSLIPLPGMVGLIPSGSKEKKKQTPTKPSDAKRIRRDRRELENIIFKLFERQPNWALKALVQETDQPEQFLKEILNDLCFYNKRGPNQGTHELKPEYKKSTGDTDAS

SEQ ID NO: 146522 - protein, 1018 aa, Oryza sativa
  Clone ID: PAT_MRT4530_47139C.1.pep
MASRPPLRTTSASSSTLSTDSPTSAPPGGVPQSITALLNNPLPSASSSSYYWLTWPPPTPLPDAPPPPPPHPCDVSRADFAPYLAAVADPFGRFADIRLHASAEELAESQDGAAAGPAASGLAACLREVPALFFKEDFALEDGATFKAACPLGDAALQERLGQHLDVVEAHLVREIARRSESFYEAQGRLRGLDGEIVAAVGRIRELREVVRVLTGDLVGAARQVQELNATRGNLVALQQKLTVILYVSQALAALKLLVAAADCAGALDVIDDLQNLLDTDELTGLYCFRNIRDQLGTSLDSVNSILSAEFVRAAVPDGKAVDALIQANVKRKASVPLNGTEHEVQCMIGKQCYAVNIDEEESFILRDRLLPLIICLLRTDKLPAVLRIYRDTLITVMKASIKATVAELLPILVARTIDSDSVTGDRAADSDAGGQSLANKLRSLSSEGFVQLLSAIFRIVQVHLVQAAEVKRIVEWIMGNLEGSLSSDASNSVQKHSGSVSDFSQENDHGVTSRVSNTLTRSNSKFPFFQGKTNDMSSTNSIKNVRADVLRENTEAVFAACDAAHGRWAKLLGVRAALHPKLRLQEFLIIYNVTEEFVAATEKIGGRLGYNIRGIVQQQSKQFVDYQHTVRNITCGKCISPSNTLSKMVVQTENVRLKQVLPPVHNMAKIKAVLDQETWVAIDVPEEFQAIVLSLSSTYSVANGMEMPSTDDSSKLHENRVTSQEPVNSAENNTDNGNAVSTSPSTENNVGHARSTQQTIVHGGVGYHMVNCGLILLKMLSEYVDISKCLPSLSFEVVQRVVEILKLFNTRTCQLVLGAGAMQVSGLKSITSKHLALASQIISFIYSLIPDIRRVLFLKIPEARKQLLMSELDRVTQDYKIHRDEIHTKLVQIMRERLLANLRKLPQIVESWNGPEDTDLQPSQFAKSVTKEVSYLHRILSQTLLEADVQLIFRQVVQIFHSHITEAFSKLELSTPQAKNRLCRDVQHILVCIRKLPAENFSPEAYSELWSSWMISC

SEQ ID NO: 146523 - protein, 494 aa, Oryza sativa
  Clone ID: PAT_MRT4530_4713C.1.pep
MDEQQPLHILFLPFLVPGHLIPIADMAALFAARGVRCTILTTPVNAAVVRPAVDRANDDALRGDAGGAPAIDIAVVPFPDVGLPPGVESGTALASEEDRGKFVHAIQRLREPFDRFMAEHHPDAVVADGFFTWSVDAAAEHGVPRLVFLGTGVFARSCQESMVRHNPVEACPDDDPDAAVSLPGLPHRVEMRRSQMIDPKKRPDHWAYFKMMNDADQRSYGEVFNSFHELETDYVEHYRTALGRRAWLVGPAAFASKDFAARGAAELSPDADGCLRWLDAKPHGSVAYVSFGTLSSFSPAEMRELARGLDLSGMNFVWVINGAADDTDASGQWMPEGFPELISPHGDRGLTIRGWAPQMLILNHPAVGGFVTHCGWNSTLEAVSAGVPMVTWPRYADQFFNEKLIVEVLKVGVSVGSKDFASNLENHQVIGGEVIAGAVRRVMGDGEEGAEAIRKKAAELGVKARGALEKGGSSHDDVGRLMDALMARRTSVDV

SEQ ID NO: 146524 - protein, 131 aa, Oryza sativa
  Clone ID: PAT_MRT4530_47140C.1.pep
MARGVAAAAGGKGGAGKKKGSVTFVIDCAKPVDDKIMEIASLEKFLQERIKVAGGKAGNLGESVTVSRDKTKVTVTSDGPFSKRYLKYLTKKYLKKHNVRDWLRVIASNKDRNVYELRYFNIAENEGEEED

SEQ ID NO: 146525 - protein, 341 aa, Oryza sativa
  unsure (1)..(341): unsure at all Xaa locations
  Clone ID: PAT_MRT4530_47141C.1.pep
VLFPITIGRIRARYPRYYKGCQDCQKFGAIQRAPASAMNPIIKPWPFRGWGMDMIGQINPSSSKRHKFILVATDYFTKWVEAIPLKKVDSGDAIQFVQEHIIYRFGILQTITTDQGSIFVSDEFVQFADSMGIKLLNSSPYYVQANGXAEASNKNLIKLVKRKISDYPRQWHTRLAEALWSYRMACHGSIQVPPYKLVYGQEVVLPWEVRIGSRRTNLHNELTADEYYNLMADEKEDFVQSRLRALAKVFKDRERVAWHYNKKVVSMSFSEGELVWKLILPIGTRDNKFGKWXPNWEGPFQIYKVVSKGAYMLQGLDGEVYRRALNGKYLKKYYPSVWVNS

SEQ ID NO: 146526 - protein, 88 aa, Oryza sativa
  unsure (1)..(88): unsure at all Xaa locations
  Clone ID: PAT_MRT4530_47142C.1.pep
VVVQQQAVVVGDGGVGSGAVAAGDAAVGQPVLLLVGHRLLKRAANHPTFLLSRGVFVXWRRYSWMIQSSSALGRDPCRHQLFLILQPG

SEQ ID NO: 146527 - protein, 52 aa, Oryza sativa
  Clone ID: PAT_MRT4530_47143C.1.pep
SEKRPKTITTRGRTTTRAHGTTLERKTFFESGIPYHLFGSTYQQGANRSAKM

SEQ ID NO: 146528 - protein, 48 aa, Oryza sativa
  unsure (1)..(48): unsure at all Xaa locations
  Clone ID: PAT_MRT4530_47144C.1.pep
SDVTLSSRCSIMFKPMLFDPMGVLAMWMXSDVTPCGWEHVECDLTTSR

SEQ ID NO: 146529 - protein, 47 aa, Oryza sativa
  Clone ID: PAT_MRT4530_47145C.1.pep
LLSVLVTGDSSTPGGRWQHPGKLHRIISLFFFLLLFLIPSRLLSLTY

SEQ ID NO: 146530 - protein, 486 aa, Oryza sativa
  unsure (1)..(486): unsure at all Xaa locations
  Clone ID: PAT_MRT4530_47146C.1.pep
MWKQFIGKLSWKSVKSSSTGGGGGGGGGFSPTAAKPPPPPSPRANGTAAAAKPSASPPPPPPPAAAGAPRVRREEAFVQNVNICCAVFDFSDRGKDTTEKERKRQVLMSLVDCVGAAEEPLTEAMIAASVRMFAANLFRVFPPKARSGAAASETEEDEPFFDPSWYHLQVVYELLLRFVTSPMVDAKAARKYVDSSFISRLLDLFDSDDPRERDSLKTVLHRIYGKFMGNRPFIRKAVSNIFYRFVFETDHHNGIAELLEVFGSVISGFAKPLKEEHKLFLWKALIPLHKPKTVGVYLPQLTYCITQFIEKETKLAGTVIRGLLKYWPVTNSQKEMMFLGELEEVLELTDMAEFQKCMVPLFRRIASCLNSSHFQLIKPFIXILPIIYPALERNTRWHWNQSVLNVTLNVKKMFLDMDERLLLACQNNFQAEEEKRAATEERRRLMWEQLERNAAAACHPHPVITTTDSSFPSPPSSTPLVAPTVT

SEQ ID NO: 146531 - protein, 181 aa, Oryza sativa
  Clone ID: PAT_MRT4530_47147C.1.pep
MDGPYAVAKSPRQPDYQRFAQSWFRCFELMDEKRPGVFRLAPQGGGLDDLDSTKILSGRRKKPLKLADSPVNNVLSAHRPGQIDRSKSLSANSPRTYARSKCRTPVRSIELLFLHTRRRRSNGGVQRRGIDRSIDGDLTCPAHRSIDRCTRLAISQVDLRRQFVSNAKLPIKMQLDRSISS

SEQ ID NO: 146532 - protein, 116 aa, Oryza sativa
  Clone ID: PAT_MRT4530_47148C.1.pep
SSPPPDMPTLDYYRPPPPPVYYTLPSPPHTTVCRRRTEATTRCRRGGSHPRRRRAAVASMIAPSHRRIDPTAAAVASILPRLSSHRSCRSRRRIDPAAATGHRRIHPAAAAVASTT

SEQ ID NO: 146533 - protein, 116 aa, Oryza sativa
  Clone ID: PAT_MRT4530_47149C.1.pep
GMGYPMYPLPRSRGLVKRQWVGRGTPPPPKQVRGDCCRQLPPVDDSWCRCEAITPMLGGIYRELGAPNVGPPMSKVFPGSRKGDLEGGGATPPGFCKVDIPNGGGGVCYWLARSGS

SEQ ID NO: 146534 - protein, 76 aa, Oryza sativa
  Clone ID: PAT_MRT4530_4714C.1.pep
TQGPCNPGHFHTPNNPITSPVNPAGLLERILSSPWYRPPLTAFHIRKNLSPKNSGRGGQHPESYLAHSIFLDYGTH

SEQ ID NO: 146535 - protein, 957 aa, Oryza sativa
  Clone ID: PAT_MRT4530_47150C.1.pep
MAHTMVSVATGVLCPVIGKLSTLLQMKYNRLKGVDSEILSLKDELSSMNALLLKLEDIDDLDIQVKEWRDQIRELSYDIEDRIDYFMFQVDGDAHRRESMKGFLQKSIRQLRMLRARDKMADQIIKLKARVDMASERRKRYNFDETLSSSIGVVPIDPRLPALYVEEENLVGIDTPRVELIRFLTEGDDKLLQKLQVVSIVGIGGLGKTTLARQVYGKISGQFDCQAFVSVSQKPDIRKIFKNILINITELDYGAIDAWDEERLINKLREFLNDKRYFVVIDDIWSTTVWTTIRCAFCENYRGSKILCTTRIISVAETCCSADCKNIYEMKPLSDVYAEKLFIKRIFGSEDQCPAYLKDIYIDILRRCGGLPLAIISLASLLATKPRTKEQWGRYRNSVCSATENVPSVSNMQRILSLSYNDLPHYLKTCLLYLSTFPEDVLILWDPLVRRWIAEGFVTAQGEGGRTLEEVGECYFNELINRSMIQPDEIQYDGQAHACRMHDMILDLIISKSVVENFITSFSHNYLLGCQDKVIRRLSLDCRERDAILPATMVLSSARSLVVYGSTEHIPLISAFHVLRTIAIESNDKLKNCYLRDIGRLFQLKCLRLREVGISELPEEIGELQELQTLELQRTRIKELPKSIVRLKNLVFLVADGITLPEGIGNMRALQKLIGVKVDISIPVDCLRELGGLNDLRCLYIIWCVSDAYPDKKTYTDSFVSCIDELCTFKLRYLQLGCDDSSLDFMLDSWSHPPYPLYNFQMITYYCFPIIPEWMATLFNVAFLDINVTSVGKDVLRILGDLPSLLSLSITTKTIVSERLVFGSNGFQCLKEFDFHSWQDVLGPLLFEVGAMPKLEKFRFNVWARTLGSLDSNFYEGLQNMACLKNLVIEVDCREARAEQVEATEVAAKNAIANNHLPDHLNVQMRRTNVDRMIKDTVMGNSVVEQQEETAVKIHYN

SEQ ID NO: 146536 - protein, 87 aa, Oryza sativa
  Clone ID: PAT_MRT4530_47151C.1.pep
FVFFFFLFFSIIHGFYSSYLLFQDAQIGLAVPHSFLSIPFAKFMHKILAGFCCSSMISNPPTPISSGSHYVMYKLQNCTFPNILEDC

SEQ ID NO: 146537 - protein, 70 aa, Oryza sativa
  Clone ID: PAT_MRT4530_47152C.1.pep
MMVLTNYFLNCNDPGMKFMNVERSFAQQHYADLSDKPFFPGLVEYIISGPVVAMVWEGKGCVATGRRIIG

SEQ ID NO: 146538 - protein, 486 aa, Oryza sativa
  unsure (1)..(486): unsure at all Xaa locations
  Clone ID: PAT_MRT4530_47153C.1.pep
MRSPPESGSRTGRGEEIAARQLNPTASASPPRSLIMDGACCDGGGSPESGGASSSASSYGSASRLQKGVRLRRRRQRLRRPLLATGGDGRGAADGAQDLALPLGMSFAAVLAQVRDRSGCXEGRLQPDFLSKIYGDRFDNFTKNFEKSFGSTLRTLHLINETPVYEQDNSRFSHEDGTSAAEIKLSGADSKRPVHDIQESTSLSSMDNQIILHAGTDQQLVKLPHNKASPEFDRHILNVFERSLNEQTRSNELKELEIGLNMRKLQLKQSQIALSSYSHMLEKIKISMGFQKASFREEKFRTQMEDTRHAELLRRLIDLLLTAVVFMSVCFGYGTYIYSYKRITAVTAACAAASRRSAMTGPNMPITFNVMLLGVLCGSVGRFCVDTLGGDGNVWLFFGEILCFIHLFGNSRPSLLYRMLYGPISVTDRTKASDLPYRVCRYTFYTVLSVILPCLAGLLPFASLSDWNELVVEYMKSKFIRINTEV

SEQ ID NO: 146539 - protein, 338 aa, Oryza sativa
  Clone ID: PAT_MRT4530_47154C.1.pep
LLATGGDGRGAADGAQDLALPLGMSFAAVLAQVLNRSSCSEGRLQPDFLSKMCTSAVKESLTNIYGDRFDNFTKNFEKSFGSTLRTLHLINETPVYEQDNSRFSHEDGTSAAEIKLSGADSKRPVHDIQESTSLSSMDNQIILHAGTDQQLVKLPHNKASPEFDRHILNVFERSLNEQTRSNELKELEIGLNMRKLQLKQSQIALSSYSHMLEKIKISMGFQKASFREEKFRTQMEDTRHAELLRRLIDLLLTAVVFMSVCFGYGTYIYSYKRITAVTAACAAASRVSFNSSNKDVIWHVNDSLDCLVDIPAFCNDWTKHANNVQCYVIGSSLWFCRK

SEQ ID NO: 146540 - protein, 73 aa, Oryza sativa
  Clone ID: PAT_MRT4530_47155C.1.pep
MQDRRALGKVIAKLELAVMVAMRDRWNRCPRWRPLVTIYVQLVGVKREEWAKGWVGSRFFIWDYESGTKDRYI

SEQ ID NO: 146541 - protein, 88 aa, Oryza sativa
  unsure (1)..(88): unsure at all Xaa locations
  Clone ID: PAT_MRT4530_47156C.1.pep
VIGFAPRSPETLTGNMEDTDVFNALAFSSQFPFRSARPPPLLDAPPFSWPSASRPXAWSVLVVEEICSSALVVQSVCSXGSWASPVLH

SEQ ID NO: 146542 - protein, 46 aa, Oryza sativa
  Clone ID: PAT_MRT4530_47157C.1.pep
IGLNMLSGFLPMDIGPKLPNLVFLSTISRKSSYGLDLEETKYLGPY

SEQ ID NO: 146543 - protein, 61 aa, Oryza sativa
  unsure (1)..(61): unsure at all Xaa locations
  Clone ID: PAT_MRT4530_47158C.1.pep
KMFGLKVVRHMVQQLKEEYVVFFPETISFLGELLEDVELLVKILXXEIVKKMETFRGESFC

SEQ ID NO: 146544 - protein, 306 aa, Oryza sativa
  unsure (1)..(306): unsure at all Xaa locations
  Clone ID: PAT_MRT4530_47159C.1.pep
YEPPPSSSPPTMSPPPSPSESSPPNASPPYQDNSPPPSPPLPSPPTEAPSYNQPPPSPSSSSPPTTSPPPSSPPTVAPSYNQSPPPPPSSPPPITSPPPSSTPSTASPPPYSPPTVPPSYNQSPPPPSSSPPPSSSPPPLSPPPTTSPPSSSPPPSTLPPPXSPPPTTPPPSTSPPTVAPSYNQPPPPSSPPPTRSPPPTSPPTVAPSYSQPPPPPSSNPPPSTSPPLSSSPPSTQPPSSTPPTVAPSYNQPPPPSTPPPTTSPPPSSPPTVAPSYSQPPPPPSSSPPPSTSPPLSSPPPSTQPPS

SEQ ID NO: 146545 - protein, 477 aa, Oryza sativa
  unsure (1)..(477): unsure at all Xaa locations
  Clone ID: PAT_MRT4530_4715C.1.pep
MDRLRAGSPVYGRQRSGSSTGSSSPGGVSPSHHRSSSTSSAASAAAGLGGGVSNVRRTQNVAARAAAARLAQVMASQSAAAAAGRDDDDDDDDYANDHPPAPPPARFGSARPAAAHGSNGVSLLGRTARSPSPALGRNIVEPPPTVRSTSAGRPAVASRPTTTVVPPIKTSTTLRTPSPIPPVAVEPPVDRSRQKSLNFFFPFFQIYDLLKKDVKKQKLEPRSLRNSRKEAALKQREAALKAARESKDGKDGEVTTLKHELDCAKEEVVTAMEQLKEAETETKALRSMTQRMILTQEEMEEVVLKRCWLSRCWSXLRRNLKHGEDDAQRRNKLVRDMSDVMGEGNIESMLSVEMGLRELSSLKVEDAVVVALGQHRRPSIVRQFTSDLSHEEAEDVSFKQAWLIYFWRRAKTHGIEEDIAEERLQFWIGRNAVAPTSHDAIDVERGLTELRKLGIEQQLWEGSRADIDEDSSAIENH

SEQ ID NO: 146546 - protein, 367 aa, Oryza sativa
  unsure (1)..(367): unsure at all Xaa locations
  Clone ID: PAT_MRT4530_47160C.1.pep
SEIQERACDPTPPSPSPSNDSPAPPSYEPPPSSSPPTMSPPPSPSESSPPNASPPYQDNSPPPSPPLPSPPTEAPSYNQPPPSPSSSSPPTTSPPPSSPPTVAPSYNQSPPPPPSSPPPITSPPPSSTPSTASPPPYSPPTVPPSYNQSPPPPSSSPPPSSSPPPLSPPPTTSPPPSSPPTVAPSSAVQPPPSPSSSPPPSTLPPPXSPPPTTPPPSTSPPTVAPSYNQPPPPSSPPPTRSPPPTSPPTVAPSYSQPPPPPSSNPPPSTSPPLSSSPPSTQPPSSTPPTVAPSYNQPPPPSTPPPTTSPPPSSPPTVAPSYSQPPPPPSSSPPPSTSPPLSSPPPSTQPPSSSPPTVAPSYNQPGIL

SEQ ID NO: 146547 - protein, 109 aa, Oryza sativa
  Clone ID: PAT_MRT4530_47161C.1.pep
MTLAMTSSPVTARPRVLASEQRRGGPNGGHLHVADSTANSLVTKTTAEDQRTTTATRKSGGNGRINSGDGAPAADRDGERADEDGDATATTAMTSPSDDDDWSDGSARN

SEQ ID NO: 146548 - protein, 54 aa, Oryza sativa
  Clone ID: PAT_MRT4530_47162C.1.pep
RTREMRKERPLERERKLDATTIRLEREREHYSVQVGGNKVRERRGSKRNQRNNA

SEQ ID NO: 146549 - protein, 102 aa, Oryza sativa
  Clone ID: PAT_MRT4530_47163C.1.pep
MGEEGAAAATRASCSRRAAASCWGRFGLGLAALWRRLRWIGLPRRRLRTYVLSASGLNYDPLGYSQNFDNGGLGDGECEANFSVRFARHAGATRPHAPSVAS

SEQ ID NO: 146550 - protein, 359 aa, Oryza sativa
  Clone ID: PAT_MRT4530_47164C.1.pep
MSPAACRGNPSRSASASAVVVDTATGYHLLKIEGYSLTKGIPTSLSLKSSQFTVGGYRWRIDYFSNGDCADSADYISLFLSLDERANKDVKVRASWRFQIGYTGNVDKPPSLSTAKACTTFGVGPDGSWSWGYDRFIRREDFEKSDNLRDDSFTIRCDIAVVRRFRAEETTEILPVEAFVSVPPSDMNQQFGDLLETEKGADVVFESPVFRAELYSSMKEGDTAGVVRIEDMEAQVFKLLLRFVYTDSLPEMGNDDEDVMCQHLLVAADRYNLERLKLIYEEKLCSYISVDAVSNILALADQHHCDGLKKACFHFLASPGNLNAVITSDGLKHLSRSFPSLMEELVAMLAPLLSHALVI

SEQ ID NO: 146551 - protein, 86 aa, Oryza sativa
  unsure (1)..(86): unsure at all Xaa locations
  Clone ID: PAT_MRT4530_47165C.1.pep
RRKLSQESLEALGDGNPKYGTKVLLVDGLLQALLPAXRKEGKERIALKKRPIDENRRVAARLSGEEGARRLGLRGANSLGGGGGEG

SEQ ID NO: 146552 - protein, 53 aa, Oryza sativa
  Clone ID: PAT_MRT4530_47166C.1.pep
HSTFQAKIVGPASFSYFEALLRGGQSSTKLGGLFVYICMSKVFFSAAYIFPLP

SEQ ID NO: 146553 - protein, 101 aa, Oryza sativa
  unsure (1)..(101): unsure at all Xaa locations
  Clone ID: PAT_MRT4530_47167C.1.pep
PSSSPLPRRCLAPNAAARRRAAVTITASSPARAAASPRVASSPAYAALSPAPLVSPSPSPAPLPRRLVTSVRCRAARRXTSPPSLSRRRHAPRRRAASPSS

SEQ ID NO: 146554 - protein, 96 aa, Oryza sativa
  unsure (1)..(96): unsure at all Xaa locations
  Clone ID: PAT_MRT4530_47168C.1.pep
ITGHPHPGSSSRRLRVPASESRAQSLPPPRXRVAAVADASCAQPSPPPPPSPARSRRRLRVPCAAGTASQSRAQPPPPPHPAPPRPPHPARRRSTR

SEQ ID NO: 146555 - protein, 467 aa, Oryza sativa
  Clone ID: PAT_MRT4530_47169C.1.pep
MAMSAAAASASASSFPNWVMLERFVFRRDDDTRATVLRASGSGSHGTPFTIAFRIADPPAISRLYVRWPQGPDPEEMVACPLVATHRNLVLVCFCYIVESPSGPACPQDYFIFTASGSGDGDVDHHPVPSPLLKALPPCTYHDEGDGNDLSMRYPLEFRSVGILCRGEEFAVAELQVLRTASGRVKARLCVLRSAISSSKDEDEAEDGDHGGGGRRPWDIMELPIVYDGDEERCDIFYWTTDAVIAFQDHLCWVDYDRGMLLCDVLRTSPRVAFLRFPLDSSIIPTGRRSRRNFSQVYRGVSVTTAATGGAALKFADVSRHDGKLLGSLEQGRGGYTITCHTLRSTLGAAAIDDEWSWSKDFAIASDEILRSFEGAPELEPREVLLFPTVSMDTPSVMHFLTCDYDRMIRKMSVVTIDIASKIVLSVVPYVNGEEDLSGEDADMVRAKSGYPQSFLPSEFSKYFNSI

SEQ ID NO: 146556 - protein, 40 aa, Oryza sativa
  Clone ID: PAT_MRT4530_4716C.1.pep
TGGGSLYWMVKVGYGFQNEIRCAELVDCLRICVIMCVLDV

SEQ ID NO: 146557 - protein, 103 aa, Oryza sativa
  Clone ID: PAT_MRT4530_47170C.1.pep
MQVADRPADESNKQHGRPLQHSTQQRAQEGMHAANSHGHGHGSEWPLPGQATMGSQVRRKTVKAPANVLQQQQRHRARIHASGSGARTSSHPAGADHGHSPRR

SEQ ID NO: 146558 - protein, 58 aa, Oryza sativa
  Clone ID: PAT_MRT4530_47171C.1.pep
MEAATRARARCSSECRNCDGDSKGLVVEKAARVKAEGFGEMLVTARNSYNSTHFVEKE

SEQ ID NO: 146559 - protein, 114 aa, Oryza sativa
  Clone ID: PAT_MRT4530_47172C.1.pep
LCFFFFFFFFFFFFFFFFFFFCFFFFFLNGGPHTLLGALGQGGRGTGAAPARGGGKAQEGGGPQTSGRGWKHRGGNYGQLTTTKAAGIPCETLEKEKHDELKHKRFQEARAPTA

SEQ ID NO: 146560 - protein, 249 aa, Oryza sativa
  unsure (1)..(249): unsure at all Xaa locations
  Clone ID: PAT_MRT4530_47173C.1.pep
RGREARAPGRETRKQTRNASPXKRDRTPAQATNRPATPTRDAKRNRKQKRAEARPESQKRNESEXKRRQKRRXAKRNKGEARKTGKREEKXEREREEXXEXERERKRGRXGKREKTRKEGRRRRXKKKKKGEEEKEGRRKREEREGDXEKGRKGKKRERREKGKGEREGEGRRGEERGKEKKGXEKQEGEEKEGERGREKGSPATPGSMGREGFGPSTPGRQNRLLRRKLIWKDLDSEMNSTIDRGLRS

SEQ ID NO: 146561 - protein, 256 aa, Oryza sativa
  Clone ID: PAT_MRT4530_47174C.1.pep
MAKEFPVPPVVFTPSTPTHRRHPPPGTGPSPPPAFAPPRPSTSSGANPLPFMSFDVGNAATSSSPPLFAGPIGVGGSGASFEDEPPLLEELGINTRQIWRKTLSILHPLRSADPSLHADADLSGPFLFLLSFGLFQLLAGKFHFGIVLGWVTVASFFLYFVFSMLSGGRRGDLDLYRCVSLVGYCMLPMVIFSAISLFLPRGGGLIFGVGMGFVLWSTRVCTRLLAELASSGDEHRGLIAYACWLVYMLFSLLVVF

SEQ ID NO: 146562 - protein, 438 aa, Oryza sativa
  Clone ID: PAT_MRT4530_47175C.1.pep
MAVFLLVLLAALVSVDVAAAHSGGGFGFKATLTHVDANAGYTKAQLLSRAVARSRARVAALQSLATAADAITAARILLRFSEGEYLMDVGIGSPPRYFSAMIDTGSDLIWTQCAPCLLCVEQPTPYFEPAKSTSYASLPCSSAMCNALYSPLCFQNACVYQAFYGDSASSAGVLANETFTFGTNSTRVAVPRVSFGCGNMNAGTLFNGSGMVGFGRGALSLVSQLGSPRFSYCLTSFMSPATSRLYFGAYATLNSTNTSSSGPVQSTPFIVNPALPTMYFLNMTGISVAGDLLPIDPSVFAINETDGTGGVIIDSGTTVTFLAQPAYAMVQGAFVAWVGLPRANATPSDTFDTCFKWPPPPRRMVTLPEMVLHFDGADMELPLENYMVMDGGTGNLCLAMLPSDDGSIIGSFQHQNFHMLYDLENSLLSFVPAPCNLS

SEQ ID NO: 146563 - protein, 457 aa, Oryza sativa
  Clone ID: PAT_MRT4530_47176C.1.pep
MAESSGGTHMSASRLLVLRGDRVAFSSSSSSFSPDAELELAAAGWRPPRVHATGWEGASGGVLMAVLFVAVLSRLPNQRHLVRTVASNDDGRNPMAIVVEAVCGGDDVRAGDGELCHLDAERPGDRPGDVDGPRRGEVEDRNIQEDPFPSPLSLLGCGRQARDGIGCRREKAAPAATPPPPRGERDGIGCRREKAAPAATPPPPRGERDGIGCRREKAAPPPPRGEQDGGGVRRVQDLPGPADRDHPMRSSHRPANRGHPASSSPVPSRPRHPSELHPRVQAAAASRRAPSARPSGRDLPASSSPALGWPRLPSKLFPRVQPAATSRRASPLRPAGRGLPASSSPTAAARANGRRLSSQSLSLKHPVSGFSNLSLNSVSREILCSWQSEDLFPNSMRSKRQDFSLKYLLMISVGMTLELIWSTPSLIADKSQTNLPCFCTDASLPLLLIEGSTRHST

SEQ ID NO: 146564 - protein, 115 aa, Oryza sativa
  unsure (1)..(115): unsure at all Xaa locations
  Clone ID: PAT_MRT4530_47177C.1.pep
AHGIIRVHTVVYARGCALAAAAQIFARLWVRIVTHRMWRAPPSRRCPXAVVVRVVLALEAEGVVAVVGVVGVRCDRLRLRSSDLGMALFVEDKTAGRTPVRTLSSAVCAPGARVS

SEQ ID NO: 146565 - protein, 104 aa, Oryza sativa
  Clone ID: PAT_MRT4530_47178C.1.pep
MGMKLLNSSPYYAPANGQAEASNKSLTKLMKRKITDFPKQWHARLAEALWYYRMACHGSTQVPPYKLVYGHEAVLPREVNIGLRRITLQDELTADDYHNLMVDE

SEQ ID NO: 146566 - protein, 72 aa, Oryza sativa
  Clone ID: PAT_MRT4530_47179C.1.pep
LLLLVASIWVWGSQVCILLRSGAYKPNCCYDSLDYHNQTHGRHKNLCFLNQAELLCLFSRAFNACQVVKADG

SEQ ID NO: 146567 - protein, 1073 aa, Oryza sativa
  Clone ID: PAT_MRT4530_4717C.1.pep
MEASISPPGSSKQAGLRRPSPGNSLKDLCLVSKQGSIAEVESALALLKKSGGSIDGRNVFGLCALHLATWRNHLPIVRRLLDAGADPDARDGESGWSSLHRALHFGHLCVASVLLQFGASLALEDTKGRTPVDLLSGPVSQANGDSPDSVAMEVFSWGSGTNYQLGTGNAHIQKLPCKVDALHGSYIKTVAASKFHSVAVSSDGELYTWGFGRGGRLGHPDIHSGQTTAVITPRQVTVGLGRKRVNVVAAAKHHTVIATEAGELFTWGSNREGQLGYPSVDTQPTPRRVSSLKARIISVAAANKHSAAVADTGEVFTWGSNKEGQLGYGTSNSASNCIPRMVEYLKGKAFKCVSAAKYHTVALGTDGEVFTWGHRLVTPRRAVISRCLKKGGNTNLKFHRMERLQVISVAAGVMHTTVLTADGAIFYWVSSDPDLRCRQIFSMCGRNVVNISAGKYWTALATAGGDVFMWDAKKHKDDLPMFTRVHGVKRATSVCVGETHMLVLSSIYHPEYPPKPKIQCKKAMLEWNGGMEELDEDIMFNDVQPDSGISGSDGVIKKGAPSLKSLCEKVAIEHILEPKNSIQLLEVAESLEAKELKKHCEDIAIRNLDYIFTVAAPSVMNASPETLANLERLLDEKSSEPWSHRRLPTVTATYPAVIDSDEEGDEAGGFLRLRDSQKSASKSYGISSYGNFLEKDSNAGQAASKQIRALRKKLQQIEMLEAKQLDGHQLDNQQLAKLESRAALEGELAELGIPTDLRTPVCVTEEKTNKKSSVSKKQKRKNKQAAHSDTPLVKREDRDQIYVKDLQEVLPVHISAEKEASVADSIKPSEHVTFINTKAISCPLENKASQPTSSKKKNRKGGLSLFLSGALDDTPKPSPPTPVVTVTPKHEGPAWGGAKVTKGSASLRDIQSEQRKTNEPITAKAKDRFEDSPDSAGRMRLSSFIPDARSTPITVTPARVVPASEGDKSTLSWSSSATSPNVLRPSLRDIQMQQEKRQTGISHSPKTRTSGFAIPSQGTSPEVGGIKDNVPNRWFKPEADAPSSIRSIQIEEQAMKDFKRFYSNVRIVKPQVQ

SEQ ID NO: 146568 - protein, 89 aa, Oryza sativa
  Clone ID: PAT_MRT4530_47180C.1.pep
AQQHPTLSQLSRAHESSTSDVDILFKSYINLSAIRGQSAARSVHLEAAASVSAFRKSNIFVGDVRDHSPLCSFMAPRRDCRIQLSLTAE

SEQ ID NO: 146569 - protein, 132 aa, Oryza sativa
  Clone ID: PAT_MRT4530_47181C.1.pep
MFARTHSAAVRPTPPATGLPLPPPARSRRKEGEPLPAAPRHAHATQCPVSGPPASPLPPPARSGREGGRKGSHRRPPYRHSTLPLPPSGQIWEGGRGREPPPPANETRRRPPMRPAATRHREPLPPPAGERR

SEQ ID NO: 146570 - protein, 124 aa, Oryza sativa
  unsure (1)..(124): unsure at all Xaa locations
  Clone ID: PAT_MRT4530_47182C.1.pep
KKKKTRDGRDTDVNTQKLRLLSLVQKSXASVHGYQNALHXPTWNKNTDSGLTITQRRTPGQDVNNNGKTVFNCXLRRRQLINIPQYYLAAKKAPXGGWAHAVFQTNTNSMGSPIARKNSIFRAV

SEQ ID NO: 146571 - protein, 49 aa, Oryza sativa
  Clone ID: PAT_MRT4530_47183C.1.pep
NDTGETYGNIRRTLRRVPQRRRNSRTREADQCLDLPHGTKHDLSEEEIP

SEQ ID NO: 146572 - protein, 51 aa, Oryza sativa
  unsure (1)..(51): unsure at all Xaa locations
  Clone ID: PAT_MRT4530_47184C.1.pep
PYGLLGHSSMTSTRPAXHQLAAMAEVDNTISEAQPEHGSTSSSRRGPCSGT

SEQ ID NO: 146573 - protein, 71 aa, Oryza sativa
  unsure (1)..(71): unsure at all Xaa locations
  Clone ID: PAT_MRT4530_47185C.1.pep
GDGGARPSKMLGTRLNFAGSSRYATAAPTTGAQKIXSLFRKXPPEAQARASTRARIGSRKTAYRDLLARWT

SEQ ID NO: 146574 - protein, 183 aa, Oryza sativa
  Clone ID: PAT_MRT4530_47186C.1.pep
RRETSSRWLCSTSAQPTAPASTPLPAPSALAPGQLVNPQLLMREQPQHSGQVANRLTQDQVAAMFLPSPPAVDPIQQQPIQQTLPIQQVVQPIQQQVVQPVQQMPPRQQPPWPIQQTPLRQQIFQPIQHQGSMSASAGFVTPGGQPGGNLNYQYQPPSPQAQYQPGGLAQPQFASQYGQFEPP

SEQ ID NO: 146575 - protein, 112 aa, Oryza sativa
  unsure (1)..(112): unsure at all Xaa locations
  Clone ID: PAT_MRT4530_47187C.1.pep
IQAVSPIAPLAQPTAPASTPLPAPSALALGQLVNPQLLMREQPQHSGQVVNRPTQDQVAAMFLPPQPAVDPIQQQPVQQTLPIXQVVQPIQQQVVQPVQQTPPRQQPPRPIQ

SEQ ID NO: 146576 - protein, 30 aa, Oryza sativa
  Clone ID: PAT_MRT4530_47188C.1.pep
ISICHGCGPKKTKKNKNKTKFKNFSLIRTI

SEQ ID NO: 146577 - protein, 132 aa, Oryza sativa
  Clone ID: PAT_MRT4530_47189C.1.pep
IQAVPPIAPSAQPTAPASTPLHAPSALALGQLVNPRLLMREQPQHSGQVANRLTQDQVAATFLPPQPAVDPIQQQLIQQTLPIQQVVQPIQQQVVQSVQQTPPRQQPPWPIQQTSLRQQIVQPIQHQCSMSA

SEQ ID NO: 146578 - protein, 510 aa, Oryza sativa
  Clone ID: PAT_MRT4530_4718C.1.pep
MEEAKQLHARALRRGVRLLQPLLLRVLAAGDHRYAARLLESYPAPPSAPLHNRLLHALASLHRPHPLLLPFFSRLHRLRLLTPLSFTLLFSSSSSSASSSTPFFLCSHSLLIKLGHFASSDPFLSSALVSFYAKSKLLVEARKVFDELTCRDTAVYNALLSAYAKGGLVDSAEKLFEEMPDRNVVSWTAMVSGYAQNGRHEEAVETFLEMWERAGVQPNELTVSSVLPACAAVGAMELGRKVEEYARGKGLLRNVYVANALLEMYSKCGSIRQAWQVFQGIGRQQDLCSWNSMIMAFAVHGLWREALALFYKLRMAGVKPDGITFVGVILACTHGGLVNEGKLFFDSMEAEFSLKPRIEHYGCMVDLLGRAGLLIESYSLIASMPVEPDAVIWGALLGACSFHGNVELAELAMDKLIHLEPQNTANLVILSNIYASSGKWDGVAQVWKLLKEKDHKKSAGYSFIELDGTMHKFLVEDKSHPRFEEVYNTLNSVTMTMKLVGLENLEELKG

SEQ ID NO: 146579 - protein, 144 aa, Oryza sativa
  Clone ID: PAT_MRT4530_47190C.1.pep
SLSTPLALRSPLQTRSASAARRTMSAVPVVSSALAGPAVAVAVARPASGSVTRLRAPAPHGVPAGSVPLASGLANCYRRSAAAARRLPIPSAAGGGTVGDAFVIEDTTNVKFPREIAVPGYTEPLVILGTGTFSCPFPYGIKSA

SEQ ID NO: 146580 - protein, 159 aa, Oryza sativa
  unsure (1)..(159): unsure at all Xaa locations
  Clone ID: PAT_MRT4530_47191C.1.pep
IQAVPPVAPSAQPMAPALTPLPAPSALAPGQLVNPQLLMREQPQHSGXVVNRPTQDQVAAMFLPPQPAVDPIQQQPIQQTLPIQQVVQPIQQQVVQPVQQTPPRQQPPRPIQQTPLRQQIVQPIQHQGSMSASAGFVAPGGQPXVQPDGTVMPQVVPEH

SEQ ID NO: 146581 - protein, 140 aa, Oryza sativa
  unsure (1)..(140): unsure at all Xaa locations
  Clone ID: PAT_MRT4530_47192C.1.pep
YKSIYMAFAKSATCIIHQSSTRWVAXTNQFPTCIKXINIWHMINSLKYVTAHASQSTAFLHSISHSIMGTTTSQQTAQQHAXPXLSFSTXXPRQTTPPVLHXGPTILLWSDNSIRLGLGTLCRPPAAILHMGSRLFAVRA

SEQ ID NO: 146582 - protein, 32 aa, Oryza sativa
  Clone ID: PAT_MRT4530_47193C.1.pep
CENIWLSVIKMFEMLMSDLIKPTLRRGEGVCQ

SEQ ID NO: 146583 - protein, 77 aa, Oryza sativa
  Clone ID: PAT_MRT4530_47194C.1.pep
MGKQERELEGGFLWAREGRTWPGGWPKPPATHQAFIGSTSPSLLLAPEPPPPILLVAEQSPALPRCHRGRNLPFRLR

SEQ ID NO: 146584 - protein, 79 aa, Oryza sativa
  Clone ID: PAT_MRT4530_47195C.1.pep
CLGGSKGGKRTQLHAKKLFFLFIKLKSLIKCEQKKNFFLSSMAIHYLHAMTMVHFFFSTIASSEEKLASPMFFKLGTHH

SEQ ID NO: 146585 - protein, 84 aa, Oryza sativa
  Clone ID: PAT_MRT4530_47196C.1.pep
MDDTHDNQHTPTRSHNIQAYVSQDTPPDIDFRDRHGYSPTVSPDTVRRYESTISDLAGHGFEEEDYHVVDYESDLQTDMSTTVR

SEQ ID NO: 146586 - protein, 317 aa, Oryza sativa
  Clone ID: PAT_MRT4530_47197C.1.pep
MTTADAIDGRRRRGGTNSPEHEEKWTPVGFCGNRMAAEERPAPEIMKVVVARLYDGPSVVWRGDDASCGGVRPEVGGGWRSSGARREGGIRRGRGRLSTFDVAILVRAPELSVDNRVVFLLESVPGEIRDSAFVSLDSIWRHRRGLTVPIPEVDIRRLVLAYVVSITLTTANGETREGARGRVFMGEGGEDVAGRVAEAAGDVGWRDRESGVGFEIKSRPFRARARGGRRGERAATWGGHGSGAAWAREERKRWGGSGGCRRLEEEDGANRHQAFIGSTSPSLLLAPEPPPPILLVAEQSPALPRCHRGRNLPFRLR

SEQ ID NO: 146587 - protein, 62 aa, Oryza sativa
  Clone ID: PAT_MRT4530_47198C.1.pep
MDSREERLWNVDGEFGSIRAGSLFFFMARAKLKVPVPKLEAIGCLAYGLVASYLTVADECVV

SEQ ID NO: 146588 - protein, 157 aa, Oryza sativa
  unsure (1)..(157): unsure at all Xaa locations
  Clone ID: PAT_MRT4530_47199C.1.pep
LRVALHHDVPKHSRVRHGIRSSHGTGXGKTQPTKSVXDLYTLLIHTCSXAVPTDDSLIATDLLMHITQHAHANADGXDHRLTHXFANGLNASLXGTRSQIYKNYTITRLPCTDXMNAYHPHWAASSCTKIVDYSPNQTITNAREIANKAHIVYYGIY

SEQ ID NO: 146589 - protein, 159 aa, Oryza sativa
  Clone ID: PAT_MRT4530_4719C.1.pep
MAGSGVLEVHLVDAKGLTGNDFLGEIGNIHPYVVVQYRSQERKSSVARDQGKNPSWNEVFKFQINSTAATGQHKLFLRLMDHDTFSRDDFLGEATINVTDLISLGMEHGTWEMSESKHRVVLADKTYHGEIRVSLTFTASAKAQDHAEQVGGWAHSFRQ

SEQ ID NO: 146590 - protein, 42 aa, Oryza sativa
  Clone ID: PAT_MRT4530_471C.1.pep
LLSRSSCYRGHYRVCSHVTVLCKFSYSRFFLSKTTLYKKKKK

SEQ ID NO: 146591 - protein, 49 aa, Oryza sativa
  Clone ID: PAT_MRT4530_47200C.1.pep
AVPFPILRGPKLGKSLAHASIPYLRHPPNGGDILLLTRSPIIIRIATGP

SEQ ID NO: 146592 - protein, 54 aa, Oryza sativa
  Clone ID: PAT_MRT4530_47201C.1.pep
FFFFFFFFFFFFFFGQKDQLNELHKIWQNWKEHMEQYMTRLQDYYQFKASLVCK

SEQ ID NO: 146593 - protein, 196 aa, Oryza sativa
  unsure (1)..(196): unsure at all Xaa locations
  Clone ID: PAT_MRT4530_47202C.1.pep
GPARLFTLKRCTKETSHTKQSIQPTRQQRKTVGDARRRRRPIRRPANDAVXVXRSSCTPEGGXGVAAPAPVQKVDELXDAEXXYYIGMGWRSSFRSEQTAKVXPAIHPXGVFFXAXVGPAPKVRRXSAPPGKXXXGXFLXXRGVGXXKXPXXKKKKKXSXXXFPXXPSFXXRXAAXXKKPQRVSXFFPPEGGXXXX

SEQ ID NO: 146594 - protein, 98 aa, Oryza sativa
  Clone ID: PAT_MRT4530_47203C.1.pep
MQRNSKRTKTENQETEAEDENTGAVSCATTLRLGSVVADRFRFTRKRQNALPAAPSRVPAKRASCLVPRGGSESWLNLTQLRVFLQNVALVGEATASW

SEQ ID NO: 146595 - protein, 120 aa, Oryza sativa
  Clone ID: PAT_MRT4530_47204C.1.pep
MAFTQLSTELVLMDPNRSSGYNNFLKDPDLVHPFGQASTQSDFCHPHDDFPNAHAQFPPFSTQPPPLATGNGGLTLASISRVRQRVQANPVSQDDGKARMYYTHDEDIRLASIFDHIPNI

SEQ ID NO: 146596 - protein, 70 aa, Oryza sativa
  Clone ID: PAT_MRT4530_47205C.1.pep
PAGPTHADNSDTLLPVICRGADIDHIPNIPHACTRHGRHPVLHPHSRALPCRAEAKVASASSYASTGNGC

SEQ ID NO: 146597 - protein, 216 aa, Oryza sativa
  Clone ID: PAT_MRT4530_47206C.1.pep
GVKIYTRVYKRKSYFRSSASECEKIIHSARWLEFRRQRVAFQRTRRTIHLIPLASQDDSSGLSVNGSPQVDSASEMDDIRVKLVKALQSEDISTGLVQSIHDAARSIELAFLDHSKSSKNSWFPKEWLGVDNNEWIKPLSYQAAVGSLLQAVIDVSSRGNGRDRDINVFVQRSLSRLLSSLEGAIQNELSKREPTLYQWYSSDQNPLVVRTFVNSF

SEQ ID NO: 146598 - protein, 49 aa, Oryza sativa
  unsure (1)..(49): unsure at all Xaa locations
  Clone ID: PAT_MRT4530_47207C.1.pep
YTQQNXXNCXIKXNSKKEQDIFFLGHFIEHHECTVRTTNQQPHVQEKIN

SEQ ID NO: 146599 - protein, 122 aa, Oryza sativa
  Clone ID: PAT_MRT4530_47208C.1.pep
HTTIVGVHVFTVSLPSPPSTGVLADRLVAADWCPRLYGWLITPLLLGVHVFTAGLPSPPSTSDLAIGLTSPPPTGVSACTAGLLYRRCWASTSLPTGLPSPPPTDVFASPLMASMSSSTGCL

SEQ ID NO: 146600 - protein, 150 aa, Oryza sativa
  Clone ID: PAT_MRT4530_47209C.1.pep
MKIHNFLRCPPTASVMMFSLVGHVGNVTSGGGRLGSTRDSRLRITPITVTTAGSTTSFAACARDGRIRATDAADDDGEEEVAGSGVAFPTRGDDGSGGGEAWRPSPAWIQRRPPSPHMAAAVDLKVVRHGTRRPRGSDGDRPPLTRRRRI

SEQ ID NO: 146601 - protein, 96 aa, Oryza sativa
  Clone ID: PAT_MRT4530_4720C.1.pep
GNREGRRPRRSALMHVPLRFPLPDLPGHPPLLACSRLPLPLPLVWHGAGARARRAPGHLGYSCRHHDGASDSAGKATLLSTNKGQNKCSLPSFSSF

SEQ ID NO: 146602 - protein, 31 aa, Oryza sativa
  Clone ID: PAT_MRT4530_47210C.1.pep
MGCSGLRLPTWAAAAPPSPSDWDGRPLRLGA

SEQ ID NO: 146603 - protein, 162 aa, Oryza sativa
  unsure (1)..(162): unsure at all Xaa locations
  Clone ID: PAT_MRT4530_47211C.1.pep
NVEWLAWVGLGRAGTQGRVATGRXELGEPFKGARRRRQRPTAXATAKETSGRTNPRQRFPNRFSRSFQTEKGGGDPKDCFPSFNFIGSGKERPDLEGNGGGSTLGFRAAAAEGXTTTPTGGPHLSATARSRGRLRLRTGPTWAGEREXGFGPTFGPKPKKTF

SEQ ID NO: 146604 - protein, 169 aa, Oryza sativa
  Clone ID: PAT_MRT4530_47212C.1.pep
MAAYAVSRTYQEVYYTGENLYDRTSSTHETKIILVQVPCEEALIQFIWDYGENHIDYNREQWNPEIADEIPIKNGSTRSTACFLTANKGFIGVSANEDQTDWHARISSRFGPALELSRSPRCRMQSQLMRIHCTCICWCFQDASDAASSAMGNYAVCGDVKGIEEVEVP

SEQ ID NO: 146605 - protein, 114 aa, Oryza sativa
  Clone ID: PAT_MRT4530_47213C.1.pep
MAAAAAATARSSVAPHASPTLRRSGSSALVISDLVLQQLNLLKDWMMMESVVDDQDKEQRKQASGSLHFLRVLLKILPSLSTLTGIADSIYLLRLQKQALFRRPIGPLTDVLAC

SEQ ID NO: 146606 - protein, 52 aa, Oryza sativa
  Clone ID: PAT_MRT4530_47214C.1.pep
QTDGTNGMDQLPMLPRQIKRAQFEGETWGLFRRLLGHMIWGPYFTNTGGANN

SEQ ID NO: 146607 - protein, 73 aa, Oryza sativa
  Clone ID: PAT_MRT4530_47215C.1.pep
ITKGDSGPDLINLANDAVVCPAGRVLIQLGFRSLSSPLSAQIASSLVLSTDQLKVKDYDPLRAQGAQIQYCHL

SEQ ID NO: 146608 - protein, 32 aa, Oryza sativa
  Clone ID: PAT_MRT4530_47216C.1.pep
IRSRYIIGSSHGWIITADERSELHLVNPITGD

SEQ ID NO: 146609 - protein, 36 aa, Oryza sativa
  Clone ID: PAT_MRT4530_47217C.1.pep
VLSNTRCQDRIRDLKLHGKLRMLIRANLQTRMRILT

SEQ ID NO: 146610 - protein, 58 aa, Oryza sativa
  unsure (1)..(58): unsure at all Xaa locations
  Clone ID: PAT_MRT4530_47218C.1.pep
PKIPVANVGYFXFFAPFDNGMDMANPLNAHPNQFVSLHVPDNKFGPSLIPHPKFGPPM

SEQ ID NO: 146611 - protein, 423 aa, Oryza sativa
  Clone ID: PAT_MRT4530_47219C.1.pep
MAATMVAMSAKSKNSVLTLEKKQGWSVPQLPELRFPWDLHEDKGFSLSLHGSASPHGGLFASVGLKVSTAAPAVAPSPAEHDFKIPFADHCIKYVSSAVGYQVPGTEAESVNEEEVVDGKAVKKAKKRGLKLKIKIGNPHLRRLVSGAVAGAVSRTCVAPLETIRTHLMVGSNGDSMTEVFQSIMKTEGWTGLFRGNFVNVIRVAPSKAIELFAFDTAKKFLTPKADESPKTPFPPSLIAGALAGVSSTLCTYPLELIKTRLTIEKDVYNNFLHAFVKILREEGPSELYRGLTPSLIGVVPYAATNYYAYDTLKKLYRKTFKQEEISNIATLLIGSAAGAISSTATFPLEVARKQMQVGAVGGRQVYKNVFHALYCIMENEGIGGLYKGLGPSCIKLMPAAGISFMCYEACKKILVEDDQDSE

SEQ ID NO: 146612 - protein, 334 aa, Oryza sativa
  Clone ID: PAT_MRT4530_4721C.1.pep
MAGCLWPCVTGGGAAADGAGSLFRSKARGPVEVVRHARELLAFLAENHDACGDKRDVKREHKMVDLAKSIGEMKSILYGNGEADPVDEACSQLTKEFFKENTNSLHLLVVCLPYMDLETQKDVTQVTANLLGKRYDNMDIAIHYSAILRDCIRHQVAARYVLESQHMKKFFDYIQYPDFNIASDAFKTFKELLTRHRSSAAEFFSNNYDWFFPEFNSKLLSSSNYIIRRQATQLLGDILLDKSNTTAMVRYVSSKDNLIILMNLLREQSRAIQVEAFRVFKLFTCNPKKPPEIVGILVTNKSKILRFLADFTIEKEDQQFEADKAQVVTEISAM

SEQ ID NO: 146613 - protein, 65 aa, Oryza sativa
  unsure (1)..(65): unsure at all Xaa locations
  Clone ID: PAT_MRT4530_47220C.1.pep
WRRRSRGVGSGRXAGVGGGGKAERVVGGDGRWWHPAAGDGEDDRQLAAAGFRPAGEAGRRWRWWR

SEQ ID NO: 146614 - protein, 371 aa, Oryza sativa
  unsure (1)..(371): unsure at all Xaa locations
  Clone ID: PAT_MRT4530_47221C.1.pep
MVISVRASSVLAWNVLDEYVLLAPWFYRFARRFRVIGMASTMKKKVESKHNNKDMKMALKHDIPLEVLQEGIPTVLRGAPDNEVQAGRVIRVSSATGLKEALQQAXRERFSRSNVVSYIPPSVAAQIRQAQIALQGPAPADQEKKPTTVKFKVDSPNPNASIGEEEEKGNIAGFIIANIHVLEAKEMAMVAMEGDMSVLEELQKRISSSPDLSPHDVQVQLPTTANNLGTDKGKNILFSLKKRYLLAHLQAGHSRMATNILKYVDLAQYNSFIEEADPEKASKAMAVKAQYELEYPGKHSPGWMAKQVLGVAAHMYWEKKKAKIMGEDGLWAGDKTTVLTRLKKQEQKDGKTRQQEVAHRRRPSRLIDLTI

SEQ ID NO: 146615 - protein, 1767 aa, Oryza sativa
  Clone ID: PAT_MRT4530_47222C.1.pep
MSNEVNHVGKASMFNGTNYSTWKIKMSTHLKAMSFHIWSIVDVGFDITGTPLTESDHRNLQLNAQAMNALFNSLSQEEFDRVSNLETAYEIWNKLAEIHEGTSEYKDAKLHFLKIQYETFSMLPHESVNDMYGRLNVIVNDLKGLGANYTDLEVAQKMLRALPEKYETLVTMLINSDMSRMTPASLLGKINTNDMYKLKKEMEEASPSKKCVALQAKVEDKSKSKVNEVNEDLRKERGRGSNSNRRRNRRPNKTLSNLRCFECGEKGHFASKCPSKDDDGDKSSKKKTGGYKLMKKLKKEGKKIEAFIGEWDSNEESSVSSGSEEEGGDDASSKKKKMAVVPIKEAPSLFAPLCLMAKGSSKVTSLSDSESDDDCDDVSYDELVSMFEELHAYSEKEIVKFKALKKDHVSLEVLYEELKTSHERLTISHEKLKEAHDNLLSTTQHGAHIDVGISCDLLDDSATCHIAHIASSSISTSWDDLMDMPSPSSSSSSCVSICDASLIVENNELKEQVAKLNKSLERCFKGKNTLDKILSEQRCILNKEGLGFTPKKGKKPSHHATRFVKSNGKYCSKCCEVGHLVNYRTGGSHWVLDSGYTQHMTGDRAMFTTFEVGENEQEKVTFGDNSKGKVIGLGKIVISNDLSNENVSLVKSLNFNLLSVAQICDLGLSCAFFPQEVIVSSLLDKSCVFKGFRYGNLYLVDFNSSEANLKTCLVAKTSLGWLWHRRLAHVGMNQLSKLSKRDLVVGLKDLKFEKDKLCSACQAGKQVAGSHSTKSIMSTSRPLELLHMNLFGPTTYKSIGGNSHCLVIVDDYSRYTWVFFLHDKSIVAEFFKKFAKRAQNEFSCTLVKIRSDNGSEFKNTNIEDYCDDLHIKHELSATYSPQQNGVVERKNRTLIEMARTMLDEYGVSDSFWAEAINTACHATNRLYLHRLLKKTFYELIVGRKPNVAYFRVFGCKCYIYRNGVRLTKFESRCDEGFLLGYASNSKAYRVYNKNKGIVEETADVQFDETNGSQEGHENLDVVGDEGLMRAMKNMSIRDVKSIEVEDKPSTSTQDEPSTSASPSQAQVEVEEEKAQDPPMPPRIHTALSKDHPIDQVLGDISKGVQTRSRVASICEHYSFVSCLEPKHVDEALCDPDWMNAMHEELNNFARNKVWTLVERPRDHNVIGTKWIFRNKVDWWEFEMSMIGELSFFLGLQIKQLKDGTFVSQTKYIKDLLKRFGLEDAKPIKTPMATNGHLDLDEGDYAGCKVDRKSTSGSCQMLGRSLVSWSSKKQNSVALSTAEAEYVSAGSCCAQLLWMKQTLLDYGISFTKTPLLCDNDSAIKIANNPVQHSRTKHIDIRHHFLRDHVAKCDIVISHIRTEDQLADIFTKPLDETRFSMPPRTRHGRREPTPDPVSENEESSGDEYVQSDDDNMENVEGDEMEVSDDGDDNGSGNGEDDEASDDGSPLDSSIQFVLNLRNAQQYTILRHHDQFRRPNDCNDPRFHTRFQKSVYAQVYANKAFAEHKWISWRHIGETPEFENLQEMFRTVGIDRIVTMKQPFDEDLIRQFYATVWVSGDCDAMKWMSGTLRCSINRHEFKELLHIRFNNGDDLHDEHTHNPFPIDHFSQFYEEGRRHTYGKVAGLRALPSVINRIVRATILPRGGNNDDIRGVAWHVIDAIMDGRRFDVINLMMKEIAISKGTLGQGIYYAPYIMRLIQSKLGQIGHNLKEHKEYKPRLKLSSPRAPRVRQPTFDQGASSSAAPLLLKGMIQVFFFPSTICLLWNATQ

SEQ ID NO: 146616 - protein, 1975 aa, Oryza sativa
  Clone ID: PAT_MRT4530_47223C.1.pep
MDRQWMYADRRSKEFIDGVHYFLRVAKANRHKGFICCPCNKCKNQKEYSASRTIHFHLFESGFMPSYNCWTSHGEQGVEMKKDKVEDDNIPDFAQYAGFEGNQTGEEERDADGNDVADDLGQMLQDTKEYCESEKGAHKLDKMLEDHRTSLYPGCEQGHKKLDPTLEFLQWKAKNSVSDKAFGDLLKLVKNILPEGNKLPKTTNKGNARMMRWHAEERQQDEMLRHPADDSQWRNINRKFKDFGKDARNIRFGLSTDGMNPFGEMSNGYSTWPVTMCIYNLPPWLCMKRKYIIMPIIIQGPKQPGNNIDVYLRPLVEDLKLLWKKEGVPELPYWEFLDVRHAIDVMHLTKNLCVNLLGFLGVYGKSKDTLEARNDLKHMEQRGDLHSEPKEKGSHYLSPASYTLSKAEKENMFECLESINVPSGYSTNIKRIISTKEKKFTNLKSHDCHVLMTQLLPVVIRGILPDNVRATIIKLCAFMNAISQNVIDPDILEALQNDVVQCLVSFELIFPPSFFNIMTHLLCHFVKEIGILGPVYLHNMFPFERYMGVLKKYVRNRAHPEASIAKGYGTEEVIEFCVEFIEDLRPIGGYEINGYTFYTRAQDIKCTNQNSVVRIDAMGHDGTTGTYYGAIEDIWELDYGPLKVPPFRCQWVRLTGGGVTIDDSGMTMVDLNKVGYSDEPFVLSNDVTQVFYVKDMSSKGKKGRGEASRPPLLILARPDQGRSDRPHSGGMTGVPWQSTSQYYKWYQSLVSLDWASPPRVKMLNEVNHVGKAPMFNGTNYSTWKIKMSTHLKAMSFHIWSIVDVGFAITGTHLTGIDHRNLQLNAQAMNALFNCLSQEECDRVSNLETAYENWNKLAEIHEGTSEYNDAKLHFLKIQYETFSMLPHESVNAMYGRLNASWGKINTNDMYKLKKKEMEETSPSKKCIAPQAEVEDKGKGKCFECGEKRHFASKCPSKDDDGDKSSMKKSGGYKLMKKLKKEGKKIEVFIGDWVTNEESSASSGSEEEGGDDASSKKKKMAVVAIKEAPSPFAPLCLMAKGSSKVTSLSDSESDDDCDYASYDELVSMFEELHAYSEKEIVKFKALKKDHASLEVLYEELKTSHERLTISHEKLKEAHDNLLSTYQHGALIDVGISCVLLDDSATCHIAHVASSSISTSCDDLVDMPSSSSSPCVSICDASLVENNELKEQVAKLNKSLERCFKGKNTLDKILSEQRCILNKEGLGFIPKKGKKPSHRATRFVKSNGRLMMVALLLDMWVLLYSVVNYRTGGSHWVLDSGCTQHMTGDRAMFTTFDVGGNEQEKGVRLTKFESRCDEGFLLGYVSNSKAYRVYNKNKGIVEETADVQFDETNGSQEGHENLDDVGDEGLMRAMKNMSIRDVKPIEVEDKPSTSTQDEPSTFATPSQAQVEVEEEKAQDPPMPQRIHTALSKDHPIDQVLGDISKDVQTRSRVASICEHYSFVSCLEPKHVDEALCDLDWMNAMHEELNNFARNKVWTLVERPRDHNVIGTKWVFRNKQDEKGLVVRSKARLVAQDFTQVEGLDFGETFAPVARLEAIRILLAFASCFDIKLFQMDVKSAFLNGEIAELVFVEQPPGFEDPKNPNHVYKLSKALYGLKPAPRAWYERLRDFLLPKDFKIGKVDTTLSTKIIDDDFVVCQIYVDDIIFGSTNEVFCKEFGDMMSREFEMSMVGELSFFLGLQIKQLKDGTFVSQTKYIKDLLKRFGLEDAKPIKTPMATNGHLDLDEGGKPVDLKLYHSMIGSLLYLTASRPDIMFSVCMCARFQAAPKKCHLVAVKRILRYLKHSSTIGLWYPKGAKFKIVSYSDLDYAVCKVDRKSTSGSCQMLGRSLVSWSSKKQNSVALSTAEAEYVSAGSCCAQLLWMKQTLLDYGISFTKTPLLCDNDSAIKIANNPVQHSRTKHIDIRYHFLKDHVVAKSDIVISHIRTENQLADIFTKPLDETRFCKLRNELNVIDFSNVA

SEQ ID NO: 146617 - protein, 1028 aa, Oryza sativa
  Clone ID: PAT_MRT4530_47224C.1.pep
MTDEVVVKKMVRAITPRNSTLVTIIRLNTYRGDGKTGCVKTANPAGSHDRRLPGGGGNGSGGGCCALPSARSGKRGFGGLPRPAADRRRQQRRRWPHPLHLAGLTGWHRRSDRHVKAGFAITGTPLTEIDHRNLQLNAHAMNALFNSLCQEEFDRVSSLETAYEIWNKLVEIHEGTSEYKDAKLHFLKIQYETFSMLPHESVNDMYGRLNVIVNDLKGLGANYTDLEVAQKMLRALPEKYETLVTMLINSDMSRMTPASLLGKINTNDMYKLKKKEMEEASPSKKCIAFQAEVEDKGKVKVNEANKDLEEEIALLARRFNDLLGRRKERGRGSNSNRRRNRRPNKTLSNLRCFECGEKGHFASKCPSKDDDGDKSSKKKSGGYKLMKKLKKEGKKIEAFIGEWDSNEESSVSSGSEEEGGDDASSKKKKMAVVAIKEAPSLFAPLCLMAKGSSKVTSLSDSESDDDCDDISYDELVSMFEELHAYSEKDIVKFKALKKDHASLEVLYEELKTSYERLTISHEKLKEAHDNLLSTTQHGAHIDVGISCDLLDYSATCHIAHVASSSISTSCDDLVDMPSSSSCVSICDASLVVENNELKEQVAKLNNSLEKCFKGKNTLDKILSEQWCILNKEGLGFIPKKGKKPSHRATHFVKSNGRLMMVALLLDLWVPLYLVVNYRTGGSHWVLDSGCTQHMTGFLLSYASNSKAYWVYNKNKGIVEETADVQFDETNGSQEGHENLDDVGDEGLMIAMKNMSVRDVKPIEVEHKPSTSTQGEPSTSASPSQAQVEMEEEKAQDPPMPPRIHTALSKDHPINQVLGDISKDEALCDPDWMNAMHEELNNFTRNKVWTLVERPRDHNVIGTKWVFRNKQDENELVQLKDGTFVSQTKYIKDLLKRFGLEDAKPIKTPMATNRYLDLDEGVGWGRRSDRPYRLGLTGLELAPEMTSDKQYTCLLLRSSALPVDARFILHSMASDFLATLALKPGMDLTGTDIPTPGVSTPASARDESQEALIILTGWGEACDRPPVAT

SEQ ID NO: 146618 - protein, 2011 aa, Oryza sativa
  Clone ID: PAT_MRT4530_47225C.1.pep
MSNEVNHVGKAPMFNGTNYSTWKIKMSTHLKAMSFHIWSIVDVGFAITGTPLTEIDHRNLKLNAQAMNVLFNSLSQEEFDRVSNLETAYEIWNKLAEIHESTSEYKDAKLHFLKIQYETFSMLPHESVNDMYGRLNVIVNDLKGLGANYTNLEVAQKMLRALPEKYETLVTMLINSDMSRMTPASLLGKINTNDMYKLKKKEMEEASPSKKCIALQAEVEDKSKSKVNEVNKDLEEEIVLLARRFNDLLGRRKERGRGSNSNRRRNRRPNKTLSNLRCFECDSNEESSASSGSEEEGGDDASSKKKKMAVVAIKEAPSLFAPLCLMAKSPSKVTSLSDSESDDDCDDVSYDELVSMFEELHAYSEKEIIKFKTLKKDHASLEVLYEELKTSHERLTISHEKLKEAHDNLLSTTQHGALIDVGISCDLLDDSATCHIAHVASSSISTSCDDLMDMPNSSSSSCVSICDASLVVENNELKEQVAKLNKSLERCFKGKNTLDKILSEQQCILNKEGLGFILKKGKKPSHRATRFVKSNGKYCSKCREVGHLVNYRTGGSHWVLDSGCTQHMTGDRAMFTTFEVGGNEQEKVTFGDNSKGKVIGLGKIAISNDLSIDNVSLVKSLNFNLLSVAQICDLVLSCAFFPQEVIVSSLLDKSCVFKGFRYGNLYLGDFNSSEANLKTCLVAKTSLGWLWHRRLAHVGMNQLSKLSKRDLVVGLKDVKFEKDKLCSACQAGKQVACSHPTKSIMSTSRPLELLHMEFFGPTTYKSIGGNSHCLVIVDDYSRYTWMFFLHDKSIVAELFKKFAKRGQNEFNCTLVKIRSDNGSKFKNTNIEDYCDDLGIKHELSATYSPQQNGVVEMKNRTLIEMARTMLDEYGVSDSFWAEAINTACHATNRLYLHRLLKKTSYELIVGRKPNVAYFRVFGCKCYIYRKGVRLTKFESRCDEGFLLGYASNSKAYRVYNKNKGIVEETADVQFDETNGSQEGHENLDDVGDEGLMRAMKNMSIGDVKPIEVEDKPSTSTQDEPSTSATPSQAQVEVEEEKAQDLPMPPRIHTALSKDHPIDQVLGDISKGVQTRSRVASICEHYSFVSCLEPKHVDEALCDPDWINAMHKELNNFARNKVWTLVERLRDHNVIGTKWVFRNKQDENGLVVRNKARFVAQGFTQVEGLDFGETFAPVTRLEAICILLAFASCFNIKLFQMDVKSAFLNGEIAELVFVEQPPGFEDPKYPNHVYKLSKALYGLKQAPRAWYERLRDFLLSKDFKIGKVDTTLFTKIIGDDFFVCQIYVDDIIFGCTNEVFCKEFGDMMSREFEMSMIGELSFFHGLQIKQLKDGTFGLEDAKPIKTPMATNGHLDLDEGGKPVDLKLYRSMIGSLLYLTASRPDIMFSVCMCARFQAAPKECHLVAVKRILRYLKHSSTIGLWYPKGAKFKLVGYSDSDYAGCKVDRKSTSGSCQMLGRSLVSWSSKKQNFVALFIAEAEYVSAGSCCAQLLWMKQILLDYGISFTKTPLLCENDSAIKIANNPVQHSRTKHIDIRHHFLRDHVAKCDIVISHIRTEDQLADIFTKPLDETRFCKLRNELNLCLPALAMVIVSPRPIPSVRMRNKAEMSMFKVKMKIWKMFRVMRWKEVMMVMTMGVAMRPNDCNDPRFHTRFQKSVYEQVYANKAFAEHKWISWRHIGETPEFEDLQEMFRTVGIDRIVTMKQPFDEDLIRQFYATWMSGTLRCSINRREFKELLHIRFNNGDDLHDEHTHNPFSIDHFSQFYEEGGRHTYGKVAGLRALPSVINRIVRATILPRCGNNDDIRGVAWHVIDAILDGRRFDVINLIMKEIAISKGTIEQGIYYAPYIMRLIQSKLGQIGHNLKEHKEYKPRLQLSTPRAPCVRQPTFDQGASSSAAPPPPHGYDPSDFFHPQYAYFGMQPNEYFNPVLGAINTLSESIQRLSTGHEALHEDVRGLRTDVGNLNTSVGRLHTRVGVLDSRVQTLKSTQAFVYHRRRDAHHPSTSARPPSPPQE

SEQ ID NO: 146619 - protein, 1610 aa, Oryza sativa
  unsure (1)..(1610): unsure at all Xaa locations
  Clone ID: PAT_MRT4530_47226C.1.pep
MSTYGLKIDGTKLKEEKTVNLCFHLKLIEALFNSLSQEEFDRVSNLETAYEIXNKLAEIHEGTSEYKDAKLHFLKIQYETFSMLPHXSVNDMYGRLNVIVNDLKGLGANYTDFEVAQKMLRALPEKYETLVTMLINSDMSRMTPASLLGKINTNDMYKLKKEMEEASPSKKCIALQAEVEDKGKGKVNKANEDLEEEIALFARRFNDHLGRRKERGRGSNSNRRRNRRPNKTLSNLRCFECGEKGHFASKCPSKDDDGDKSSKKKSGGYELMKKLKKERKKIEAFIGEWDSNEESLASSRSEEEGGDDASSKKKKMAVVTIKEAPSLFAPLCLMAKGSSKVTSLSDSESDDNCDDVSYDELVSMFEELHAYSEKEIXKFKALKKDHASLEILYEELKTSHERLIISHEKLKEAHDNLLSTTQHGARIDVGISCDLLDDSATCYIAHVASSSISTSCDDLVDMPSSSSCVSICDVSLVVENNELKEQVAKLNKSLERCFKGKNTLDKILSEQRCILSKEGLGFILKKGKKPSHRATRFVKSNGKYCSKCREVGHLVNDCPGGKLSKTCMFDSHYMLRKAHDGSIVARYVGSPILGGKKNTIWVSKALISXPPRTQICLDYSRYTWVFFXHDKSIVAELFKKFAKRAQNEFNCTLLKIRSDDGSEFKNTNIEDYCDDLGIKHELSATYSPQQNGVVERKNRTLIEMARTMLNEYGVSDSFWVEAINTACHATNRLYLHRLLKKTSYELIVGRKPNVAYFRVFGCKCYIYXKDVRLTKFESRCDEGFLLGYASNTRVYNKNKGDEGLMRAMKNMSIGDVKPIEVEDKPSTSTQDEPSTSASPSQAQVEVEEEKAQDPPMSPRIHTALSKDHPIDQASGDISKGVQTRSRVASICEHYSFVSCLEPKHVDEXLCDPDWMNSMHEELNNFARNKVWTLVERPKDHNVIGTKWVFRNKQDENGLVVRNKARLVAQGFTQVEGLDFGETVAPVARLEVIRILLAFALCFDIKLFQMDVKSVFLNGEIAELVFVEQPPGFKDPKNPNHVYKLSKALYGLKQAPRAWYERLRDFLLSRYTKSTLCRVHLQAIFPGSLKNLSQIGYVVFYFFRLNNHIINIDFNQPADQXHDIYIIHSSLVREPNQVYQIVSQTKYIKDLLKMFGLEDAKPIKTPMATNAHXRSMIGSLLYLTASRPDIMFSVCICARFQAAPKECHLVAXQKVLSLSLLAIPIRIMPVAKWIERTHPVVAKCLLCLPTLAMVVVSPRPIPSVRMRNQAEMICSKXDENMENVEGDEVEVSGDDNGSDGGDVNGSGDGEDDEASDDGSPLDPTIHFVLNLRNAQQYTILRHXDQFRRPNDCNDPRFHTRFQKSVYEQVYANKAFTEHKWISWRHIGETPEFVDLQEMFWAVGIDRIVTMKQPFDEDLIRQFYATVWVSGDCDAMKWMSGTLRCSINRREFKELLHICFNNGDDLHDEHNHNPFMIDYFSQFYEEGGRHTYGKVGGLRAIPSVINRIVRATILPRCGNNDDIRGVAWHVIDAIMDDRRFDVINLMMKEIAISKGTIGQGVYYALYIMRLPPPRRLVEELPGDLSEKIMEEARCRFVSGLEFTTFGVKEELP

SEQ ID NO: 146620 - protein, 1476 aa, Oryza sativa
  unsure (1)..(1476): unsure at all Xaa locations
  Clone ID: PAT_MRT4530_47227C.1.pep
MSNEVNHVGKAPMFNGTNYSTWKIKMSTHLKAMSFYIWSIVDVGFAITGTPLTEIDHRNLQLNAQAMNALFNSLSQEEFDRVSNLETAYEIWNKLAEIHEGTSEYKDAKLHFLKIQYETFSMLPHESVNDMYGRLNVIVNDLKGLGANYTDLEVAQKMLRALSEKYETLVTMLINSDMSRMTPASLLGKINTNDMYKLKKKEMKEASPSKKCIALQAEVEDKSKSKVNEVNEDLEEEMVLLARKFNDLLGRRKERGRGSNSNRRRNRRPNKTLSNLRCFECGEKGHFASKCPSKDDDGDKSSKKKSGGYKLMKKLKKEGKKIEAFIGEWDSNEESSASSGFEEQCSDDASSKKKKMAVVAIKEAPSLFAPLCLMAKGSSKVTSLSDSESDDDCDDVSYDELVSMFEELHAYSEKEIVKFKALKKDHASLEVLYEELKTSHERLTISHEKLKEAHDNLLSTTQHGAHIDIGISCNLLDDSATCHIAHVASSSISTSCDDLMDMPSPSSSSSSCVSICDASLIVENNELXEGLRFIPKKGKKPSHHAXLVLSRAMVNYRTGGSHWVLDSGCTQHMTGDRAMFTIFEVGGHEQEKVTFGDNSKGKLFKKFAKRAQNEFSCTLVKIRSDNGSEFKNTNIEDYCDDLGIKHELSATYSPQQNGVVERLYLHRLLKKTSYELIVGRKPNVAYFRVFGCKCYIYRKGVRLTKFESRCDEGFLLGYASNSKAYRVYNKNKGIVEETADVQFDETNGSQEGHENLDDVGDEGLMRAMKNMPIGDVKPIEVEDKSSTSTQDEPSTSASPSQAQVEVEEEKAQDPPMPPRIHTALSKDHSIDQVLGDINEALCNPDWMNAMHEELNNFARNKVWTLVERPRDHNVIGTKWIFRNKQDENGLVVRNKARLVAQGFTQVEGLDFGETFAPVARLEAIRILLAFTSCFDIKLFQMDVKSAFLNGEIAELVFVEQPPGFEDPKNPNHVYKLSKALYGLKQAPRAWYEILRDFLLSKDFKIGKVDTTLFTKIIGDDFFVCQIYVDDIIFGSTNEVFCKEFGDMMSREFEMSMIGELSFFLGLQIKQLKDGTFVSQTKYIKDLLKRFGLEDAKPIKTPMATNGHLDLDEGAMPPRTRHSRREPTPDPVSENEDSSGDEYVQSDDDNMENVEGDEIESVYAQVYANKAFAEHKWISWRHIGETPEFENLQEMFQTVGIDRIVTMKQPFDEDLIQQFYATVWVSGNCDAMKWMSGSLRCSINRREFKELLHIRFNNGDDLHDEHTHNPFPIDHFSQFYEEGGRHTLERWREIAISKGTIGQGIYYAPYIMRLIQSKLGQIGHNLKEHKEYKPRLQLSSPRAPRVRQPTFDQGASSSVVPPPPPHGYDPSAFFHPQYAYFGMQPNEYFNPVLGAINTLSESIQRLSTGHEALHEDVRGLRTDVGNLNTSVGRLHARVGVLDSRVQTLESTQAFVYHRRHDASHPSTSARPPSPPQE

SEQ ID NO: 146621 - protein, 1406 aa, Oryza sativa
  unsure (1)..(1406): unsure at all Xaa locations
  Clone ID: PAT_MRT4530_47228C.1.pep
CVRGLISQESSALLPFVELVWHLIDHLHAGSLLVTLGGCRLLDGLWRSCPVTSPRRLWKRPGAGFTITGTPLTEIDHRNLQLYAQAMNALFNSLSQEEFDRVSNLETAYEIWNKLAEIHEGTSEYKDAKLHFLKIQYETFSMLPHESVNDMYGRLNVIVNDLKGLGVNYTDLEIAQKMLRALPEKYETLVTMLINSDMSRMKPASLLGKINTNDMYKLKKKEMDEASPSKKCIALQAEVEDKGKGKERXMGSNSNRRRNRRPNKTLSNLRCXECGEKGHFAXKNTNIEDYCDDLGIKHKLSATYSPQQNGIVERKNRTLIEMARTMLDEYGVFDSFWAEAINTACHTTNRFYLHRLFKKTSYELIVGRKPNVAYFRVFGCKCYIYRNGVRLTKFESRCDEGFLLGYASNSKVYRVYNKNKGIVEETADVQFDETNGSQEGHENLDDVGDEGLMRAMKNMSIGDVKPIEVEDKPSTSTQDEPSTSAMPSQAQVEVEEEKAQDPPMPPRIHTALSKDHPIDQVLGDISKGVQTRSRVASICEHYSFVSCLEPKHVDESHCDPDWMNAMHEELNNFARNKVWTLVERPRDHNVIGTKWVFRNKQDENGLVVRNKARLVAQGFTQVEGLDFVETFAPVARLEAIRILLAFASCFDIKLFQMDVKSAFLNGEIAELIFVEQPSGFEDPKNPNHXLKQAPRVWYERLRDFILSKDFKIGKVDTTLFTKIIGDDFFVCQIYVDDIIFGSTNEVFCKEFGDMMSREFEMSMIGELSFLLGLQIKQLKDGTFVSQTKYIKDLLKRFGLEDAKPIKTPMATNGHLDLDEGGKPVDLKLYRSMIGILLYLTASRPDIMFSVCMCARFXAAPKECHLVAVKRILRYLKHSSTIGLWYPKGAKFKLVGYSDSDYAGCKVDRKSTSSSCQMLGRSLVSWSSKKQNSVXPLYHRGGIYFGGXLLCPIALAETFGQNEIEKEFEKNFKTNLWRSDRPQSVGLTELXGRRSDRPWVVSLTDLRPAVMPPRTHHGRREPTADPVSEESSGDEYAQSDEEVEANVEGASEEESGDDVSGSGEDEDEGSDDMHIDPSIQFVVNMSNPSQYTILRHHDQFLRPRDTPDPRFHIAFQKMWVAGDYSEMKWMSDTLQCSISRWQFRWLLXYEEHTHNPLFIDYLSQFYEDGVRYTYGKVASLRTIPSVVNRIVRATILRRLGNNDDIRGXVAWHVIDGIIXGRQFDIVSLMMQEIAISKRTFTQGIYYAPYIMRLIQDKLXKKHKQYKPRLQLGAPRAPRVAPSSHPGASSSSAPPPPPGYDPNAFFHPQYAYFGMQPNEYFNPVLGAINPLSESIQRLSTGHEALHEDVRGLRTDVGDLNASMGRLHTRVGALDSRVQMLKSSQAFVYDRRRDATHPSTSARPPSPPQ

SEQ ID NO: 146622 - protein, 60 aa, Oryza sativa
  Clone ID: PAT_MRT4530_47229C.1.pep
MAITTCCLPHFQEAHNKRSCHVQGGGQGAMFGSAEPGRHLQPSTFFKEVGMWGLMAMHCG

SEQ ID NO: 146623 - protein, 298 aa, Oryza sativa
  Clone ID: PAT_MRT4530_4722C.1.pep
AFFFCASLCALSISLSSKTLTLAAGGSGGGGGRGGGGVVVVVGGMDGGGAHRTPEDVFRDFRARRAGMIKALTTDVEKFYQQCDPEKENLCLYGLPNETWEVNLPAEEVPPELPEPALGINFARDGMDEKDWLSLVAVHSDTWLLAVAFYFGARFGFDKESRKRLFSMINNLPTIYEVVTGTAKKQSKEKTPKTSGKSNKSGTKPSRQPEPNSRGPKMPPPKDEDDSGGEEEEEEEDHENTLCGACGDNYGQDEFWICCDACETWFHGKCVKITPAKAEHIKHYKCPNCSSSSKRARA

SEQ ID NO: 146624 - protein, 102 aa, Oryza sativa
  unsure (1)..(102): unsure at all Xaa locations
  Clone ID: PAT_MRT4530_47230C.1.pep
MKIIFVFALLAIAACSATAQFDVLGQNIKQYQVQSPLLLXQQVLSPYNEFPRQHYIIAASPLLQSTACQVRKNQILLQPPLXAPQSYYQDTNICQAITHHFP

SEQ ID NO: 146625 - protein, 1008 aa, Oryza sativa
  unsure (1)..(1008): unsure at all Xaa locations
  Clone ID: PAT_MRT4530_47231C.1.pep
MSNEVNHVGKAPMFNGTNYSTWKIKMSTHLKAMSFHIWSIVDVGFTITDTPLTEIDHHNLQLNAQAMNALFNSLSQEEFDRVSNLKTAYEIWNKLAEIHEGTSEYKDAKLHFLKIQYETFSMLNVIVNDLKGLGANYIDLEVAQKMLRPLPEKYETLVTMLINSDMSRMTLASLLGKINTNDMYKLKKEEMKEASPSKKCIALQAEVEDKGKGKVNEANEDLEEEIALLARRFNDLLGRRKERGRGSNSNRRRNRRPKKTLSNLSSKKKKMAVVAIKEAPSLFAPLCLMAKGSSKVISLSDGGSDDDCDDVSYDELVSMFEELYAYSEKEIVKFKDLKKDHASLEVLYEELKTSHERLTISHEKLKEAHDNLLSTTXHRALIDVGISCDLLDDSATCHIAHVASSSISTSFNDLVDMPSSGSSPCVSICDASLVVENNKLKECREVGHLVNDCPGSKPPKTCMFDSHYMLRKAYDGSIVARYVDSPILGGKKNAIWVPKALVSNLQRPKQVWVNYRTGGSLSHPEVLFPSXIEYLIGLKKISXKSKRETLNKXNANNSRNWHVGQSHWMLDSGCTXHMTGDRAMFTTFEVGGNEQEKVTFEDNSKGKVIGRLAHVGMNQLSKLSKCDLVVGLKDVKFEKDKLCSACQAGKQVACSHPTKSIMSTSRPLELLHMDLFGPTTYKSIGGNSHCLVIVDDYSRYTWVFFLHDKSIVAELFKKFAKKAQNEFSCTLVKIRSDNGSEFKNTNIEDYCDDLGIKHELSATYSPQQNGVVERKNRTLIEMARTMLDEYGVSDFFWAEAINTACHAINRLYLHRLLKKTSYELIVGRKPNVAYFRVFGCKCYIYRKGVRLTKFESRCDEGFLLGYASNSKAYRVYNKNKGIVEETADVQFDETNGSQEGHENLDDVGDEGLMRAMKNMSIGDVKPIEVEDKPSTSTQDEPSTSATPSQAQVEVEEEKAQNPPMPPRIHTVLSKDHPIDXVLGDISKGVQTRSRVASICEHYSFVSCL

SEQ ID NO: 146626 - protein, 487 aa, Oryza sativa
  Clone ID: PAT_MRT4530_47232C.1.pep
MARSGDCCPVCAAPIASLIREYNVLVDTTGEKQYTIGKFTTGVPPFSDRENAGSRSWSLHPEGQQGRQPTGNIWENCSNRKSCILEDDTGDYQYQGQIQGLQSAASTYYLLMMHGKDVHAVPADSWYNFSKISQYKQLTLEEAEEKMSRRRSTATGYGRWMMKAATNGAAAFSSDVTQLDDANEGETDQVHLKKGNKNGDENKSDKGSGEERAHVPMTKGREEEGSKDRDFDLDDEIEKGDDWEHEEIFTDDDEAVDVDPEEGGDLADPEIPAPPEIKQDDNEKHGGVGLSKSGKELKKLLRRAAGQNESDDDDEDTDEDESPSPVLAPKQQDQLKSEPQEDNHSKPTVLGHPYSTPHVSKSNQKRRQRGDDSKTCATPKKPKIEPDTKKIVVKEETSCSLEPTSEPFASARSDTNVSPITVEEIRVVLRLYAPIAMRDFSKDFMPRFSPRLRSPEDREVFLANLRKISHLQKINGQKYIILLEEYK

SEQ ID NO: 146627 - protein, 231 aa, Oryza sativa
  Clone ID: PAT_MRT4530_47233C.1.pep
MSNEMNHVGKAPMFNGTNYSNWKIRMSEEEGDDDASSKKKKMAVVASKEAPSLFAPLCLIAKGSSKEIVKFNALKKDHASLEVLYEELKTSHERLTISHEKLNSCVSICDTSLVVENDELKEQVAKLNKSLERWFKGKNTLDKILSEQRCILNKERVGFIPKKGFLDLYLSDADHLPPRRHLLRLRRILTDLVHPSVSLVDRRSAAVPVDPSRAAAFIRSGCLFVVAVDQG

SEQ ID NO: 146628 - protein, 961 aa, Oryza sativa
  Clone ID: PAT_MRT4530_47234C.1.pep
GVCQSILHDCKLTFLQIICDHDLFVEMPGRDPSDRNYLSSVLIQEIFLTLDHDDLSQRAKAARILVVLICKHEFDARYQKSEDKLYIAQLYFSLIGQILDEMPVFYNLNAVEKREVLVVILQIIRNLDDMTLIKAWQQSIARTRLFFKLLEECITHFEHNKTGDSLLLGSSSRSPDAERPASPKYSDRLSPSVNAYLSEASRHEIRPQGTPENGYMWNRVSPQLSSPNQPYSLREALAQAQSSRIGSTARALRESLHPVLRQKLELWEENLSTAVSLEVLGIIDKFSVAAASRSITTDYAKLDCVTSVLMGLLSRSQPLAFWKAFLPVVYNIFNLHGATLMARENDRFLKQIAFHLLRLAVFRNDSIRKRAVVGLQILVRNSFNYFKNTTRLRVMLTITLSELMSDVQVTQMKSDGSLEESGETRRLRKSLEEMADVRSKDLLKDCGLPVNALEAAPEGSTDNRWSWVEVKHLSKCLVQALDAGLEHALLGSEMTLDRYAAAEGFYKLAMAYAPVPDLHIMWLLHLCDAHQEMQSWAEAAQCAVAVAGVIMQALVGRNDAVWSKEHVASLCKICPIVNTDVSSEASAAEVEGYGASKLTVDSAVKYLQLANKLFAQAELYHFCASIQELIIPVYKSRRAYGHLAKCHTSLKDIYESILEQEASPIPFIDATYYRVGFYGERFGKLNKKEYVFREPRDVRLGDIMEKLSHIYEAKMDGNHTLHIIPDSRQVNADELQPGVCYLQITAVDPVMEDEDLGSRRERIFSLSTGTVRARVFDRFLFDTPFTKNGKTQGGLEDQWKRRTVLQTEGSFPALVNRLLVIKSESLEFSPVENAIGMIETRTAALRNELEEPRSSEGDQLPRLQSLQRILQGSVAVQVNSGVLSVCTAFLSGEPATRLRSQELQQLIAALLEFMAVCKRAIRVHFRLIGEEDQEFHTQLVNGFQSLTAELSHYIPAILSEL

SEQ ID NO: 146629 - protein, 444 aa, Oryza sativa
  Clone ID: PAT_MRT4530_47235C.1.pep
MARTPRKRRRRRGGGGHDYLSGLPDDVILAILSRLTTRQAVTLSALSRRFRVLPSQFGRVDSALVADPALPLPSLPARPSFIRRLSFAPQTRRFSSSAFGRLLDAAADRGLSELAVRLPRSAFLPQNLLSIRSLTVVSLDSCALPRWCPAACPGLRTLKLHHVAIPQRMISVILKAAPVLETLEMVYCMGFAGSCSMESSTVRNLLFKSALEQREVTVKMAGLRTITLYTRPKVQSVRLDPAPEIRKAYLHIARPRVKLQFRIRPFLDAGTGLTCLTLRGMAIKLLSSEYKDTPNLAVQFEDLRILSVSLDFSNERELIFLLKLLESCPNLQQLTLSAVDAKDDTALPNFADHEERLSKLSCLTKSLEQLKFLGFRPQRYQKELFIFLLTQATNLKKMAVEFPKDQEAAVRRILSVRKAPTQKKTTKYKQYYLELEYPVEPNCS

SEQ ID NO: 146630 - protein, 37 aa, Oryza sativa
  Clone ID: PAT_MRT4530_47236C.1.pep
MASILAVSVSLGTRDQWSLVSPVTFDGWPVVTGDTHL

SEQ ID NO: 146631 - protein, 159 aa, Oryza sativa
  unsure (1)..(159): unsure at all Xaa locations
  Clone ID: PAT_MRT4530_47237C.1.pep
TGIKKFKKQQNMIFGHIGVXGCIRGKTSLRDSRGELLSITANIGTRGCNVLDRNXKVQKAPKHDFWTYWSVLGAFVAKHHFVIHAANFYQLLPILAHVGPMFXDQNEKVQKAPKHDFXTYWSVLGAFAAKNHFVIRVANFLGVFVGKNHFVIRAANFCQ

SEQ ID NO: 146632 - protein, 187 aa, Oryza sativa
  Clone ID: PAT_MRT4530_47238C.1.pep
MGVDMSQQRRRTFLLNAGEIESLKQRISESDAGREQLRNRLSTYVAISSLAWTSIVRAKSLDAADKVYFMVSADCRRRLRPPADKGYFGNCVTTCVAKAISGDLSAGSDDGLAGLARAAAAIQRAIREGSGGPVRQLGALARRRHEDDPAGEVVHEVGVVAPVSVVLRRALMDAFATNFRRQLVAST

SEQ ID NO: 146633 - protein, 105 aa, Oryza sativa
  Clone ID: PAT_MRT4530_47239C.1.pep
MALATVYCVRTCGTSRTGTACREAGEQRAGVPLPHENPSSYVVRWRTDGRPPCMRLGSSVVIDTLSHVGGGALPLELHLSLGAEISSAVVQTRLVWRAQRHTPQR

SEQ ID NO: 146634 - protein, 134 aa, Oryza sativa
  unsure (1)..(134): unsure at all Xaa locations
  Clone ID: PAT_MRT4530_4723C.1.pep
RVRNEPSQISIDTNAYCLARYTIICHANRVPPHVPPDILDDGSHHIARFTYVTQXILLGYYTTSITHVLRTASLMKPNIATRGSKSKKVCPNVIAEYTVXALQRTVPAAVPAISFLSGGQSEEEATENSNAMNK

SEQ ID NO: 146635 - protein, 479 aa, Oryza sativa
  Clone ID: PAT_MRT4530_47240C.1.pep
MSSRSVRVVSVTHVQPEQTAGEMPPAAGESGDDVVRLSFYDVMFVSMMPIQRLFFYEGAALPPFPSLVGSLRSSLAAALAAFLPLAGKLTFRAALGDVVLDYSAAAVPPGVKFVEAEYGSSDEISAFDAMRRLAGDVEHNVEAFMELVPELEVEQLPAPVLAVQVTRPAFRNDDGDDAVGVVAVGVSVHHAVADGQSLWQFMKAWSAAAMVGSPAAPGLLPPTFDRALIRHPRSEELASKFLQLSSPTLPEVKLSLYRRCPARRRTFLLNAGEIESLKQRISESDAGREQLRNRLSTYVAISSLAWTSIVRAKSLDAADKVYFMVSADCRRRLRPPADKGYFGNCVTTCVAKAISGDLSAGSDDGLAGLARAAAAIQRAIREGLEVPFGNSERWLDGATATTPPVRSFTRSGSSHRYMAYETDFGWGAPSRAELATVYGEEVVMMLGAADGGVQVSVVLRRALMDAFATNFRRQLVAST

SEQ ID NO: 146636 - protein, 473 aa, Oryza sativa
  Clone ID: PAT_MRT4530_47241C.1.pep
MSSLVRVLAVSHVLPDEVAAGGAWPPPPPHVVELSFLDNLQVSKAAIQRLFFYDGGSLPPFESVDRSLQSSLAAVLAIFLPLAGKLAYLPEPGDVVIDYSPDAVSPGVKFVEAEYSGSVDDMRRLASDDEHHTEAFLQLVPELEVTRPRDDHAGGGGGAVAVGVAIHHGVADGQSVWQFIKAWAAAARGGSPAGQGLVPPTFDRSRIRHPTADSHELAHTILHKMSPALPMVTPRSKPADMAQQRRRTFLLSAGEIQSLKQRISESETGGELLHNRLSTYVTISSLAWTSIVRAKCGALDAAADDVYFMVSADCRRRLRPPADEGYFGNCIAIAIARASAGELLDDDGLAGLARAAAAIQAAIRDELELEDPVGGAERWAERLAAIPRGRLTAAGSSHRFMAYETDFGWGAPSRVELVTVYGNELVAMLGGAADGGVQVSVVLGRALMDAFADNFRRQVVACPNSTVSRSRHH

SEQ ID NO: 146637 - protein, 136 aa, Oryza sativa
  unsure (1)..(136): unsure at all Xaa locations
  Clone ID: PAT_MRT4530_47242C.1.pep
FIGRRGGGGRMAGDGAARRREKGGDACRRLICCNGGSVVGNGSRRLVAAADWCSKVAAADWLCGGGGKARHGVDGGASGRGERWRRPSRERGRRRHGCEXLGGLRLSWAGSPRRREEKKRGMGQKKGKLAQNKKEV

SEQ ID NO: 146638 - protein, 219 aa, Oryza sativa
  Clone ID: PAT_MRT4530_47243C.1.pep
MSTLVRVLAVSHVHPDEAAVGAAWPPPNTVELSFLDSFQVARGAIQRLFFYEGDDLPPFQSIVGALQSSLAAALPVFLPLSGKLAYLPESGDVVIDYSPDAVSPGVRFVEAEYSGSVDDMRRLAGDDEHQIEAFLQLVPELEVSMLPAPLLAVQVTRPRDDNVGGGGAGGAVAVGVAIHHGVADGQSVWQFMGVFSAALYPRCGVPPPCVGACGLSPLT

SEQ ID NO: 146639 - protein, 75 aa, Oryza sativa
  Clone ID: PAT_MRT4530_47244C.1.pep
MVKVHSRQSLCSPPPRPRHFVFDPPKSASPPCPLAQRGGAGVLSSFEPHPEWWGLKGNKWLKRVSTRLYPKKETH

SEQ ID NO: 146640 - protein, 126 aa, Oryza sativa
  unsure (1)..(126): unsure at all Xaa locations
  Clone ID: PAT_MRT4530_47245C.1.pep
CRPGTPRRFPSPPGRLSTXQPYINPPRASLVRFRHSPPYLPAGIELALSSSLFAVAVDLRPGLSARRDRPPPRRRLLRLRHTAADPVYRLAELADRRXAAVPVNPSRATASLHSGHLLRRRRRPAV

SEQ ID NO: 146641 - protein, 972 aa, Oryza sativa
  Clone ID: PAT_MRT4530_47246C.1.pep
MRSAGTISQQLTRYAAAQALLPGAHLHASLLKSGSLASLRNHLISFYSKCRRPCCARRVFDEIPDPCHVSWSSLVTAYSNNGLPRSAIQAFHGMRAEGVCCNEFALPVVLKCVPDARLGAQVHAMAMATGFGSDVFVANALVAMYGGFGFMDDARRVFDEAGSERNAVSWNGLMSAYVKNDQCGDAIQVFGEMVWSGIQPTEFGFSCVVNACTGSRNIDAGRQVHAMVVRMGYDKDVFTANALVDMYVKMGRVDIASVIFEKMPDSDVVSWNALISGCVLNGHDHRAIELLLQMKSSGLVPNVFTLSSILKACAGAGAFDLGRQIHGFMIKANADSDDYIGVGLVDMYAKNHFLDDARKVFDWMSHRDLILWNALISGCSHGGRHDEAFSLFYGLRKEGLGVNRTTLAAVLKSTASLEAASATRQVHALAVKIGFIFDAHVVNGLIDSYWKCSCLSDAIRVFEECSSGDIIAGTSMITALSQCDHGEGAIKLFMEMLRKGLEPDPFVLSSLLNACASLSAYEQGKQVHAHLIKRQFMSDAFAGNALVYTYAKCGSIEDAELAFSSLPERGVVSWSAMIGGLAQHGHGKRALELFGRMVDEGINPNHITMTSVLCACNHAGLVDEAKRYFNSMKEMFGIDRTEEHYSCMIDLLGRAGKLDDAMELVNSMPFQANASVWGALLGASRVHKDPELGKLAAEKLFILEPEKSGTHVLLANTYASAGMWNEVAKVRKLMKDSNIKKEPAMSWVEVKDKVHTFIVGDKSHPMTKEIYAKLVELGDLMSKAGFVPNVDVDLHDLDRSEKELLLSHHSERLAVAFALLSTPPGAPIRVKKNLRICRDCHVAFKFISKIVSREIIIRDINRFHHFRDGTCSCGDYWLEQNLAIASLQPGVSYSIYRETTTISPAAEITSFDGHMPISLFTSSYKSFTFASLLEMVTMRLLYYRAPLILLVFNSSILFPLPYMNLYFVTGNW

SEQ ID NO: 146642 - protein, 96 aa, Oryza sativa
  Clone ID: PAT_MRT4530_47247C.1.pep
TSQHAFPICDSATNTGKDDVLIKGCSQSEISISKGCRQVKCCISWITWPTRCSYKEYQQILKPWTGVARYVLFCLKNVNQDSIFLAPNNVVRIIQV

SEQ ID NO: 146643 - protein, 110 aa, Oryza sativa
  unsure (1)..(110): unsure at all Xaa locations
  Clone ID: PAT_MRT4530_47248C.1.pep
MGKHLYKTLIPSTRNGTXDKQVKSNLRNNLTHGQHYCGKGRIITAKHIGRCHKRIYRKINFXTEXKDISSRVVTIXHNLNRNVYICXHIHYGDEEKGYILYPRTSIGGIP

SEQ ID NO: 146644 - protein, 171 aa, Oryza sativa
  Clone ID: PAT_MRT4530_47249C.1.pep
MATARLLLVLTVVAAAGSCFCSAQEAKPPPYCGSVRTAIEAHNIIGWKTFTADCAKYLADYLTGDRYPRDADVVINEAIAYAESLKLSGSGKEIWVFDVDETALSTLPYQANHGYGVQPYDQASFIQYVSEGSAPALQGTLRLYQRLLQLGVKPVFLTDRTEVQRTVTTNN

SEQ ID NO: 146645 - protein, 325 aa, Oryza sativa
  Clone ID: PAT_MRT4530_4724C.1.pep
MMQDLFSVPSCFSSGEKLPDIPSSGTAAAAAAARQSAVTLVYRAEISGHRRLVTVTWCRNLLTHGLSVSIEGSAGNGKDKIGREYGEAAVAATAADGGGGGGGGKSCSACKVEMQPWHFWRKYGAKQFQVDGNAIDVVWDLRSARFSDEPEPLSDYYVAVVAGEEVVLLLGNLKKDAFRRTGSRPSLQDAVLVCKKEHVFSKKRFVTKARFSDRGKLHDISIECSSSNLTGGTDVDMAIKIDGCVSVLVRHLQWKFRGNECISINKLKVQVYWDAHDWLFGTGMRHALFIFKPEPPSPSPPGASSEFSTDEYSDFCLFLYAWKVE

SEQ ID NO: 146646 - protein, 31 aa, Oryza sativa
  Clone ID: PAT_MRT4530_47250C.1.pep
CSGGTVQCYPSAQGAGSLDFFPFWQLVHLVV

SEQ ID NO: 146647 - protein, 423 aa, Oryza sativa
  Clone ID: PAT_MRT4530_47251C.1.pep
MTSSMKLPATFLSFSSHQPRGSSHCSVASAAYAAEPRLGEGAVVSKKTPSRSPCRTMAKVDDKNDLCRMNQAKFEPSIWGDFFLSYCNPLAYSDNQRSMEERAEYLKKEVAKLIVNSRTDSLPEKLHLIDVLERLCVDHLFEEEINAVMDEISDADVSDCELHTVALWFYLLLKHRHRVSPDVFLKFRDEDGIFEAEDARDLLSLYNAAHLTTHGEGILDEAISFTKRQLRSLMPKVVEGSLAHDINSALEIPLPRRVRIYEAKYFMSTYEKGASVNEMIMELAKLSYNIMQIHHQQELKIITRWWKDLQLETRLSFARDRVVECYFWIAGVYFEPCYSRGRIILTKVLAIVSILDDIYDVYGSPEECEQFTKCIESWDPKMGCNLPELLRFAFEKILDTYQNIDDECRNMNSAIIKEVAYET

SEQ ID NO: 146648 - protein, 568 aa, Oryza sativa
  Clone ID: PAT_MRT4530_47252C.1.pep
MEEKVGETVAAAAVAVAPVVAGDQDGVAYCSEHPYPPGAAAAAGVAAGGGICAFCLQEKLGMLVSSSKSSPFHPPPASASSSTPTSHVAAESSSSSLPLHPSAAAAARKVIPASAAGGLKRSKSVAPRPEETTPVTAPAPSAVTADSPRKKSFWSFLYSSSSSSSGGHQGSASMANGGGGGGASVRRKSVSVASASSASLGRRLEAIVEPDSPGRRSEGSSSSSFGRKVARSRSVGCGSRSFSGDFLERLSTGFGDCALRRVESHREPKPKSSAGALAHLGGNHSAAGNGDDDEYESTQQHRIKCAGFFGGLGAAPPPTSSSYWLSAADGATAAAPSARTHGARSHRSWAWALASPMRALRPTSSSSSKSIMAAPHNRGGVSGNGGMAMAALACPQLAQAQAHGDGGGASGQLRLRATCIVGYGWGFSVAAGHNEDSKQCAIENRPQVQLLVVCVTAQPRLCCPPAMVAGREALACLPIAQVVSKCDLCAGCGSAIMMAWRLIFFSLQLCKITDKFIRLYIKIIQYPTAPAHVIPSLVPKDSYGFFILSYGMCAGYILMSVMMSLQEI

SEQ ID NO: 146649 - protein, 468 aa, Oryza sativa
  unsure (1)..(468): unsure at all Xaa locations
  Clone ID: PAT_MRT4530_47253C.1.pep
MLIHRMQIKVRGSPNVRPAQEPARVKLKNPGPALVVPRLETPRVYVWRWGEARAAEGARYLDVEMLRRALAEAAVAEGGIDLEREREGQALAEVLFHVXAVALGQAHDAGGRVDNYGDCARIMDVEALVPTVDDTDGIASSPILELQVLNLYIFYLGSIYALLILLMQVTHFKCGGVALGVGMQHHVADGFSGLHFINSWADLCRGVPIAVMPFIDRTLVRARDPPAPSHPHVEYQPAPAMLAPEPPQALTAKPAPPPTAVDIFKLSRSDLGRLRSQLPRGEGAPRYSTYAVLAAHVWRCASLARGLPAEQPTKLYCATDGRQRLQPSLPDGYFGNVIFTATPLAEAGRVTGSLADGAATIQSALDRMDSGYCRSALDYLELQPDLSALVRGAHTFRCPNLGLTSWVRLPIHDADFGWGRPVFMGPGGIAYEGLAFVLPSASGDGSLSVAISLQAEHMEKFRKMIFDF

SEQ ID NO: 146650 - protein, 99 aa, Oryza sativa
  Clone ID: PAT_MRT4530_47254C.1.pep
RSPIPNSPSIPITAEKSEIGVSTSSPIDPIQLRPSVLPRRLLPSVLLTESASAMVGGSRLLPVTMRIPNSAPLRTDHRSRVLVGNAHCGGRAEAAGYSA

SEQ ID NO: 146651 - protein, 395 aa, Oryza sativa
  Clone ID: PAT_MRT4530_47255C.1.pep
MEEKVGETVAAAAVAVAPVVAGDQDGVAYCSEHPYPPGAAAAAGVAAGGGICAFCLQEKLGMLVSSSKSSPFHPPPASASSSTPTSHVAAESSSSSLPLHPSAAAAARKVIPASAAGGLKRSKSVAPRPEETTPVTAPAPSAVTADSPRKKSFWSFLYSSSSSSSGGHQGSASMANGGGGGGASVRRKSVSVASASSASLGRRLEAIVEPDSPGRRSEGSSSSSFGRKVARSRSVGCGSRSFSGDFLERLSTGFGDCALRRVESHREPKPKSSAGALAHLGGNHSAAGNGDDDEYESTQQHRIKCAGFFGGLGAAPPPTSSSYWLSAADGATAAAPSARTHGARSHRSWAWALASPMRALRPTSSSSSKSIMAAPHNRGGVSGNGGMAMAAVATS

SEQ ID NO: 146652 - protein, 893 aa, Oryza sativa
  Clone ID: PAT_MRT4530_47256C.1.pep
MDEPSIVKLPEYELPDAFRGEIDGKGLEEGATIDNMDPSRPFLVLNVFDWDKVDEWIALKTAWIAKRLKNDIIIPDPVPQIGRDAFFDITPRLTTVLEKDSVRCFLPLFVQCESIMTYQCAITSETLTHMVRHNALRCAKVVLEGKAAELRCKHANPNCMNPYGYFALHEAAERFSADMTKLLFRHGASANVRTASDAGIQGLLPLDVAVENACMHKYLEDNLSPTPMQYHEDYIYKLIHLLCLPEMKVFLDTIRLLAEKTDNLVDELWNYMKNGKLVQTAVLLLAAQKHIRKIKPDGFCIITHHLFKEYANSLRCAKGDTGEAQKQLEEREALLSCKSELFSIILLAGEALDNYIQAHSEVSHAEVLARVSSILKEFGFCPKEKCIDNIKLYCSFCIQNHNFLSPYMYGTSYCDIFHKGAYWHVAVDNHVSANCYAVHVSLRFGRMAGPHGPCRVFGSLNLIDVRYLDTCHRMSRSRKNSEIKRAWSAAISGWVTDQKILLGCEACLVCSNFGMGDRPENSSRSFILERPRYTSRLQLKVEVMEKQSIDFGKVLEEIQESLVVLNLKQGAARGSVRSASTNGAHEQGFKFVCGESFPNSSSVDGRGEEGSATPYAAYATCGCARRRGQMASWPLRCNRSPGKGFGDGYHPDPDSGQEYDFPTNPLIISSNLNLGVEKLDLETALAIASLQEEVILESSAVSVSNPKKIDNGLQIRPNLAYKGALPLPLPPNRGVTTGSVSRMEDRKTLDNGKLVNGTDKISALKAQRRAHGLCYICAEKWSPTHKYANTVQLHAVQELLTTLGSEILYDQEFTEECEGSDSQGLMAISVQSMHGSETMGCMRLLGFIQGREVLILVDSGSTAGFLSSQVAQTISMRHAILLDLMFHIDQKLC

SEQ ID NO: 146653 - protein, 92 aa, Oryza sativa
  Clone ID: PAT_MRT4530_47257C.1.pep
SAAACPIPAGRRCHLPSPPPPSPSPFSLKASVAAAAARRAEGLMQRSARGTETTHGGATSAGTACRRWRLETANNAVADGGSFRRGCVAFVG

SEQ ID NO: 146654 - protein, 187 aa, Oryza sativa
  Clone ID: PAT_MRT4530_47258C.1.pep
EELIIKGYNGSSFPSWVGSLPLDRLASIELKDCQNCEELPPLGCLPSLKHVVIQSLPSVQLVGPEFLGDVGDIPYNNRKKAYFAFPALESLKFRDMGAWEEWSGVKDEHFPELKYLSIVRCGKLKVLPNFTSGPKQRIRNCEKLLQPLCQNIHWNLMEYIPPSSELSYTCMAEGDISILEASCSYST

SEQ ID NO: 146655 - protein, 287 aa, Oryza sativa
  unsure (1)..(287): unsure at all Xaa locations
  Clone ID: PAT_MRT4530_47259C.1.pep
MDRAWMYEIRRTHPTFVNEASKFFCLGKGTCFKENMRQSFWPCFDCKNQKLLAHIVEHGFMYNYKVWPYQGDFXTPEDDGEEFNFQMDEXNFAIMDIYVSXERMDVDGSTGNDDFEAVFDLEDMLWHIEPELLLRRARGLENWESLKKSSKDLLYDESNGCGKDITVLRSVLKLLTWKAKHGWSDSSFNDLMSLLRVLLPKPNFLSSNTYQLKKLIFPLSLGVQKIHACLNHYVLYHKEFADLDGCPTCETSRYKERNMSFGTEVVDLDSSERAXEKYSSMVMWYPH

SEQ ID NO: 146656 - protein, 1306 aa, Oryza sativa
  unsure (1)..(1306): unsure at all Xaa locations
  Clone ID: PAT_MRT4530_4725C.1.pep
AGAERGRRGEGGCSRKGTSDQGGDPFDKPAAGYVPPRVYPQVPPQPLPPQVAQASMYFVGQPTAAAVHLAPHLQLQAQLAAAQVHPQPLGQVSQAMAEGASALQAQFQAFLQQINQPHNISSTTSSTRPEGNASQGALSWLPSNQPSLGASPWSQGPQFNFINAXLGANRSAASTNTKLWNKAPTQVAMMWSQPVFDPSMAAQQALPIGAGQPNTMAQTHAQAVISPFATPYPQQGAVNRAGGKKGLPLSGGIKTRPIPPXFKFPPVLGYSGRESQXREYMRRFSQAQCQVQDITEASVINAASAGLLEGELTRKIANKEPQTLEHLLRIIDGFARGEEDSKRRQAIQAEYDKASVAAAQAQAQVQVAEPPPLAIRQPQPVIQGQPPRQGQAPMTWRKFRTDRAGKAVMVQKDLYCAFHGRSSHTTEQCRNISQCGNAQDSRPQQGATVEAPREAVQEQAPLAEQRQDAQRRVIQVITRADLPTQLSKRQKKMQIRTVHSITSAGEGAPQYLNQLISFGPEDAKGVMLPHQDPLVISTEIAGFEVRRILVDGGSSADVIFAEAYAKMGFPTQALTPAPASLCGFGGEAVQVLGQALSMIAFGSGENRREEQVLFDVVDIPYNYNGIFGRATLNKFEAISHHNYLKLKMPGPAGVIVVKGLQPSAASKGDLAIINRAVHNVEAEPHDLPKHVPKPTPHGKIIKVQMDDADPTKLVSLGGNMGEEEAESILEVLKKNIGIFAWSPVEVGGVSTDLIMHHLAVKPEAKPRKQKLRKMSADRQEAAKAEVQKLLRARVIQEIDHPEWLANPVLVRKSNGKWRICVDFTDLNKVCPKDDFPLPRIDQLVDSTAGCELMSFLDAYSGYHQIHMNPPDIPKTAFITPFGTFCHLRMAFGLRNAGATFARLVYKVLCKQLGRNVEAYVDDIVVKSRKAFDHASELQETFDNLRTTGIKLNPEKCVFGVRAGKLLDFLVSERGIEANPEKINAIQQMKHPSSVHEAHKVTVPSQYPLCEILRGKEVTGRLSKWAAELSPFDLHFVARTAVKSQVLADFVAEWTSVFASELEPVEKSWVMCSDGLWSHKGAGIAAVLISPNGVPIRYAARLQFNTTNNAAEYKAILLGLRKAKALGVRRLLIRTDSKLVAGHVDKSFEAKEEGMKRYLEAVWSMEKYFTGITVEHLPRGQNEEADALAKSVAYGGPHLPGIFFEVLLAPSVPVDSLEVMAPGEDPHDWRTPFVKHLETGWLPEDEAEAKRLQIRATKYKMVSGQLYRSGXEEMAKEIHQGLCGAHQAARTVAFKVFRQGVYWPTVL

SEQ ID NO: 146657 - protein, 50 aa, Oryza sativa
  Clone ID: PAT_MRT4530_47260C.1.pep
APTAKLNVSLPSTSIKPTPRHLQHLSHSRHQYFVWNCDTDNKSCTQGNKL

SEQ ID NO: 146658 - protein, 76 aa, Oryza sativa
  Clone ID: PAT_MRT4530_47261C.1.pep
ESFGVDWYGISFINQGPVEADTTRSCQWLGLKYLTEKKEDARNASPVKLKGTTWDLLAVAGVMSLELNSKQHCRKI

SEQ ID NO: 146659 - protein, 72 aa, Oryza sativa
  Clone ID: PAT_MRT4530_47262C.1.pep
MPPLQRRRAPPSLPPSSPLPPSRPREPWIQVKAKTRKTLSKAIYWRMPCQEGQRLTCSLLADALIGGPEIDL

SEQ ID NO: 146660 - protein, 763 aa, Oryza sativa
  Clone ID: PAT_MRT4530_47263C.1.pep
MEILSPSPPPSPGPASASASASGSAMDSFIHRGAGWHFPRRDNVDARVHVAVGRSPEKTLGLLRWAFRRFACAQVVLVHVHQPSPLIPTLLGKIPAAQATEELVLSHRKSEKDEMNKILLTYLTFCHRAQVQASLLVTENEQIHDGIITLVKDHGITKLVMGSTPDTCFKLKASYGKASFMARNAPSFCEIWFVWRGRHIWTREAAAAIGNNISVYNEDDVMIRKRIRFSSTSNNAESILDEGYISYEAQTPADRYEITISDNGQPNDYESLVDANHFCNIIVPNLQNAQSAFNSTFQPGSSVDMESLVLYPQEILDKNFKQVILEAERSRKDAFVELLKRKDTESRVAGVIARAKASEFAQKQEMKMREELEALLTATKKQHEDLAENKEKATEGLDSSMRKLAILDARAKSIAFRMNEAVAELKLIQSSIGTLNQEIPKREKLELVHTDQVESSTVCADDLYNFRELTLSDIKAATCKFSDSLKVLPRGLGCVYKGEIMNRSVMIYKLHSCIIQSSMQFQQEVHLISKVRHPHLVTLIGACPDALCLVYEYVPNGSLHDRLWSKCGIPQLPWKIRARIVAEISSALFFLHSCKPQMIVHGDLKLENILLDANLHCKIADCGISQLFMEDAKDADPEYRRSKPLTPKSDIYSFGIVILQLLTGKQAAGLPSEVRRAMSSGKLWSLLDPTAGEWPLEVARRLAELGLKCSEAASPELLTPETVRDLEQLHLMRDNRQVPSFFLCPILKAGTKPPNIDRAEAHK

SEQ ID NO: 146661 - protein, 507 aa, Oryza sativa
  Clone ID: PAT_MRT4530_47264C.1.pep
MVFRDVPEPTAAAGSPDGQPAMASYDKAIESYKRAVTTAASLAASAMLVRGVVNELVPYEVRDLLFSGVGYLRSRMSSQHTVIIEETEGWTNNQLYDAVRTYLATRINTDMQRLRVSRVDETKSMMFSMEEGEEMADVHEGSEFRWRLVCRDNSSSSNGNGNGRGGNGNYRLEVRSFEMSFHKKHKDKALNSYLPHILATAKKIKDQDRTLKIYMNEGESWFAIDLHHPSTFTTLAMDHKQKQSVMDDLERFIKRKEYYKKIGKAWKRGYLLYGPPGTGKSSLIAAMANYLKFDVYDLELTEVNWNSTLRRLLIGMTNRSILVIEDIDCTLELQQREEGQESSKSNPSEDKVTLSGLLNFVDGLWSTSGEERIIVFTTNYKERLDPALLRPGRMDMHVHMGYCCPESFRILASNYHSIDNHATYPEIEELIKEVMVTPAEVAEVLMRNDDTDVALEGLIQFLKRKKDVGKEGKAENVEQVVKAEETEKGMMKKNDVPENQDPQDASK

SEQ ID NO: 146662 - protein, 142 aa, Oryza sativa
  Clone ID: PAT_MRT4530_47265C.1.pep
GWHGAAAVGEAGGRGGAPGRFKRTRGGWMRWGAHRRGRSSVGDAEGVVARWSRRRDRAAPSGRGQGTREGDARMGAPRSSSSTPRARRPPGHARQQNERRRRRAARRQGRQWRVAVVSWAVRKRRRRGCVGRRRRWIGRRKL

SEQ ID NO: 146663 - protein, 170 aa, Oryza sativa
  unsure (1)..(170): unsure at all Xaa locations
  Clone ID: PAT_MRT4530_47266C.1.pep
MQNTYAISQRTLSTRSASRSPSRGESFFIFLQGLVSTHGYXNMYTRGHCNLSLXSIQFGASPLFYLFYFILSFGGTWHLTRGCIGFDLRRMGKSNXSAGPGNCIVYVGVVQCCIXVHSTSWIALIWTICLPGYLSCVYINLVLESQFSSIGCLSLXGFCRYRLNRPARLD

SEQ ID NO: 146664 - protein, 64 aa, Oryza sativa
  unsure (1)..(64): unsure at all Xaa locations
  Clone ID: PAT_MRT4530_47267C.1.pep
MASFKQQLMLLRRVMAMKPXTKRLSGFGLKPSAAFSRLHVPSAVVSLQSSRLVLCVFDDPDATD

SEQ ID NO: 146665 - protein, 584 aa, Oryza sativa
  Clone ID: PAT_MRT4530_47268C.1.pep
VKKQVDEQLQKGYIRPSTSSWGAPVIFVEKKDKTKRMCVDYRALNEVTIKNKYPLPRIDDLFDQLKGAKVFSKIDLRSGYHQLRIREEDIPKTAFTTRYGLYECTVMSFGLTNAPAFFMNLMNKVFMEFLDKFVVVFIDDILIYSKSEEEHEQHLRLVLEKLKEHQLYAKFSKCDFWLTEVKFLGHVITAQGVAVDPSNVELVTKWTPPKTVSQIRSFLGLAGYYRRFIENFSRIARPMTQLLKKDEKFKWTAECDKSFEELKKKLVSAPVLILPDQMKDFQVYCDASRHGLGLVHALKIWRHYLIGNRCEEFEHLNVGIVEHGFVAALEARPTLVDQVRAAQVNDSEIEELKKNMRVGKARDFHEDEHGTIWLGERLCVPDDKELKDLILTEAHQTQYSIHPGSTKMYQDLKEKFWWVSMRREIAEFIALCDEELGTRLNFSTAYHPQTDGQTERMAPFEALYGRKCRTPLFWDQTGERQLFGTEAEAQPGRPPPSSPGVADRLGPPVGSFPHLRPTPRQQPPRPKPPPRPRLRLLRATSTTPAPPPSLPLAFSPFRLPLPSSPSLPRRAPIRRCLSRYSGRL

SEQ ID NO: 146666 - protein, 210 aa, Oryza sativa
  Clone ID: PAT_MRT4530_47269C.1.pep
MDDFVAELARMTLVVGYPNVPEYSTVLPLSAGENDTTFGHMCAVMRGMDRMHSDLRKASKALNDGKLVRIIALKDEIARLKKENAQLKGLPIPGGVRIRNTPRKSTTAPVRIQLAPRNPPPPAPPAAPPVPPAVSEVPTAPAAPAPVPAPVPVSAPTSALSFAPASAVRGPASGNGGWLPATPSGSHDHSSSSSSGSEPGSGEMSRPEIH

SEQ ID NO: 146667 - protein, 1626 aa, Oryza sativa
  unsure (1)..(1626): unsure at all Xaa locations
  Clone ID: PAT_MRT4530_4726C.1.pep
MAAEEGAEPSASVTEDVEGQAPSQSPSAPAPSQPSSAPATSVQVPNTADVAKAAAAARALQTRAEILSTNQLVVPQAAPSQPAAPTALAVVQAQISLDPEAQAEADMEAMRQNMTRLQDMLCQMLEQQQAYEATRRTKATSAPILQYSAGYAPSQVRPQVVTQPSPPLAAQPPVYFVGQHQPPGQATQTVAEGASALQAQLQAFLQQLNQPHYISSTTPSAHXGANRLAASSNPRLRNKPSTNPSCHDVVAANLXPIHGGPASTTSWSRAVECRGPTPRTSHDFALRHTVPAARCGTYEEPKTQQHLLGIRQRPGESIREYMRRFSQARCQVQDITEASVINAASAGLLEGELTRKIANKEPQTLEHLLRITDGFARGEEDSKRRQAIQAEYDKAFVAAAQAQAQVQIVEPPPLSVRQSQPAIQGQPPRQGQAPMTWRKFRTDRAGKAVMAVEEVQALRKEFDAQQASNHQQPARKKVRKDLYCAFHGRSLHTTEQCLNIRQRGNAQDPRPQQGTTVEAPREAVQEQIPLAEQRQDTQRRVIQVITRADPPSLLSKRQRKMQIRMVHSITSAGEGAPQYVNQLISFGPEDAEGVLFPHQDPLVISAEIAGFEVRRILVDGGSSADVIFAEAYAKMGLPTQTLAPAPTSLRGFGGEAVQVLGQALLLIAFGSGENRREEQILFDVVDIPYNYNAIFGRATLNKFEAISHHNYLKLKMPGPTGVIVVKGLQPSAASKRDLAIINRAVHNVETEPHERPKHMLKPTPHGKITKIHMNPLNIPKTSFITPFGTFCHLRMPFGLRNAGATFARLVYKVLGKQLGRNVEAYVDDIVVKSRKAFDHAFDLQETFDSLRAAGIKLNPEKCVFGVRAGKLLGFLVSDRGIEANPEKIDAIQQMKPPSSVHEVQKLTGRIAALSRFLSTAAERGLPFFKTLRGAGKFNWTPECQAAFDELKQYLQSPPALISPPPGSELLLYLAASSVAVSAALVQETESGQKPVYFVSEALQGAKTRYIEMEKLSYALVMASRKLKHYFQAHKVIVPSQYSLGEILRGKEVTGQLSKWAAELSPFDLHFIARSAIKSQVLADFVAEWTPFDTTNNAAEYEAVLLGLRKAKALGVRRLLIRTDSKLVAGHVDKSFEAKEEGMKRYLEAVWSMEKCFTGITVEHLPRDQNEEADALAKSAACGGPHSPGIFFEVLHAPSVPMDSSEVMTIDQEKLGEDPYDWRTPLVKHLETGWLPVDEAEAKRLQHRATKYKMVSGQLYRSGVLQPLLRCISFAEGEEMAKEIHQGLCGAHQAARTVASKVFRQGVYWPTVLKVCVEQIKKCESCQRHGRSQAVPQYDLQPIAPIWPFARWGLDIIGPFPVARNGYKFAIVAVEYFSRWIEVEPLGAITSAAVQKFVWKNIVCRFGVPKEFITDNGKQFDSDKFREMCEGLNLEIRFASVAHPQSNGAAERTNGKILEALKKRLEGAVKGKWPEELLSVLWALRTTPTRPTKFSSFMLLYGDEAMTPAELGANSPRVMFSRGEEGCEVSLELLEGVRVEALEHMHKYATSTSAAYNKKVRPTELMPGHLVLRKKANPVAVGKLESKWEGPYIIKHKSTTGSFRLATLKGEEFDHSWNVASLKRFYV

SEQ ID NO: 146668 - protein, 765 aa, Oryza sativa
  Clone ID: PAT_MRT4530_47270C.1.pep
MEVVLLKERAITTAASKAQVTHLGKGKSYCNALCTEGMCKELQQELEHLNLGLVEYGTKMYQDLKEKFWWVNMRREIAEFVALCDVCQRVKAEHQRPAGLLQPLQIPEWKWEEIGMDFITGLPRTSSGHDSIWEELGTRLNFSTAYHPQTDGQTERVNQILEDMLQACALDFGGAWDKSLPYAEFSYNNSYQASLQMAPFEALYGRKCRTPLFWDQTGERQLFGTEVLTEAEEKVRTIRERLRIAQSRQKSYADNRQRELTFEAGDYVYLRVTPLRRVHRFQTKGKLAPRFMGPYKILERRGEVAYQLELPSNTIGIHDVFHVSQLKKCLRVPEERADSEHIDIQEDLTYVEKPVRILETTGAAAPTFPPPPGHVGHACACAVSPAPTPPPSRLRPRPRWLGFEIQIPPLSPPRLPHVGRRFPPLLATSGLPLLYLSSTATPSLFFPISPSPPVPSNALAPSPSSSPPPPPLRSPLAAAPSRADDAAAFAVVRATPSTPFPPDSAAGTHSAPFAGERRHGRRLRPASSPSSNSFSLSNPFYRVRYVVPEIVPPSPPPSVARRRRSSSVRFPSPFLSPSPMPLSRRSPPPVGHRRSPSRAATACAPLAAARHGRRAGLRRARARRPRATPAGPSVRVPRGRRVCAASVPRVRHVVRWFSPVRGPGPPWTAPESLPCFVRAVEDACGVVFPLQSKSRLSSSYPLSFPLHLSEAYIPRALIMGAHPQSIRVHGLADSLIAQPSPPTMGHPGQIRPIHHRPNQSHNFRT

SEQ ID NO: 146669 - protein, 183 aa, Oryza sativa
  unsure (1)..(183): unsure at all Xaa locations
  Clone ID: PAT_MRT4530_47271C.1.pep
TTAPVRIQLAPRNPPPPAAPPAAPPAVPVAPAAPTPAPAPVLVSAPASALSFAPASAARGLASGSHDRSSSSSSGSEPGSGETYLPDSRSRSEEPGDEQEDAFDSTDRRSRSEHXARFPLVYXRNGSRAAGEDSNSEERTDGGHPNSASGNGPPRAAAAVAVWSPSPPVQAAGVSTCQATHLL

SEQ ID NO: 146670 - protein, 120 aa, Oryza sativa
  unsure (1)..(120): unsure at all Xaa locations
  Clone ID: PAT_MRT4530_47272C.1.pep
LSSDPLLEIGAGIXLATAALPPFFLPLAWGANVVKNVAGVSLTSTRTPIFXAHAKGENLGDVPAKGESVWDLSDFLGPGFSIFLSKRDPPRSMFIKGPGKKFYVVFSPLLKCFPKTLPFF

SEQ ID NO: 146671 - protein, 965 aa, Oryza sativa
  unsure (1)..(965): unsure at all Xaa locations
  Clone ID: PAT_MRT4530_47273C.1.pep
MVYTRNGTRTTGEGSNGEERTDGVHPNSDSDNSPPPLPENPTLAQVMAHQTQMMAAMMQQMQQQHQQMHQRMQQHAEQHHQQFGPPPPQSKLPEFLRVRPPTFSSTTNPMEANDWVHAIEKKLNLLQCNDQEKVAFATHQLQGPASARWDNHMATRPPGTEVTWAKFCRSFRKAQEKFLAGLDDELTNQLISGDYADFERLVDKAIRQEDQRNKMDRKRKAAQFRSSQGNHQRPRFTPGQQGGPTTMIVRQHRPFNSSNFHQGASGSQNHHGGQPHRGVAPRPLVAPAQSAPPAQXRRRPEQSQGPASTVVSLVTSPTNAQSLGVPGQGSSRLVSTTRLQRRRXAAPEVVLEVKKQVDEQLQKWCIRTSTSPWGAPVIFVEKKDKTKRMCVDYRALNEEHELYAKFSKCDFWLTEVKFLGHVITAQGVAVDPSNVESVTKWTPPKTVSQIRSFLGLAGYYRRFIENFSRIARPMTQLLKKDEKFKWTAECDKSFEELKKKLVSAPVLILPDQMKDFQVYCDASRHGLGWKANVVADALSRKSYCTALCIEGMCEELQQLFERLNVGIVEQGFVAALETRPTLVDQVRAAQVNDPEIAELKKNMRVGKARDFLEDEHGTIWMGERLCVPDDKELKDMILTEAHQTQYSIHPGSTKMYQDLKEKLWWVSMRREIVEFVALCDVCQRVKAEHQRPAGLLQPLKIPEWKWEEIGMDFITRLPRTSSGERQLFGTEVLAEAEEKVITIRERLRIAQSRQKSYADNRRRELTFEAGDYVYLRVTPLRGVHRFQTKGKLAPRFVGPYKILERRGEVAYQLELPSNMIGIHDVFHVSQLKKCLRVPEEQANSEHIDIQEDLTYVEKPIRILKTSERRTRNKVTRWGPPVGPVSHLAPAPPRRQPPPRPRLRLLRATVVATPHRRRRRVREAELHPVRPSSVEGIPKLVRRLPSSSRGSPSPFDVVFLRAGHPR

SEQ ID NO: 146672 - protein, 107 aa, Oryza sativa
  unsure (1)..(107): unsure at all Xaa locations
  Clone ID: PAT_MRT4530_47274C.1.pep
WRTAALTRGGGGRRRRPMAAXMSAGGATARTAIVAAKRLGGGAAAKWRGREREEXRGEEVSHRRRLTTASDGGRXRRQDKLRNHLANTVQGNLVTLFLVLLSLVSRM

SEQ ID NO: 146673 - protein, 187 aa, Oryza sativa
  Clone ID: PAT_MRT4530_47275C.1.pep
MLRNILCQSWRRGAYALQEGNHPGALHACWSRFHSGQMLSSSRSFFGVEDFMDEDNSKPYTYKKEKRSKNPHKHISFKQRTIAYMEPFTLDVFISKRFVSASLTHRTTCRQVAVAGTNSKDIKAALKSRSDIPACLAVGRFLAERAKEADVYTCTYTPRERDKFEGKIRAVVQSLIDNGINVKVYLD

SEQ ID NO: 146674 - protein, 965 aa, Oryza sativa
  unsure (1)..(965): unsure at all Xaa locations
  Clone ID: PAT_MRT4530_47276C.1.pep
MAAAQPVRAAMAKSTPTVDIPTAPLAMGNRAVTEYLHEFNRQARYAPEDVRTDAEKQEKFLAGLDDELTNQLISRDYADFEKLVDKAIRQEDQRNKMDRKRKAAQFRSNQGSHQRPRFTPGQQGGPTTMIVHQYRPFNSSSFHQVASGSQNHPGGQPNRSAAPRPPMATAQAAPSVQAKKETGVKPGSCFNCGEHGHFADKCPKLRRAGPRFAQARVNHASAEEAQAALEVVLEIQISPFLANLVLLESKDLDVILGMDWLTKFKGIIDCANRTVTLTNERGETVVYKSPVALKQGISLNQIEVENSVVTAEKSSRKLEDIPIVCEYSEVFPEDLTTMPPKREIEFRIDLAPGTAPIYKRPYRMAANELAEVKKQVDEQLQKGYIRPSTSPWGAPVIFVEKKDKTKRMCVDYRALNEVTIKNKYPLPRIDDLFDQLKGAKVFSKIDLRSGYHQLRIREEDIPKTAFTTRYGLYECTVMSFGLTNAPAFFMNLMSKVFMEFLDKFVMVFIDDILIYSKSEEEHEQHLRLVLEKLKEHQLYAKFSKCDFWLSEVKFLGHVITAQGVAVDPSNVESVTKWTPPKTVSQIRSFLGRAGYYRRFIENFSRIARPMTQLLKKDEKFKWTAECDKGFEELKKKLVSALVLNLPDQTKDFQVYCDASRHGLGCILMXGRVVAYASRQLRLHEGNYPTHDLELAARHGLRSWIKSEQLMXYPEIAELKKNMRVGKARDFHEDEHGTIWLGERLCVPDDKELKDLILTEAHQTQYSIHPGSTKMYQDLKEKFWWASMRREIAEFVALCDVCQRVKAEHKRPAGLLQPLQIPEWKWEEIGMDFITDGQTESVNQILEDMLRACALDFGGAWDKSLPYAEFSYNNNYQASLQMAPFEALYGRKCRTPLFWDQTGKRQLFGTEVLTEAEEKVRTIRERLRIAQSRQKSYADNRRRELTFEAGDYVYLRVTPLRGVHRF

SEQ ID NO: 146675 - protein, 43 aa, Oryza sativa
  Clone ID: PAT_MRT4530_47277C.1.pep
MYPLPRLVYCNRPCASHAIIYREHSSPRSAIWFFDRLIDGFWL

SEQ ID NO: 146676 - protein, 54 aa, Oryza sativa
  Clone ID: PAT_MRT4530_47278C.1.pep
MAALARSIEAGNQEGKERQKGDDLEQEERIWSKVGVDPGENEVSPKPLPRYSGI

SEQ ID NO: 146677 - protein, 204 aa, Oryza sativa
  Clone ID: PAT_MRT4530_47279C.1.pep
MANGDGKPREDTATGGRASGGNSGGKRLHGAGAMGGSGEVGEMGKKREGATEKIKLGEREPDVAGRGGNRRPTWGVGEEREAGFENRIPAISDAGAGGRERGVGAGDAAQARTWSTWPEGGGDVGAAAVAGAVARRERREVGEGPDSAAWVNGVLGLMSLGEYQILQFLVVRPCLQSGYEPEFNNSHVEMLKLLPQFLTHALDA

SEQ ID NO: 146678 - protein, 1769 aa, Oryza sativa
  unsure (1)..(1769): unsure at all Xaa locations
  Clone ID: PAT_MRT4530_4727C.1.pep
MPPKRVVKEKVARWKESDAGLDMAAEEGAEPSAPTAEDGGGQATSQLPSAPATSVQVPNAADVAKAAAAARALQTRAEILSTIQLVVPQAAPSQPAAAPTAPAVVQAQVSPDPEAQAEADMETMRQNMTRLQDMLRQMQEQQQAYEVARRTKATSAPILQYSAGYVPSQVHPHVTTQPIPPQAAQAPVYFAGQQSAAAVHSAPHVQLEAQPVAAQAHHQPPGQAPQTVAEGASALQAQLQAFLQQLNQPHCISSTTPSAHPEGNTSQGVPNWLPPIQPGLGVFPWNQGLQFDFVNXAQAPTVRQQAPTPGFGTNQAPIQAATTWSQPIFDPSMATQQVPPIGARQSNAMAQPHAQAAILPFATPYPQQSAVNRAGGEKGLPLSGGIRTRPIPPQFKFPPVPRYSGETDPKEFLSIYESAIEAAHGDENTKAKVIHLALDGIARFWYFNLPANSIYSWEQLRDVFVLNFRGTYEEPKTQQHLLGIRQRPGESIREYMRCFSQARCQVQDITEASVINAASAGLLEGELTRKIANKEPQTLEHLLRIIDGFARGEEDSKRRQAIQAEYDKASVATAQAQAQVQVAEPPPLSVRQSQSAIQGQPPRQGQAXPITWRKFRTDRAGKAVMAVEEVQALRKEFDAQQASNHQQPAHKKYRNQLISFGPEDAEGVMFPHQDPLVISAEIAGFEVRXNPGRRREFNRCYLRRSICQDGVAYPSPYPSTSITPWFRRRSSSSSRPSTFADSLWLGREQTRRANTVRRRRHPVQLQRHLRPCNPEQVRSHFPPQLSQAQDARPDRGXVVKGLQPLAASKGDLAMINRAVHSVETRPYERPKHTPKPTPHGKITKVQIDDADPTKPVSLGGDIGEEEVESILEVLKKNIDIFAWSPDEVGGVPADLIMHHLAVKPDIKPRKQKLRKMSADRQEAAKAEVQKLLRAGVIQEIDHPDWLANPVLVRKSNGKWRMCVDFTDLNKACPKDDFPLPRIDQLMDSTAGCELMSFLDAYSGYHQIHMNPLDIPKTSFITLFGTFCHLRMPFGLRNAGATFARLVYKVLGKQLGQNVEAYVDDIVVKSCKAFDHAIDLQETFNSLRIAGIRLNPEKCFFGVRAGKLLGFLAAKRGLPFFKTFRGVGKFNWTPECQAAFDELKQYLQSPPALISPPPXGSELLLYFAXASRKLKHYFQAHKVIVPSQYPLGEILRGKEVTGRLSKWAAELSPFDLHFVACSGIKSQVLADFVAEWTPVLAPDPEPAEQFWVMCSDGSWSHKGVGIAAVLFSPNGVPIRYAARLQFDTTNNAAEYEAVLLGLRKAKALGVRRLLIRINSKLVAGHVDKSFEAKEEGMKRYLEAVRSMEKCFTGITVEHLPRGQNEEADTLAKSTVCGGPHSPSIFFEVLHAPSVPMDSSEVMAIDQEKLGEDTYDWRTPFVKHLETGWLPVDEAGAKRLQLRATKYKMVSGQLYRSGVLQPLLRCISFAEGKEMAKEIHQGLCGAHQAARKVASKVFRQGVYWPTVLKVCVEXIKKCESCQRHGRSQATPQYDLQPIAPIWPFARWGLDIIGPFPVARNGYKFAIVAVEYFSRWIEAEPLGAITSAAVQKFVWKNIVCRFGVPKEFISDNGKQFDSDKFREMFKGLNLEIRFVSVAHPQSNGAAERTNGKILEALKKGKWPEELLSVLWALRTTPTRPTKFSPFMLLYGDEAMTPAELGANSPRVMFSGGEEGREVSLELLEGVRVEALEHMHKYATSTSATYNKKVRPTELMPGHLVLRKKANPVAVGK

SEQ ID NO: 146679 - protein, 958 aa, Oryza sativa
  unsure (1)..(958): unsure at all Xaa locations
  Clone ID: PAT_MRT4530_47280C.1.pep
MAEHPPNHRGEGMDDFVAELARMTLVVGYPNTPEYTTVPPLSGELPHRVRLEVHGYVGTCLANMVVEASGGTADHACQEAAYLMMARLRERHTYIFHDTAYRFHPRQASGSDVSSFRPTAGENDSTFGHMCAVMRGMDRMHSDLHKASKALNDGKLVRIIALKDEIARLKRENAQLKGLPALGGVRIRTTPRKSTTAPVRVQLEPKNPPPSAAPAAPPVPPAAPAVPAAPAPAPAPIPVSAPASALSFTPASAVRGPASGKGGWLPATPSGSRDRSSSSSSGSEPGSGCLLVGQSAMVYTRNGTRTTGEGSNGEERTDGVHPNSDSGNGPPPFPENPTLAQVMAHQTQMMAAMMQQMQQQHQQMHQRMQQHAEQHHQQFGPPPPQSKLPKFLRVRPPTFSSTTNPMETNDWLHAIEKKLNLLQCNDQEKVAFATHQLQGPASAWWDNHMATRPPGAEVTWAEFCRSFRKAQDVRTDAEKHEKFMAGLDDELTNQLISGDYADFERLVDKAICQEDQRNKMDRKRMAAQLRSNQEEAQAAPEVILGTFPVNSIPATVLFDSGATHSFISMKFVGMHGLRKEELSTPMRVHTPGNSSTSVSFIPSVLIEIQRSPFLANLILLESKDLDVILGMDWLTKFKGVIDCANRTVTLTNEKGETVVYKSLVSPKQGISLNQIEAEIPVVTEEKNSRKLEETPIVCDYPEVFPEDLTTMPPKREIEFRIDLAPGTAPIYKRPYRMXEVKKQVDEQLQKGYIXDQMKDFQVYCDASRHGLGCVLMQEGRVVAYASRQLRPHEGNYPTHDLELAAVVHALKIWRHNLIGNHCEVYTDHKSLKYIFTQPDLNLRPRRRLELIKDYDMSIHYHPGKANVVADALSRKSYCNALCIEGMYEELQQEFERLNVGIVEHGFVAALESRPTLVDQVRAAQVNDPEIVELKKNMRVEKARDFLEDERGTIWMGER

SEQ ID NO: 146680 - protein, 94 aa, Oryza sativa
  Clone ID: PAT_MRT4530_47281C.1.pep
KPLPADYLVLAAADHTLDGRAEAHYTTHSETNHDLGQRIRGGMQIYYKTLNGKTISLEDETPDTIDNDKAKIQNKEGKPPNTPSPIIAGKQPEE

SEQ ID NO: 146681 - protein, 228 aa, Oryza sativa
  Clone ID: PAT_MRT4530_47282C.1.pep
MPMEQVFEHYDKDTLKMAMLKHEETFRQQVHELHRLYRIQKLLMRDLKRELKNQSNMSTSSPNGFAEYSRAALDAMRSYEQCYGAATRRGAAVHHAAAAARAALSLVPAVEYAQSPEEEDAEETDDEEEAAAAELELTLAVGDAASAKKRYSRNEHHSPGQSFSSSSTESDVLVTGVRDADAASPPYHHKRRPGPAAAFDVVQVDDGAVQAAPPPPPLLFHWLSLRMA

SEQ ID NO: 146682 - protein, 211 aa, Oryza sativa
  Clone ID: PAT_MRT4530_47283C.1.pep
MQSLLRRVHLAGSHGSAAKLLSSAASEIAQSGAKNELEPTVGYTIKLALKRPDKTAMHARASIIESCNCKSRLTIYELELVVGYTIKLALRWLNAEVDERGEERDEKQAILNMEAADKVLGEREIPDVQPGCILQMRLQVPEKKRRESTLKGIVIARRNAGINTTFRLRRLVAGVGVDYSPNIKEIKVLDRKKVRRAKLYYLRDRMNALKK

SEQ ID NO: 146683 - protein, 616 aa, Oryza sativa
  unsure (1)..(616): unsure at all Xaa locations
  Clone ID: PAT_MRT4530_47284C.1.pep
MQLGRIEDTQSNPIHRPIKDVTEGNYKATDVEVIGSNHAVDEDATVDEDVCQAGSSARQIGSRLALHRNYAAKDIKFGVEARALMLRGVEELADAVKVTMGPKGRTVVIEQSFGAPKVTKDGVTVAKSIEFSNRVKNVGASLVKQVANATNDTAGDGTTCATVLTKAIFAEGCKSVAAGMNAMDLRRGISMAVDEVVTNLKGMARMISTSEEIAQVGTISANGEREIGELIAKAMEXSVGKEAVITITDGNTLYNELEVVEGMKLDRGYISPYFITNQKNQKCELDDPLILIHDKKVSNLHAVVKVLELALKKQRPLLIVAEDVESEALGTLIINKLRAGIKVCAVKAPGFGESRKANLQDLAILTGGEVITEELGMNLENFEPQMLGTCKKVTVSKDDTVILDGAGDKKAIEERAEQLRSAIELSTSDYDKEKLQERLAKLSGGVAVLKIGGASEAEVGEKKDRVTDALNATKAAVEEGIVPGGGVALLYASKDLDKLQTANFDQKIGVQIIQNALKTPVHTIASNAGVEGSVIIGKLLEQDNTDLGYDAAKGEYVDMVKSGIIDPLKVIRTALVDAASVSSLMTTTESIIVEIPKEEEAAAAAPAMGGMGGMGF

SEQ ID NO: 146684 - protein, 82 aa, Oryza sativa
  unsure (1)..(82): unsure at all Xaa locations
  Clone ID: PAT_MRT4530_47285C.1.pep
DVTRDRRRRGVQTASSSHCQVITCNVLCCXDANMPHTFVDVPLASPXAGQFRVKTLFTELXHNLHFSXCCKDPDGLFTCILG

SEQ ID NO: 146685 - protein, 252 aa, Oryza sativa
  Clone ID: PAT_MRT4530_47286C.1.pep
MIRSPHAANSLQLLLVFLLATTTLLTSAKDLAAPRRQEGHGRVVPSTATLAGCQSSCGDLTFVYPFGIGSGCFRSPDFELTCDSTTSPPRLLFHDGITQIAGSINIVSTEFMDTDNSVSTRFSHTISMRNASVVSWSLSPKLLEHSLDAFYLTLWGLRFSGCDFDVYWLNRPSINKATPNCTATCPKGESTGMVSPMQHCNGTGCCTIDFGAEINAYSSTIEFKFVRQAETNLESYHNRSLHACRSTLEDPR

SEQ ID NO: 146686 - protein, 472 aa, Oryza sativa
  Clone ID: PAT_MRT4530_47287C.1.pep
MRKLCPNLERDDALDTVLEVPIPEEMFSRGSGGGGSRGSRFGCTNVKSWVRPNASDRSGGAGEPCSMSRGELQLMLGVIGAPLIPLPVDHAKQSPCSVLCEQLKADPIESSTAKYIIQQYIAASGGEWALNKVTNMYAMGKVRMTAAELNSSDADGGGGGGGGHRGGKKSSKNGGEVGGFVLWQKKPELWSLELVVSGCKISAGSDGKVAWRQTPWHQSHASRGPPRPLRRSLQDRTDRSSTRTAERHDYAFAALIGPLALAVVKGLDPMLTASLFADAVCIGERSVDGEDCFVLKVEAEASSLRARNSSSVEIIRHTVWGYFSQRTGLLVQLEDSHLLQIKSSGHGSVFWETTMESHLHDYRAVDGVNIAHAGRTAVSLVRFGDSSDGNTRTRMEEVWNIEEVDFNIWGLSMDCFLPPSDLKDSKEDKDVSAAVKPARPPPIRIPAVAVRVGPSQVAAVNMDDSDSLIARS

SEQ ID NO: 146687 - protein, 72 aa, Oryza sativa
  Clone ID: PAT_MRT4530_47288C.1.pep
YINPPVAPPLVGGYGNGYGYGWSPFSFFAPGPKVPVGVGGGFETLGLFIGPETIVGAVKRFLNRNDDDYNEY

SEQ ID NO: 146688 - protein, 290 aa, Oryza sativa
  Clone ID: PAT_MRT4530_47289C.1.pep
MEVWNTVGQAAIGWLVESVLGSLFTDKLSSWLRRVNLDDNVEELVSEMRNVAVVLEAAKGMKVGDQNEPMAGSLLHLKDLLYDADDVLDKLDYCRLQEQIIKDARGDVSKGLKINGLKSPEASNLSHRSTARATNSTTTSYVLEPIVYGRPTEIESIKNLIMSNRSDGMIVLPIVGNGGIGKTTLAQQIYKDSEIRKSAIKIWIHVSDKFDLHKVTREILECVSKKKQKETSNFNVELCMCWPMRPIYYSYVHVYSRVREMKKVVKLLEKNSQNFMVSEPIGWRLATGDG

SEQ ID NO: 146689 - protein, 191 aa, Oryza sativa
  unsure (1)..(191): unsure at all Xaa locations
  Clone ID: PAT_MRT4530_4728C.1.pep
MAAEEGAEPSASVAEDGEAQAPSQPPSGXAPSEPSSAPATSVQVPNTADVAKAATAXRALQTRAEILSTNQLVVPQAAPSQPAAAPTALTVIQAQISLDPEAQAEADMEAMRQNMTRLQDMLRQMQEQQQAYEAARRTKATINHLAKRHNQWRKGLRLCRRNSKLSFSNSTNPTTFQAQPHRLTRWGIQVM

SEQ ID NO: 146690 - protein, 82 aa, Oryza sativa
  Clone ID: PAT_MRT4530_47290C.1.pep
MPLPSHIEAHPGRRAAAVAHRGRRPSSPPRRCRRTSRSSPSCNLSLPLPLAAISRCSSPAMWLAQKLDMDDGFVKIPLPCDL

SEQ ID NO: 146691 - protein, 136 aa, Oryza sativa
  unsure (1)..(136): unsure at all Xaa locations
  Clone ID: PAT_MRT4530_47291C.1.pep
MHVVGEDYIWHTMEVLCAYGMRNRIWKESEFGMIGXVKFVSCTGRFPRWIRTSSMSLVCGFRLPTLCINREGALDRRHHGGXTGEEAVVRPATASGDFRRQQVIXRFDQSLISVRPTFFRWSDRCNYFGQTAIRRI

SEQ ID NO: 146692 - protein, 64 aa, Oryza sativa
  unsure (1)..(64): unsure at all Xaa locations
  Clone ID: PAT_MRT4530_47292C.1.pep
PFWNIXNAHSVVYITQAVPGFKLSNNNGKTVFNGXLRRGQLLIIPXHYAVVKKAQKGRKGIGGL

SEQ ID NO: 146693 - protein, 80 aa, Oryza sativa
  unsure (1)..(80): unsure at all Xaa locations
  Clone ID: PAT_MRT4530_47293C.1.pep
EAISFLLVVVVVPRLLLLLGAAGFLVLGGGGGRRLLAGSVVLLGGXRARRSLRRRLGFSRGXXAGXRLAGSVKTASSXIG

SEQ ID NO: 146694 - protein, 80 aa, Oryza sativa
  Clone ID: PAT_MRT4530_47294C.1.pep
GCWSSHLWQCSCQGFRIYPSLCSLTCSPGLCIAWLLFAPFRSYYCALPPLLLALKVMYGSCWLVWLYPSPFTNYPSFHIK

SEQ ID NO: 146695 - protein, 82 aa, Oryza sativa
  Clone ID: PAT_MRT4530_47295C.1.pep
MRGHQLGLDFLPPEILNDVLSHLPIHDTMLAFKKEHKDLKYCWLDLHIAKKTITPDGVVSLQRWWIGEDEVVFEARADKDED

SEQ ID NO: 146696 - protein, 68 aa, Oryza sativa
  Clone ID: PAT_MRT4530_47296C.1.pep
FGRLAQLGIAFSIIGEIIPGKGALAQVNIETGVPINEIEPLVLFKVVFFFIAAINPGTGKFVNDVDEK

SEQ ID NO: 146697 - protein, 66 aa, Oryza sativa
  Clone ID: PAT_MRT4530_47297C.1.pep
MAKEQPANLGKFMTTFMELIRLMIQQLNQQQQGNDAQAANNDTMNTGLRVEHPNRLSWGKDFDRRG

SEQ ID NO: 146698 - protein, 510 aa, Oryza sativa
  unsure (1)..(510): unsure at all Xaa locations
  Clone ID: PAT_MRT4530_47298C.1.pep
GLNWSNHHCQLEIETFQDHVDSAMYHALINKSGVLVNTLSNLIKSVVDGSIAEEKTGGPISFPGGVFPKYREIKTNIGGGQPQGNLMSTSGSLXQKQPPASRTLGPSIMTPPQPIYNQYEQQHQGGVQQQPLADMIADAVREQFGIKPKDSGIMYQHPYPEYFDRVPLPNRYKIPDFLKFSEQDNVTTYEHISRFLAQFGEASAIETLRVRFFPLSLFGLAFTWFSSLPXNSIRCWANLEKQFHKYFFSSVQEMKLSDLTAIRQRADESVPNYIHRFRDTRNRCFSLXLIKLQLVDLAFQGLIGPIREKFSSXDFESLAHLAQKVSAHEQIFQEVKKXKKVNYVYSCVSDSDDDQDPEISLAEWSKVKKTTMCQWVKDTNKEEKYDFDINKADKIFDLLLXEKQIQFPIGHVLPLAEELKKRKXCKWHNTGSHHTNECKMFRQQIQSAIEQGMIKFDDGKMPXRLMDILFLXTCTRRGMTSKSRGIIRILVTRLILIGISTSLGFVGMKG

SEQ ID NO: 146699 - protein, 241 aa, Oryza sativa
  Clone ID: PAT_MRT4530_47299C.1.pep
MSEGFDGTENGGGGGGGGVGKEQDRFLPIANIGRIMRRAVPENGKIAKDSKESVQECVSEFISFITSEASDKCLKEKRKTINGDDLIWSMGTLGFEDYVEPLKLYLRLYREGDTKGSRASELPVKKDVVLNGDPGSSLVNYGAQRADANANHLDLFFLLRKNPESTTANCMREDEAKPVTVKIIETVYVEADTADDFKSVVQRLTGKDAVAGDAPELNSAQRFGSGREASRHGDHKVRIYE

SEQ ID NO: 146700 - protein, 468 aa, Oryza sativa
  unsure (1)..(468): unsure at all Xaa locations
  Clone ID: PAT_MRT4530_4729C.1.pep
MEGSRRRPGSGLARGRQWARRREVARWLEELAPTVGTPSETTXERMPPKRVVKEKVVRRKESDAGPDMAAEEGAEPSASVAEDGEGQAPSQPPSAPAPSQPSSAPATSVQVPNTADVAKAAAVARALQTRAENLSTNQLVVPQAAPSQPAAPTALAVVQAQISLDPAAQAEADMEARRQNMTRLQDMLRQMQEQQQAYEATRRTKATSALILXYSAGYAPPQVRPQVVTQPSPPLAAQPPARXPSPWSKGQQFDFGNTAQSNAAAQLHAQAAISPFATPYPQQGAVNRAGSEKGLPLSGGIKTRPIPPQFKFPPVPRYSGETDPKEFLSIYESAIEAAHGDENTKAKTQQHLLGIRQRPGESIREYLRRFSQARCQVQDITEASVINAASAGLLEGELTRKIANKEPQMLEHLLRIIDGFARGEEDSKRRQAIQAEYDKASVAATQAQAQVQIADPPPLSVRQSQPAI

SEQ ID NO: 146701 - protein, 430 aa, Oryza sativa
  unsure (1)..(430): unsure at all Xaa locations
  Clone ID: PAT_MRT4530_472C.1.pep
MMRRPRSLNASTAGSFPFLLVLVVTSSFLSGRCLATTDSHHRRPPAGRHGPPRPVSPPSPPATTFSVLQYGAVGDGDKDDTKAXAFVHAWSAACAVRSSTVVVPAGYXLDGTIVANTDSGAWCSGNAVQQWLEFRSCTGLTIQGSGTVDGQGSHWWSGGAPATDIDADRVGTNNRPTALRVYESTNVAVTGITIQNSARFHLTFDTCRAVEVRGVAIRSPGDSPNTDGIHLAGSVGVSIQNATVACGDDCVSIQDGCSRVLVRGVTCGPGHGISIGGLGKGGAMAVVSDVTVQDVSLVGTSAGVRIKTWQGGSGSVRGVLFSGVRVSAVKTPIVIDQYYCDHATCANQTAAVAVSGVAYSGITGTYTQRPVYLACSDAAPCAGLRLEDIKLAPVKEGGYGRLYGPFCWKAYGDEVRPVVPPVDCLMAGEP

SEQ ID NO: 146702 - protein, 177 aa, Oryza sativa
  unsure (1)..(177): unsure at all Xaa locations
  Clone ID: PAT_MRT4530_47300C.1.pep
CLPAARAPPPRTAESAAAASASLTAGARQSVAKPLGTRTATPTSPSHGRLCFRLAGAPPRPPPPSLEVVAVTVFIGAGTPPRHVKRRLLDADPAASSRSPAPPPHRPSSSRHPSGAGSPPAPPXPPPAPPPSSAIPPPRPQPRWIERRPRXPPPPRRGSPGPAATSSTSPPPPSPWR

SEQ ID NO: 146703 - protein, 472 aa, Oryza sativa
  unsure (1)..(472): unsure at all Xaa locations
  Clone ID: PAT_MRT4530_47301C.1.pep
MGAASAHSRICCSCFRLSHGRRPAERGQAAGYPRRHADLPFHRGRCRRAAWGAASSRGCLLDADPRGLLTPAAAAAASAVVVAPSFQGRLAISATIPHRRLSLRQPYRRHSRRLAGSSVGRVAVSSAPWFAQSRGDVLNLVAFSNSMEIEGTAGRGGAPWEGERRRRRRMRRHGLGRRPVEVEDGGRTRGHAAKLGGDLLLSLLLLRPPPPPAPCRRRRSARALRSSWAPSLAACRSRRSADASVATIVVGMLRHDEEGEGEPNGKREMTLMLAIWFWGFLSRARAPGGQVAHMGPAHSPLALSLLFPSVPPPRAAAPASPAPKGINVPARPRPAXPPPLCLALLPLRSPAARPCPPPTAGPPPPRSSLQTRSPTSPSPAPPSPTPPHAVAVPPLPGSSAHLSIASVSQLPPQSPRLPVVRRQPRCRATAVICPPVCSIHGAAEGRGTAATRHHGHRKADAEAPSAAGTGIP

SEQ ID NO: 146704 - protein, 140 aa, Oryza sativa
  Clone ID: PAT_MRT4530_47302C.1.pep
MMVMGYLLAPKKGGRRRRGKDQPSAAAHHGDNDDGLRETLLEQQQQPASSSSPTAGGGGVPKGYFAVYVGEEARRFVVPTGYLREPAFRDLMERAADEFGFAQAGGLRVPCGEDDFEDLLRRLRRKNGGAAAAKAKKAIS

SEQ ID NO: 146705 - protein, 131 aa, Oryza sativa
  unsure (1)..(131): unsure at all Xaa locations
  Clone ID: PAT_MRT4530_47303C.1.pep
QPSGRRPSGPTSPRXPGHVGDCVCLKPLVMILPVPYHRHSSLPLTIGRPIGQGGRGSEEGGAVAARRSSATAEDGPGKAVARRERHGHATVVHVRRGRALGGRARGRRGCARRRLVARCRVAGRQMPFPAL

SEQ ID NO: 146706 - protein, 827 aa, Oryza sativa
  Clone ID: PAT_MRT4530_47304C.1.pep
MGARVVLFLAVAVVAAVAQEPNTDAYFVSRFFAKMGRAAPASGAAVCGWPGVACDGEGRVVEFSAAGMGLEGAVPEDTVGKLARLRSLDLSGNRLAALPNDLWEVGASLLELNLSRNAIRGDLPNNIVNFAALQVLDVSHNAFSGALPPALGSIAALRVLDASHNLFQGQLLGTVISGWTNLSSMDLSGNALDGDLPDLSPLLSLSYLNLSGNRLRGSVIGAFHEQMKVIDLSNNSFSGLNFSSGYAGSSLAYLDLSGNELTGEFSVGNRFQNLKHLNLAFNQLSVANLLVSMGEISGLEFVNLSSTGLHGQIPRELSSQLSRLKVLDLSRNNISGVVPDLSSIRLQVLDLSVNNLTGEIPVALVKKLVSMERFNFSYNNLTVCASELSPEAFAAAFARSRNDCPIAVNPDRIQRSGGKRKGMKLALAIVLSLFFSVLGLLCVAVACRRRRKRGDVLPAVKQVSFKEEPGISGPFAFQTDSTTWVADVKVATSVPVVIFEKPLLSFTFADLLAATSNFDRGTLLAEGRFGPVYRGFLPGGIQVAVKVLVHGSAMADQDAARELERLGRIKHPNLVPLTGYCLAGEQRIAIYEYMENGNLHNLLHDLPLGVQTTEDWSTDTWEDNNGGVATENITPEGTATWMFRHKIALGAARALAFLHHGCIPQIVHRDVKASSIYFDCGMEPRLSDFGLSMIAGTSTDNNLLHHSPGYAPPEFSDSENAMATAKSDVYSFGVVLFELITGKKPLGDDYPGQKEASLVNWARAMVKANLGPGIIDPKIRDTGLERQMEEALRIAYLCTAELPSKRPAMQQIVGLLKDIEPKVAEQD

SEQ ID NO: 146707 - protein, 248 aa, Oryza sativa
  Clone ID: PAT_MRT4530_47305C.1.pep
MVPKAIAVDGDLFLFRIPIDRVGTMSLTHNDYFVYAARPPPRRPTLDLLPNPSHDTLGDREIALLSCSGGDGGGDGEPCYVVAALRTIPGSTTIHRLHLYRSRPGGEQGRWTSRMVSVDEPPPLMRDVVFPIPETSHRQVHHVTSKAIRLGSGGDGTVGWVDIWRGILLCDVLHESPKLRDVPLPPPAKGNSHRAFQKHHRPVLRRHRRQPRQEVHQGERRGKMDLSHGPMARVAKMVPISCKRKASS

SEQ ID NO: 146708 - protein, 317 aa, Oryza sativa
  Clone ID: PAT_MRT4530_47306C.1.pep
MGECSEHRCWDELLPDALGLIFRKLSLKDVLTVVPRVCKSWGRVVAGPYCWQEIDIQEWSQQQSKPDQLKRMVRMLVARSGGSFHRISVSGLPGDPLFTFIGDHARSLKTMELPRSDISDSLVENVAPRLSNVTFLDISSCTKIGARALEAFGKHCKSLIGLRRVMHPTDVVGRASQHDEARAIACNMPKLRHLEIGYMLIATKAVVEIASQCHDLKFLDLRGCWNVDDKLLQESYPGLKVVGPYVDDCYENSFWEECSDDSDDSIYWELMDDDYYAAGSDDEGIWDDGQGLEGLEVRFYGGGFSESHAGFDWPPSP

SEQ ID NO: 146709 - protein, 37 aa, Oryza sativa
  Clone ID: PAT_MRT4530_47307C.1.pep
GQGFGPKKKGISSPEVPQLNSEIILRSLNYKTRNVHP

SEQ ID NO: 146710 - protein, 94 aa, Oryza sativa
  unsure (1)..(94): unsure at all Xaa locations
  Clone ID: PAT_MRT4530_47308C.1.pep
ESEKDFLEEEGKKSTAVVQKLQQEIREVVRDTGTTILEKENAFDEKLLTAFRAAIGKPADEPAEEXSFTHKIKGGLLQKGKIRENLTKSCMDHP

SEQ ID NO: 146711 - protein, 281 aa, Oryza sativa
  Clone ID: PAT_MRT4530_47309C.1.pep
MATATALSLSGGGGGGCGGRYPATVARRCCCAVPRSRRGPAPRRRLGLAASRADDSSPAPFEMTLEGALKLLGVAEGASFDDIMRAKNAVLASCKDDQDAVAQVEAAYDMLLMQSLSQRRAGKVVDNSIRYADVKPVKSAGSGTVPQWMQATMKNAPVTFEAPSSSSLGIQSCVYGALMVFTYASGSATSLPSTYTSPDVPGFILATGFGASLYFLTKKNMNLGKAALITVGGLAVGATVGSAVENWLQVDVVPFLGVHSPAVVVSEFILFSQLLVSLFVR

SEQ ID NO: 146712 - protein, 124 aa, Oryza sativa
  Clone ID: PAT_MRT4530_4730C.1.pep
FGLLKIQSWRSPHAGPTPTPTEAATIINRGGGKKIPANAGTHAHSLENPAGGTEKTKQKKADRFCHLRRKAGVHFFSFIPTSSHRDVVLDSSGRAIILALVGMIGLDPQPAAASNSWPSVVGGC

SEQ ID NO: 146713 - protein, 90 aa, Oryza sativa
  Clone ID: PAT_MRT4530_47310C.1.pep
MANYLAQIQTIKCSCDRIVVGAEDGRDLWMNEKESSHATLTRRRRPRINNKARNHVDVENVPVEFIQTSDSRLRRRFPQDQYSVWSREPY

SEQ ID NO: 146714 - protein, 79 aa, Oryza sativa
  Clone ID: PAT_MRT4530_47311C.1.pep
SSCIWGRDDRLLLLPLSIREWRNTSSVGTIAAFPVDAAASSLPPPSATTTNTAPTTTTAQRTTIDAGAGRSVAISTHET

SEQ ID NO: 146715 - protein, 41 aa, Oryza sativa
  Clone ID: PAT_MRT4530_47312C.1.pep
LQRSYPAQSNTWMLQKRGWRARVASDAGSLVPEFTAATGIH

SEQ ID NO: 146716 - protein, 124 aa, Oryza sativa
  Clone ID: PAT_MRT4530_47313C.1.pep
MAHIGFTCGAAGRADANSAAARLRLDRHGPHASVQHWFARVDRYVVRLASPARPAWRRPPRRIATACVRAPDDIVMQVRRDPSTARGAPVKSGPFRLPADMLSLVGVGEVLATRDGGVGTDTAQ

SEQ ID NO: 146717 - protein, 73 aa, Oryza sativa
  Clone ID: PAT_MRT4530_47314C.1.pep
MGLLSPMGKPTRSVLLDLAAGALIPEPAISIKGTFIPKAFQVINDPASVSSPYVLLYIGIYPFKCHLLQTSES

SEQ ID NO: 146718 - protein, 44 aa, Oryza sativa
  Clone ID: PAT_MRT4530_47315C.1.pep
LELSLALNCSGNTTPQASSTARTKPTPRRTRHRTHTQTLGLGEN

SEQ ID NO: 146719 - protein, 205 aa, Oryza sativa
  unsure (1)..(205): unsure at all Xaa locations
  Clone ID: PAT_MRT4530_47316C.1.pep
MERKVVVVCAVVGFLGVLSAALGFAAEGTRVKVSDVQTSSPGQCIYPRSPALALGLISAVALMVAQSIINTVAGCICCKRHPVPSDTNWSVAXISFIVSWAPPEIAPGLDPTGAALNDQRGEENMYFGSFCYVVKPGVFSGGAVLSLASVALAIVYYVALSSAKSPPNWGPQQNQGIAMGQPVIPPQSSEPVFVHEDTYNRQQFP

SEQ ID NO: 146720 - protein, 129 aa, Oryza sativa
  unsure (1)..(129): unsure at all Xaa locations
  Clone ID: PAT_MRT4530_47317C.1.pep
VGLCLXFEDEWPLKCPFGGSKNSRSDEVTVFLMARRDNEDELNNGWYSMGILQFLWGMEYVASKGIGEFTRSLLCGFIFAGLLLVLLMLVVRLRTELRNNGTTWSWQPNDSGDGKLARAYQLVSAKTDY

SEQ ID NO: 146721 - protein, 54 aa, Oryza sativa
  Clone ID: PAT_MRT4530_47318C.1.pep
EVVSPVFKSPNAPFPFKKRVKFVQIVISIGRETFVGKNKARVFNDNNFFLVSRY

SEQ ID NO: 146722 - protein, 243 aa, Oryza sativa
  Clone ID: PAT_MRT4530_47319C.1.pep
MASRRHEQEHEESSLQAAEAELSSARIVLESIKEEGLRFTTSIERTRRETARVTDEIPRLTEQEKAASAQLEDDAEAAEKEKTLTETENRRAMSDAENIDAEIAAAEQRIRESERHEFTIPRFEYEYLTGRAEVVHAVAEMKAAAAEAWTEARRTSEEIAMRAEAIERELGEASAADAEVTNTPRRPVEARGSGSAATTRMEKSRRMSSSSKPRAPSSNVKRKRRVLTLNCLKLLAGKCRGQN

SEQ ID NO: 146723 - protein, 610 aa, Oryza sativa
  Clone ID: PAT_MRT4530_4731C.1.pep
MSWQRVGALLLGAQSCLPVPGVPAVGGIGSVLLSMARMGWELCHVFRPYTVVDFPQSELVELSMAKQSLVLTLIMLEPQVDKETRYNNSVAMIIGLGGELRGVTPFDLHFVARTAIKSQVLADFVAEWTLVFAPEPEPVEQFWVMCSDSSWSYKGAGIAGVLISPNGVPIRHVDKSFEAKEEGMKRYLEAVRSMEKCFTGITVEHLPRGQNEEADALAKSAACGGPHSPGIFFEVLHAPSVPMDSLEIMAIDQVKLGEDPCDWRTLFVKHLETGWLPEDEAEAKRLQLRATKYKIVSGQLYRSGVHQPLLRCISFAEGEEMAKEIHQGLCGAHQAARTVASKVFRQGVYWPTVLKVYVEQIKKCESCQRHGRSQTAPQYDLQPIAPIWPFARWGLDIIGPFPVARNGYKFAIVAVEYFSRWIEAEPLGAITSAAVQKFVWKNIVCRFGVPKEFITDNGKQFDSDKFREMCEGLNLEISPFMLLYGDEAMTPAELGANSPRVMFSGGEEGREVSLELLEEVRVEALEHMRKYATNTSATYNKKVRPTELMPGHLVLRKKANPIAGGKLESKWEGPYLIKHKSRTGSFRLATLEGDEFDHSWNAASLKRFYV

SEQ ID NO: 146724 - protein, 671 aa, Oryza sativa
  Clone ID: PAT_MRT4530_47320C.1.pep
MNVPHVSSDSDDDRPVIRLFHRQKPVHKILGGRKVADIMLWRDRNLSAGILAGATLIWFLFDVAEYNLVTLLCHIALLGMLVLFIWSNAAPLFDRAPPRIPEVIVSEHAFRELALTLHSKVAHFSAVLYDISCGKELRKFLANLSPEIEESIGSSRRKLHRRKAIAEDQEQARVESELSRAMNMAMELERQIEQTNAKARSRRSELQRQRTRASGGGSRRKTARGLAAEAAGGAPAHRQEGVGTAYGEVMQELDRVKGELRKLQREVMAAMAAKGTAGRRDAEAEASTSSAVSSGPRGGGGVERDADGASEEHGVLVELAVGTAATASSDAGSWHSELAVVRATDATAMASRGHEVEHEEPSLQAAEAELSSARIELESIKAEGLRFTASIERTRRETARVTDEIRRLTEQEKAASAHVQQLNAKLLKARSRLEAVTAADERADETISKLAAILRQLEDDAAAAEKEKTLADTENRRAMSDAENIDAEIAAAEKRIRESVRELGAARASEAAATARLKAIVESATLATAAAATPRSSSSGNVTIPRFEYEYLTGRAEVVRAVAEMKAAAAEAWAEARRASEKEIAMRAEAIERELGEARAADAEATNTTRRMPFSSAATSRMAKSRRMPSSSAAAAARKPRSPSSSVKRRKRRVLTLNCLKLLAGKCRGQN

SEQ ID NO: 146725 - protein, 632 aa, Oryza sativa
  Clone ID: PAT_MRT4530_47321C.1.pep
MSHRAPMPGGSSSLSDALAAAALRDKPDSLPPGRLSPVSPLVHSRLPTPTSSSGSSGSAPPRPARRGGGDYHGVGEGFGPLIYTSCSSSAGGGGGGVGASTATSALAAGAFPAGNICPSGRLPTTPPSPPPRTTRRAVRMSAAASAEAEEVRRAGNEQYKNGCFEEALRLYDRALALCPDSAACRANRAAALIGLTRLGEAVEECEEAIRLDPSYGRAHQRLASLQIRLGRTADARKQIGMGGLQPDIVELHKLEAVDKHLGRFADARKIGNWKSALRECNAAIAAGADSCAMLFASRAEALLQINQLDEADLAISRASKLDCSSSCSQDMMFCGFQSNSYLYYVHAQVDIAFGRFDSAMSSMEKARKIDSGNVEVMAMHKSVRTVAQARTLGNELFHSGKFAEAFLAYGEGLKHHPANSVLYCNRAACMFKLGQWEKSIEDCNEALKIQPNYWKALLRRAASYGKIEQWADSVKDYEVLRRELPGDTEVAEGHFHALVALRSSRGEDVSNMKFGGEVEALVGAEQFQMATTLPEGLFLERIFHFIMLCTILLQIFPFHCFHDHPAAIPQLSTRNNAVIGQQVDITENPTVTQLENVKTVPTFKIYKDGTRVMEMICPSHQLLESSLRQYEV

SEQ ID NO: 146726 - protein, 362 aa, Oryza sativa
  Clone ID: PAT_MRT4530_47322C.1.pep
MESDASTSPRRRSTSCYSDSGDSSCSEPFSECGSDDLSFTPAAAAGIHRLLLSCAAEASDGTISSLVAELESPSSSLDSLRRAAMELRLLAKHNPDNRIRIAAAGAVRPLVALLSHADPLLQEHGVTALLNLSICDENKAIIVEAGAIRPLVHALKSAASPAARENAACALLRLSQLDGSAAASIGRAGAIPLLVSLLETGGARGKKDAATALYALCSGARENRLRAVEAGAVRPLLDLMADPETGMVDKAAYVLHSLVGIAEGRSAAVEEGGIPVLVEMVEVGSPRQKEIATLSLLQICEDSAAYRTMVAREGAIPPLVALSQSSSARPKLKTKAEALIEMLRQPRSASLRARPTAVVAAE

SEQ ID NO: 146727 - protein, 342 aa, Oryza sativa
  Clone ID: PAT_MRT4530_47323C.1.pep
MADGSSPSAAAGYPLLVQRSNAGSPAMAFSLSDGKTHDDVSLPEMHSSTYLQTPQGWVLVLSSSSAPEMSTFLLDPRDGRKVGLPPLDESELPTARKCVLSDNAPDAGAGVVVLSLQGPAVWFCRVGGERWSTHTYDMGYFSLPVEYRAPKKRHLFDVAGVGGRFYFCEDKDFSLGTLDFTGDGEVALVAVSVPGIDDIFPSPDSSGIAATYLVESRGDLYLAAVVFLGFRAEGPPHKFSVYRMDFSAAGPAWRRTADIGGDRAFVLGGGGGGNFGASCSASGCGVRANCLYWFNSFSPDDYNLHVLSVGDGGVETVAPPPFEHASCVHKPFWLVPTTNNTA

SEQ ID NO: 146728 - protein, 40 aa, Oryza sativa
  Clone ID: PAT_MRT4530_47324C.1.pep
TFKGTNPPHSSGGHHRRRRGIFLHRLQTTVYRSLLQVSLL

SEQ ID NO: 146729 - protein, 142 aa, Oryza sativa
  unsure (1)..(142): unsure at all Xaa locations
  Clone ID: PAT_MRT4530_47325C.1.pep
EREGKREERGSSPASTAAGAKDEGGGDDPTSGGADGHGERGVPAAGLDGDAAAEVALAAEKLTAAADWLGGGARGDRRGRGRRHARXAAKKGKGRVGRGERARGAGRRGEGSGDVGTVTWGEWTRWGAGGAGGWSSGSNGRR

SEQ ID NO: 146730 - protein, 124 aa, Oryza sativa
  Clone ID: PAT_MRT4530_47326C.1.pep
EGHGRSGPRRGGGDRRCASHGQYLYCLRYRPVRPDVLLRRLRARSLGAPLLTGAPAYCAHTSVRLALPSILCGLIARSTPPYLGKTIALGEPRLMHVRTNMGDISVYREVPRVLRAIDNEISCS

SEQ ID NO: 146731 - protein, 93 aa, Oryza sativa
  Clone ID: PAT_MRT4530_47327C.1.pep
MATASDGSGSGGEQRRLLSIPKEGERIIAPTRRPDGTLRKAIRIRAGYVPQEEVAIYQSKGAQMRKSGPDVPPGYDPALDAKPKTKAAKRNER

SEQ ID NO: 146732 - protein, 135 aa, Oryza sativa
  unsure (1)..(135): unsure at all Xaa locations
  Clone ID: PAT_MRT4530_47328C.1.pep
GAEVFILGRDNLIVCSRYLEDCFNLPLXTXSYVQFQQLQQELDDLEFTSQRGGIWTFIWNTETYSSQKFYRSMFMGILVPRPFIWIWKTKCVKNIEVFIWLLLCDMLNARDMLNXKHCAPEDADLFVICVKTREK

SEQ ID NO: 146733 - protein, 316 aa, Oryza sativa
  Clone ID: PAT_MRT4530_47329C.1.pep
MASRSASIVQANVTSGYNLLTIDGYMATTPIPTGVYMTSSAFAIGGHQWRISYYPNGKNSGCADYISFDLILDENVAAPLHERERGEGPSRFVKRRILERSRRRHLKNDSFIVRCDVVVTEFRPAEVAPGSVDVDGPPSDLHRHLGDLLRGETGADVVFEVGGERFAAHRCVLDARSSVFDLELFGATTAKEVVVGQSTGIVRVDGMEARVFKALLFFAYTDSLPEMMTTTKKKMEEQAAGDGDDRYDIDAFTVGKVIALAEQHDCRVLRKLASISSCVVLDFRRMYCWAPATAAPSAAPFLLDKSCLKASSKSGS

SEQ ID NO: 146734 - protein, 2074 aa, Oryza sativa
  Clone ID: PAT_MRT4530_4732C.1.pep
MDEDEVSLEEMEEYNLVASKLFRSEEDGYKFYNEYARCKGFSIRRDKVKRFSGYRTLKNFERTNRKREPRALTHCGCKAMLEIELNGETGMWFVSGFEARHSHRLANPDLVAFLRSHREVNDAQKAEAVELGVGGLRTCQIITYHVNRYSLPFVPFVGANHHRSTIIFGCGILSNESVSSYVWLLQTLLEAMHQKHPKSLITDGDASMAKAITKVMPNTDHRLCSWHIEENMKCHLRRQKLADFKKFLYDAMDVDDFERCWVEYKAKYGFNENNLWISMMYELRKKWSTAYMKGTRFLGMRSNQRSESLNSRLHRHLDRKMSLVDLVEHYEFCLSRIRRNEAVLDARASQSVSFTTICADPLEKSAARIYMPAMFKKVWAEIRKLYEWEVFNVARQDGAGVFTVASKDNNVVQVHVWCTFEEQSMNSANCDCKKLECDGIPCSHVCAVLKFLGVGTIPHCCVMTTQICSIHALYDLIATFSVPQREAVHKCGFGGLLKIHRINVHRILCMWIANQFDTKAEAFKIQGSYLSLTNRDAEHLLDLPSQGEEIFEPPQTKNRDLFDEFKTTSKQGAHIKLSLQEYFQTNKGIHDDNFIHRFVLFVIGVFLCPTTQRYVSSAYLNLVEDVNAISAINWTSLNLNHLMKSIKNISTIKGVNLEGNLPLLRLWYWEKLRADNLDPTIDYTMRDKPLIQYWDKHKAKKRYKIDTTYDYAGADHGDSERNHSERMPPKRVVKEKVVRRKESDAGPDMAAEEGAEPSASVAEDREAQAPSQPPSDPAPSQPSSAPATSVQVPNTADVAKAAAAARALQTRAEILSTNQLVVPQAAPSQPTAPTALTVVQAQISLDPEAQAEADIEAMRQNMTRLQDMLRQMQEQQQAYETTRRTKATSAPILQYSAGYAPPQVQPQVVTQSSPPLAAQPPVYFAGQHQPPGQAPQSVAEGASALQAQLQAFLQQLNQSHYISSTTPSAHPVGNTSQGAPNWLPPIQPGSGPSPSSQGPQFDFVNTVQVPTVQQQVPTPGFGTNQAPIQAAMMWSQPIFDPSMAAQQVQPVGAGQSNATAQLYAQAAISPFATPYPQQGAVNRAGGEKGLPLSGGIKTRPIPPQFKFPPVPRYSGETDPKEFLSIYESAIEAAHGDENTKAKVIHLALDGIARSWYFNLPANSIYSWEQLRDVFVLNFRGTYEEPKTQQHLLGIRQRPGESIRENMRRFSQARCQVQDITEASVINAASAGLLEDELTRKIVNKEPQTLEHPLRIIDGFARGEEDSKRRQAIQAEYDKASVAAAQAQAQVQIAEPPPLSVRQSQPAIQGQPPRQGQAPMTWRKFRTDRAGKAVMAVEEVQALRKEFDTQQASNHQQPARKKVRKDLYCAFHGRSSHTTEQCRNIRQRGNVQDPRPQQGTTVEAPREAVQEQTTPAKQRQDTQRRRKMQIRMVHSITSAGEGAPQYVNQLISFGPEDAEGVLFPHQDPLVISAEIAGFEVRRILVDGGSSADVIYAEAYAKMGLPTQALTPALTSLRGFSGEAVQVLGQALLLIAFGSGENRREEQILFDVVNIPYNYNAIFGRATLNKLEAISHHNYLKLKMPGPTGVIVVKGLQPSAASKCDLAIINRAVHNVKTEPHERPKHTPKPTPHGKVTKVQINDADPTKLVSLGGDMGEEEVESILEVLKKNIDIFAWSPDEVGGVPADLIMHHLAVKPNIKPRKQKLRKMSADRQEATKTEVQKLLRAGVIQEIDHPEWLANPVLVRKSNGKWRMCVDFTDLNKACPKHDFPLPRIDQLVDLTAGCELMSFLDAYSGYHQIHMNPLDIPKTSFITPFGTFCHLRMPFGLRNAGATFARLVYKVLGKQLGRNVEAYVDDIVVKSRKAFDHAIDLQETFDNLCVAGIKLNPEKCVFSVRVGKLLGFLVSETGIEANPEKIDAIQQMKPPSSIHEVQKLAGRIAALSRFLSKAVERGLPFFKTLRDARKFNWTPECQAAFDELKQHLQSPPVLISPPRGSELLLYLAASPVAVSAALVQKTESRQKSVYFVSEALQGAQTRYIEMEKLAYALSRPEFLSKIPNAYMCVNPRPGISRGTQ

SEQ ID NO: 146735 - protein, 88 aa, Oryza sativa
  Clone ID: PAT_MRT4530_47330C.1.pep
LSYSLYLVIMIHERFFKYSLISMDKFVKMHGRNIIAIFLSGMRQMVLCFFFVRTSNMILIFLHFFLSSKMFVAFVWQNLIYHLVRNLE

SEQ ID NO: 146736 - protein, 120 aa, Oryza sativa
  unsure (1)..(120): unsure at all Xaa locations
  Clone ID: PAT_MRT4530_47331C.1.pep
MAWEASSRSVTAHQALVDSLRRASPMLPPPPPPTARAPDPAAAGDHAVAVEAFRAMVRXEGALLNACTYTVVIEHLASAGFVDQVVDDSXVFRLLLSLRARRTTRQYNVLAVALASAGKF

SEQ ID NO: 146737 - protein, 303 aa, Oryza sativa
  Clone ID: PAT_MRT4530_47332C.1.pep
EIDPHRAAAAAAAAAAVAMSSSSSSLLSSLATLGLGYSIAIALGFLVLLASLLLASYFCFRRGGGGGHFSGVLTPSSSSSHLSITVPRVLFVAEGSESPDAYSSGVAAASSPVGLDPAAIASYPKVPFYSGAGADADAMCSICLSEYADGEMLRVMPDCRHRFHVCCLDAWLRRNASCPVCRSSPIPTPVATPLATPLSELVPLSQYAADRRRSRGLCLGYLEKFGRCKTTTRDHALGENRSLVTCLGKRRGQGELAVVIVAATEVALPLHVADEVVSPLQVATAKIRRCQWPLDCREKGAGG

SEQ ID NO: 146738 - protein, 247 aa, Oryza sativa
  Clone ID: PAT_MRT4530_47333C.1.pep
MMPSASDAAAAAAALELQESGWEELRREARKLEGDLDVKLSSYARLAARSSSAADAASASSPSERSSWKSMEFEIQSLLDKLQDVNDAMSRCAASTAPTTSVSQKLARHRDILHEFAQEFRRTRGNLSSIREHADLLSSVRDDITESKATGGMSPRVHLLRERASIHGSINQIDEVIGQAQSTRVALSNQRALFGDVQGKVKQLGEKFPVIRGLLGAIKRKKSKDTIILSAVIAACTIFLIIYWLSK

SEQ ID NO: 146739 - protein, 542 aa, Oryza sativa
  unsure (1)..(542): unsure at all Xaa locations
  Clone ID: PAT_MRT4530_47334C.1.pep
EYQGEEDTKRMQEIQAEYDKAATAATAAAQXAQVQVQAQAAGSTHVLVRPSLPANQGQPPRPNQAPMTWKKFRTDRAGKAVMAVEEVQALRKELDVQQAGSQQQPFRRKIKKDLYCSFHRRSSHTTEQSPQVEQRQDAQRRVIQVITRSDPPSQMSKRQKKMQLQAVHNIVSASEGVPSYLAQQISFGPEDAEGVLFPHQDPLVVSAEMAGFEVRRILIDGGSSADVIFARTYAKMGLPTLALSQAPTSLKGFEGEVVQVLGQALLKVAFGTQENKREEEILFDVVDNPYNYNAIFSHGTLNKFEAVSHHNYVKLKMPGSAGVIVVKGLQPLATTVAPFDREVHIVDAEGQERARPTPKPAPHGKVMQLQIDDTDPTKVVLLGVDLGDQEKSNGKWRMCVDFTDLNKMCPKDDFPLPRIDQLVDLTAGCELMNFLDAYSGYHQIHMNSVDIPKTTFIMPFGTFCHLRMSFGLRNAGATFTRLVYKVLGLQLGWNVEAYVNDIVVKSRKAFDHASDLQETFDNLRVAGMKLNPEKCVFGVRAG

SEQ ID NO: 146740 - protein, 69 aa, Oryza sativa
  Clone ID: PAT_MRT4530_47335C.1.pep
MQPHKPETCPSTMPKFDTKSGEKIGLLAAPYVLADWAARRVPALAAARGRPESPPVSHSALEPAWCAAG

SEQ ID NO: 146741 - protein, 124 aa, Oryza sativa
  Clone ID: PAT_MRT4530_47336C.1.pep
KKNIFFGEAPGDKNKKKEWAGAFFWCLDPPQKKNFFSGTKFTFFLPPRGGSAPPPKKLKSFFLIKKNSQEILKVFQPFCFGEYKLTSSMRKVKKNLSIGVPYIYMCSRRKNLNKFWFSFFGNWG

SEQ ID NO: 146742 - protein, 48 aa, Oryza sativa
  Clone ID: PAT_MRT4530_47337C.1.pep
FYQDSHLVYLGGAVHGSMGLSSTGYQISLRLTALTTQTDLTSCRRTYS

SEQ ID NO: 146743 - protein, 389 aa, Oryza sativa
  Clone ID: PAT_MRT4530_47338C.1.pep
MGKVGTAGVGKSRLASRGGLKQLAEWSAESRGTRTLGWHVAWASAIPVLNVGDLGCITTALMYRTAVVTQARLVLAMQSKQCEDEHGDNSEKCRERWRDVSFGHVSVDEIKGQKKFNGRWGRETKRWPAGRRQAGEVVRRRRRPREAADEKALLVVKRATTRSMRVIGMRGSTIRWPYYHQRTSRRTREPDSRPPASLAPVWQSDVQADQAAAAAAVNCERTDRAFIRACPRCPFAGIISRRVTMDHGSGAFVGPLPCRPASSAPPEPRRNGKAAGVRGYRAPTPENGGKGNLLPSAICSREVASPGCLQAVLVFSRYPASSFHVLRDCNHIDNDAVTITPYSTMAAEDWDWMLELSSRRTSGSSSNRLLCVSRVSPVLYPLVNSPGTG

SEQ ID NO: 146744 - protein, 69 aa, Oryza sativa
  Clone ID: PAT_MRT4530_47339C.1.pep
MGSFFTGSRVAIPQGANSQRPQPSSHTWATTIINIPTRGHHMYFHPKIHSSGLTKLGLGCGMHGLTAPW

SEQ ID NO: 146745 - protein, 146 aa, Oryza sativa
  Clone ID: PAT_MRT4530_4733C.1.pep
EIQKREKSVPGLFFSPNTMTAYWRQSPHAARRPYLRTTPPATCCLPHDAPTPNCCAAAAAHPCPAASHHFKPTLASNARSKGGASSGRGSNGPTEWERGDQTAGGKGWCVGEVIADEEKQAGGGQDGAAAVAREEERAREVEPQPG

SEQ ID NO: 146746 - protein, 156 aa, Oryza sativa
  Clone ID: PAT_MRT4530_47340C.1.pep
MARVSRGGLYFSWALAVVTGELCANSTTNLLVRVTTAVRYIKAVVIHPKSPTFKTGMALAHATCHPNVRVPLLSALHSASCFKPPREANLLLPTPAVPTLPIPPAIPKLPMPLRRIHHAIEPLIYSIRGASLRGRMVRCPLSNSWEQAGHAKPAGQ

SEQ ID NO: 146747 - protein, 393 aa, Oryza sativa
  Clone ID: PAT_MRT4530_47341C.1.pep
MARWSSPKDPALEAALRRNRRWIVNNQIKRLLLRFPSRTAPVRLLQSRFKTLDLLGRAANWLRKYPSCFDLFHGGAGGDGDGGEEACFGFTKRMAVLVDAEEAAVAASEPAMADRLARVLMLARGRRLQVSKLAALRGPLGLPDDYLLRLLPARTDLFRLANPYPHRRNAAELELLRWVPSLAVSSVEAAAASAADSSAPRFTCSLPPSWAKSHAKMEEFNSTPYISPYSERWAAIGTDADAEKRAVAVVHELLSLTLWKKMSVLKLEHFRREFGLPEDTARMLHRHPCLFYVSNRYKIHTVVLREGYEGSELREKDPVVAAKDRLGELMQEGLHEYNQRRRSDNLEKKRRRGEIEIKEEEEEDDEEAARLDSAEKREERRKFYKVLFNDDNR

SEQ ID NO: 146748 - protein, 143 aa, Oryza sativa
  Clone ID: PAT_MRT4530_47342C.1.pep
ARGQESVTQALRHPHRPRRQPSGVHAGACAHPVAPCRSAAAALSRRHSRPPSASRVRRPRRCRTEPGATTDGATRRLLFSSPLLVAASPDAGRRPPNQLPAWRFAAAVGVQRRNGAARLLISCFPISIPIRPPAQLLHVSTDP

SEQ ID NO: 146749 - protein, 162 aa, Oryza sativa
  unsure (1)..(162): unsure at all Xaa locations
  Clone ID: PAT_MRT4530_47343C.1.pep
MAVRFAHPGTGLSSKVFNFETKISAAVIHNYRRIENTNFRLLYDRSNVHEFSPNECALHNLPRNATAEILGIMGTISITKLARNSKSKHINDAVLQTQVPPNTYHKRSXRPDPGRGRAAQVRAARGWPEKTNPGDGDRKSVDGRNLARRTGYRLDQPPPETR

SEQ ID NO: 146750 - protein, 126 aa, Oryza sativa
  unsure (1)..(126): unsure at all Xaa locations
  Clone ID: PAT_MRT4530_47344C.1.pep
WRGGCGLARRRHGGAASAWRVAWRRRGCAASVWRGGGVARRRCRAAXGVVARLHWHCQCDVVAGAGRIEVGVGIVGAAESCSAATTSATASATRQLAKDIFPLKIFSIFTPGYSHQPGLKIFSRYF

SEQ ID NO: 146751 - protein, 63 aa, Oryza sativa
  unsure (1)..(63): unsure at all Xaa locations
  Clone ID: PAT_MRT4530_47345C.1.pep
ITTIEQQQQKQLRFNSMAISRSAPMEERXQLQGARRSAVGDYLXQQQQQDGVYXIHSQVMXIK

SEQ ID NO: 146752 - protein, 372 aa, Oryza sativa
  Clone ID: PAT_MRT4530_47346C.1.pep
MGASTSPRLALLVVVAAAAFVFVSPAMAFPMGLPATANPFPNPWSAFQNLSGCHAGEEREGLGRLKDYLSHFGYLPPPPSSSPYSDAFDDSLEAAIAAYQRNFGLNATGELDTDTVDQMVAPRCGVADVINGTSTMDRNSSAAALRGRHLYSYFPGGPMWPPFRRNLRYAITATSATSIDRATLSAVFARAFSRWAAATRLQFTEVSSASNADITIGFYSGDHGDGEAFDGPLGTLAHAFSPTDGRFHLDAAEAWVASGDVSTSSSFGTAVDLESVAVHEIGHLLGLGHSSVPDSIMYPTIRTGTRKVDLESDDVLGIQSLYGTNPNFKGVTPTSPSTSSREMDGSAAAAGIRPWSGFVGLVVPAVVLLLAP

SEQ ID NO: 146753 - protein, 261 aa, Oryza sativa
  Clone ID: PAT_MRT4530_47347C.1.pep
MVWPASRCVLLDPGVPDYVFSIDQTKQGWASIDLKKKRYQGCGRYGPLLAESVKLYARLAEEHPALSRLAVCADKNIIRDIVAEELKKKQAFKVADLPIRAIEFGNVDEISGVTARVEVADKNLMVLSLSFVFTSSKLKHYLLYDAIHASMSMIPIPNWKPRFPKETPASFCHHVKFTSSSHAFRADLTKGVLCCRIKDLMDSFFVHFDFIELPPGCKSDALDDSDTGPAEMFRTMGCGTGDLIKFVSISFDDSVPEDDIR

SEQ ID NO: 146754 - protein, 62 aa, Oryza sativa
  Clone ID: PAT_MRT4530_47348C.1.pep
MPDKCGNCDWADTSQCVKKGTRLGVVIVEAEKSHYEEDAAGQENGGCKCGTSCYCTDCQRGK

SEQ ID NO: 146755 - protein, 516 aa, Oryza sativa
  Clone ID: PAT_MRT4530_47349C.1.pep
MASPASRCVLLDPGVPDYVFSIGPTEQGWASIDLKKKRYQGCGRYGPLLAESVKLYVRLAEEHPALSRLAICADKNIIRNIVAEELKKKKASKAAESSPPGLMVPDLAIRAIEFDKIDEISGVTARVEVADKNLMVLSLSFVFTSSKHYLLYDAIHASMSMIPIPNWCCDIYLPSNPLPVRYGDEYALVLFAKNYPYKREGRSTCIDLLYLWTPPKSSSPPTLLPPPPPPPREKMYPNPSGEPWHTRKPRFSKETPASFCHHVKFTSSSHAFWADLTKGVLCCRIKDLLDSFFVHFDFIELPPGCKSDALDDSDTGPAEMFRTMGCSTGDLIKFVSISFDDSVPEDDKTVTEWTLDMGTLQWTKGEELRFGTLWELDDFKKDGLPETEPVYPLLSMEEGDGGDLYFILSRPIMRWEDPAVHHVCRFNMTSKKLVSNPLSWRPDKIVPSGLLGCEFFRHLDSQRLVPDNRKMDAGKVQSWVEMESALEEVDESMQREISRKQMVWSGSQLDLFCQAN

SEQ ID NO: 146756 - protein, 1533 aa, Oryza sativa
  unsure (1)..(1533): unsure at all Xaa locations
  Clone ID: PAT_MRT4530_4734C.1.pep
ATEEGREGEGYKXRKESDAGVDMAAEEEAEPSAPVAEDGGAPSASASAPSLLPSALAASVQVSNVANVAKAAAAARALQTRAEILSTSQLLVPQAAPSQLAAASAPLAAGQVQVNPDPEAQTEADMEAMRQNMARLQDMLCQMQEQQQAYEAARRTKLTWAPILQYSTGYVPLQQRIRPLTCKCKLSRSLPKCTISHLAKCHKQWQKGLRLCSRSSKLSFSSSTNPTTFQVQPHWLARRGIQVKVRLVGCRQISQPTFDPSMAQPHAQAVISPFATPYPQQGAVNRAGGEKGLPLSGGIKTRPIPAQFKFPPVPRYSGETDPKKFLSIYESAIEAAHGDENTKAKRPGESIREYMRRFSQARCQVQDITEASVINAASAGLLEGELTRKIATKEPQTLEHLLRIIAVSQGARRIPSDGKLYKLSKAVMAVEEVQALRKEFDAQQASNHQQPVRKKGATVEAPREAVQEKAPPAEQRQDAQRRVIQVITRADPPSQLSKRQKKMRIRTVHNITSAGKGTPQYLNQLISFGSEDAEGVMFPHQDPLVISAERAGFEVRRILVGRGSSADVIFAEAYAKMGLPTQALTPAPASLRGFGGEAVQVLGQALLLIAFGSGENRREEQVLFDVVDIPYNYNAIFGRATLNKFEAISHHNYLKLKMPGLTGVIVIDDANPTKLVSLGDDMGEEEAGSILEVLKKNIDIFAWSPDEVGGVWTDLIMHHLAVKLDAKPRKQKLRKMSADRQEAVKAEVQKLLRAGVIQEIDHPEWLANPVLVRKSTSKKRMCVDFTDLNKACPKDDFPLPRIDQLVDSTAGCELMSFLDAYSGYHQIHMNPPDIPKTAFITPFGTFCHLRMPFGLRNTGATFARLVYKVLCKQLGRNVEAYVDDIVVKSRKAFDHVSNLQETFDNLRAAGIKLNPEKCVFGVRAGKLLGFLVSEKGIEANPKKIDAIQQMKPPSSVHEVQKLAGRIVALSRFLSKAAERGLPFFKTLRGSGKFNWTPECQAAFDELKQYLQSPSALISPAPRSKLLLYLAASPVAVSAVLVQETEFGQKPVYLVSEALQGAKTRYIEMEKLAYALYPLGEILRDKEVTGRLSKWAAELSPFDLRFVARTAVKSQVLADCVAEWTPVFTPEPKPVEQFWVMCSNGSWSHKGVGIAAVLISPNGVPIRYAARLQFDTTNNAAGYEAVLLGLRKAKALGVRRLLIRTDSKLVAGHVDKSFEAKEEGMKRYLEAVRSMEKCFTGITVEHLPRGRNEEGDALAKSAASSGPHSPGIFFEVLYAPSVPVDSLEVMAIDQVKLSEDPYDWRTPFVKHLETGWLPEDEAEAKRLQLRATKYKMVSAQRYRSGPXRQSGPSPDGDWTSLGCSRWRETAVQKFVWKNIVCRFGVPKEFITDNDKRFDSDKFREMCEGLNLEIRFASVVHPQSNGAVELLSVLWALRTTPTRPTKFNPFMLLCGDEAMTPAELEANSPRVMFSGGEEGREVSLELLEGVRVEXHMRQYTTSTSATYNKKVQPTELMPGHLVLRKKANPIAVGKL

SEQ ID NO: 146757 - protein, 99 aa, Oryza sativa
  unsure (1)..(99): unsure at all Xaa locations
  Clone ID: PAT_MRT4530_47350C.1.pep
NNVCHRRDPAYNKQLTAGVVITQTPTGNSCEFQWSGQVHGCHISGHLHRRNSKDAYGQQFLVKCTHRKPEFFIIQPXMILIYGPRIAKKKKLCFYMVHK

SEQ ID NO: 146758 - protein, 327 aa, Oryza sativa
  unsure (1)..(327): unsure at all Xaa locations
  Clone ID: PAT_MRT4530_47351C.1.pep
MMHTPSVLPRSQITDATLHRSYLWDCMVQLKPVRNMRVXSDSWFADYLLRVGNGIEEVNEEGHIHLPSDICVTCKGNDSDLDGLIXVFPNLNDNLMDPNYITSRAIMSTQNGFVDRINMKMIERFRGEVMTYHSFDRAEDDPCNYYPLEFLNSLTPNGLPPHVLKLKINCPIMLLRNIDPANELFNRTRLVVRGFRRNAIDVEIVVWKHAGKRVFLPWILLCPSDDEMFPFRFKRKQFPIRLSFALTINKAQXQTIPNAGVYLPKPVFSHGQLYIALSRATSRTNIKILSVQDKEKEKTATCTKNIMYKEVLTTSLTGRIRIHLTLC

SEQ ID NO: 146759 - protein, 50 aa, Oryza sativa
  unsure (1)..(50): unsure at all Xaa locations
  Clone ID: PAT_MRT4530_47352C.1.pep
ISRLNRPKGPYLHWFPNMGXIIQEDKANKGNTFSDTCHQGGSHHPRSPEV

SEQ ID NO: 146760 - protein, 224 aa, Oryza sativa
  Clone ID: PAT_MRT4530_47353C.1.pep
MGASASVLSLPTAAAIPGAATAIAGAAGCFALGYFLALSRFPRQVVAASPASGETSDEDSEEDSEEDDDDENSGRSRAAKRAPKRAGLRLLFWARNVVTKSDSAKEAERAKARTAASPLEVENLAEIIEDFKMVLVVRNDLKMGKGKIAAQCRWERCGQVKVVVKIESEEDMLVLQGRAKSLNIPTHITIDAGRTQIAPNSRTVMAILGPADMVDDVTGGLKLL

SEQ ID NO: 146761 - protein, 97 aa, Oryza sativa
  unsure (1)..(97): unsure at all Xaa locations
  Clone ID: PAT_MRT4530_47354C.1.pep
MAMMRSIILLLLXASSLSASADATFLVANKKXSSPASKSGGKRQSVYLELYDQGSATAYDVSINDDTXSEEAFELVSGEMAKTLRRLDPGSDASHAI

SEQ ID NO: 146762 - protein, 219 aa, Oryza sativa
  Clone ID: PAT_MRT4530_47355C.1.pep
AAGCFALGYFLALSRFPRQVVAASPASGETSDEDSEEDSEEDDDDENSGRSRAAKRAPKRAGLRLLFWARNVVTKSDSAKEAERAKARTAASPLEVENLAEIIEDFKMVLVVRNDLKMGKGKIAAQCSHATLGLFKKLQQRAPKSLRRWERCGQVKVVVKIESEEDMLVLQGRAKSLNIPTHITIDAGRTQIAPVSRTVMAIHMVADIIDDVTGGLKLL

SEQ ID NO: 146763 - protein, 55 aa, Oryza sativa
  Clone ID: PAT_MRT4530_47356C.1.pep
RERSEIQRHDEDTGKISDTIEPGTKQRDTSYTWMTPNRNIIRAGETLKAQLRGST

SEQ ID NO: 146764 - protein, 774 aa, Oryza sativa
  Clone ID: PAT_MRT4530_47357C.1.pep
MKKRKRRGGGASAAFDRSVFPILLAAAARSTHRRTPHGSDSTVARLLRRALSRSRPSLHPLPASLVAILPLLLTSRNWQCSSASVAALSCEVLGAAALQSMEASETLASDAAIADCLARALRRGSQRVAEAACNAIMDLSASSAGREHLAGSAVLQSILYLFSQVEFISGVIDIRSTECSKSASKANKSFYLMVDTLVFMVNSCQVDTLHNLQQDVVRKVLPLLHKIWKNVDKLGSSTDCINSKNQLQRKEHEISEAIFRLSMNIACPAHLEPDEVRRSIFGQSVSDYENFLLNYWEKSTYLVTRKQKNLHVDSVFTSLLNEFDLKTPDTIIQSLVNGIVSCPAIASDELDISSFLREVQGSLGATVKYRQDIRVVRINDQCDQTSIGYAMEEHFFDDGMTFQDADAFVEKCKDAFKNGFSVALRGMEFRSEKIAAIASAVADLFGQPSVGANIYFSPPRAQGLARHYDDHCVLVWQLLGCKKWMIWPDTKLLLPRLYEPFEPLDDLVDDCGGRMEILLEGDIMYVPRGFVHEAHTDVDVGGFEVNSTVDCSLHLTLAIEVEPPFEWEGFTHIALHCWTEKHWSSPFVKSQEEARTSLFALLLHVAIRLLSKNDATFRKACMVAAKLPPSSSCTTTHSKALRSNQRSFFDEIIKKIDRSCNFKEALMCIGLAVREKNDEPFQWMCWLRHLPQHGGTNDQVDFCNILGALEELLEAVSCNLEQSLTEFTDFKLKFCRCVAYEDACESFEMLLQMYRTTRNQYTRGMLALHRKHEI

SEQ ID NO: 146765 - protein, 39 aa, Oryza sativa
  Clone ID: PAT_MRT4530_47358C.1.pep
KPCYAWTQEDLSEGIIKEDYACSTLIWFSHIHSMDFHRL

SEQ ID NO: 146766 - protein, 405 aa, Oryza sativa
  Clone ID: PAT_MRT4530_47359C.1.pep
MAAIGKGDWRRSSAPSSFLPLVTTQFHSVLLVRTEKSVLATSVQQHGKFLSSSCMLGHGEQICGRSKDNITYQGRSSIHEFNKDYLSYFKLRDQLKEFGLKENDSLYYLKPGYFAPNGLVLLMDDNQCIQLLTDYEGKSSCSLYIVLGPARLVMNDEILVNGPSRRKGSAAIRDIVATSNSDDSVEDETYFALNEIDDYSSFVEIVPDHEVENLLWMLVIIYLMVMVEMMSCTLGRSSTSGQNKMVNYLLMVEVMIMAITRSRGVDDNWFDEGTMRHPYIQEGCAWYMYGRVIPGEKTFKLKKFIKDHTCGRSHDVKQLDAKWIAKDYVEDFRSDRDWKDPDVNLVFVRMFISFKAQIDGFIAACRPFIGVDGTRVKLPNRAQILAATGRDANNNMSLSTSICNS

SEQ ID NO: 146767 - protein, 209 aa, Oryza sativa
  unsure (1)..(209): unsure at all Xaa locations
  Clone ID: PAT_MRT4530_4735C.1.pep
RAAGIRHEEFTVLDVDGEEPHTGIIASISNDNPAMISCVDDERLEFQDGDLVVFSEVQGMTELNDGKPRKIINARPYSFCIQEDTSKFGIYAKGGIVTQVKEPINLEFKSLRDSIREPENFLLSDFSKFDRPPLLHFAFLALDKFRKEFGRFPGAGCDQDAQRFIEFVASVNEATIDYKMDELDGKLLRNFASGSRAVLNPXMAAMFGG

SEQ ID NO: 146768 - protein, 368 aa, Oryza sativa
  unsure (1)..(368): unsure at all Xaa locations
  Clone ID: PAT_MRT4530_47360C.1.pep
QYIERVVAEIIIKQKEEREEEGRGEKESKKEIEKRERSDRIKKEEKRXEKINKEIKNMIRXIRRKXKERKGEREKTEKEERVGRKREKRRREKNNKKSKMIEAKRNKRSGEGRERRKKEEIIEEKXRRRKEGGEESKIKRGEVWERYKDXESIEAEKKRDDIXREEKEKKRRRKRENNIRGRDGEEQVTYNNEIQNKTERERSRTGESREEEERNKKEKEGDERRXRERRRDNKERKEKITRKXERKERDKKRKIKEERRRNXEKKQQKQKRRERTKKERVEEKKEKDEEGIGKREREEMGKRGRRRKKEKREGGEKKEEEKESEGKRKEXKEVRKKSSKKKEEKKKEKKKKKNKKGKDMKQKKKDGT

SEQ ID NO: 146769 - protein, 635 aa, Oryza sativa
  Clone ID: PAT_MRT4530_47361C.1.pep
MVAFYGLGDGGCLVSAPAELAGMFCRGGVVVQQQQRKRSLVAASAVAAADCVVRAAKRQRQQRQPPSLDALPDECLFEVLRRLPGGRERGASACVSRRWLALLCSIRASRAQPGHRCCRRGGAALPSRPQRGGKEATDVRLAAMAVVAGSRRGLEKLAVRGSHPTRGVTDRGLLAVARGSPNLCSLALWDVPLVTDAGLAEIAAGCPSLERLDITRCPLITDKGLAAVAHGCPNLLSLTVESCSGVGNDGLRAIGRSCSKIQALNIKNCARIGDQGISSLVCSATASLTKIRLQGLNITDASLALIGYYGKAVTDLTLVRLPVVAERGFWVMANAAGLQNLRCMSVTSCPGVTNLALAAIAKFCPSLRQLSFRKCGHMTDAGLKAFTESARLLESLQLEECNGVTLVGILDFLVNCGPKFRSLSLVKCMGIKDICSTPAQLPLCKSLQFLTIKDCPDFTDASLAVVGMVCPYLEQVDLSGLREVTDRGLLPLINSSEGGLVKVDLSGCKNITDAAVSTLVKGHGKSLKQVSLEGCSKITDASLFAISENCTELAELDLSKCMVSDNGVATLASAKHLKLRVLSLSGCSKVTPKSVSFLGNMGQSLEGLNLQFCNMIGNHNIASLEKQLWWCDILA

SEQ ID NO: 146770 - protein, 50 aa, Oryza sativa
  Clone ID: PAT_MRT4530_47362C.1.pep
SSSMAFCFQMASCANLERSECSESNTSFSPFLVVSSSWMMISFSLIMNRA

SEQ ID NO: 146771 - protein, 367 aa, Oryza sativa
  Clone ID: PAT_MRT4530_47363C.1.pep
MAPAAAEQELLLHLKLAFLAREPPACVLSLARKAGGGSVTPHVQNFILESCTGNNAGGDQNCSYVTTILKRIIAEAELSSDIVIDGLYEEFGQFMSSKSNNSSLNRTEKIYKEISFISPTNDNKRVSLVARLSCSINMLEGDTGCSLWPSGLFLSEFILSYPKIFSRKCCFELGSGVGLVGVCLNYVSASKVILTDGDASTLENMKGNMEMNNLCVEQEGSQLPEENKNKVQCKYLSWEETSESDLWDCRPDLVLGADIIYDPVCVPHLIRVLSMLLRRGNNRGTNNVANKEETSNEFSSAATEVPVAYIATVIRNAETFNCFDKAAADAKLSVVNITNSEAPLSLLPYMLSYDRSSVQLLKITLLS

SEQ ID NO: 146772 - protein, 284 aa, Oryza sativa
  Clone ID: PAT_MRT4530_47364C.1.pep
MGNGSIKAYAAVVLIRIMYSVMQVVSKVALDQGMSPLVFIFYRHTAAALVLIPIAFVLERGKAKRVTLKNAGKMFIHALYGVTGCGDFFNLGLNYASATSSSALYNVQPVVGVYETEEIPWTCLWNVFQGPLIEDTSKLMNTTIQISFASVQAFVVAVAAERDFSKWKLGWNFGLAAIIYNGVIVTALSYYMQIWTIAKRGPVFLAMSMPLTLIFTIIISSFILGEAVSLGSIVAGILLIGGLFNVLWGKNLEEHDELNKIGPAIPDLEMQDKEAQVPNDRATN

SEQ ID NO: 146773 - protein, 144 aa, Oryza sativa
  Clone ID: PAT_MRT4530_47365C.1.pep
MALAVKLAVLLLLAAAAAGGSSTTTVPPLEERLGAAFDGMAAAAEGGGGGGWMMECWSAVTKLGSCTNEIVLFFVNGESYLGPDCCVAIRTVTRRCWPAMLASIGFTAQEADILRGFCDAELAAPPPPSTNASSAAPAPAPASA

SEQ ID NO: 146774 - protein, 66 aa, Oryza sativa
  Clone ID: PAT_MRT4530_47366C.1.pep
WFFNNRGYHYNKPLVPSERLKSKVCCYPYRHKRLERMHYKFEQKNKQTGFLLKEHRPKICTKRTKP

SEQ ID NO: 146775 - protein, 107 aa, Oryza sativa
  unsure (1)..(107): unsure at all Xaa locations
  Clone ID: PAT_MRT4530_47367C.1.pep
WRRKAWRSHRQASPGLPKRKAYPGAKTIPATSKIGSIALVDGKLGATPTXRANCQNMNSXLKVDGCGDKGFRLVQALSIRVQVIVEYLRVWDLVKGVDEELDPDLPI

SEQ ID NO: 146776 - protein, 185 aa, Oryza sativa
  Clone ID: PAT_MRT4530_47368C.1.pep
MAPSTALSPVAFKSSFSPLLFNPTRSKINVEGAFCLPCYNRKKASNRSFRVYSLFGGKKDKDENGEEAPSKAGIFGNMQNLYETVKKAQMVVQVEAVRVQKELAATEIDGYCEGELIKVTLSGNQQPVRVEITEAAMEVGAEKLSELVNDAYKDAHQRSVQAMKERMADLAQSLGMPAGLGDGLK

SEQ ID NO: 146777 - protein, 190 aa, Oryza sativa
  Clone ID: PAT_MRT4530_47369C.1.pep
MAESTLALLAEVAAICEQLVDDPDAAKIMLDSVLSGFAALDGHITTLENLLDFYLRAADEPIMDWPMAEVEREEQRALEELYQDLRADADVLMEHRRRLHRIVKLLVFIRTYGIIKRALRRFLPAAALKFVAGAAAVVVYVEWRRGTVPEFENLGGIFTRLMCFFLLGYRVRLLCLLRLVVSPSASDLEI

SEQ ID NO: 146778 - protein, 942 aa, Oryza sativa
  unsure (1)..(942): unsure at all Xaa locations
  Clone ID: PAT_MRT4530_4736C.1.pep
MAEDGGGQAPSQPPSAPATSVQVTNAADVVKAAAAARALQTRAEILSTSQLVVPQAAPSQPAQLQAFLQQLNQPHCISSTTPSAHPEENTSQGAPNWLPPIQPGLGASPWNQGPQFDFINAAQRPTVRQQAPGFGTNQAPIQAATTWSQPIFDPSMAAQQVPPVGARQSNAMAQPHAQDAILPFATPYPQQSAVNRAGGEKGLPLSGGIKTRPIPPQFKFPPVPRYSGETDLKEFLSIYELAIEAAHGDENTKAKVIHLALDGIARSWYFNLPANSIYSWEQLRDVFVLNFRGTYEEPKTQQHLLGIRQRPGESIREYMHRFSQAWCQVQDITEASVINAASAGLLEGELTRKIANKEPQTLEHLLRIIDGXAQVQVAKPPPLSVRQSQPAIQGQPPKQGQAPITWRXKFRTDHAGKAVMAVEEVQALRKEFDAQQASNHQQPARKKVRKDLYCAFHGRSSHTTEQCRNIRQRGNGQDPRPQQGTTVEAPREVVQEQTPPAEQRQDVQRSVIQVITRADPPSQLSKRQKKMHIRMVHSITSAGEGAPQYLNQLISFGPEDAEGVMFPHQDPLVISAEIAGFEVRQILVDGGSSADVIFAEAYAKMGLPTQALTPAPASLRGFGGEAVQVLGQALLLIAFGSGKNRREEQILFDVVDIPYNYNAIFGRATLNKFEAISHHNYLKLKMPSPTVVIVVMGLQPSAASKGDLAIINRAVHSVETEPYERPKHTPKPTPHGKITKVQIDDADPTKLVSLGGDMGEEEVESILEVLKKNIDIFAWSPDEVGGVLADLIMHHLAVKPDIKPKKQKLRKMSADCQEAAKAEVQKLLRAGVIQEIDHLEWLANPVLVRKSNGKWRMCVDFTDLNKACPKDDFPLPRIDQLWGRRGARSIARTLRRSKGRSARAHAQVRHKHFGNLQQKSSTHAADAWSSCPKEEGESSSGW

SEQ ID NO: 146779 - protein, 44 aa, Oryza sativa
  unsure (1)..(44): unsure at all Xaa locations
  Clone ID: PAT_MRT4530_47370C.1.pep
RGTVLGFYKLCGPTAKSLRPCVTRGVEXGTKQRGGHNRCPREGT

SEQ ID NO: 146780 - protein, 152 aa, Oryza sativa
  Clone ID: PAT_MRT4530_47371C.1.pep
MKFIATVLSVLPVVLALPTGEDASISKRQSVNTVTDQLLFSVTLPQFTARRNARDPPTVDWTSDGCTSSPDNPFGFPFVPACNRHDFGYHNYRAQNRFTVSGKARIDSNFKTDLYFQCQSSSVSGVCRGLADVYYAAVRAFGGDDATPGKRD

SEQ ID NO: 146781 - protein, 55 aa, Oryza sativa
  Clone ID: PAT_MRT4530_47372C.1.pep
QHDLLHYYIFLLTNRDTLKYQTIYCNITNQLSFSCTNNNPLNILSQVPLIFSSLQ

SEQ ID NO: 146782 - protein, 271 aa, Oryza sativa
  unsure (1)..(271): unsure at all Xaa locations
  Clone ID: PAT_MRT4530_47373C.1.pep
MRGRSPPGQRQHHKDETLKAMPPRRSRHQGCRHRPSKEMWFSPRENSPREKGILASALKGVTTPKSVAAASPMNHQARLSPGNLSTLLESCRHPENWPRPPPSRHPPASLPALAEXGEPGIGRRPVGGLSSPXANRMPPQSNIETPHREGEELQEGRGCRPAXEEDDPLPPAPLALPSLPSCPASGPTDPDVGRPDPAKEVPDPPPPRAAPPSSPPAVVERVAVVEGLAAAFPARRXTSSGGGEVKREEGEWRRGRLGFRPPSRPRESASC

SEQ ID NO: 146783 - protein, 569 aa, Oryza sativa
  Clone ID: PAT_MRT4530_47374C.1.pep
MPTSSSPLWLLLFLSNLITTHEAAEIIPNATTPSCPSYRCGHAVDIRYPFWIDDNTSGGGAYYCGYPSLRLECRRDTPVLALPSGEYAVTHILYGDRTVSLFDLGVFSRSNTCPLVGRNLSLPAGSPLSLTDRDANLTFFIHCSFMGMPAHLVACLEGDGRHHSYVFRDGDDRTPYGYAALCQDVVGMPVLRRSLLGGNYSSPLDAAVVPALNMGFELGWRPLEDGECGDCEKAGGWCGHRRRAAHEPWTFACFRTVTITARADTKSPAMLLLITLPIASSTVDAINTTNTTSPFCEPARCGNLTIGYPFWLAGKHPPECGYRTFQVTCDHRNASLKNGIWTYQIQRIFYHNSSFMVTNEQLTDGQCVIESFVNASSDLGLTQFKISPINRELVFLYNCSQSRRQLPISWAPVSCAKNESSNSYAWLAGKYKPDDDFRQLPGNCTVSMIPVLGYDGAVAKNYERLIKGGFLLDYTAAAGPDDCEDCSRSGGWCRVNVTYDGLECQCPEGLTSSGFTCALHGSLQERKLAKGERYPCQRPQGGYDAQKRSRCQPDESSGEAFTRKPFNLA

SEQ ID NO: 146784 - protein, 108 aa, Oryza sativa
  unsure (1)..(108): unsure at all Xaa locations
  Clone ID: PAT_MRT4530_47375C.1.pep
HSRLAFPAADWCLDLHGWSIMPLLMGVHVFTDRLAFADWCFRHRSWASTSSXPAGLRRLVFPPAXRLAYYAAISGHLRFHRRPPSSPPTGVFIVIDGRLCSHIGHFCH

SEQ ID NO: 146785 - protein, 111 aa, Oryza sativa
  unsure (1)..(111): unsure at all Xaa locations
  Clone ID: PAT_MRT4530_47376C.1.pep
MTMSSPTYYFTFTVAIDWITDIVIFIIGVGTMHLKRCQTVKLYIAVPLTFLYXVKVLFGFXKQLIGYNIIAFCHPSTVFKFGKSTRETMAKMIEALGFGVIXFERRLYFRL

SEQ ID NO: 146786 - protein, 110 aa, Oryza sativa
  unsure (1)..(110): unsure at all Xaa locations
  Clone ID: PAT_MRT4530_47377C.1.pep
MTMSSPTYYFTFTVAIDWITDIVIFIIGVGTIHFKRCQTVMLYIAXPLTFLYXVKALFGFIKQLIGYNIIAFCHPSIVFRFGKSTRETMAKMIEALGCGVIXFERRLSFR

SEQ ID NO: 146787 - protein, 110 aa, Oryza sativa
  Clone ID: PAT_MRT4530_47378C.1.pep
WRQLCIESSSNGNWRSIWTLEFIDELQLVEIKGKIQVGAHYFEEGNVQLDTNIDCKDSTILQSPEECAVSITNIIRHHESEYLSSLEESYMNLSDATFKDLRRKLPVTRT

SEQ ID NO: 146788 - protein, 251 aa, Oryza sativa
  Clone ID: PAT_MRT4530_47379C.1.pep
MPAGHGFGKGKAAAVEEEEDEVNGFFVEEEEEEEEEEEAAVSDASSIGAASSDSSSIGENSSSEKEGEEEGEEVESKAKEVAVEVEGGGLGFHGLGTLESLEDALPIKRGLSNFYAGKSKSFTSLAEAAAKAAAKEIAKPENPFNKRRRVLAAWSRRRASCSSLATTYLPPLLAPDHAVVEEEDEEDDSDAEQCSGSGGGNRRREPTFPPPRLSLHAQKSSLTPRSSNPASSFRSPRSFSLSDLQNAGSYN

SEQ ID NO: 146789 - protein, 60 aa, Oryza sativa
  unsure (1)..(60): unsure at all Xaa locations
  Clone ID: PAT_MRT4530_4737C.1.pep
LDKGPIXHWGNVQITEQYKLXHGGXQHXGVFSRLEYQSRPYYKWHHLSTYSRLRSGFHVQ

SEQ ID NO: 146790 - protein, 91 aa, Oryza sativa
  unsure (1)..(91): unsure at all Xaa locations
  Clone ID: PAT_MRT4530_47380C.1.pep
TPIRCLEPXEISVXAPHSSPPGPAHXGLGSDRGPTGEIGRXRARAAPPRGNAGAGFVXRHASRRRRARCAAPRPCFVLSSVFRFWFWFGLV

SEQ ID NO: 146791 - protein, 168 aa, Oryza sativa
  Clone ID: PAT_MRT4530_47381C.1.pep
MAALPLATAEVCDANSNPIIAGELRALPPIFKIYGRRQVFAGPVATVKVFEDNVLVRELLQEKGHGRVLVVDGGGSVRCALLGGNLAQLAQINGWVGIVVNGCIRDVDEINGCDVGVRALNSHPMKSGKKGAGEKRVPVTIEGTRICDGEWLYADADGILISRTELTV

SEQ ID NO: 146792 - protein, 75 aa, Oryza sativa
  Clone ID: PAT_MRT4530_47382C.1.pep
MRCPLVGGASDRDKGKGPGEDSAQRLEESPGLDDVKLAMMTTKPDGCKGFGLMEEGATRTTLLRRPSGDGSTRPC

SEQ ID NO: 146793 - protein, 368 aa, Oryza sativa
  unsure (1)..(368): unsure at all Xaa locations
  Clone ID: PAT_MRT4530_47383C.1.pep
MASAFSSTVGAPGSGLVVKNWLRTAGYSHHGGRSRCRCRKIMAMAGGSSKEVDEEKQTEQDRWKGLAYDISDDQQDITRGKGLVDSLFQAPMGDGTHEAXEYLSQGLRTYNLDNTXGHISKNLMKLPNIQGKSFQCDLVFAKMGINLIMMSAGEPAKLIRQRYREAADMINKGKMCVLFINDLDAXGGTTQYTVNNQMVNATLMNIADNPTNVQLPGMYNXVPIIVTGNDFXPLIRDGRMDKFYWAPTREDRIGVCRGIFRSDKVPDAFPXDFFGALRARVYGDEVRRWVAEIGVENIGRRLENVKRVRLADKYLSEAALGDANHDSGEFYGKAEQQSPVPVPAGCTDQRAANYDPTARSDDGSCVYN

SEQ ID NO: 146794 - protein, 559 aa, Oryza sativa
  Clone ID: PAT_MRT4530_47384C.1.pep
MPHSLSLLLAPSRALSLSSPPLRLAPTHPPLRLHHDGGHLLVGTTRRQAPSPRRRRLHAARASAPSAAAASPVGPAGEGGEVGGRARKAAGYRNRFLDLARLGAVAESAAEALFRSEIRRRLAVTAVLILLSRVGYFVPLPGFDRRLIPDSYLSFAPLPADDLGDFSSELKLSFFQLGISHQISASIVMQVLFYPLFGPALLFSNGNVLCHVLPSLEKLRKEGLDGHEKIKGYIWWLSLGFALVAAFTVSCYSLQYSIYAASYRVKHVMITSLFLVLGAMTMTWICDTISESGFGHGSSLIICVGILTGYTDTLHKMLTQFSGNWYSCWPYILGIAGTFILVTMGAVLVTEGCRKIKLQYYGFKLASGARSESSPVTEVEPYIPFNINPTGMQPLLTTSYLLAFPSIMASIFGTQFWESLKETLNPKTSVGGGPWVYYLTYAFLVFVFNIFDIANLPKEISDYLNKMSARVPKIKPGRATVEYLTKIQTSTRFWGGILLSLLATSSLLLDRYLRQINEGFSIGFTSVLIIVGSIIELRRSYQAYNVMPALSKVLRRYGA

SEQ ID NO: 146795 - protein, 86 aa, Oryza sativa
  unsure (1)..(86): unsure at all Xaa locations
  Clone ID: PAT_MRT4530_47385C.1.pep
MGPMAMTGASLLKTSFAGARLPGAARKPTVSVAPRTGGVICNSISSSGSTPSXDLNAIRXRPIKACIVCREMTTRYVTDMSHLLPT

SEQ ID NO: 146796 - protein, 103 aa, Oryza sativa
  Clone ID: PAT_MRT4530_47386C.1.pep
QARRLTWSMPRTTQWMYLHRIVNACVPARLSHPLHVTIRRLKWVLLRLGLSIVRMIGDIILSYFQGTLATALLDTIVIGGRHVFLLDLRLPLDPCEMPFAHSL

SEQ ID NO: 146797 - protein, 153 aa, Oryza sativa
  unsure (1)..(153): unsure at all Xaa locations
  Clone ID: PAT_MRT4530_47387C.1.pep
ALPALFGQIIIDGATGLADGLGRVEAEGFADVEALEVEGLEEVDGRSGRGSVNLCPMGXWTSDACLHDAARIIRLNFHCIRSRADIMSSRDLAILSHSFSHSEVVSAYSSSAISPVRWVTGADCIGYSASTSAILEISGFPIVTRRTHVCAVY

SEQ ID NO: 146798 - protein, 139 aa, Oryza sativa
  Clone ID: PAT_MRT4530_47388C.1.pep
HRVRDYLGNPNLVHAQSILAIGAVQVVLMGFDEGYRVGGCPLGEGLDKVYPGGAFDPLGLVDDPDTFAELTVNELTNGRLTMFSMFGLFVQAILTGKGPIMNSFHHVVDPVANNTWAYTTQLLARQVSTTDTYRDGANQ

SEQ ID NO: 146799 - protein, 100 aa, Oryza sativa
  Clone ID: PAT_MRT4530_47389C.1.pep
SKVHHRSLNLYRCVIPVPKLANRPFRSSNLFDCVIPVPKLEDHLFRSSNLFSCVSSVPKLGFEYHLGQIGRDRGDTTEQVGGPKRVICKFRDRDNTAVQV

SEQ ID NO: 146800 - protein, 440 aa, Oryza sativa
  Clone ID: PAT_MRT4530_4738C.1.pep
MATRIPGTVAASGVYYNDQYRMPCKLKGIHCMALNCIPQKAKVRKCMNGYQSTFRFCVNEKNGQTTGQSNGSLIQQGQNFRCHSYGSHNSSETKECSLEDGTDSYRDFEEHSRGASQFSDNQVAAKKKSVKSSQGLAEACKFVYNDAKFVNERAQNDILLLSRGITRLNKRACQDVAVLGSGFLKLDACYLCMHIQILKEQAQSDLKKAADQHWSDGALEADLRRADSVVRRRAMEDAFMALKFVRDIHDMMANRLQEQFAKDGSSSPANSRSFITLEKNGNTFELFPHEVSTDQITAIEQAYWSMASALSEADGIDYTDPEELELLVATLIDLDAMDGKKSVSLLAECSSSPDVNTRKALANALAAAPSMWILGNAGMGALQRLAQDSNYAVARAATRAINELTKQWELEEGDSLRFVLNQNMVSKETADDSAAADDTR

SEQ ID NO: 146801 - protein, 100 aa, Oryza sativa
  Clone ID: PAT_MRT4530_47390C.1.pep
SKVHHRSLNLYRCVILVPKLANRPFISLNLFDCVIPIPKLIDHSFRSSNLFSCATSVPKFGFEYHLGQIGRDRGDTTEQLGGPKRVICEFRDRDDTSVQV

SEQ ID NO: 146802 - protein, 746 aa, Oryza sativa
  Clone ID: PAT_MRT4530_47391C.1.pep
MDGFKLSLLSFLPFVFVLAIAVEATGDEIGTFIVHVQPQESHVAATADDRKEWYKTFLPEDGRLVHAYHHVASGFAARLTRQELDAVSAMPGFVSAVPDQTHTLQTTHTPQFLGLSAPPPPQGKRWSSSSHGGSGAGAGVIVGVIDTGVFPDHPSFSDAGMPPPPAKWKGHCDFNGGSVCNNKLIGARTFIANATNSSSSYGERLPPVDDVGHGTHTASTAAGAAVPGAHVLGQGLGVAAGIAPHAHVAVYKVCPNESCAISDILAGVDAAIADGCDVISISIGGPSVPFHENPVAVGTFGAMEKGVFVSMAAGNAGPNVSSVINDAPWMLTVAASTMDRSIRTTVRLGNGLYFDGESLYQPNDSPSTFYPLVYAGASGKPSAEFCGNGSLDGFDVRGKIVVCESVVSAGGAGMILPNHFPEGYTTLAEAHVLPASHVDYVAGLAIKAYINSTANPVAQILPRGTVLGTTPAPAMAFFSSRGPSVQNPGILKPDITGPGVNVLAAWPFQVGPSSAQVFPGPTFNIISGTSMSTPHLSGVAAFIKSRHPHWSPAAIKSAIMTTADITDRSGNQILDEQRAPANFFATGAGHVNPERAADPGLVYDIAPCDYVGYLCGLYTSQEVSVIARRPVNCSAVAAIPEHQLNYPSISVRFPRAWNSSEPVLVRRTAKNVGEVPSEYYAAVDMLDTTVTVRVFPRTLRFTGVNQEKDFTVVVWPGQGGARVVQGAVRWVSETHTVRSPVSVTFA

SEQ ID NO: 146803 - protein, 91 aa, Oryza sativa
  Clone ID: PAT_MRT4530_47392C.1.pep
MAMALLLLDAVVAFVVAWYVRATSDRSIPEKIHMAQRASRRRGGNATEIAAMQWQAFDQQFSRDPRRWHGMHGSVHMRCRAAAAAASAASY

SEQ ID NO: 146804 - protein, 109 aa, Oryza sativa
  Clone ID: PAT_MRT4530_47393C.1.pep
VPSGSQLDTLNDQHPYDGNDGLCGPPLENSCSSSSASKQRHLIRSKQSLGMGPFSLGVVLGFIAGLWVVFCTLLFKKSWRVAYFCLLDNMYNNVCVIVVVQWGRLPGRT

SEQ ID NO: 146805 - protein, 81 aa, Oryza sativa
  Clone ID: PAT_MRT4530_47394C.1.pep
SKTPRITRARMWRPLNSSEVTLHSTFQCQPLPPVHRGIQSHDLYGTDAVVALVPERVIILYNIFLPPGRWLVTLVKMICAY

SEQ ID NO: 146806 - protein, 95 aa, Oryza sativa
  unsure (1)..(95): unsure at all Xaa locations
  Clone ID: PAT_MRT4530_47395C.1.pep
NLQGFRKVDPDRWEFAXNEGFLRGQRHLLKTIKRRKPPSNAPPSQQQSLTSCLEVGEFGFEEEIDRLKRDKNILITEVVKLRQEQQATKDHVKAM

SEQ ID NO: 146807 - protein, 158 aa, Oryza sativa
  Clone ID: PAT_MRT4530_47396C.1.pep
MSIASELAEGGEEDPKISSLMDVKKLSKEACIHAAQNDRLPLRVVLQVLFFEQLRAAVGASPAVVSGGIARHLVEEEDEDNDDVSSGGGDWSKSHPLSTPTSSARERSPWPSSWQEERRGRWCEMTPHLMRETIRREIGDGKRDGSGMVLILEIFSGM

SEQ ID NO: 146808 - protein, 132 aa, Oryza sativa
  unsure (1)..(132): unsure at all Xaa locations
  Clone ID: PAT_MRT4530_47397C.1.pep
MSKEVSEEPEHVRPKDYTDPPPAPLFDVGELRLWSFYRALIAEGIATWRGLYITGATXIADKGQAXADQGGGGGTLGIGWAFGGMIFILVYXCAAGIFGGRHYPAVTFGLLLARKGVVIRAVIVIVEECLGG

SEQ ID NO: 146809 - protein, 984 aa, Oryza sativa
  Clone ID: PAT_MRT4530_47398C.1.pep
MPVGVQAPEASPGRYHRRRDDDDGNGNDCSDVLGVDVLDEGADPFDIPAKRASVERLRRWRQAALVLNASRRFRYTLDLKKEEEKEQIRRKIRAHAQVIRVKGLANLLKTNTEKGVHGDEVDLACRANAFGANRYPRKKGRSFLGIKEGWYDGASIAFAVFLVILVTAVSDYKQSLQFQHLNEEKQNIQVEVIRGGRRIEVSIFDIVVGDVVALKIGDQVPADGVLVSGHSLAIDESSMTGESKIVVKDHKSPFLMGGCKVADGYGTMLVTAVGLNTEWGLLMASISEDNNEETPLQVRLNGVATFIGIVGLSVAAMVLIVLVARYFTGHTTNPDGSIQFVKGQTSVKSTIFGTIKILTIAVTIVVVAVPEGLPLAVTLTLAYSMQKMMADKALVRRLSACETMGSATTICSDKTGTLTLNQDGSPIEITGSPTEKAILSWGVELHMKFAEEKSKSSIIHVSPFNSEKKRAGVAVIVDDSDIHVHWKGAAEIVLALCTNWLDVNGISHEMTPDKANQFKKYIEEMAEESLRCVAFAYRNLDLNYVPNEEERINWELPDNELALIGIVGMKDPCRPGVRNAVDLCKNAGVKLFSSLLPDKLLRFLNKQVRMVTGDNLQTARAIALECGILTDSQASQPVIIEGKVFRAYSDAEREAVADQISVMGRSSPSDKLLLVKALKKKGNVVAVTGDGTNDAPALHEADIGLAMGIQGTEVAKESSDIIILDDNFASVVKVVRWGRSVYANIQKFIQFQLTVNVAALIINVVAAISSGNVPLNAVQLLWVNLIMDTLGALALATEPPTDQLMKRPPVGRKEPLVTNIMWRNLFIQAVFQVTVLLTLNFRGRDLLHLTQDTLDHANKVKNTFIFNTFVLCQVFNEFNSRKPYELNIFDGVSRNHLFLAVVSITVVLQVIIIEFLGKFTSTVRLSWKLWLVSVGIGFVSWPLAFAGKFIPVPRTELKTYISRCLPGKKDNEGSTPPPPPPPPV

SEQ ID NO: 146810 - protein, 46 aa, Oryza sativa
  Clone ID: PAT_MRT4530_47399C.1.pep
INNPPVIPYNGNMKPWLEIAMSKFRPSWAKYINSGPPYVRGCKTSQ

SEQ ID NO: 146811 - protein, 193 aa, Oryza sativa
  Clone ID: PAT_MRT4530_4739C.1.pep
MTRHRRGKRGRASPDPPAKRRRRGRGHGHGPGPPELEADELEAPPAPVQAPSAAAAAASEPLLVMVAGLPPGCGVMELKSRLGAYGPIARTRIDAASATGYVTFRSAAAAMAAIAASLDPDGGVTVGSKKVLVVQASEAPNDLRSTAQANPVGENTHDATKRNASESSAFSSTKAAPEGTYKAREIVAYDDLF

SEQ ID NO: 146812 - protein, 108 aa, Oryza sativa
  Clone ID: PAT_MRT4530_473C.1.pep
VPTLGATQVLPLAFTQRVPHSFWLMTRNFVLVLQSNFLMALAFVIRGWTPFCIWRHSSNVYNSKVFPFLYKNGFRSMRWAYFWPVWGALSSPVWVRLETPYPLQRGSS

SEQ ID NO: 146813 - protein, 115 aa, Oryza sativa
  Clone ID: PAT_MRT4530_47400C.1.pep
FWGERLFCTVSSICEFVTGTSKVVLGCVAFGIFWVLAVFPTVPFMPVGRTAGSLLGAMLMVLFRVISPEDAYAAIDLPIIGLLFGTMVVSIFLERADMFKYLGNLVSWKSRGSKD

SEQ ID NO: 146814 - protein, 84 aa, Oryza sativa
  Clone ID: PAT_MRT4530_47401C.1.pep
MALAGTSKVVLGCVAFGIFWVLAVFPTVPFMPVGRTAGSLLGAMLMVLFRVISPEDAYAAIDLPIIGLLFGTMVVSIFLERADM

SEQ ID NO: 146815 - protein, 133 aa, Oryza sativa
  Clone ID: PAT_MRT4530_47402C.1.pep
MVAAAWGEAEALLLPRRCRRCLVAWCTSASPISLLPFRRLSCPIEKKSYIESAAMSDKESKPPRDLVYTGFGTRWVSELVPTSSMFMSEDVALATDAIWLGETSTVGAEAAFDCWGRRCTALGDWKQARAPIR

SEQ ID NO: 146816 - protein, 559 aa, Oryza sativa
  unsure (1)..(559): unsure at all Xaa locations
  Clone ID: PAT_MRT4530_47403C.1.pep
MALAGTSKVVLGCVAFGIFWVLAVFPTVPFMPVGRTAGSLLGAMLMVLFRVISPEDAYAAIDLPIIGLLFGTMVVSIFLERADMFKYLGNLLSWKSRGSKDLLFRVCIVSAIASALFTNDTCCVVLTEFILKVARQNNLPPQPFLLALATSSNIGSAATPIGNPQNLVIAVESGISFGQFLLGVFPAMIVGVLTNAAILLCYFWKYLSVEKDQEGGQPAGPEVVADDEVTSHRFTPARMSHVSSLNPDDMDCISEPIIRSNSVRSTSANENLRSRSVNSEADIQLAIKSLRASSMSHEMVEVSTVTDRRDEGASSRKFTRTASQQRSVIIEDSPPSPASNGDKEKEDEVAEKRWRVFVWKTAVYLITLGMLIALLMGLNMSWTAITAALVLLALDFTDAQACLEKVSYSLLIFFCGMFITVDGFNKTGIPNTLWELVXEPYSRIDSAQGVALLAXVVILILSNVASNVPTVLLLGTRVAASAAAISHDSERKAWLILAWVSTVAGNLTLLGSAANLIVCEQARRAQFFGYNLSFWSHLRFGVPSTIVVTAIGLLIVTSY

SEQ ID NO: 146817 - protein, 171 aa, Oryza sativa
  Clone ID: PAT_MRT4530_47404C.1.pep
MAVQTEPGLSDPAPAFPTIGMRESTDTEVPQWWSDKGSGYVSLQEVVRLLGAIGQRVTCLAQGLHGASRIFEKTRDRRKSGRRDRNQTFSSDLARPERICAARPILLGRHGLRGGGPREGRREREGEGEPGGPASVWTVPTVMGGCETRLPEWKRIALLLGSWTLGVRKNE

SEQ ID NO: 146818 - protein, 706 aa, Oryza sativa
  unsure (1)..(706): unsure at all Xaa locations
  Clone ID: PAT_MRT4530_47405C.1.pep
MEASSSSTSSPPPPPPPSIPASSAWADASPLLDAACRDLQDGELIHGENFSLFGAMSALEIMDPKMDCGIEKSGYYSIDEAIEDGIAPVPLSLDRTLDIQRTLDVMDHLFSCEATWHKGHTLAQTVFTCIYLMRMERTSSHAILNSFCRILRATCYAVVSVVSTARTHEEEDLFTMSFGLPLRDEGDEKCLSILNSVEETIARQLRACKAQALSRKKTLEGLESLQDNPDLEEDYCRALLCRLRFRKHFYHVVTCLRKPHGRGLELAQKHVASCLTELSLMLNSRDFLRSQSNNTQQQGDEICTTASGVRPVGFDASLNSRLLSPAPPRAVKLLSWSDAIRYFEKLLRDLDIICSSPLDPVLENVLHFVVQFQKSVPDLVPRAFLQTLLVQDGKLYGRDLSCDVISRALSLPDIIGDKEFQMNEFVVQLGQLVINLLKILCTNTAWQRRKLGKSLQDWSTISIQLEFALKREFGETRNVLPHENMCMRVSKQLLVWTQEHTYWVAYRFLILGFELDLYSPSEYCMVYXRRKGKKKKDHSKDSSRDTAFPSSCLLLQCYVLLSEGLSMDFQAAFSQXIHINSHWNMKLEFIALRGRFIQHFDLLQKARLPEHITYYSFRESASHASIADLTKYNFFKEIHKITPSLRGSFASEPEKLAEIRQIEQVAEHNRIALNIISQVGAGDPSLRVSFEFTHHPHFAVAVVRRS

SEQ ID NO: 146819 - protein, 241 aa, Oryza sativa
  unsure (1)..(241): unsure at all Xaa locations
  Clone ID: PAT_MRT4530_47406C.1.pep
GDLGDISTGFASVRRTTSTTLXITTLSSAFQAFLLIFFSELGDRTFFIAALLAARNSGAIIFLGTFGALAVMTIISVVLGRAFHYVDGIIPFSFGGTDFPVDDFLAACLLVYYGITTLLDAASGDEEKMNEEQEEAELAVSKFLGNGAGIISAASTIASTFVLVFIAEWGDKSFFSTIALAAASSPLGVIAGSLAGHAVATLIAVLGGSLLGTFLSEKIVAYIGGSLFLAFAAVTLVEIVN

SEQ ID NO: 146820 - protein, 120 aa, Oryza sativa
  unsure (1)..(120): unsure at all Xaa locations
  Clone ID: PAT_MRT4530_47407C.1.pep
ATRATTRTGRGLDMRTLIEVRRSQLAYKLCDEMASEMFREHAXTVSKENIXTVLNNLNNTAQVVKEXRSILSFNGMLTALMNIPGEERIDLXLGPITFMXDSDHEKRVEDLKTLYTAYAM

SEQ ID NO: 146821 - protein, 133 aa, Oryza sativa
  Clone ID: PAT_MRT4530_47408C.1.pep
MWLLPQEEVDRILAESNETVCTVYRELKRANPSLVPSPEEEKDESTMLLYTCARNAYEDDAKFAKFQAWVCDEYARKGFVEVDYDYFGERAEVFRLYDEAREEVMGHWDHPSDSDDDDEDWKLFIRAIRRTFV

SEQ ID NO: 146822 - protein, 392 aa, Oryza sativa
  Clone ID: PAT_MRT4530_47409C.1.pep
MLFQVGGQGARPTFFEMSAAQQLPASLRAALSYSLGVFALRRPLLHKVLDYEDEFFALLMAVLESHSLRTTDGSFSESLYGLRRRPVKVSVKRSSSGAESNDKAYDSVLRKRQKVLSVVFLVVLPYFKSKLQSIYNKEREARLQASLWGQGDVRFDEADLVSDQGETSQAQVEATTGEVSNMARIKKNFAALIGVCYPWIHATNEGLSFAYQLLYLLDGTAFYSPALHALGLHVCRATGQELMESSSRVSRIRNRELERLRGPPWLKTMQRVLLNCMYTSLDYAQTGLIAAVFFFKMMEWWYQSAEERMSAPTVYPPPPPPPLPKVAKDGLPLPPDRTLCPLCCQKRNNPSVLSASGFVFCYSCIFKSVSQTTRNSALLTLKAWPSTQEQCC

SEQ ID NO: 146823 - protein, 269 aa, Oryza sativa
  unsure (1)..(269): unsure at all Xaa locations
  Clone ID: PAT_MRT4530_4740C.1.pep
PDADELALLHSGDQWSKEFIDGVHYFLSVDNAYKSKGFICCPCTRCKNXKHSSSTALNIHLMQLGFMPSYNCWTLHGELGVAIEEDEEEDDNISDWVQYGGFAENTIGVADSAIEENKGADDLGRSCVTLRTRAEKVGYHAEILIMQXKNGVTDKTFGVLLKLIKNILPXGKQFLETTYKAKKLVCPLGLEVQKIHVCPNDYFIYCGVEYENLVACPVRKALRYKMTPXDVDGKPSKKRVPAKMMWYFTTTAALPSIFKSKINVFLWVI

SEQ ID NO: 146824 - protein, 62 aa, Oryza sativa
  Clone ID: PAT_MRT4530_47410C.1.pep
LPPDRTLCPLCCQKRNNPSVLSASGFVFCYSCIFKSVSQHKRCPITLMPATVEQIRRLFHDL

SEQ ID NO: 146825 - protein, 65 aa, Oryza sativa
  Clone ID: PAT_MRT4530_47411C.1.pep
TLTGPGITKFLSPYPFTPLNFFLWDFWDFGKNIWDSIFSSHILPASLGSGGWSGNTHPIFTPCRK

SEQ ID NO: 146826 - protein, 448 aa, Oryza sativa
  unsure (1)..(448): unsure at all Xaa locations
  Clone ID: PAT_MRT4530_47412C.1.pep
MAAATSDHLSGLPDDVLRHIISLLSAKEGGATAVLSRRWRPLWRQAGTVNLDTEPYLDPAAYRGNNFPEHRRSAFFDHALAALAACESPRILSLRLASEEIEGGAAEEKCAGVVDAVQDAPAAARVEELRVRCDVSWFCSSFPGHYSLTSPAPDFASADLHFHDHRSYGDKDPNNLTVPLWSCLRHLHGVRVLKLQLDFYAEYITMEADACDGGGVVPATFPNLEYLELDAHCKDDHDMATELTVASVLRWCPAIRDLRLRLSVADAEGRVNVYNSKRHMIHQARLMRNSFEQDVQTKIDVDVTNITTSWINRLQGALSNEALGEFFQLWDEVRDVSLQQMADTIKWKLTADGNFLVASAYDLFFIATEDCSYGDTLWHSRVPSCVRFFMWIALKGRCLTADNLAKRNWPHDAICSLCQRENEDCHHLLVSCDYTAXGLAQAETLVQH

SEQ ID NO: 146827 - protein, 164 aa, Oryza sativa
  Clone ID: PAT_MRT4530_47413C.1.pep
GWRASARRRSRPGASPVTRWLSPAASPSGAGGRRRPSPSPRRSTPTSLACRTRSVAAAQGRDPSRSRHVPLELERSQLPCSQSHETAQRTRSSSTRAAAGASRTASTTPAHLSSAAPPSISSDTRRRLRTLGLSHAARAASAWPTNALRLCSGKLLPLYAAGYK

SEQ ID NO: 146828 - protein, 85 aa, Oryza sativa
  Clone ID: PAT_MRT4530_47414C.1.pep
YTYSFTLRVSFPILARGVTSYDTKFEHNAQRCTRMEYSFALLDLYGTTQDTYQVKLYPINTYKTVWPVVTLIQFSLTVTHCQKSL

SEQ ID NO: 146829 - protein, 535 aa, Oryza sativa
  unsure (1)..(535): unsure at all Xaa locations
  Clone ID: PAT_MRT4530_47415C.1.pep
MAPRKPNPASAKGPDPGQVDDDSTAFLGVSLVDDVELAKLVNSRVLVEGQAFAPGKAVVLKPIDNRTVVFAVFFEVGLWFPCNVLLLEILRLFQPSAELFGAIFFTTVNSKTVITPAGTKKTVFGSVNFNVRPERSDLWPVNAAMSKWDLHWMARWFYHTIPFAAGSNSAKALRCRRRAIAPNRKPKIAVDGAMEARFVLLRKMRGQVKLAPRKRRVPASSDSDADDEDDSEERDGEEEGEEEEEVEAVADKAVNEAIEDHVDTPGYTPTPSPGHNETGVESNSSPLRRKDLEGAKALVAFSSGKAAKGGLVKKISKKKGLVDIARVFSNDESSDETPTSPAGRSLDLXSTAPLAPLSVAGAGXSAAAGASASAERIVSAVARVFGSPVREPAISPLVKAKGKCAAAEASASEYSLAAPHFAPGDFETRANLFPFVEGVSNLILPAGTPSLFTELNEFNKGCSSIKSLAVRILAAHCSIERTVRARFDDFKSRLRAKDDEISRKNLEVESLAHTLKEAKIEIKRLQSELDKGKEA

SEQ ID NO: 146830 - protein, 861 aa, Oryza sativa
  Clone ID: PAT_MRT4530_47416C.1.pep
MEAFGGFFVDEKAARVENIFLEFLRRFKEADAAEAFYETELEAMRSRESTTMYVDFAHVMRFNDVLQKAISEEYLRFEPYLRNACKRFVMEQRTGENRAPIISDDSPNKDINIAFYNIPMLKRLRELGTAEIGKLTAVMGVVTRTSEVRPELLQGTFKCLDCGNVVKNVEQQFKYTEETSKEIPAGSLPRSLDVILRHEIVEKARAGDTVIFTGTVVAVPDVMALTSPGERAECRREAPQRKNGSGVQEGVKGLKSLGVRDLSYRLAFVANSVQVADGRREVDIRDRDIDGDDSERQKFTEEEEDEVVRMRNVPDFFNKIVDSICPTVFGHQEIKRAILLMLLGGVHKITHEGINLRGDINVCIVGDPSCAKSQFLKYTAGIVPRSVYTSGKSSSAAGLTATVAKEPETGEFCIEAGALMLADNGICCIDEFDKMDIKDQVAIHEAMEQQTISITKAGIQATLNARTSILAAANPTGGRYDKSKPLKYNVALPPAILSRFDLVYIMIDEPDENTDYHIAHHIVRVHQKREEALAPAFSTAELKRYIAFANVESSEVDLSDFQDADDGTNVPADNDAGQPTEMDAAPQQDGPGDGLAGMKQGDLIIWYVEQQNAQGAYSSTAEVKEEVKCIKAIIEGQKELQEPSNRSLERHPCAGLTDQIQDYGMGRGRRRADGAVRERVRGAHGPLMGRLAIAGPIALRLDGPERLPRPSRGRTCHGEVVFLRQSKGLMPSANKPLTGKGEIGASAETVQTMWYAKGLDPGRVDDDSTAFLGVSLVDDVELAKLVSSGALVAGQAFAPGKAVVPKPIDNRTVVFAAFFEVGLRAELFGAIFIATVNSKTVITPAGTKKTVFAPSGPISGR

SEQ ID NO: 146831 - protein, 68 aa, Oryza sativa
  unsure (1)..(68): unsure at all Xaa locations
  Clone ID: PAT_MRT4530_47417C.1.pep
EQAPCVRLGGNWRXLYVRAPGACLLEPRDFLRGPFEAGEGRARYQRVPLHNTSTMLADRLKFFFKHTC

SEQ ID NO: 146832 - protein, 380 aa, Oryza sativa
  Clone ID: PAT_MRT4530_47418C.1.pep
MAPRKPNLASAKGPDPGRVDDDSTAFLGVSLMDDVELAKLVSSGALVKGQAFAPGKAVVPKPVDNRTVVFAVFFEVGLRFPCNVLLPDILRLFQVELPQLSPSPLVRISIFDWACRTSGFEPSAELFGAIFFATVNSKMVITPAGTKKTVFGSMNFNVRLERSDLWPVNAAMSKWDRHWMARWFYHTIPFAVKLAPRKRRVPASLDSDADDEDDAEERDGKDEGEEEEEVEAVADKAANEVIEDRVDTPGYTPTPSPRHNETGVESNSSPLRRKDLEGAKALVAFSSGKAAKGGLVKKISKKKGLVDIARVFSDDESSDETPTSPAGRSLDFSTAPLAPLGVAGAGGSAATGASASVDRIVSAAARVFGSPACEPAISPL

SEQ ID NO: 146833 - protein, 944 aa, Oryza sativa
  Clone ID: PAT_MRT4530_47419C.1.pep
MPSANKPLTDKGEIGASAETVQTMWYGLRFPCNVLLPEILRLFKVELPQLSPSALVRIAIFDWACRTSGFEPNAELFGAIFFATVNSKTVITPTGTKKTEFRSVNFNVHPERSDLWPVNAAMSKWDRHWMARWFYHSIPFEAGSDSAKALRCRRRAIAPNRKPKITVDGAMEARFVLLRKVCSRLSCRDLVEEFCMLRIFPLSQAWQVTVDQGEEVDGLPNLILPEGTNTSGRANRVYNSELPPRANPHKADDDAGPSRKRMRGQVKLAPRKRRVPASSDSDADNEDDAEERDGENEGEEEAVADKAAKEAIEDRVDTPGYTPTPSPGHNETGVESNSSLLRRKDLEGAKALVAFSSGTVAKGGPVKKISKKKGLVNIARIFSDDESSDETPTSPAGRSLDLSTAPLAPLGVAGAGSSTAAGASASAERIVSATARVFGSPVHEPAISPLVKAKGKCAAAEASASEYSLAAPHFAPGDFETRADLIPFVEGVSNLVLPAGTPSLFTELNKFDEGCSTIKSLAVRILAAHCSTERTVRARFDGFKSRLRAKDDEISRKNLEVEALAHTLKEAKTEVKRLQSELDKGKEARAEVDRLKAELEKEKAHSAVLIDYYNLTEPKMEALCQKASRAEASAAEESQRFSREMAKTTESARMACQTLRLALTDMDAKVRGVPAEDASAFDFSEWTQQAGGSVSDCATAYGDCCARVSAAFTLGLLQQFGCEHVAEFPTYAKGDWEISAQNILTALRAWRKQFWQKDGRSAAKAHLLEQLAKAEAVDRCEEEGAVGKEVGGDAQDHPEGVRQKLCIRPPSGSWRSQNEKFVALKDLPKVRCPFRPVYRKMEINGQSYKVIKVANWLRAHPGRTLEDYDLVHSRRLEDMARFWRNHQKTKRQETIFQRRYSLVCVSPPTPLKVVYDISSDDEPSSSDHSLERDNDYGGEDVIYL

SEQ ID NO: 146834 - protein, 171 aa, Oryza sativa
  Clone ID: PAT_MRT4530_4741C.1.pep
MNGREFGDGSSRWLQTERLKTINVCQSETQLSKQRDRQDKASRQKFLVAATDVQRMDKDGHASRVGVYPIPLYPYGPHTSTVVIRWIFCNAALSPKLRRYVVPRRTAAAIKDRRLVGRGAFTSGRADARCGGARYRRIRRSFASQLIWCPYHRQPEPNLFQDQIDRAPSPD

SEQ ID NO: 146835 - protein, 72 aa, Oryza sativa
  Clone ID: PAT_MRT4530_47420C.1.pep
MSSAPAAGGAFDRYQRAGAPAASGNTVFKSGPLFISSKGIGWKSWKKRWFILTRTSLVFFKSDPSTLPQRGG

SEQ ID NO: 146836 - protein, 445 aa, Oryza sativa
  unsure (1)..(445): unsure at all Xaa locations
  Clone ID: PAT_MRT4530_47421C.1.pep
MAPRKPNPASAKGLDPSRVDDDSTAFLGVSLVDDVELAKLVSSGALVEGQAFAPGKAVVPKPIDNRTVAGTDSEKALRCRRRAIAPSQKPKIAVDGAMEARFILLRKAENEARRMIGDMSVVEYSQLLTRQAAGRANRVYNGELPPQANPHKADNDAGPSRKRMRGQVKLAPRKRRVPASSDSDADDEDDAEERDGXGGRRGGRGGGRGRXRPRMRRSKTASGYTPTPSPGFSXSPLREPAILPLVKAKGKCAAAEAFASEYSLAAPHFVPGDFETRVDLNPFVEGVSNLILPAGTPSLFTELNEFDEECSAIKSLAVRIIAAHCSTERTVWARFDGFKSRLRAKDDEISRKNLEVEALANTLKEAKTEVKRLQSELDKGKEARGEVDRLKAELEKEKAHSAVLIDYYNLTEPKMEALRLKASRAEALERGGVPGMVELLAFECR

SEQ ID NO: 146837 - protein, 757 aa, Oryza sativa
  Clone ID: PAT_MRT4530_47422C.1.pep
MAPRKPNPTSAKGPDPGRVDDNSTAFLVRSGALVVGQAFAPGKAVVPKPIDNRTVVELPQLSPSALVRVAIFDWACRTSRFEPNAELFGAIFFTTVNSKTVITPAGTKKTVFGSVNFNVRPERSDLWPVNAAMSKWDRHWMARWFYHTIPFEAGSDATKALRCRRRAIALNRKSKITVDGAMEARFVLLRRVCSHLSCRDLVEEFCMLRIFSLSQSWQVTVDQGEEVDGLPNLILPEEANMLTLDQAETEARRMIGDVSVVEYSQLLTRQAAGRANRVYNGELPPRANPHKADNDAGPSRKRMRGQVKLAPRKRRAPASSDSDADDEDDAEERDGEGEGEEEEEEAVADKAANEAVEDRVDIPSYTPTPSPDHNETKVESNSSPLRRKDLEGAKALVVFSSGKAAKGGPVQKISKMKGLVDIARVFSDDESSDGTPTSPAGRSLDLSTAPLAPHGFAGAGGNAAAWASASAEWIMSAAARVFRSPLREPAISPLVKAKGKCAAAEASASEYSLMAAHFAPGDFETWADLVPFVEGVSNLVLPAGTPSLFTELNEFDEGCSAIKSLAVQILAAHYSTEQTVRARFDSFKSRLRANEDEIRRKNLEVEALANTLKEAKTEVKRLQSELDKGKEARAEVDRLKAKLEKEKAHSAVLIDYYNLTEPKMEALRLKARLLQQFGCEHVAEFPTYAKGDWEISAQNISPALHTWRKQFWQKDGRSAAKARLLEQLAKAEAADRGEGEDAAGEEGGGNAQDHPEE

SEQ ID NO: 146838 - protein, 623 aa, Oryza sativa
  unsure (1)..(623): unsure at all Xaa locations
  Clone ID: PAT_MRT4530_47423C.1.pep
MAPRKPNPASAKGPDPGRVDDDSTAFLGVSLMDDVELVKLVSSGALVEGQAFAPGKAVVPKPIDNRTVVFTVFFKAGLRFPCNVLLPEILRLFQVELTQLSLSALVRIAIFDWACRTSGFEPNAEFFGAIFFATVNSKTVITPAGTKKTVFGSVNFNVRPERSDLWPVNAAMSKWDRHWMARWFYHSIPFEAGSDSTKALRCRRRAIAPNRKPKIAVDGALEARFVLLRKVCSRLSCHDLVEEFCMLRIFPLSQAWQVTVDQGEEVDGLPNLILPERTNTRRMIGDVSVVEYSQLLTRQASGQANRVCNGELPPRANPHKADDDAGPSQKRMRRQVKLAPRKRRVLASSDSDADDEDDAEERDGENEGEEEEEEAVADKAAKEAIEDRVDTPGYTPTPSPGSGRGEGSSCVLLGNGGEXGGPVKKVSKKKGLVDIARVFSDDESSDETPTSPAGRSLDLSTAPLASLSVAGAGGSPAAGASASAEQIVSAAARVFGSPILAAHCSTERTVRARFDGFKSRLRAKDDEISRKNLEVEALAHTLKEAKAEVKRLQSELDKGKEARGEVDRLKAELEKEKAHSAVLIDYYNLIEPKMEALRQKASRAEASAAEESQRFSREMAKTT

SEQ ID NO: 146839 - protein, 49 aa, Oryza sativa
  Clone ID: PAT_MRT4530_47424C.1.pep
TCSTLAAGDALLALTGRDRAARRRYFEEIRVLKASHRSILMLDSPGYSL

SEQ ID NO: 146840 - protein, 913 aa, Oryza sativa
  Clone ID: PAT_MRT4530_47425C.1.pep
MAPRKPNPASAKGPDPGRVDDDSTAFLGVSLVDDVELAKLVELPQLSPSALVRISIFDWACCTSGFQPSAELFGAIFFATVNSKTVITPAGTRMTVFGSVNFNVRPERSDLWPVNAAMSKWDRHWMARWFYHTIPFEAGSESAKTLRCRRRAIAPNRKPKIAVDGAMEARFILLRKVCSRLSCRDLVEEFCMLRIFPLSQSWKVTVEQCEEANGLPNLVLPEGMNMLTLDQTEAEARKMIGDVSVVEFSQLLTRQAAGLANRVYNGELPPRANPHKTDDETGPSRKRIRGQIKLAPRKRRVPASSDSDADDEDDAEELDGEEEGEEEEEVEAVADKAANEAIDDRVDTPGYTPTPSPGHNETGVESNSSPLRRKDLEGAKALVAFSSGKAAKGGLVKKISKKKGLVDIARIFSDDDSSDETPTSPAGRSLDLSTAPLAPLGVAGAGGSAATGASTSAERIVSAAARVFGSPVREPAISPLVKAKGKCAAAEASASEYSLAAPHFAPGDFETWADLIPFVEGVSNLVLPAGTPSLFTELNEFDEGCSTIKSLAVRIFAAHCSTERTVRARFDGFKNRLRAKDDEISRKNLEVESLAHTLKEAKTEVKRLQSELDKGKEAWAEVDRLKAELEKEKAHSAVLIDYYNLTELKMEALRQKASRAEASAAEESQQFSREMAKTTESVRTACQTLRLALTDMGAKVRGVPAEGASAFDFSEWTQQAGGSVSDCATAYGDCCVCVSAAFTLGLLQQFGCEHVAEFPTYAKGDWEISAQDISPALRAWRKQFWQKDGQSAAKARLLEQLAKAEAADLCEEEGAAAGGGGGDAQDHPEGVRRKSCIRPPSGSWRSQNEKFVALKGLPKVRCPFRPVYRKMEINGRSYKVFKVANWLRAHPGQTLEDYDHVHSRRLEDMARFW

SEQ ID NO: 146841 - protein, 538 aa, Oryza sativa
  Clone ID: PAT_MRT4530_47426C.1.pep
MEHASSPRAHGVVVIAVAPDHDDDSGKKGWRLAAAAAPAFGDEAGFGVEEEEEEGEEEEEEVRWRERRVASLWRVAGALLVVAALAVAGHYCLYHDPAAFSREEGRSSFLLPLYPKSSGGGAAGESAGSVKPDGAGAEARENSSALLPIRGNVFPDGQYYTSMYIGNPPRPYFLDVDTGSDLTWIQCDAPCTNCAKGPHPLYKPEKPNVVPPRDSYCQELQGNQNYGDTSKQCDYEITYADRSSSMGILARDNMQLITADGERENLDFVFGCGYDQQGNLLSSPANTDGILGLSNAAISLPTQLASQGIISNVFGHCIAADPSNGGYMFLGDDYVPRWGMTWMPIRNGPENLYSTEVQKVNYGDQQLNVRRKAGKLTQVIFDSGSSYTYLPHDDYTNLIASLKSLSPSLLQDESDRTLPFCMKPNFPVRSMDDVKHLFKPLSLVFKKRLFILPRTFVIPPEDYLIISDKNNICLGVLDGTEIGHDSAIVIGDVSLRGKLVVYNNDEKQIGWVQSDCAKPQKQSGFPFLFKRVLQNQLL

SEQ ID NO: 146842 - protein, 797 aa, Oryza sativa
  Clone ID: PAT_MRT4530_47427C.1.pep
SSRASPWSYHPSPPSPFSFPRAGRLQPPVRPRVSVGRPCRRFPRLCDAALFSGLTSSSPEARQSGLLVGVQYLPASGRLLFLIGAAAVVVISFPGSTGPFCHPRAPSAVPPPPPASQRRASDVVFGIASSPSWSSQTSLGSAAPPRRLLVSLCRQHLCLVLGKLREHQLYAKLSKCEFWLSKVKFLGHVISAKGVAVDPETVTAVTDWKQPKTVTQVRSFLGLARYYRRFIENFSKIARPMTQLLKKEEKFVWSPQCEKAFQTLKEKLVSSPVLILPDTRKDFMVYCDASRQGLGCVLMQEGHVVAYASRQLRPHEGNYPTHDLELAAVVHALKIWRHYLIGNRCEIYTDHKSLKYIFTQSDLNLRQRRWLELIKDYDVGIHYHPGKANVVADALSRKSRCNTLGVRGIPPELHQQMEALNLSIVDRGFLATLEAKPTLLDQIHEAQKNDPDMHGILKNMKQEHQRPAGLLQPLQVPEWKWDEIGMDFITGLPKTQGGYDSIWVVVDRQTKVARFIPVKTTYGGNKLAELYFARIVSLHGVPKKIVSDRGSQFTYHFWKKLQEELGTRLNFSTAYHPQTDGQTGRLNQILEDMLRACVLDFGKTWDKSLPYAEFSYNNSYQASIQMAPYEALYGRKCRTPLLWDQVGESQVFGTDILREAEAKVRIIRDNLKVAQSRQKSYADNRRRDLEFAVDDFVYLRVTPLRGVHRFQTKGKLAPRYVGPFRITARRGEVAYQLELPASLGNVHDVFHVSQLKKCLRVPSEQADSEQIEVREDLTYVEKPVKILDTMERRTRNW

SEQ ID NO: 146843 - protein, 833 aa, Oryza sativa
  unsure (1)..(833): unsure at all Xaa locations
  Clone ID: PAT_MRT4530_47428C.1.pep
MAPRKPNPASAKGLDPGRVDDDSTAFLGVSLVDDVELAKLVSSGALVAGQAFAPGKAVVPKPIDNRTVVFAAFFEVGLRFPCNVLLPEILRLFQXELFGAIFIATVNSKTVITPAGTKKTVFXPERSDLWPVNAAMSRWFYHTIPFAAGSDSAKALRCRRRAIAPNRKPKIAVDGAMEARFVLLCKSWQVTIEQWEEADGLPNLVLPEGTNTAGRANRVYNGELPPWANPQKADDDAGPSRKRMRGQVKLAPRKRRVPASSDSDADDEDDAEERDGKEEGEEEEEVEAVADKAANEATEDRVDTPGYTPTPSPDHNETGVESNSSPLRRKDLEGAKALVAFSSGKAAKGGLVKKILKKKGFLDIARVFSDDESSDETPTSPAGRSLDLSAAPLAPLGVAGAGGSAAAGASASAERILSAAARVFGSPVREPAISPLAKAKGKCAAAEAFASEYSLAAPHFAPGDFETRPDLIPFVEGILAAHCSKERTVRARFDGFKSRLRAKDDEISRKNLEVESLVRTLKKAKTEPKMESLRQKASRAEASAAEESQRFSQEMAKTTESARTACQTLRLALTDMGAKVRGVPIEDASAFDFSEWTQQAGGLVSDCATAYGAIAVHQFGCEHVAEFPTYAKWDWEISAQNISPALRAWRKQFWQKDGRSAAKARLLEQLAKAEAADQGEGEDAVGEEGVRRKSFIRPPFGSWRSQNEKFVAVKGLPKVRCPFRPVYREMEINGRSYKVFKVANWLRAHPGRTLEDYDLVHSKRLEDMARFWRNHQKTNRQGTNFQRRYSLVCVAPPTPLKVVYDISSDDEPSSPYHSLERDSDYGDEDVIYL

SEQ ID NO: 146844 - protein, 46 aa, Oryza sativa
  Clone ID: PAT_MRT4530_47429C.1.pep
YQFICYVNMLRSSIHNTAHFADTNLQCFLSTLSSSHHQKLTGANHD

SEQ ID NO: 146845 - protein, 88 aa, Oryza sativa
  Clone ID: PAT_MRT4530_4742C.1.pep
ETQIFQWLAHFAVSGFFNSVRAGSSLQQLHVLSLLFSFLPFTAFGDGHVLLQSHLLARDDKCGGNLVSYRTYRAGMRIEKRFGKLAEF

SEQ ID NO: 146846 - protein, 881 aa, Oryza sativa
  Clone ID: PAT_MRT4530_47430C.1.pep
MAANELAEVKKQLEELKEKGYIRPSTSPQGAPVIFVEKKDKTKRMCVDYRALNEVTIKNKYPLPRIDDLFDQLKGATVFSKIDLRSGYHQLRIREEDIPKTAFTTRYGLYEFTVMSFGLTNAPAFFMNLMNKVFMEYLDKFVVVFIDDILVYSQSEEDHQQHLRLVLGKLREHQLYAKLRKCEFCLSEVKFLGHVISAKGVAVDPKTVTAVTDWKQPKTVTQVRSFLGLAGYYRRFIENFSKIAQPMTQLLKKEEKFVWSPQCEKAFQTLKEKLVSSPVLILPDTRKDFLVYCDASRQGLGRVLMQEAAVVHALKIWRHYLIGNRCEIYTDHKSLKYIFTQSDLNLRQRRWLELIKDYDVRIHYHPGKANVVADPLSRKSHCNTLGVRGIPPELNQQMEALNLSIVGRGFLATLEAKPTLLDQIREAQKNDPDMYGLLKNMKQGKAAGFTEDEHGTLWNGNRVCVPDDWELKQLILQEAHESSYSIHPGSTKIYLDLKEKYWWISMKREIAEFVALCDVCQHVKAEHQRPARLLQPLQVPEWKWDEIGMDFITGLPKTQGGYDSIWVVVDRLTKVARFIPVKTTYGGNKLAELYFARIKLQEELGTRLNFSTAYHPQTDGQTERLNQILEDILRACVLNFGKTWDKSLPYAEFSYNNSYQASIQMAPYEALYGRKCQTPLLWDQVGESQVFGTDILREAEVKVRTIQENLKVAQSRQKSYADNRRRNLEFAVDNFVYLRVTPLRGVHRFQTKGKLAPRFVGPFRIIARRGEVAYQLELPASLGNVHDVFHLSQLKKCLRVPSEQADSEQIEVREDLTYVERPVKILDTMERRTRNRVIRFYKVQWSNHAEEEATWEREDELKAAHPDLFASSSESRGRDSV

SEQ ID NO: 146847 - protein, 77 aa, Oryza sativa
  Clone ID: PAT_MRT4530_47431C.1.pep
PPKKSSAWEWKAPGKRFFGFPLEEKDQFPPLFWVFQEWHPKIQKAFEKVWPPLGPPRAPNPIKAQYQGANFVARPIV

SEQ ID NO: 146848 - protein, 100 aa, Oryza sativa
  Clone ID: PAT_MRT4530_47432C.1.pep
LSRLLPRFYRVEFIKIEVTEVEYLCFFGRLNWDTHDRSLEADLHNYGLILDSKIITDRETGRPQGRELINYYSELMMRDTIFGLNGLELNGRYYYRHLRP

SEQ ID NO: 146849 - protein, 1405 aa, Oryza sativa
  unsure (1)..(1405): unsure at all Xaa locations
  Clone ID: PAT_MRT4530_47433C.1.pep
MVMPLSLFAGSVWGFQMVTTRRNAATSDGNQLEGSNHNNHGSPPPPPPPPPPPPPDTNAILTQILTQQANMMAAFLHHIQNPPQHNAPPPPPQHSKLAEFLRIRPPTFSSSNNPVDVLDWLHAVGKKLDTVQCSDEEKVVFAAHQLQGPASLWWDHFQATQPEGQPITWARFTAAFRRTHVPAGVMALKKREFRELKQGNRSVMEYLHEFNNLARYAPEDVREDEEKQEKFLAGMDPELSVRLVSGDYPDFQRLVDKSIRLEAKHKELESHKRRLANFRNQQGANQRIRYTNPYPGGSSSQQQQPRSAPRPQFVVRVPQPQQQQSQQGTHAPRPPTPAAQSGQGRRDVQGPQRLCFNCFEPGHFADKCPKSRRQQGQAPPCSNNGGKDVIRGRVNHVTAEDVLTTPDVIVGTFLIHSIPATILFDSGASHSFISVPFVGRNQLGVERLRNPLLITTPGGVMTAKYYSPAVPIEIQGIPFPSDLILLDTKNLDVILGMNWLAQFQGVVDCARRTVTLYRGPEQPVVFFAPPTSVSSSELHQIGLSEIPIVREFGDVFPEELPGMPPKREIEFRIDLAPGTTPLYKRPYRMAANELAEVKKQLEELKEKGALNEVTIKNKYPLPRIDDLFDQLKGATVFSKIDLRSGYHQLRIREEDIPKTAFTTRYGLYEFTVMSFGLTNAPAFFMNLMNKVFMEYLDKFVVVFIDDILVYSQSEEDHQHHLRLVLGKLRKHQLYAKLSKYEFWLSEVKFLGHVISAKGVAVDPETVTAVTDWKQPKTVTQIRSFLGLAGYYRRFIENFSKIARPMTQLLKKEEKFVWSPQCEKAFKTLKEKLVSSLVLILPDTRKDFMRRWLELIKDYDVGIHYHPGKANVVADAQSRKSHCNTLNVRGIPPELNQQMEALNLSIVGRGFLAALEAKPTLLDQIREAQKNDPDMHGLLKNMKQGKAAGFTEDEHGTLWNGNRXFVALCDVCQRVKAEHQRPAGLLQPLQVPEWKWNEIGMDFITGLPKTQGGYDSIWXAYHPQTDGQTERLNQILEDMLRACVLDFGNTWDKSLPYAEFSYNNSYQASIQMAPYEALYGRKCRTPLLWDQVGESQVFGTDILREAEAKVRTIRDNLKVAQSRQKSYADNRRRDLEFAVDDFVYLRVTPLRGVHRFQTKGKLAPRFVGPFRIIARRGEVAYQLELPASLGNVHDVFHVSQLKKCLRVPSEQADSEQIEVREDLTYVERPVKILDTMERRTRNRSAAVVAPDLLPLRRRLLRFRRNLADLVHPSVSLADRRNAAVPVYPSRAAAFLRSGRRSRCRRRPGVSCGPPIRFPLPFPLSGAAPPRRWSPAATIVARVRRLPSAVPAWPPSGAPRGCHVGPGRQPPAPSDAAASEDPLFVKVEATFGKVSKASHIILEHIES

SEQ ID NO: 146850 - protein, 140 aa, Oryza sativa
  Clone ID: PAT_MRT4530_47434C.1.pep
MTVAFKGNIKGEIVGSCDDLGDEQLSKTGLRRPVRPEVSDRPARGLTGRVDRAWEKLRSRRSRISCGMLRLENNACRDRSTTGGLTGERRRSNRRIYTGQTGGDWAVRPGSSSGQTGGGVLTAAAMAAIYIEKRVTLISA

SEQ ID NO: 146851 - protein, 1432 aa, Oryza sativa
  Clone ID: PAT_MRT4530_47435C.1.pep
FPPWVLPPPPPPPPPPPPDTNAILTQILAQQANMTAAFLHHIQNPPQHNAPPPPPPPQHSKLAEFLRIRPPTFSSSNNPVDALDWLHAVGKKLDTVQCNDEEKVIFATHQLQGPASLWWDHFQATQPEGQPITWARFTAAFRRTHVPAGVMALKKREFRELKQGNRSVMEYLHEFNNLARYAPEDVREDEEKQEKFLAGMDSELSVRLVSGDYPDFQRLVDKSILLEAKHKELESHKRRLANFRNQQGANQRVRYTNPYLGGSSSQQQQQQPRSAPRPQFVVRVPQPQQPQGQQGPRAPRPPAPAVQPGQGHRDVQGQQRLCFNCFEPGHFAEKCPKPRRQQGQAPPRPNNGGKDVARGHVNHVTAEDVLTTPDVIVGTLLIHSIPATILFDSGASHSFISVTFVGRNQLGVERLRNPMLITTPGGVMTAKYYSPAIPIEIQGIPFPSDLILLDTKNLDVILGMNWLAQFQGVVDCARRTVTLYRGPEQPVVFFAPPTSVSSSELHQIGLSEIPIVREFGDVFPEELPGMPPKREIEFRIDLAPGTTPLYKRPYRMAANELAEVKKQLEELKGKGYIRPSTSPWGAPVIFVEKKDKTKRMCVDYRALNEVTIKNKYPLPRIDDLFDQLKGATVFSKIDLRSGYHQLRIREEDIPKTAFTMRYGLYEFTVMSFGLTNAPAFFMNLMNKVFMEYLDKFVVVFIDDILVYSQSEEDHQQHLCLVLGKLREHQLYAKLSKCEFWLSEVKFLGHMISAKGVAVDPETVTAVTDWKQPKTVTQIRSFLGLAGYYRRFIENFSKIARPMTQLLKKEEKFVWSPQCEKAFKTLKEKLVSSPVLILPDTHKDFMVYCDASRQGLGCVLMQEGHVVAYASRQLRPHEGNYPTHDLELAAVRRWLELIKDYDVGIHYHPGKANVVADALSRKSHCNTLNVRGIPPELNQQMEALNLSIVGRGFLAALEAKPTLLDQIREAQKNDPDMRGLLKNMKHGKAAGFTEDEHGTLWNGNREAHESPYSIHPGSTRMYLDLKEKYWWVSMKREIAEFVALCDVCQRVKAEHQRPAGLLQPLQIPEWKWDEIGMDFITGLPKTQGGYDSIWVVVDRLTKVARFIPVKTTYGGNKLAELYFARIVSLRGVPKKIVSDRGSQFTSHFWKKLQEELGTRLNFSTAYHPQTDGQTERLNQILEDMLHACVLDFGKTWDKSLPYAEFSYNNSYQASIQMAPYEALYGRKCRTPLLWDQVGESQVFGTDILREAEATVRTIRENLKVAQSRQKSYADNRRHDLEFAVDDFVYLRVTPLRGVHRFQTKGKLAPRFVGPFRITARRGEVAYQLELPASLGNVHDVFHVSQLKKCLRVPSEQADSEQIEVREDLTYVERPVKILDTMERRTRNRVIRFCKVQWSNHAEEEATWEREEELKAAHPDLFASSSESRGRDSV

SEQ ID NO: 146852 - protein, 222 aa, Oryza sativa
  Clone ID: PAT_MRT4530_47436C.1.pep
LGDRSIVIMGMEDDAAGRGTTVPFLVAVRFVVALAVGAVTFAVIVMVIAMVSRPEEIQLSIDRGYITVYDDYGSEVLPTATTSLAAILVRFVQSRPSTAQLAVSLTASYSSQRGHKDKIINCSDITIGLVDMTLSPASWASGQMPAKINDTIVWFKLNNGFTLLKDTSHTEAMTVTITNSSQIMEYIEHRLKQEDVFHVLVMCVPWTESGHLPRVAGRYLRY

SEQ ID NO: 146853 - protein, 91 aa, Oryza sativa
  Clone ID: PAT_MRT4530_47437C.1.pep
GATSDCPRGANVRRGAGGYCRRYGPGGRQSEGKLPSHPVTWLYSLALPPRLASRRSSQGASGCHVTPLGLSRCLPRGPRVTSQNDPKIYPL

SEQ ID NO: 146854 - protein, 369 aa, Oryza sativa
  unsure (1)..(369): unsure at all Xaa locations
  Clone ID: PAT_MRT4530_47438C.1.pep
IKTKIHRYPSIFRSLISTDDRYFVPRAVAIGPYHHGAPHLKEAEEVKRAAAYYFCGESGHSVEEVYQRILLVVAEARSCYVDDDTVASIGEGDFAAIMFHDGCFFLQYIICSTDDIAPSLESWFNSNDASMERDIFLLENQLPWVVLDALMTFRSVPVGEFISQESTSFDAYTDLEKXSFVLDESYTPSHLLGFLRYYQSGLSMPNGSMALEPPEGITSISQTSSAIELAEMGINLVANKKTWFNDMSISKGALFGKLFMAPLVMDDQNACWLINMMALEIFSASTGMASTGMDGEDTVCSYVSLLAMLMSREEDVHELRVKRILHGDFSNQHTLVFFKNLVDLIPIPFQHCYLLDNLEAYRRKIFFFF

SEQ ID NO: 146855 - protein, 100 aa, Oryza sativa
  Clone ID: PAT_MRT4530_47439C.1.pep
GFPPGHGPGGGSIFRGKFSPQVFKFKAGSPGLLFLGNPGAPPYGVPFFFCPLPPHWLGGKPLFFGPVLQGLGVFQALQKVGFPGGGPPQPVVFPGFGPLS

SEQ ID NO: 146856 - protein, 121 aa, Oryza sativa
  unsure (1)..(121): unsure at all Xaa locations
  Clone ID: PAT_MRT4530_4743C.1.pep
TSLLLEGSRXVAVDKIVPREIDAHDGEVVPKEDDARDEDDDHDDDIEVLMAEIDRINKDGGDDNLVTERPPEREVDSMTEAELMRGNPLIKMNNAGSFNGERRRDEXCVFNNQARWETKTP

SEQ ID NO: 146857 - protein, 204 aa, Oryza sativa
  Clone ID: PAT_MRT4530_47440C.1.pep
MRRKVHRYVIFKIDDRREEIVVEKTGAPWESYDDFTASLPADAVYDLDFVSDDNCRKSKIFFISWSPSLSCIRAKTIYAVWRNQFRHELDGKTSEEVRESLFSLKKKRLDPGFEGKPGPKTLHKHGLKGKPGKTHKENKEKTCDGTTGGEHSSSKPKTPTSYEQTTDNVEQGLQDEASKEETERRNASNVRPKIGTGFSPEENG

SEQ ID NO: 146858 - protein, 198 aa, Oryza sativa
  Clone ID: PAT_MRT4530_47441C.1.pep
ILRTSRTKRPGSLSLPNYDTPGFHNATKESGRGLSLPSLSLTSSSDSPQHTYPKTRQEANSTATPTKLPKRRGKGVIVAQLATPGQAAPTPPQTPSTGCVVGISCTNSTKPNTSQTQEKLGTCSAEALELQANLPTQLATRPSPRNSPQPESESRPVNRRGGAPGTGGAPTDHGTCRRTSHRQHYCSPCPTAFQTNEP

SEQ ID NO: 146859 - protein, 412 aa, Oryza sativa
  Clone ID: PAT_MRT4530_47442C.1.pep
MFKPIIHRYPSIFRSLISTDDRYFVPRAVAIGPYHHGAPHLKEAEEVKRAAAYYFCGESGHSVEEVYQRILLVAAEARSCYVDDDTVASIGEGDFAAIMFHDGCFLLQYIICSTDDIAPSLESWFNSNDASMERDIFLLENQLPWVVLDALMTFRSVPVGEFISQKSASFDAYTDLEKRSFVLDESYTPSHLLGLLRYYQSGLSMPNGSMALEPPEGITSISQNSSAIELAEIGINLVANKKTWFNDMSISKGALFGKLFMAPLVMDDQNACWLINMMALEICSASTGMDGEDTVCSYVSLLAMLMSREEDVHELRVKRILHGDFSNQRTLVFFKNLVDLIPIPFQHSYLLDNLEAYRRKRWISQEQLRLPMNRPQTSVGQGLQDEASKEEDSVETQTTSVRKSEQGFHPKK

SEQ ID NO: 146860 - protein, 213 aa, Oryza sativa
  Clone ID: PAT_MRT4530_47443C.1.pep
MPPAGQPPPPQACQAAAFPRLPPATCYLRYKSRTSLRPSAFFATGHCFREPLPDRVSRVAPPRAHPLPIPAIPGLPGRPFWALPPTPRRSSTAAFRASPSGSAGSEAARGTKVVVRAARVSPPSRPQRPHRGLSSIPTLDMAYLMITVFSSTIQHSSKDVGVPPEYRIRRAVNTSKEKVSPGDSDIDTESSTNLQNSSVIRGYPTKCSVQLDM

SEQ ID NO: 146861 - protein, 112 aa, Oryza sativa
  unsure (1)..(112): unsure at all Xaa locations
  Clone ID: PAT_MRT4530_47444C.1.pep
FYYYGRRVTDYRSIAHTGMDCASTWGVSLQVLKCTCGLPRRRRYTNSGFGNVSNGGRIKCMQVWPIEGIXKSETLSYLPPLTVEDLLKLILFLAPSKRESCLEVSKVGFSLP

SEQ ID NO: 146862 - protein, 73 aa, Oryza sativa
  Clone ID: PAT_MRT4530_47445C.1.pep
RMVSTQDTQRPLDAILTRSHQLGVSPADAPRSSVRGEVHCIDGEGLCGLSLQDFSPMIKSATATANYSIQQPR

SEQ ID NO: 146863 - protein, 66 aa, Oryza sativa
  Clone ID: PAT_MRT4530_47446C.1.pep
DHLRKLAPIIDGDGLRYTTDGPECSKNFKSGFRYYQEIIPFTFSLTGGGPPIKEYFVPSVIKRHQL

SEQ ID NO: 146864 - protein, 43 aa, Oryza sativa
  Clone ID: PAT_MRT4530_47447C.1.pep
FIIDKFFLVILEIFKKLFLHSKSSNISHPYFLFLQLNSTTFFF

SEQ ID NO: 146865 - protein, 114 aa, Oryza sativa
  Clone ID: PAT_MRT4530_47448C.1.pep
GSPGLSFSSSHITTLRRLPATTKATSHTEWPAISRPAETYPCSTCNRTTTAVGIVFAASPYCICTLIMLPARRWMPLATTTLLALACAAVRATITELVLSLIDAVSPSVTVQTR

SEQ ID NO: 146866 - protein, 171 aa, Oryza sativa
  unsure (1)..(171): unsure at all Xaa locations
  Clone ID: PAT_MRT4530_47449C.1.pep
GAITCFFGRLLLLETQALVAVRLWKGYPEALCFFGEKLFYKNXASGSLPPKYSKSGFCLGLTVHGPRKGILXIWQMGSGGRFFSLPCPKGSRVFQPLARFMSSPFLLVFFPLGGFLFNGGFGQLFFFNRPLGLKNFFLGGFFFFFYPPGVGRTIFISERVGVFYLALPGDK

SEQ ID NO: 146867 - protein, 60 aa, Oryza sativa
  Clone ID: PAT_MRT4530_4744C.1.pep
KKFSKAFTGKNTKNWNSMFIQVIWLHVVTSQAKCLGFFGKLAFETFAYMHLFILPYCAAI

SEQ ID NO: 146868 - protein, 125 aa, Oryza sativa
  unsure (1)..(125): unsure at all Xaa locations
  Clone ID: PAT_MRT4530_47450C.1.pep
TPACRRPPLRATSXNXXNGGTIRCMXVWPIEGIKXFXTLSYLPRSPWXTPEQIXYLLRSKWVPCLXFXKVGFVYRXXHKSPDTTTAGXKAYLIIVRIIRFXXVRXVQLIXFIAYKPXGCEESGGN

SEQ ID NO: 146869 - protein, 152 aa, Oryza sativa
  unsure (1)..(152): unsure at all Xaa locations
  Clone ID: PAT_MRT4530_47451C.1.pep
LDSIWQSLAVFFIPYLAYREXAIDGASLGDLWTLAVVILVNIHLAIDVIRWNWITHAAIWGSIVATLICVMVIDSIPILPGFWAIYKVMGTGLFWALLLAVIVVGMIPHFVAKAIREHFLPNDIQIAREMEKSQDSHDVTHPEIQMSTVARA

SEQ ID NO: 146870 - protein, 69 aa, Oryza sativa
  Clone ID: PAT_MRT4530_47452C.1.pep
MAGVLKSSGKSRNIIHPSTGLGEAQCKPQPYLHYALEDPLEDRDQRAQADDPRVHTVVRLEGGREQGQG

SEQ ID NO: 146871 - protein, 191 aa, Oryza sativa
  unsure (1)..(191): unsure at all Xaa locations
  Clone ID: PAT_MRT4530_47453C.1.pep
TKSRERDRLASAALILAIGHEDDGRRRRHCAAVVAFPLAFHYHLSKLISFXLSFIPFGAADRRERGPRHRCSGANTXASRRVLVVIPTAVDQAKPSPRANIFSLKSSSKPLXNPRQWRSKCGDXAHRLLHLRSPSPLSIPPPPVSHYSIEPSPINXRFLPPPSRSARGHRYLDLAKFLWTLDDCLNGEEVN

SEQ ID NO: 146872 - protein, 31 aa, Oryza sativa
  Clone ID: PAT_MRT4530_47454C.1.pep
GKCWDMGNTPKVNRELPKRLINIWACFLPLF

SEQ ID NO: 146873 - protein, 517 aa, Oryza sativa
  Clone ID: PAT_MRT4530_47455C.1.pep
MAPTSPEELKCAANGGCAAASPGGTPRAGHYLPAVPAAVEGELRWLRRKVGAMTNEEAVVLALKETVRYGLFLGTFAGSYVSVDECIAGIWGRKRTARWRSLLAGLIAGPSMLLTGPGTQHTSLAIYILMRAAVLASRCGIKSKRFGNICKPLTWSHGDIFLMCLSSAQILSAYILSQESLPSTYKAFLNKHGGKDLTILQGVKEVVNHTAFSNLAGIEKYYKSVGVDLKLDPNMKVPCSIVHGNQSCAGHFITFLFQAYGRAVPVYVPVYLVPALVVHRQDLLKRPYPIIGKNLLGTARSSLFLSVYCASAWAWTCLLFRIFQSCNTPLVVLATFPTGLALLIEKKSRRIEIALYCFARAIESFFTCMTDAGLCPPILQIKRADVVVFSMATSIIMHCYAQEREVFRSKYLNVLDWALYFCVPFREQLLEYYANNKSTGDVEDNMLTCLADLFSQISNQKKKTGVIAPKRFIQRLKKQNEIFRSYMHQDAHEFLNFLLNELVDILEKESKVVAEPL

SEQ ID NO: 146874 - protein, 784 aa, Oryza sativa
  Clone ID: PAT_MRT4530_47456C.1.pep
MEEPSPVPPAAAPASLAAAPPTTDVLSRRRAHLDSASYRALSRLFSHCLHLHPPRHAARPDAEVEPAAAAAIPPGGSGGLPHGDSPPPADVGGDRGKNLEVEVALGNHAPHETPSTSASPDAAVNPTTDPGVVPQGTEEGRVAGVERVEGVEEVVFAGGTSGEADADGDELGAGAGLMGDDEALRSMQACLDGEDSELVIEMVGNDNEQLQLDAMMNNLSGLIDDASACVMSAQSCGVSGDKLQSDDRVAEEVKELGAGIGNDRSVCSLDHGSLDGGGGFEEGEIEGDTQNLDADDSGNSELQDDVELEEDFDSRRIEEDGSCGHDLKSNLHLIPQKGNGDTARNMLCNSKGDSQMHVARAQAVSYDEVLDWNETPLPDDKALKHGNTRKRTLTEERKAKKTKTKRIKRALQREAEGVKRLKLQPVIKPKVVKVCHFYLHGKCQQGNLCKFSHDTTPLTKSKPCTHYARGSCLKGDDCPYDHELSKYPCHNFMENGMCIRGDKCKFSHVIPTAEGPSTPDAKKSNASSVPEKANCQEQTSRQKTSTVYSGEPATSVPIKHHSILKNLAGISGNAQKDVVSTEKHKNPTGGPHQNFGRPQPADGKKLGKHNGHRSAPLLDEKDSSKQANLHPCSEPKKNSLPTTAAVPSSHTWMLFSDEPVPMRLCSIFCIPHTSFIAVTPSCKLQLLMWTYFAELGANIYCQILKIGNYQMNALLFNPQAYNSKSQFLIFISLQQQEANSAAKGSMPVCIHQLVLSMFLNKDLNWKVGVYLFVWDYENAKRHMT

SEQ ID NO: 146875 - protein, 336 aa, Oryza sativa
  Clone ID: PAT_MRT4530_47457C.1.pep
MARKFRREIERERRTLAAAWEESRARVSRSRVVEGCSRVSLKKKKKKSFYVFAIDGAWAVLGLMCSSYGPRYTGLRIPHCHGPFAVRMAHLSLGGGDVNGPSQKGKLRLSECVGNGRDGGIGKCADDAVPGWSLASLKPSYYHHVFSKAEFHVVILGVHKAGKTTLLEKVKSIYLKEEGLPHDRIVPTVGLNIGRIEDANVKLVFWDLGGQPGLRTIWEKYYEEAHAVIYVIDSAAASSFEDAKSALEKVLHHEDLQGVPLLIFANKQELPAAVTEEELARHLHLKGLDERPYMFQAGSAYDGTGIKAGIDWLVEEMERSKRTEVLMARTETAEKI

SEQ ID NO: 146876 - protein, 144 aa, Oryza sativa
  Clone ID: PAT_MRT4530_47458C.1.pep
EGFQALASKMACGLIVASLERLFLPPDEIRGYLVDVHQAVPGLLLRCRRRHPVHDHHDLVHPLDMDFAVQYTTITAVDVRLGGLVNIPSCSCSPLRRCSAATGRPRRPRRVDDHLRLRLRLIIDPLHPADLDLLRPLDTRHIVV

SEQ ID NO: 146877 - protein, 81 aa, Oryza sativa
  Clone ID: PAT_MRT4530_47459C.1.pep
SDCCEFSSLLLFHFSCSWYTWHVGCVPRTNQIPHIYKFFLDRSIFPLTFWCVTRFEAVDDHLQESNIPTLPAFSDRFLIQD

SEQ ID NO: 146878 - protein, 138 aa, Oryza sativa
  Clone ID: PAT_MRT4530_4745C.1.pep
PPNKPLSTGGVPGGSPPIPPGSGFPPPFWARLFPLGFPPSRGPLGAVLFVGKRGGAPNSFPKFLGFSSRGALPGFRGWFLKTWGFWGPGMPPSGRAIKFQGRGFGFSLLKKKKKKKKKKKKKKKKKKKKKKTKKKKNK

SEQ ID NO: 146879 - protein, 93 aa, Oryza sativa
  unsure (1)..(93): unsure at all Xaa locations
  Clone ID: PAT_MRT4530_47460C.1.pep
CIRYARLIDSTNGTTNATSTLLLLMMLNSDMXSASRPTTSXTRNVITHVXVFLGRLPFHLETVQVKAYYTDTVVLLYYLIQPERTPGDDPFIL

SEQ ID NO: 146880 - protein, 141 aa, Oryza sativa
  unsure (1)..(141): unsure at all Xaa locations
  Clone ID: PAT_MRT4530_47461C.1.pep
DXNFLXSKPXXFKXXVCXTXXVLXNXXXLXXXFPVXXKSTFMPXXSXKXFXXXXXXXXXQXEKKRXXLFXVYXXVXPXXNAXYXLTPSQPCPCHCYXLIXGXXKTXXKLLPXKIXKTFSFXXGXEKYSXXKKKXPXAPPXP

SEQ ID NO: 146881 - protein, 71 aa, Oryza sativa
  Clone ID: PAT_MRT4530_47462C.1.pep
MATMSRRALGSAFAGFTRTPAMTPTATLPSYCASPARLLRALWSAWVGIWIALRTRDALHSMNLPRRCMHW

SEQ ID NO: 146882 - protein, 110 aa, Oryza sativa
  Clone ID: PAT_MRT4530_47463C.1.pep
LTLPFPHHRATLIIARPLNRRGTYRPPGNAPAEEPQAQPPQPPPPPYRRRRHPSCRRRPWRGGNLPDDGEPPATAAGDGVLLAHGARGVEKIRLPSAERDDPGKKRGGRM

SEQ ID NO: 146883 - protein, 45 aa, Oryza sativa
  Clone ID: PAT_MRT4530_47464C.1.pep
MVCQCALVLVPSVRELLLMQLCLRVLIQLCLCHRIHRIMIFVSDH

SEQ ID NO: 146884 - protein, 64 aa, Oryza sativa
  Clone ID: PAT_MRT4530_47465C.1.pep
KDCSKVLKVHSCQPILEFVTHKLHKCISKGYFRESFSLCFCSRTLKCQTQKEDSWSTSSVAMGV

SEQ ID NO: 146885 - protein, 47 aa, Oryza sativa
  Clone ID: PAT_MRT4530_47466C.1.pep
QKHAHFLGSLDAKALRGTLAMLTLTLDYTKACMIVEPAPVDEGLFCL

SEQ ID NO: 146886 - protein, 99 aa, Oryza sativa
  Clone ID: PAT_MRT4530_47467C.1.pep
YWNCRPIKSVWQPSGSRSPPIAAGASAASLPTAGSCRRRWEEEFRCSLMAFLCEYIKNLKGSGSFGVEWSCVAAKTQLHPRMRGRCRPLAAAAAAATAA

SEQ ID NO: 146887 - protein, 204 aa, Oryza sativa
  Clone ID: PAT_MRT4530_47468C.1.pep
MILEQFDESAAEKADAAMVVAPPSNFGMVDTGVYRSGFPDPASFGFLRGLGLRSVVYLCPEPYMETNAEFLKAEGIRLFQFGIEGNKLCLTTGEEDPNVSIPVDAIMGALRVILDVRNHPVLIHCKRGKHRTGCLVGCFRKLQNWCLSSVFEEYHRYAAGKSRLSDLKFIESFDVNCMTDCLLRLIYHYHGCLQKSKRLAYSER

SEQ ID NO: 146888 - protein, 726 aa, Oryza sativa
  Clone ID: PAT_MRT4530_47469C.1.pep
MAGAIRVTMEVGADGVAVVTICNPPVNALHPIIIQGLKEKYAEAMDRDDVKAIVLTGAGGKFCGGFDINVFTEVHKTGNVSLMPDVSVELVSNLMEAGKKPSVAAIQGLALGGGLELTMGCHARISTPEAQLGLPELTLGIIPGFGGTQRLPRLVGLPKAIEMMLQSKFITAKEGKEGGLVDALCSPDELIKMSRLWALEIANYRKPWIRSLARTDRLGSLSEARSVLNSARQQAKKVAANLPQHQACLDVMEEGVLCGGHAGVLKEAKVFKELVLSPTSKALVHAFFAQRLTTKVPGVTDVQLKPRKIRKVAVIGGGLMGSGIATALLVSNTSVVLKEVNPQFLQRGQKMIAANLEGLVKRGSLTKDKMNKAMSLLKGALDYSDFKDVDMVIEAVIEKIPLKQSIFSDLEKVCPPHCILATNTSTIDLNVVGEKTNSQDRIIGAHFFSPAHIMPLLEIVRTEKTSPQAILDLITVGKMIKKVPVVVGNCTGFAVNRTFFPYTQGSHLLVSIGIDVFRIDRVISSFGMPMGPFQLQDLAGYGVALAVKDIYAAAFGTRNLDSNLVDLMVQNGRQGKSNGKGYYLYEKGGKPKPDPSVQVVIDEYRRCAKTMPGGKPVTLSDQDILEMIFFPVVNEACRVMDENVVIRASDLDIASILGMGFPKFRGGLVFWADTIGAPYIHSKLSKWTEIYGDFFKPSSYLEDRAKRSLPLSAPNATQQASSRSRM

SEQ ID NO: 146889 - protein, 520 aa, Oryza sativa
  unsure (1)..(520): unsure at all Xaa locations
  Clone ID: PAT_MRT4530_4746C.1.pep
TRIKSAKAXPLDAKPSKDSWLMEEKVKRKIESLQAYAVDACDDEQRRTAGNILKAMGFSKTSSAALKILINIGYFPVHVNLDLYRYDVRIRYTEEVLSAAEELLVDCPDSDKDIRKDLSTLKVYAIDVDEADELDDALSAARLPDGRIKVWIHVADPTSLVQPRSIIDREAMHRGTSIFLPTATFPMFPERLAMNAMSLQQGRGCKSVTVSVILXQPGGGIAEYSIEKTSGTPGQQVTYESATELLYMNLEEEEELRILQEAASLRAQWRRSQGSIDTAMIEPRIKVANPDDPEPNINLYVEDQSNPAMQLVSEMMILCGEAVAAFGSDNNIALPYRGHPQSNTAVSAFTHLSEGPARSFANISVLRAAEMDFQKPVPHGVLGIPGYVQFTSPIRRYVDLLAHYQIKAFLRGESPPYSAGDLEGMTFIASMHVKVARRLHSNNLRYWLLEYLRRQPKGKKYKALILKFIKDRLATLLVIEVGIQATAVVSTGKVGDEVSVVVEAAHPRDDILSVTEITEV

SEQ ID NO: 146890 - protein, 99 aa, Oryza sativa
  Clone ID: PAT_MRT4530_47470C.1.pep
FWNWPNFKEGFPANQLIKRFLGLSLLGYWEGAGGNGTPETSNSFPSWCNAWKPSWKPSFLPLEEWRIIAICLGTFKLWGEPREDGTLSCEMGRYHRVRV

SEQ ID NO: 146891 - protein, 194 aa, Oryza sativa
  Clone ID: PAT_MRT4530_47471C.1.pep
MVHPLGRTSMGRQRIEIRRIDNKERRQVTFTKRRGGLFKKASELALLTGASVAVVVFSPAKHVYAFGHPSVDAVLRSYASVPGEAAAVAPVPVHGGSGGEDVDLLGLRLAADDTGAQVAAEHARMRDVAARIVQAKAGRRFWWEADVDALGEAELLEFFTALKKLRDNVGRHANALLAPQPPPLPLQQKQRRRR

SEQ ID NO: 146892 - protein, 186 aa, Oryza sativa
  unsure (1)..(186): unsure at all Xaa locations
  Clone ID: PAT_MRT4530_47472C.1.pep
MERRRRRYDVASGIGPPNYLRQRREGRGSDYSIPLADVHLRSGEQVSGTSAFDVLNREKAAIRFLGPPPRTYRTLTRTLPQAHVPSLQPASRRELYGSADADADARPTHTARFDSHAHAHALPAARGLSFKLPGAAAPSVYADTAKXQGGVSRAKGRTVGGRLAGAAGHRMQHKGFINGVGTGDWL

SEQ ID NO: 146893 - protein, 110 aa, Oryza sativa
  Clone ID: PAT_MRT4530_47473C.1.pep
RRRRRWCCLHSPRRAIFALAHGERYYGWDRHFALPSTSSCRRFPITAVPQATTSAATAVEMEAAASARGDCGRGHGRGAATDTRGANREGGAERLQPDAPAERDRVPAVE

SEQ ID NO: 146894 - protein, 64 aa, Oryza sativa
  Clone ID: PAT_MRT4530_47474C.1.pep
PRVTRFWFMGRHQQKTGRGKETQITTWGHTPDTPLRSSQGQRTHKAPAEQNQTLPQTGRDGFTG

SEQ ID NO: 146895 - protein, 396 aa, Oryza sativa
  Clone ID: PAT_MRT4530_47475C.1.pep
MPSSAASRRRRHRHRHAGKPDYPPSELPDILRVRELRLAPRASSLPNPNPHKPQPHPTIPSSTTTTTSGRRRNRRGRGRGRGRKEGDARDWAGGLPLDAILAIFHKLDHIEILMGAGQVCRSWRRAARDEPQLWRRIDMRGHADLSFELNLFGMAQAAVRRSAGQCEAFWGEYAADEKLLHFLGERAPSVKSLRLISCYDILNEGFSAAIKKFPLLEELELSLCSNIGESNVFEIVGKACPQLKRFRFSKDCFYSFEDNEYEMDEEALGIATMHELRSLQLFANNLRNEGLAAILDNCPYLESLDIRHCFNVNMDDTLRAKCARIKTLRLPYDSTDDYDFQVQKPISLADFYSDSDDDCVYGGPDYILDSDEYDDYCDPYRYLDGVYEGVASGRAR

SEQ ID NO: 146896 - protein, 108 aa, Oryza sativa
  Clone ID: PAT_MRT4530_47476C.1.pep
TRALAVAVGVGAHEEALQRHHRSSCRTTWSQWRRRRWRPPPAAGWWSSARRRPNAAVAPPRRPVTTTTTRRCGCSASGWTTTMARRGGCSWCRKTKETSREARGSLAS

SEQ ID NO: 146897 - protein, 89 aa, Oryza sativa
  unsure (1)..(89): unsure at all Xaa locations
  Clone ID: PAT_MRT4530_47477C.1.pep
MSSDEKNXRQRDARVLMPPPRSLAPNRTRPGVKHVLSSSSNTSNSTSGGTFKNRRAANQPGDHNSNLSSNSDAHKPRRKRRHRKKKKLA

SEQ ID NO: 146898 - protein, 217 aa, Oryza sativa
  Clone ID: PAT_MRT4530_47478C.1.pep
MALAMAPRLVHHPCCMMLSKNPRTPPPPPAMHHHHAHKPLITALTSTSSFLLRSVDVSKDDKPLETATTTTPPTPAPAAAAPETEQAEAVASPELELELEEGPKVDPRRLEEKFAVLNTGVYECRSCGYRYDQAAGDPSYPVPPGLPFEQLPDDWRCPTCGAAQSFFESKSVEIAGFAQNQQFGLGGNSLTGDQKALLIYGSLLVGFLFFLSGYFLQ

SEQ ID NO: 146899 - protein, 174 aa, Oryza sativa
  Clone ID: PAT_MRT4530_47479C.1.pep
MDASDGWALLLAVLWIMEYGCRTERLFSALRSFLAGEGSAQAFTCRQIICPLVKMRFGHLQKCFSKNDTNTHLTTYSHKVNQISMEVTDPWPHIPPPPSLISPHGASFSSFSTSTVHAAVIIILSIAALVGAVLLSIGLYLLCSRWMKPRMIAGEPPPLCSHEVVVQMAPIRVG

SEQ ID NO: 146900 - protein, 93 aa, Oryza sativa
  unsure (1)..(93): unsure at all Xaa locations
  Clone ID: PAT_MRT4530_4747C.1.pep
LKDISLFXQSVDSAKVSINGHSMSXRVLRKAAKKXGPVGPGSYWYDYRSGFCGVIGHECRDIIPPFIKECNYAMPKNCAGGNTRDIVNGTELY

SEQ ID NO: 146901 - protein, 53 aa, Oryza sativa
  Clone ID: PAT_MRT4530_47480C.1.pep
MADEHAPGVVPPPSDGQLLPWLLYRALAYMMRLQSSNAAAFRWLWALGTGVHL

SEQ ID NO: 146902 - protein, 110 aa, Oryza sativa
  Clone ID: PAT_MRT4530_47481C.1.pep
QPPPGIISRNPRAEFLKVTVSCSISLKKFVNQLRILNLSSWDHIQGHDEQLKCMFSFIFHHTNVYCMTFVTVCSIACNVPMRVIRKQLLILRKNLSALASSLIGNVHRSS

SEQ ID NO: 146903 - protein, 131 aa, Oryza sativa
  unsure (1)..(131): unsure at all Xaa locations
  Clone ID: PAT_MRT4530_47482C.1.pep
FFSGARLAGLGVKFQACPKTELTFYLAQAXLGRQMDAANAEAKHVYYLPMRADNSNTESDCTTIGKQXLPAVMILARGLRKLAVDGSNLLDDEVTKAEITVPRAFSDVQPTLTHESGRIAALLDVRITNQP

SEQ ID NO: 146904 - protein, 47 aa, Oryza sativa
  Clone ID: PAT_MRT4530_47483C.1.pep
MARRTHVEEKVEPGQKAKGVALHCVGTAGDERRATSGGKASTEQPKP

SEQ ID NO: 146905 - protein, 532 aa, Oryza sativa
  Clone ID: PAT_MRT4530_47484C.1.pep
MAGRCAGGGDGGGEGMLARLRRAAARRIGLSCASFFSHAATSPSPPPKTISCSALNAPADSTDEDQEKLEEPTSTRMADKNLCAICLEPLSTGSVDIDNGDRPAIFTSQCSHSFHFLCIASNIRHGNVTCPICRAQWSQLPRDLKVPPLLQNNQSDPILRILDDNIATSRFNRRSSIRAARYNDDDPVEPYTLTEHVDPCLRFALIPSPVAAHHHALGHYPCGRVMPLQQHCQYSSSSMLSPPQIASPSGQRRAYLSVSLAPQPAMDLVLVASPNGPHLRLLKQAMALAVFSMRAIDRLAIVTNATTATRAFPLRRMSSHGKRMALQVIEHLCCVGGTDPVGALQKGLKILEDRAHQNPSSCILHLSDHPIRSCFGVDMNRFNIPVHQFHVGLGFGVQNGFVMHEFEELLARLLGGVISDTQLRIGEHGGVVRLGELRGGEERRIPLDLVSDCGFILVGYSYLEGGREDQFRTGEVAVGFEEKGDNRYCGVRDAGGLSIGGERRSSCCAERWDYLDPFMARRWAKHFNVYRA

SEQ ID NO: 146906 - protein, 52 aa, Oryza sativa
  Clone ID: PAT_MRT4530_47485C.1.pep
HRSGGMRTAPPPPLPENPAFCLFPPGSSGHNSMEMVEFTTISWYIRTRAPRM

SEQ ID NO: 146907 - protein, 162 aa, Oryza sativa
  Clone ID: PAT_MRT4530_47486C.1.pep
MTEAGGERRIGVAMDFSPSSKKALQWAADNLLRKGDTLVLLHIRHHGRDEAKNVLWSHTGSPLIPLEELMETAVRQRYDIPSDEEVFDMLNAVSREKELSVVLKMYWGEPREKVCEAVGELNLESLVMGSRGLGQIQRILLGSVTNYVLSNASCPVTVVKAK

SEQ ID NO: 146908 - protein, 50 aa, Oryza sativa
  Clone ID: PAT_MRT4530_47487C.1.pep
KAPYVAKANKLKAEYNKAIAAYNKGETLPRRTRKEERRREEDLQVQVRVI

SEQ ID NO: 146909 - protein, 98 aa, Oryza sativa
  Clone ID: PAT_MRT4530_47488C.1.pep
MCKASWLLLALDASEGKRSSGDNVVMVDPLEAKRLAAQQMQQIQAREKLKRRRRAEAINGALAMIGLTVGLVLEGQTGKGILAQLAGYLTALSSLFGQ

SEQ ID NO: 146910 - protein, 93 aa, Oryza sativa
  Clone ID: PAT_MRT4530_47489C.1.pep
DCTEFLPERWITSEGKLRYEPSYKFFSFNAGPRTCLGKELAFVQLKTVAAAVMWNFAVEVVPGHAVEPKLSIILHMKNGLAVTVKRRATMASC

SEQ ID NO: 146911 - protein, 483 aa, Oryza sativa
  Clone ID: PAT_MRT4530_4748C.1.pep
MAIRITMSYSGYVAQSLASSFGLRCTAAAAASSGAAPGAGARFLQDALSRPFCLFASSRHSEYHHDADDHNHPKPKPKPKAKALPAASAIAANGGGHSLLLSRSCATKAPVNDPPSLLAVGLLTVFTSGMGSATGRVGASSLSASPSISSAFNPAALLPFLQATKWLPCSDLITSAAPSRKSARPVDVAKAPTAAPAATPVSRTKPAPAPSPRPAHVPSPAVAAPSKVGVKALVGSGVINSGVINSSGASSNVGVGVKPLVGSGAINSGAAGMVRKSSPALGAAAEVSRRNWLSRWVSSCSDDAKTVFAAVTVPLLYRSSLAEPRSIPSKSMYPTFDVGDRILADKVSYVFREPNILDIVIFRAPPVLQALGCSSGDVFIKRIVAKGGDTVEVRDGKLLVNGVVQDEEFVLEPLNYEMDQVLVSQFDGIKYLSKVPTLLDQTLRCLLPVKNILGRSVLRYWPPSKITDTVFEHDAVHCTAGIS

SEQ ID NO: 146912 - protein, 504 aa, Oryza sativa
  Clone ID: PAT_MRT4530_47490C.1.pep
MAAAAAAIRRPLLRSVAFSSSRSRSLLHLLSRPLSYSYPPSASPNHLHHPHQQQWQPSPPPPPPPPQGPPPQWSPPGNYHQQQAPPPARHYYGPPQHQPRYNYGPPQPQAPPPPRNDYGPPPPPPQQQQQQREAVVGPGELIGLGREGRVKEAVEKLDKGARADPQAFYELAAACSNPKLLEELRKIHDFFLRSPFRADLQVNNKMLEMYAKCAAMNHARRTFDHMPDRNMDSWHIMIDGYAVNGLGDVALQLFEEMKTKYGIAPTAHTFTLVLNACANSEAIEEAFLYFDAMSRDHGIEPGVEHYVGIIEVLGKSGHLNEAVEYIEKLPFEPTDTVWESLLNLARMNGDIDLEDRAEELLVSLDPTKVNPKKLPTPPPKRRLGINMLDGRNKLVEYRLPPKIEKKVVNEQRYVPDTRYVLHDIDQEAKEQALLYHSERLAIAYGLISTPARTPLRIIKNLRICGDCHNAIKIMSRIVGRELIVRDNKRFHHFKDGKCSCGDYW

SEQ ID NO: 146913 - protein, 149 aa, Oryza sativa
  Clone ID: PAT_MRT4530_47491C.1.pep
MYGSLKRGGGGYMKVAVLEFNKSVRKYPKRGKATTPTPILKILPSLSNKYPKRRKITTPTPITFIYYEISKEGKDNNTNTNVTYSDIMQQEQFAVAEISRISDTKTLMEQNLCNLKKAIKSPSSDNLRRIVALTRRIGELEEDRTLHCS

SEQ ID NO: 146914 - protein, 797 aa, Oryza sativa
  unsure (1)..(797): unsure at all Xaa locations
  Clone ID: PAT_MRT4530_47492C.1.pep
MQASYWKQRGKVKKIRLGIDNTHFFKAHATQNHRRTFIRSIKLTDMEVSEHSDKATTMFSYYNSILGASTETSWSFDLHTIYHGCAMANADELVQPFSEQEIFQAIKHMDKNSAPGPDGFGPGFFQAAWAMIKPDILHLLQSFYDETADMERINRAFIVLIPKPGKTNTPDGYRPISLQNCSVKIIAKVMANRMQRQLPPLIDLDQSGFLKXGRSISENFIYASELLQCCFKRKCAAAVIKLDFTKAFDSVAWDSLDRILQARGFPFLWRSWTNRLLQTSKSAIMINGVPGNWINCKRGVRQGDPMSPYLFILVADVLQKLIRHSGEIKHPIYPDQPCATLQYADDTIIICRATEQDLAALKTCLNHFAAATGLHINFSKSTLVTMHVPDEVTTALANILQCKTGSFPLSYLGLPLSHSKLHIADLXLRPMIAKADFYLSSWQAKLLNYSERIVLINAVLDSLPVYAMSALLLPKGTIEAFDKKRRAFLWSGDDSCSGSSCLVAWDKVCTAREVGGLGIKNMHDQNCALLVKRLHHLHSTDSSWGRWIWQEHSGSALFCDNQLGPHWDSLSTLLPILQRLTRVQVGDGTRTSFWHDCWYGSSTFKDRFAPLFSHALNREATVAVFLSKPIEDQFAPRLSSTAETQLARLREMLQNFYLSNSTDLCPSRDAPGILRTKFIYSSTHMGLPLCKNWRFIWDNRAPPRVQFFAWLLAKDRLPTKANLHKKNIVPTAGCIVCNCADETATHLFLQCQFAQEFWRALRTSVVSNVQDLADLVAPCHLPVKHFQVFFLLCFWGL

SEQ ID NO: 146915 - protein, 836 aa, Oryza sativa
  unsure (1)..(836): unsure at all Xaa locations
  Clone ID: PAT_MRT4530_47493C.1.pep
MGRTLYNPTVGANITFAIKCLGDEQLAPIDKTFXSSSSPIIEGYGILHSVPIRHNYVKDILDFHFFDVSDFDLLIAQTIDKLLLEAXILESLXIKLGEIMFSVPILRSKNSLMQSIPDFEPIEELLAISPFVSPESLLEDDASAFVEEDDPREVIELPKTNSPSQPLVKLKPLPSGLLSHFLHGDMELAVIIRDKLSDAKTSKSTAVLEKHRSIQGNSLXTHRIPLDPSCAPSREPQXRLNNAMREFVKIKVLKLQHAGIIYPIPYSEWVSPVQVVPGGMTVIENSITXPTRNDHFPMPFIDDMLELLVNHSFFRFLYGYSSYHRIPIHSNDKSKTTFMCPCGMYAYRRMLFRLCNAPASFQXEHDVFFSDMIKEIMNIFMDDFXINGKTSDHCLXKIDKVLQXCQEEGLFRSYLDGAKVIVYTDHAVLKYLLTKKDSKPWLIRWVLLLXXFDLEIKDKFGVENYVAVHLSHMLSTNMHEQQINDFLRDGMLXKVTYSQPWCANIVNFMVAWYVPXGENKRCIIYDSRRHLWDEPYLYRVYSDKLLKRYVPTAKSIQIIEKFHASPYEGHCGAFRVQAEIWRSAFFRPTMYEDIKEFIXRCAGCXKHGGITIHDVMPLTYNIQVELFDAWIIVYMGPFPKSXYCEYILVAIMCPSMVISEKGSHFINKTFQNFLHELGAXHNIATPYHPQTSGQAETFNKXIKNISQNTIHEMGKAWKNKLHYAFWAYRTAYKTPKGMSPYQLVYGKTYHLPVELEHRAHWATRTWNIDLGEARHHRXVVAIXMEELRDKAYHDAKMYKERTKRWHDRRVMVKEFEAGDIVLLFNSWVKLFVHGNL

SEQ ID NO: 146916 - protein, 86 aa, Oryza sativa
  Clone ID: PAT_MRT4530_47494C.1.pep
YPTILPTSYSTCTLATAIGIIRQCLSTLKQDSTLLSTYLTTSRWPTSLVLCLHLILRHQRSRPRSLYIASYLLCYNLSMLLSMYQA

SEQ ID NO: 146917 - protein, 140 aa, Oryza sativa
  unsure (1)..(140): unsure at all Xaa locations
  Clone ID: PAT_MRT4530_47495C.1.pep
GMVLLHPFFRGGELMPSERVXXELPRRAERSWGFMCAGRYGIDHPFINPLSTPAEEWAALGCRRALVTVGELDTMRDRARMYVEVLRGSAWEGEEAALYETGGEGHVYFLEEAAAAAGGDKAEAELDAVVSFIKRSSAAT

SEQ ID NO: 146918 - protein, 69 aa, Oryza sativa
  Clone ID: PAT_MRT4530_47496C.1.pep
CQRNAYHSRDRLKEAGVGAMLNEQSSTGESDRPMDEAVFRRWQLDCKGNISKCLVMPNVDINWWHYVRL

SEQ ID NO: 146919 - protein, 65 aa, Oryza sativa
  Clone ID: PAT_MRT4530_47497C.1.pep
MVISGAWGMLQVKGRCRGGGVLAGGGADTVEVGGGGWKRRGGGGGRAAVSANARWMGRNAALRRE

SEQ ID NO: 146920 - protein, 150 aa, Oryza sativa
  Clone ID: PAT_MRT4530_47498C.1.pep
ALMEIPQQYKATVELGILGRRSFKSPERVPLPPPGGSHDAYSYGSKSFSKPSTYPQSSTSSSSYPHYETAQSSSPAVPSSTYDNQVCPICLVNPKDMAFGCGHQCNPCKAFERLADKPVKYWVCIDKDRKASNPLLQDCGAGDVSSIETH

SEQ ID NO: 146921 - protein, 660 aa, Oryza sativa
  Clone ID: PAT_MRT4530_47499C.1.pep
MALSRRFLNLIVDNRFPGSKSLRCIDLTLQNFFNISDSKVVAADASAAISGSMDWIQLPSPMFNFQASSVAHHWEISCFPLRGREVLCIDQDECCLIFFTNVDDDDGDGTLFIMERVVKPESPRSSPSHSDQFEAVFYRTQSSVRSVSSTCKPLPPPPFVRDPKFSNTRTTINSYAVVSGGSEICISVEGAGTYCMDTVKHTWRHVGQWTLPFYGKVEYVPELKLWFGLSDKTNHLAATDLSAMDDCFQRPELVRAWMELSPCQPGLRQVLHRKFTPTMALSRRFLNLIMDNRFPVSKSLRCIDLTHHCNLFNATPPNFFNGSKSTIIRVENRIQLPSPIFNFAAGFGEATRAGFGEDWRMDCLPFLDRRVICADQSGRCFLFEADRSRVVMLPRLHGPKQVPISILIPCPEEESGEFDGGNFYIMDKMSRAGVSGTNQFEAFVYCHYRGSRIMKSWTCQLLPPPPYVYDRTYLGRWLEIRSYVVVDYGSKICISVKGVGTYCMDRRSLTWSHLGKWMLPFIGKVEYVPEVKLWVGICSSTHELAAADLSSMDSQPQLVGTCKEFEPPEEWKQCRDPQLVNLGSGKFCVTRFFRNQAPKGDSDDEFIGRNITVLTGVEVMQSACHGNGNGNGNGSSGEMELQMIPHRSRWYGGDTIGTVC

SEQ ID NO: 146922 - protein, 618 aa, Oryza sativa
  Clone ID: PAT_MRT4530_4749C.1.pep
MVRKANGKWRMCVDFTDLNKACPEDHFPLPRIDQLVDSIAGCELLSFLDAYSGYHQISLAKEDEEKIAFITPFGVFCYVKMPFGLITAGNTFQRMVQGALSDQLGNNVEAYVDDIIIKTKTGDSLIDDLREMFDNLRRYRLMLNPEKCTFGVPSGKLLGFLVFGRGIEANPEKIKAIENMKSPTRLKEVQKLTGWMAALSRKLRHYFQAHRVTVVSSFPLGEVVRNKDVVGRIAKWVVELSQFDVNFALRTAIKSQVLADFVADWTMPDNKSDNQVDNETWTMAFDGRPIRAAAALGVKRLIVKGDSELVANQVHKDYKCSNSELSKYLAEVRKLEKRFDGIEVRHVYRKDNIEPDDLARRASRREPLEPGTFLDILTKPSVKEVSGEVSPVTPDISSEATKAEQAVADIETTDDWRIPLIKFINSEELPEDDTETKKITRKAKIYCMVGNDLYKKAPNGVLLKCVSSDDGRHLLLDIYEGICGSHAAGRILVGKAFRQGFFWPTALKDACDMVQRCEACQFHSKHTKIPAQALQTIPLTWPFSYWGLDILGPFPRGQGGYRFLFVAIDKFTKWIEAVPMGEIKADNAIKFIKGIFCRYGLLHRIITDNGSQFISADF

SEQ ID NO: 146923 - protein, 122 aa, Oryza sativa
  Clone ID: PAT_MRT4530_474C.1.pep
MPDDKIGHKVAHGGWTDTGGQAEQPKTTGHCIEASRPSSSGARSAGGHMAGPNWPKMETAHGDGPMKTRQASPRYACGGSRTSNVAASRSTDHGIGRKGRPARLEHARSARRDAWRLRTGRG

SEQ ID NO: 146924 - protein, 165 aa, Oryza sativa
  unsure (1)..(165): unsure at all Xaa locations
  Clone ID: PAT_MRT4530_47500C.1.pep
YSYGSKSFSKPSTYPQSSTSSSSYPHYETAQSSSPAVPSSTYDNQVCPICLVNPKDMAFGCGHQTCCDCGQSLESCPICRSPISTRIKLYXQWQFGSFANGWHTGDHLVSHWAMDCIGCFKCNPCKAFERLADKPVKYWVCIDKDRKASNPLLQDCGAGDVSSIE

SEQ ID NO: 146925 - protein, 44 aa, Oryza sativa
  Clone ID: PAT_MRT4530_47501C.1.pep
VFVQPPQNRFFKTPFSGKKPLLGSDVPPLHSPILAIFLSSFPVL

SEQ ID NO: 146926 - protein, 91 aa, Oryza sativa
  Clone ID: PAT_MRT4530_47502C.1.pep
AKKSLLPTTLITMAGCTEPFLRPCTFRTWLMEIPTSVRSRTTLIRANKSCPACNLSGLTRDEGLLACRGGPSLPKAEHLGGGGHLERKRLG

SEQ ID NO: 146927 - protein, 166 aa, Oryza sativa
  Clone ID: PAT_MRT4530_47503C.1.pep
TRLNFAFRDKFKKMFGFKKERDGYAMWMAGNLASGGAAGATSMLFVYSLDYARTRLANDSKNAKTGGDRQFNGLIDVYRKTLASDGIAGLYRGFMPSVAGIIVYRGLYFGMYDSFKPVLLVGPLADNFLASFMLGWCVTTGAGIAAYPLDTIRRRMMMTSGEAVKY

SEQ ID NO: 146928 - protein, 62 aa, Oryza sativa
  Clone ID: PAT_MRT4530_47504C.1.pep
QSGAPASSSKDCANTNTVLTDKWEPDSPKTKPHLKDYKEDLYGCGPGGLILLLKTNKQQDPF

SEQ ID NO: 146929 - protein, 108 aa, Oryza sativa
  Clone ID: PAT_MRT4530_47505C.1.pep
MADVQSGGGGGITVTAVAERDGESGYGAAVFFACLPGALIAIGVLMVLYYRSHHGHGALAVFLLVLSVFVFLSVCFCCIGLVQLAIHGSLPLEEDRVAAAVDHPLDAV

SEQ ID NO: 146930 - protein, 145 aa, Oryza sativa
  Clone ID: PAT_MRT4530_47506C.1.pep
MASTSPLQMRAVSPPVAASHHMARSRSQPISQTTTRQAAAGKAKRLPGRAWITFPGAILRVHRRVDLVGQMTTHAAAVALWSVTVREGGGGGHGSGHAGAGHGHGGGHGSSHGRPDPSEHHPGKRSAAPGVGQPPAPLSLCFPSE

SEQ ID NO: 146931 - protein, 34 aa, Oryza sativa
  Clone ID: PAT_MRT4530_47507C.1.pep
SIFFPQKKKKKKKKKKNKKKKKKKKKKKKKKKKK

SEQ ID NO: 146932 - protein, 101 aa, Oryza sativa
  Clone ID: PAT_MRT4530_47508C.1.pep
ENQMQETDESWLSSPSHFTHNTKQKSNSLIPLPSKYRQVVCLLLPVWYGSQVYTSDTYCQPVGVEVNVHVMGQTGLCCYHVGPSHHVHKKHGSLLLCNNNS

SEQ ID NO: 146933 - protein, 375 aa, Oryza sativa
  unsure (1)..(375): unsure at all Xaa locations
  Clone ID: PAT_MRT4530_47509C.1.pep
MLGSWWIDGTGNVKFAPSGRRGGWMRRRLRQEGGWGRWRRRPSSPDLARRRAXARKAAYRSAAPRSRKRRRRADPVASVLWSGQARLGRTVACGSIASRARERRQRADLPDSARLRRAGSSGHGGGSCDNDDGHGGCDDDNDGRLGWSGRSERAEREEAGRPASSAGMLVSARGEGGGEEAGERAERVEAGAAPLPSSVVAPRATSPPRRAALISAGEHAGLPASSLSARLLLSSPPPSRHVPHSAPLSRAALVSAAKHAEGASCVLCHRRQQRRAGLDSLELQAGGRGGGNEQQLRNLRAGASATSNPTNGARNSTNIDSIDFLEAFRPVLLFTDLLVYILVNSDELMNQGIQIAMPNILSSSDVATSFFNFKV

SEQ ID NO: 146934 - protein, 106 aa, Oryza sativa
  Clone ID: PAT_MRT4530_4750C.1.pep
PPSSAGLGCSSGDVFIKRIVAKGGDTVEVRDGKLLVNGVVQDEEFVLEPLNYEMDQVTVPQGYVFVLGDNRNNSFDSHNWGPLPVKNILGRSVLRYWPPSKITYGL

SEQ ID NO: 146935 - protein, 210 aa, Oryza sativa
  Clone ID: PAT_MRT4530_47510C.1.pep
MLSGSLPPELGKHSPLANLEVSNNNLSGKLPEGLCFNRKLYDIVVFNNSFSGKLPSSLDGCYLLNNLMMYNNNFSGEFPKSLWSVVTNQLSTVMIQNNRFSGTFPKQLPWNFTRLDISNNKFSGPIPTLAGKMKVFIAANNLLSGEIPWDLTGISQVTEVDLSRNQISGSLPMTIGVLARLNTLNLSGNQISGNIPAAFGFMTVLTILDL

SEQ ID NO: 146936 - protein, 84 aa, Oryza sativa
  Clone ID: PAT_MRT4530_47511C.1.pep
AVNVVAQASGLRSPALSRVATTRTVRRQPLPPPLALVRHASPIDIGSGRAFAVADLQSAQVLFGLLLGEHRPVALARECRFRSG

SEQ ID NO: 146937 - protein, 132 aa, Oryza sativa
  Clone ID: PAT_MRT4530_47512C.1.pep
MGPTSIGTTWAASPFWANKFQVSRFSPSSPSFFLPRSEIHRRRRRSKLRRRLHYSRRRVLAASSVSGVNPPPRAPPRLPPPKIQRKPKLQFVIRFATNLSNSQLCARGFSSARRRLRPGDRQPRSGPRRRPA

SEQ ID NO: 146938 - protein, 217 aa, Oryza sativa
  unsure (1)..(217): unsure at all Xaa locations
  Clone ID: PAT_MRT4530_47513C.1.pep
STSRCQSXSRRSILESRHITSQSNHAPHTEHRTYHTRSPHIHPLARIPPRLTPHHIHPTHRPRSLSLASNLHHCSIAIPSVTRPLNAIPRSGVLPTLDTPSSVSGSFYNSSHKPRPAIYXLRLTHRASLSRHXPIPHPLLALSCRHIPPYVYYVAWYNKLNMXLWACVHTVQITYVMNRCIKVLQGIPASCSXKNLQSRFRELMVLVQCCHNXPRXP

SEQ ID NO: 146939 - protein, 90 aa, Oryza sativa
  unsure (1)..(90): unsure at all Xaa locations
  Clone ID: PAT_MRT4530_47514C.1.pep
EHIRQSAYASINAHNVEXNRRYLRELVFTLLVLLQHLSGEILFEETLSQKTKDGAPFVPVLRDDGALHALKVXKGPHGAGPTQQSTTQGT

SEQ ID NO: 146940 - protein, 351 aa, Oryza sativa
  Clone ID: PAT_MRT4530_47515C.1.pep
MEERAWLVGRRSCLCFDDKSENAWKSRVGVLYVMHPITFFTNIIGVVTIVLISIVSILGLICLCHSLNFQLLIKRRRRNYYQANDEQLSYFNGPWLTRITLILVALWWGVGEVLRLTFVNGEGRFISDQTWQANVCKFYIVSNLGFAEPGLFLLLAFLLSAALQNQEVGALNRKWNQRTICAVFMLCSPSLIWEACVVFIGPHIASNDGQTSKVAKYWYSASSVHDGDVACTYPLLSSIFLGTFYTVLTLYVIFVGGQILSLVINKGLRRRIYMLIFATGILLPRAMFLGFSVLPWPGEIVHESLVFVSFLVLMIAAMLGIVILVYFPVAETFEVRNQEHIELQTSHSIAL

SEQ ID NO: 146941 - protein, 39 aa, Oryza sativa
  Clone ID: PAT_MRT4530_47516C.1.pep
LHFRLNTSVQINLLTSAEEHCMTSPDCLCTRSVATEFGR

SEQ ID NO: 146942 - protein, 90 aa, Oryza sativa
  Clone ID: PAT_MRT4530_47517C.1.pep
MAVVGGRFGTATASMLRRTRDRLGDRGALREYEEAYPMLGWSGGGRRQRRKAAAIGLGQYWAKGGGVGLAMAHSGCGGRRLGAAGHRAGK

SEQ ID NO: 146943 - protein, 124 aa, Oryza sativa
  Clone ID: PAT_MRT4530_47518C.1.pep
LWAQVLKFSSPLPNHQSGDNGVVPKKSVLEPKREIFASWRAPVKKNQPGICKWGSVKKPLKTGHAPFVHGMPGPDGPPRRGPAMAPPVFMLTCLCKKMCAPCMVVTPFRPMAFSYLGVCFPLFP

SEQ ID NO: 146944 - protein, 175 aa, Oryza sativa
  Clone ID: PAT_MRT4530_47519C.1.pep
MAVVGGRFGTATASMLRRTRDRLGDRGALREYEEAYPMLGWSGGDGGSGVGFAQGGGRGGRLRLSGLVSIGQRAAVLGWPWPTAAAVVGAWARQGTGQGSSSLASALPAGIAGRVGPVVLRPTDQRDNGRRDESPIGRRLPPGSRGFPIIGETLEFLTESPANQLPAFFKRRLDR

SEQ ID NO: 146945 - protein, 63 aa, Oryza sativa
  Clone ID: PAT_MRT4530_4751C.1.pep
KSVLYCVARSVTRLTRPPSGEITRRADTSPSGPTSPKVPGHVGDCVCLKPLVMILPVPYHRQD

SEQ ID NO: 146946 - protein, 92 aa, Oryza sativa
  Clone ID: PAT_MRT4530_47520C.1.pep
CMEGERARGVLIRQVMASCDTGTTMAAYSPLLDRGRACALDEYAAHGGCFSPGLMGGAGVLYIRTNDPNWHDKGVCMLLSSSICYSINACVR

SEQ ID NO: 146947 - protein, 290 aa, Oryza sativa
  Clone ID: PAT_MRT4530_47521C.1.pep
MALLRCLLVVLAVVVASAGLSLAEENTGGAGRQVSPSPAPSTGKHPCLDNSPNMTEKTGGEAGEVVHDYGGLECYVTGSRRSGRAIILVSDYYGFRAPKLRQIADKVAYSGYYVVVPDLLYGDPYTDDPARPFWVWIMAHSPEEAAEKTKPLIAVLKKEGMSSVGVGGYCWGGKVAVELSKTEETQAVVISHPSLVTVHDMTEVKRPIEILGGERDTITPPLVVHQFEHALDQNNRVDHFVKTFPKAPHAFACRYNASDPFAVKTAEEARADMVQWFDEYLKQHGEFQLQ

SEQ ID NO: 146948 - protein, 61 aa, Oryza sativa
  Clone ID: PAT_MRT4530_47522C.1.pep
YKTCVRPILDWSWTLTITRLDGHGGEGILSRDPCVPTMCFEWLPQGNCYKPYLSGLRQIGI

SEQ ID NO: 146949 - protein, 172 aa, Oryza sativa
  Clone ID: PAT_MRT4530_47523C.1.pep
MTELFDTAVTSLLHLPEVLDRLGAAAGDRRSAGDHAHHAAHGHGQHRISGIGGGAPVDIMETPGEYAFVLDVPGLSKSDIQVTLEEDRVLVMKSSNGAGNGKRKREEEEGECKYIRLERRASPRAFARKFRLPEDADTGGISARCENGVLTVTVKKRPPPEKKTKSVQVTIA

SEQ ID NO: 146950 - protein, 944 aa, Oryza sativa
  Clone ID: PAT_MRT4530_47524C.1.pep
MEMQLAAVLASLALGGALLVLVFGKWWQPLADADRRVKELADAVEALLQLRSELLKVEPAPPESDQLARAWLRRVQEAQDEVASLKARHDGGQLYVLRLVQYFVSTAPVAGSAEKQLKAVRALREQGEALLEAALSTPQAPPPLLRQPEELELPPGTSLTRPYLNEALRFLGDCDAALGVWGAGGVGKTTVLTHVRDACGLVAPFDHVLLVATSRDCTVAKLQREVVGVLGLRDAPTEQAQAAGILSFLRDKSFLLLLDGVWERLDLERVGIPQPLGMVAGRVRKVVVASRSEAVCADMGCRKKIKMECLSEEDAWNLFEANAREETIHRHPRIPALSRQIGSKQALRLAFSVFLQKIDIFHPLDHTMVASECKGLPLSLVTVGRAMSSKRTPKEWGDALDALKKTKLSSAPGPDKIAHPLVKFCYDNLENDMARECFLACALWPEDHNISKDELVQCWTGLGLLPELADVDEAHRLAHSVISVLEASRLVERGDNHRYNMFPSDTHVRLHDVVRDAALRFAPGKWLVRAGAGLREPPREEALWRDARRVSLMHNGIEDVPAKTGGALADAQPETLMLQCNRALPKRMIQAIQHFTRLTYLDMEETGIVDAFPMEICCLVNLEYLNLSKNRILSLPMELSNLSQLKYLYLRDNYYIQITIPAGLISRLGKLQVLELFTASIVSIADDYIAPVIDDLESSGAQLTALGLWLDSTRDVARLARLAPGVRARSLHLRKLQDGTRSLPLLSAQHAAEFGGVQESIREMTIYSSDVEEIVADARAPRLEVIKFGFLTKLRTVAWSHGAASNLREVAIGACHAVAHLTWVQHLPHLESLNLSGCNGMTTLLGGAADGGSAAGELVTFPRLRLLALLGLPKLEAIRGDGGECAFPELRRVQTRGCPRLRRIPMRPAASGQCKVRVECDKHWWGALQWASDDVKSYFAPVLI

SEQ ID NO: 146951 - protein, 641 aa, Oryza sativa
  Clone ID: PAT_MRT4530_47525C.1.pep
MASLLTFGMSLLLELLVSTSGRAADGTNYRNAQFKSTKIINKILKRHEKQEQRFCWNEGMRLPSIEDCPGCSNNVGSSSQSYNKSNRLSQKRVSVHQRLDTVNQDRDEGEDEGRKSQWCPSEFEAKEADVDDVEEASARLILSPDQAVFEKPEWTENRHLKLLYLNGYVNGKPMSKMLVDGGAAVNLMPYATFRKLGRNVDDLIKMNMILKDFSGNPSETKGVLNVELTIGSDKIEIVPADSQLKMETPNYYFEGVVEGSNVYTKDTVDDLDGKLTKFGNDGKTKYGKAKDDEPKDEKSEGEESQEIKNSQDQIDYAVHHALINQSGELVNTLTNMIKSLVDVTIAEHQAKGPTFLPDGVFLQYRNLVSSKQQPVSDVMREQFGLKPKDTSNFYWHPYPEYFERVPLPNRYKVPDFSKFSWQDNMSTYEHVSQFLAQCGEASAIDALRSWANLEKQFHKYFYSANDEMKLSDLTAIMQRHDESVPDYIQRFKDMRNRFSAQDFECLAHLAQNVTLHEQRFAEAKKKFKKVNHVYPYVSDFEEDNDLEVATARNKKVFTQLIKSAIEQGKIKFDDSRRPMKVDGNTFPISMVHTSGRTTDGKNHRNSQINSVRIINKYQRKYEKQEERYYEDDGGFDPHWDY

SEQ ID NO: 146952 - protein, 129 aa, Oryza sativa
  Clone ID: PAT_MRT4530_47526C.1.pep
KIGRKLSMSSMLYISCLCIAPLMVPQTESLTTIFLFGARICISASFIVLHIYAPEIYPTAVRATGVGFASSIARFGGILCPLVAVGLVHACHQTAAILIFITVMLVSGVAVSYFPLETSGRKLSDHIAA

SEQ ID NO: 146953 - protein, 337 aa, Oryza sativa
  Clone ID: PAT_MRT4530_47527C.1.pep
MAEFEAAAEQFRVFIQETKAKAEEAYQLAVLIQKAAAGGGSDVAAALEVCKKAAEATAAGGASSDAAATSEICKAADVMVKEVAAHADLIQEGSAEEEAYRPPVLIPVATARDFGGSMRGLTQRTMLGDDSDHMAMFEKKASVTQTDMKEKRGKAKDVSIDEDKSSDDDVDMMFLIGIRVNIKRKAMLVVTSINLQNFIHGIGTVYNNNYHVTWMVMVGTSLHITSKLILLLTNMHFNFCNHWFIKVRHIMLISLICHWFIKPRRCSHRWESAPRDLIAVSPFSRRRLPPPLQSAAVEHPPANPSHWLVSPRPVQHPVSEPEDPQCEDFEDQAQDLE

SEQ ID NO: 146954 - protein, 46 aa, Oryza sativa
  Clone ID: PAT_MRT4530_47528C.1.pep
SFLLKLSSYEPGAYYTLKRVSYLHKLQYQSSTKVLKNLNKLNYIMI

SEQ ID NO: 146955 - protein, 99 aa, Oryza sativa
  Clone ID: PAT_MRT4530_47529C.1.pep
ESILLGRKSCKSLQEGKKVRVALSAKDSIMSKHGWIEAVTEPSGGGVSAVSSLGLGTRHRAAGIVWMHSGAGLSSLPATQEQGTCIHPISDHALIRQRE

SEQ ID NO: 146956 - protein, 73 aa, Oryza sativa
  Clone ID: PAT_MRT4530_4752C.1.pep
MVGRSPRWSPAIVVAGGGGGDGVRRRWREAVRPLVESPSEGLPVPGFFGLWQIQDKKYELDAILMLCAMRMDE

SEQ ID NO: 146957 - protein, 298 aa, Oryza sativa
  Clone ID: PAT_MRT4530_47530C.1.pep
MPSEGKVILDHILENTSFVTPCNEPLLEASVSKIEEPSTIESQSEPSTSTYSIVEKVPEPPAVENEEIQTPDHAAIMFRDGFDEDYGNTLNYFSKKKPLVPLPPPDPMELGFLIETVRELTSIMSDECLREAELSSEVTRINTAPRVLPCHLEGNDVVIQYSPTIVVNLISESFAFAYLSNKAVTPTNKFFKHPNGNIIEGFGIVQDVPVYFEDRKAVLDFYVFEIQDFDILIGLPIEQLLINTPRLDSLKITLGGNEFSVPFSWARFALTDSLPEDEFAEEVTSGPPHESPETLLEN

SEQ ID NO: 146958 - protein, 129 aa, Oryza sativa
  Clone ID: PAT_MRT4530_47531C.1.pep
YEFLNSLYQNLKGKGRRNQRQKGKNSSATASNVVLPLDLRTHKSDALASSSSSTRHTPPPGRARGRLRQRGGWGERSEVAARRGGGGGRAPRRWIWRRRRCAVEGGEMAARGASLGFSFLGWIFFPRVT

SEQ ID NO: 146959 - protein, 88 aa, Oryza sativa
  unsure (1)..(88): unsure at all Xaa locations
  Clone ID: PAT_MRT4530_47532C.1.pep
MYYSMNELVDLXEKXINKFLNKIYITEEXLLKNIEDAPLPLKMDLIFIYSTFIKGDQTYFEIDSRKEGTQLYPHVNYTTVDGYLDKLV

SEQ ID NO: 146960 - protein, 132 aa, Oryza sativa
  Clone ID: PAT_MRT4530_47533C.1.pep
MEEDEMRMREKLATMDERQAMAMRLTWISELVASNKKSIAGNKAYILALIDAIDNDRCPYTAAELSDKIRELREDRVTVILPAQAVIKTMIDSVRAATPAAGGDGGTRRRGADDNSGAIGCGPTHQSRTISR

SEQ ID NO: 146961 - protein, 379 aa, Oryza sativa
  Clone ID: PAT_MRT4530_47534C.1.pep
MNDDVVSEILLRLPAKAVLRSRAVCRTWRRITTAYSRRRPLQLLGNTDPSYYFTPFNTLTSLPATAVPRIDDGGDIAGCRRLLHRDRFCLGLEATCDGFLLFRRVQKGSMLICNPATRQLVNLPPVSPEPSSRPNDNELRALGFYFHRPSGEYRVLCHRPLLDVDATYILSTGAAEPRRLGGGPDYHRCTMVVGETIGDTVYWCRPRYLHNGKPQISSFDTVSEAFRLLPPPPVSLAKDELVAMIDMRGTPAVWTMTELHLDVWALEEEERWVRRLRVGMPPPPAPLAYWSKGSRKNAVATFESGDGGVQMVVVTWAWKLLYDDTSKDRRVVGRTIVPRHCGHFWHTNCWFRAYRESLVRVESCTPDLPPDGEPYLQFC

SEQ ID NO: 146962 - protein, 96 aa, Oryza sativa
  Clone ID: PAT_MRT4530_47535C.1.pep
KKPANHNHDSIPAERCDSFSLMIYNTRTVSLIIAKPAKLYAYTKRVMPLGPLAYKPKQNCNGTRQGKSEHKYTTNEPVNRNERPITIPSNVLLNGL

SEQ ID NO: 146963 - protein, 394 aa, Oryza sativa
  Clone ID: PAT_MRT4530_47536C.1.pep
MNDDVVSEILLRLPAKAVLRSRAVCRTWRRITTAHYFITAYSRRRPLQLLGHTDPSDHFTSVYTLTSLPATAVPRIDDGGDIAGCRRLLQRGRFCLSLVTTCDGLLMFRRVQKGGMLICNPATRQLVNPVSPEPSSRPKDNELRTLGFYFHRPSGEYRVLCHRPLLDNTTYILSTGAAEPRQLGGGPDYHRCTMFVGETIGDTVYWCRPRYLQNGKPQISSFDTVSEAFRLLPPPPVSLAEDELVDMIDMHGTPAVWTMTELHLDVWALDEDERWVRRLRVEMPPPPAPLAYWSKGSWKNAVATFESGGGGVQMVVVTWAWKLLYDDTNKDRRVVGRTVALLFRDTVDISGTPIVGFMPTGRASSGWNLARRTSRRTASPIYSSVEYKHVVTSY

SEQ ID NO: 146964 - protein, 270 aa, Oryza sativa
  unsure (1)..(270): unsure at all Xaa locations
  Clone ID: PAT_MRT4530_47537C.1.pep
MGGIAAHCSTERTMRARLDGFKNCLRAKDDELGRKSLEIEGLVNTLKETNSENKRLQAELEKGSEAKAEIEXLKAELQKEKDQSATLTEYYNLTEPKMEALRQKALKAEASAEKEAERFTQGMVKATESTKTACRTLRLALNDMGERVQGVPREDASIFDFSEWTQQAGRAVSDCATAYGDCCARVSAAFTMGLLQQFGCEHVAEFPNFAKGDWEVSCQDVSLALCAWRKQFWQKDGRSTTKARLLEQLAKAEAANQGEEAAAGEGGGDA

SEQ ID NO: 146965 - protein, 313 aa, Oryza sativa
  Clone ID: PAT_MRT4530_47538C.1.pep
MVGGISGGGDSGGRSSGSWRRCSQPPALGTTAGEAWGRGGGGPQGGRRRGRRRAELGVVEGAFAAARARDDGGGSLGSRGRRELGVARGGDGGGRRRDAHSRRRVARRGNGGDARSQRCSGRWRGAAERAEDGGGWSSSCGGSARNHRRVAHRGNGAVRCRRRSSRNRQDLRERRWGRGKEIECRRRRPRPGIGDDSDLQKDLDEPRRSCILSGNDPDAAVAQVSASLAAGTSGAGGGEEWLCPMMTRRRRTMALALVRSIRENLLNKASCPPHPICVWPPSDLEEDDDNDLETLRAIQHPLLALPFRTEPPI

SEQ ID NO: 146966 - protein, 926 aa, Oryza sativa
  Clone ID: PAT_MRT4530_47539C.1.pep
MFAASTSSTGLPLPRAGGLLLLPTSRSLLLPRHRHRLRLRDVGAAAAAGGGVSGGGGGAASSREPPRTLFPGGFKRPEIRVPALVLRVGADEALASGDAVVAAVARGVGIVVLEAGEEGGGRVYEAALSLKASVGDRAYLLVAERVDVASAVGASGVVLADDGIPAIVARSMMMKSNSDSIYLPLVARTIRSADTARSATSSEGADFLIIDTGSDDAINVMNGVSGTQHVKIPIFSTLSDSQSEGSYSDNTSRLLQSGASGIVMSLAGIQVLADDIIERDFSKVDTAESVLQANYSSASTLEEADNVMVLTREKAKVAGFTKLDEKVMQLISIEKPILSEAVAVIRKAAPMMEEVELLVDAASRLSEPFLLVTVGEFNSGKSTFINALLGRKYLQEGVVPTTNEIMLLSYSDVDSESAERCERHPDGQYMCYLSAPVLKEMNLVDTPGTNVILQRQQRLTEEYVPRADLILFVLSSDRPLTDSEVGFLQYVQQWKKKVVFVLNKLDLYRNSNELEEATAFIKENARKLLNTEDVTLFPVSSRSALEAKLLYSKNDGREHHGEALFNDPRWRNSKFYDLEHYLLSFLDGSTENGKERVRLKLETPIGIADRLLTSCQRLVKLEYEKAIDDLTSIKDLVSGANNYAVKIEADSDSWQRQISSLIARAKGRAISLMESTLQLSNIDLIFTYTLSGGKSTPTKVTSFFQNDILSPSLDDAANLLSEYSTWLSSTNVREANIYVDCFHERWGALVAQEQRIPPEKNELVNEEEKLCVKALDGFSASAAAKVFEEEIREVAWGTFGGLGVAGLSASLLTSVLTSTLEDLLALALCSAGGFFAISNFPTRRKLAVEKIGKAAEKLSSKVDEAIQQDISRSANQLVHFVETVSKPYQDACQQKIDWLQGVQGELSTVERKLQTLKVEIQNLHES

SEQ ID NO: 146967 - protein, 1482 aa, Oryza sativa
  Clone ID: PAT_MRT4530_4753C.1.pep
MPISAGPSRTRNENAVAVAQDDSTSKDPPAEAENGTSTTSELEKNSNAAKPCRSDKKHRPTRITSEVTGSWCPIHKTRKHTLQACLVFLNARTEIRACKERGIQRVSPTRGVYCPIHKTKNHDLSSCKDFLIVTKMSSPKVQQPGKTLRDEDKERGTTLTPDCIVGVIDIGSSEPSVLHLLEDYDSSSTSTPREVLALDGTGTSARANTGAENQTSTPAQHIRTLNAILRETPYDPVLHDDLAQWTERAFSRSLRDVRWPERFRPGAIEKYDGSTDQEEFLQVYSTVLCAARADDNVLANCLPTALKGSARSWLMHLPPYSISSWADLWQQFVANFQGTYKRHAIEDDLHTLTQNSGESLREYVRRFNECRNTILEIIDASVIRAFKSGVRDRYTTQELATRRITTTRRLFEIVERCAHVDDALRRKNDKPKTGGEKKPTTDTPESSRKKYRKNAKRKAQAEVLAAEYANPLKRPDRQGSDARKAWCPIHRSNIRSLEDCLVFKKSLEKHMTSEQGKRVRVVEKDAEMTAQESDPAYPDSDLHVSHIFGGSTAYSSKREYKKVEREVCSTWQGAAPKMKWSEQKIQFSEDDHPKTAVIPGRYPIVVEPTIRNIKVARVLIDGGSSINLLFASTLDAMGIPRSELTPTDQPFHGITPRSSSKPMGKITLPVTFGQANNFRTENITFDVAEFDTCEVHGHISLRPSDMPGVPREVIEHKLMVQPDAKPVKQRLRRFAPDRRQAIREELDKLLKAGFIREVLHPEWLANPVMVWKANGKMENGALSDQLGNNVEAYVDDIVVKTKKSDSLFDDLREMFDNLRRYRLMLNPEKCTFGVPSGKLLGFLVSGRGIEANPEKIKAIENMKSPTRLKEVQKLTGCMAALSRFVARMGERGQPFFALLKKQDKFVWTQEAEEAFIALKRYLSNPHVLVAPQPNEELFLYIAATPYSVRTVIVVEREKVQRPVYYVSEALHNAKTRYPQIQKLLYAVIMTSRKLRHYFQAHRVTVVSSFPLGEVVRNKDVVGRIAKWVVELSQFDVHFVPRTAIKSQVLADFVADWTMPDNQSDNKIDDETWTMAFDGALNSQGAGAGFILTCPSGDHFKHAIHLNFRATNNTAEYEGLLAGIRAAAALGAKRLIVKGDSELVANQVHKDYKCSNPKLSKYLAEVRKLEKRFDGIKGGYKFLFVAIDKFTKWIEAIPTGEIKAANAIKFIKGIFCRYGLPHRIITDNGSQFISADFQDYCIGLGVKIYFASVSHPQSNEQIERANSIVLQGIKTYVYDRLMSHDNKWVKELPSVLWAIRTTPTTSNKETPFFLVYGSEAMLPSELRHQSTRAQKYSDEEQEEQRNDDVNLLEEHRERVAVRAATYQQALRRYHEKRIRDAYFRSATTSSEGFKAKQGETSSHPNGKDHTRSHKSCDQAHSKLQTAMAASWQTHGTLTNYVNSMYESIPSIPVRQLTSSIKPIFQAHIAITVSCPTIPHPDDT

SEQ ID NO: 146968 - protein, 59 aa, Oryza sativa
  Clone ID: PAT_MRT4530_47540C.1.pep
NFQVLIKLDVWTLITNIKRRLLIKPIHIFRLIRETNLLSLINPISRLCDAAGNISLIMD

SEQ ID NO: 146969 - protein, 117 aa, Oryza sativa
  Clone ID: PAT_MRT4530_47541C.1.pep
IFRSLFPPWCRPSGVWRSARFRCILGVGLHGCGMWRWQRLSALRRAAAVLWGFLSCLFLLVAACVARCPFFVSLFWLPVAAGSVGDDSWGDAGVSCCCSLFPRALPFFVFLALVPRL

SEQ ID NO: 146970 - protein, 90 aa, Oryza sativa
  Clone ID: PAT_MRT4530_47542C.1.pep
VPGYIPSRRTRRWNLREHPSMHRSDVVVLRTYATFLVEPPHPLFSIVARYPIASGMAGCGFGAARPAPRAYAYVSAGRVTVSIQARCMVA

SEQ ID NO: 146971 - protein, 61 aa, Oryza sativa
  unsure (1)..(61): unsure at all Xaa locations
  Clone ID: PAT_MRT4530_47543C.1.pep
MEPEFDAKNQQYMHREGIKKCCLHGMYQXVPXGQTGLXSTKADGRKDAPRVRHAIEWDLVE

SEQ ID NO: 146972 - protein, 167 aa, Oryza sativa
  Clone ID: PAT_MRT4530_47544C.1.pep
MLRLLTSLKVVAAGPGQDPGPLSLLPFVLLRMPELRGCDLSTSAALRRRRGSGEEGHGEAASVRGRRRQAPPLADRRPFPSLRLSSSPSPATSLHSLRIRLCPPRWPPPYSLSAHACRPARELDEEGRKDSREREGGAEPPTRRRLWIEKRARGTKIRFVDKLRDFK

SEQ ID NO: 146973 - protein, 267 aa, Oryza sativa
  Clone ID: PAT_MRT4530_47545C.1.pep
MGRGKVQLKRIENKINRQVTFSKRRNGLLKKAHEISVLCDAEVAAIVFSPKGKLYEYATDSRMDKILERYERYSYAEKALISAESESEGNWCHEYRKLKAKIETIQKCHKHLMGEDLESLNLKELQQLEQQLESSLKHIISRKSHLMLESISELQKKERSLQEENKALQKELVERQKNVRGQQQVGQWDQTQVQAQAQAQPQAQTSSSSSSMLRDQQALLPPQNICYPPVMMGERNDAAAAAAVAAQGQVQLRIGGLPPWMLSHLNA

SEQ ID NO: 146974 - protein, 320 aa, Oryza sativa
  Clone ID: PAT_MRT4530_47546C.1.pep
MGRGKVQLKRIENKINRQVTFSKRRNGLLKKAHEISVLCDAEVAAIVFSPKGKLYEYATDSSLTILLIIKESVNTYTYGYRIMGRMDKILERYERYSYAEKALISAESESEITLPQLTTCTASRSTHGICFQYCLMSKTLGNWCHEYRKLKAKIETIQKCHKHLMGEDLESLNLKELQQLEQQLESSLKHIISRKSHLMLESISELQKKERSLQEENKALQKELVERQKNVRGQQQVGQWDQTQVQAQAQAQPQAQTSSSSSSMLRDQQALLPPQNICSYPPVMMGERNDAAAAAAVAAQGQVQLRIGGLPPWMLSHLNA

SEQ ID NO: 146975 - protein, 99 aa, Oryza sativa
  Clone ID: PAT_MRT4530_47547C.1.pep
HENGHENTNQAAGIGAVERSGRRKGGSGAPWRPREGRGSARRGVGARHPPVSRPAHRRRMGSHASSTASKQIRPSTVTWRAHGPAATLVRSGRDRAHAS

SEQ ID NO: 146976 - protein, 267 aa, Oryza sativa
  Clone ID: PAT_MRT4530_47548C.1.pep
MAASLPLSAAIVGAEESVDKEVLEMEYLFEKFLMPSDLCSNTEWLGIPEEHVRKFGMMLEDRDGYSVIFFQDGVVPGKLWCFRYWKSNGVHGLTKGWRCFVREKGLKAGDTISFFRGSACGRLFICCRLGTHATFASSSTLHHGFSMPPPPARPLVGLQSGMLARDVPSLGQARLHDGNQDGGGAPSRHVPSSGRRVEAQLSRVSSRRQRRTMKHSIPEPTIETPPILESMFLIAAPPAVKCLRLFGVNIYVLPVSSSGQPKQESSP

SEQ ID NO: 146977 - protein, 117 aa, Oryza sativa
  Clone ID: PAT_MRT4530_47549C.1.pep
DGVQVQKTNSEDASSVKSSKDILVKSERSNSLKLTTNEVVSALKHNGMEARGTDLLNQPVEKYFGAARLWPWEVIYYRKLKKGPISTENYAKRLEQNKEYSIVDRYVRSSSGWWECH

SEQ ID NO: 146978 - protein, 139 aa, Oryza sativa
  unsure (1)..(139): unsure at all Xaa locations
  Clone ID: PAT_MRT4530_4754C.1.pep
INYLSERSRVHRRAGEEAKRGIITGGDRAGPWGRYGGGGGGGGEEDAGAGEHGGDHGARRRGLACRRCTGRWARRCTRRPWGFGAFTLCPFLRAGGVLTRSPPTAAVRYNRAHVVARRALPLGRRTFLVAVXDTFARSG

SEQ ID NO: 146979 - protein, 464 aa, Oryza sativa
  Clone ID: PAT_MRT4530_47550C.1.pep
MGWASRWLRGLLGGGKKPNSGSGDPKPAREKKRWGFGKSFREKSPAHPPPPPPPSAAVQRAVTPRRAYTASDEGDDEQSKRAIAVAAATAAVAEAAVAAAQAAAAVVRLTSSGRCAPAAAKREEYAAVRIQAAFRGYLARRALKALRGLVKLQALVRGNIVRRQAAETLRCMHALVRVQRRARACRAIRSQHVSAHPGPPTPEKYDQATHEGVPKHGRSGSLKGSSSKTPGSERLTRERSESCGRNWLDKWVEERYLDDEKNAKILEVDTGKPGRHASRRRSGSHHHHSSCSSMTSEQKSRSYATMPESPSKDSTTAQQSVPSPPSVGMAEALSPLLMAVDIAELCDSPQFFSATSRPGSSRSRAFTPTKSECSRSLFGGYSDYPNYMANTESFRAKARSQSAPKQRPQYEKSSSLRKASAHAFGPGSCAPVAQRTTASLHSKFTNKAYPGSGRLDRLGMPVKY

SEQ ID NO: 146980 - protein, 83 aa, Oryza sativa
  Clone ID: PAT_MRT4530_47551C.1.pep
NFDKSQESYSIRNIITEIDWFQEVHSNAGYVNVLFVRVHYSCYFIIVESLACTVSSIMSVTFVSRHMFSNTLCSLNFHVTFVS

SEQ ID NO: 146981 - protein, 71 aa, Oryza sativa
  unsure (1)..(71): unsure at all Xaa locations
  Clone ID: PAT_MRT4530_47552C.1.pep
XXLIQIFCHLALSTETESSSLFKTESTAPKPATSCGQIKINYTHNNSPMANIPVPQILKFGTMHTTTQASK

SEQ ID NO: 146982 - protein, 98 aa, Oryza sativa
  unsure (1)..(98): unsure at all Xaa locations
  Clone ID: PAT_MRT4530_47553C.1.pep
MPASAEMDGDRYGAGAGMRDFMSXSDSHASVDEFDPFTDSPYHFTXSSSDNAFRICMAALNLTSGGDGWPELESYEGLLKWGLRKSPVAVRQSHHPIT

SEQ ID NO: 146983 - protein, 76 aa, Oryza sativa
  Clone ID: PAT_MRT4530_47554C.1.pep
MVFHTLVLVESGVFMGLSFAVNLVEIHHEAVQEVVPGAHREFNGKNVPLKELKRQHVGSHYGDDPAKDAGRLTLQV

SEQ ID NO: 146984 - protein, 212 aa, Oryza sativa
  Clone ID: PAT_MRT4530_47555C.1.pep
MAATTTSSSSGGGNRIWTSSLAVLALAVALVSLLSLRAPPPAAPSMADDLPTSVHDISVKDIKGNDVKLSEYEGKVLLIVNVASKCGLTNSNYKELNVLYEKYKEKGLEILAFPCNQFAGQEPGSNEEIEQTVCTRFKAEFPIFDKIDVNGKEAAPLYKFLKSQKGGFLGDGIKWNFTKFLVGKDGKVVERYAPTTSPLKIENDIQKLLGTS

SEQ ID NO: 146985 - protein, 132 aa, Oryza sativa
  Clone ID: PAT_MRT4530_47556C.1.pep
MASSRAALLVAVLLLLLVSSLSVRAEADQVARAPALAPDVAAASWVQQGSQEAAAPGRPGMGMGKNGAARWRRTAGRRGRGGGGGGTGAWAFSAMLPRGFVPPSGSSACHNDMPAAAADAEFFVCGGGDGSP

SEQ ID NO: 146986 - protein, 604 aa, Oryza sativa
  Clone ID: PAT_MRT4530_47557C.1.pep
MDYLYLDDADADVEAMLREIAAAVAANGPGGAAAGDETDGSYCAGERCACAAWTYDADLYASLRAMEMAAGERSSPDYMTAVQRGRVDPWTRASLVAWMEGITRGHAGLAAGTLHRAVAYVDRYQSVRPLEAVSHRLLALLGATAVFVAAKYEGDLPEERLSAGDAAAGAGAGGLAIARSEVLDRELDLLDALGYRLGRPTAHTFADHFLARYGYSGGDAVHAVAHHLADLTLLDRRSLRIPPSVVAASAVYLARYAATTLADAGLPPPLPWEDDGLEAVTGYSVVYLARCMEEMYDVHEMASLWPGYDEMKSRFAIDYLLLPCRLVRRETGIGGFNGGGGRRVVAERVFAGAGAGAAAAAVARRGERRGELPADEDGAEEQAAGGGEAGEAGGAGGGGEGEGVVYFWYPLNIVTGGTTAKIMLAAKDNFLGKYIYKDTLARNLAAVIYKDEDDIIDTAKEQYRVLKTDNEFRYGYKVVENGNLRSALTTSNVIELPKKEELKTVVDKVKDFFGDVTSGAKESFAQITGSVSAEAEAPVEEEKPWVKRRNERKRKQKEKQNQKQGISLCIAIKHRRSDLPAWLPFLICRNGELIVKRSIPEIVK

SEQ ID NO: 146987 - protein, 141 aa, Oryza sativa
  Clone ID: PAT_MRT4530_47558C.1.pep
MGVHLLKRQQSSASAGGSSAGGGMPPKGCMAVRVVGPGGVGGGGGGAEGERFVVPVGYLKHPLFVGLLKEAEEEFGFEQKGAITIPCGVDHFRRVQGIIHHQKHHHGGSHGAGGAGAGGLLSGHGSSGHHNNFHIAACFRA

SEQ ID NO: 146988 - protein, 198 aa, Oryza sativa
  Clone ID: PAT_MRT4530_47559C.1.pep
MAGGPGSCVMCASCCTLLLLLVAALLILSYGVVFNVGVTVEDASLTRLDLAGANGTDLAYGISLTVAVHNPNMAVRAEYTRPLAAELRLATREELLHAVHLADAGQRVEAAETDRFGVTDEGVAAHLGGAALTELVKEMGARGGGGVVAGAEDHRRGEVPAGARRPDEEGGRDVPAEAVPTGDEHHAGQPQGHQMPLD

SEQ ID NO: 146989 - protein, 275 aa, Oryza sativa
  unsure (1)..(275): unsure at all Xaa locations
  Clone ID: PAT_MRT4530_4755C.1.pep
TSAVTSPPAAVARRLGLAXLAGERRHGGANGRHQRVERDAANSPVTKRAAEDQRTATATTKKRRRSSGRRRRRCSGGLQRRRRGGRGRRRDGDHDGSLPEXRRRLKRRRRTAGATAATAALGHTVLELFRRREAKARVAAGRGDTGEPFKGARRRRRRPTAAGDEKESSGKSNPKQTRIHEFPNDFSRCFQRRKGRGDPEDHFPSINSAGNGKERPDWKXGGGGAKLGFRPEEDDGPHLSAGERARARRRTGPTWAEERESGFGPTFGPKPKETF

SEQ ID NO: 146990 - protein, 104 aa, Oryza sativa
  unsure (1)..(104): unsure at all Xaa locations
  Clone ID: PAT_MRT4530_47560C.1.pep
MASITRPIVLFTAGXILPRRGSLAQQLVGQSTSQWQSSRGGSTRECRFDRLQAFEPIRSVRSEAGTAEFFDVYNEQVQGTWSICLCARAIEXPEALLLPQYTKW

SEQ ID NO: 146991 - protein, 501 aa, Oryza sativa
  Clone ID: PAT_MRT4530_47561C.1.pep
MASDGSFFRYGERQIAAKPEDCPAMSSMLSLEDLPDALLAEIVKRITNTSDLKSISLVSKRLYTIEAEQRSSIRVGSDLCPAIDALSALCSRFPNLLEVEMDYSGWKFHWNLLEKHIFSLHFPVLRDLTLYIDDIRMGCLASCKNLMSLRLNSVSAIGSCGLLSVAVGCKNLTSLHIIKCNHIVGSDKWLEYIGSAGSLEELVVKNCKRISQYDLLKFGPGWMKLKKFEFKFKRSFNTYEPRDPCYVDNYQYGYDFCCESLRDVTLATIVTKPEIGLRCLLTKCKALERLCLHYVIGISDHDIITISQNCSNLRSISLSQEMLLCEIPGGTGVMARTPLTDDSLNALALRSHMLEAVELMFYGCAPDWPSEIAFTQDGLVTLLQSCPIRHLVLRGANFFDDEGMEALSCAQFLETLELMQCVAVTDVGMRFLAQSPCLKNLTLQMCYEVTDDGVCEVAHARDLESLTVESCNQISVEALHGAAKSVHYKVDCPSYYDRYKD

SEQ ID NO: 146992 - protein, 87 aa, Oryza sativa
  Clone ID: PAT_MRT4530_47562C.1.pep
RVNAGEAWGRKADQEPPQPGFQPAHGPRHSGLNHIRQHSPSKQRQLLGIGGMSQTDRHSGGCSPEADFDGGRRPQRRWEFWRHSCSA

SEQ ID NO: 146993 - protein, 251 aa, Oryza sativa
  Clone ID: PAT_MRT4530_47563C.1.pep
MKTSHVENDYIDNPSLAPATGPKRPRGGPPELAPTPARCDQDITHHWISFSGRPSSVSSSSSTSSDQRLLDHMAPPPVAEQASPRAVRLQPKVVHCKPLDLKGPTAPPELDKHFLLCEACGKCKCKECASPRTLPSCWVCNQECLCSAQTLVNYGTCMCLVQGIFYHCTNEDDEGSCADHPCSCSGSNCCARWSFMGALSVVLPCLLCYLPATGCVKLAQRGYDRLRRPGCRCKHTNSVICKAASGDTKTS

SEQ ID NO: 146994 - protein, 86 aa, Oryza sativa
  Clone ID: PAT_MRT4530_47564C.1.pep
MAAAWCNYRRSRKRSTMTTRTPLPHAPAVLGDEAGKRVRDPTTRKKMSGGRCDRGGEDRVASSLRSLNHCRSSPQSPPPPSPPKEE

SEQ ID NO: 146995 - protein, 84 aa, Oryza sativa
  Clone ID: PAT_MRT4530_47565C.1.pep
MESMCSCWLGQSMRQLVGGVPLWVGKNLGCNRLPEIGVMVNDGNDIVLAINMSPGLPTRQLQCPRKDSRSSDVSQQRPQSFGVL

SEQ ID NO: 146996 - protein, 373 aa, Oryza sativa
  Clone ID: PAT_MRT4530_47566C.1.pep
MEEGFVALKRTEHVEVTSLAVAVEATPSAKGGKGKVVVGGGGAGGGVGPTRVRVFCDDFDATDSSSDEDEEEVTARRRVKRYVQEIRLQRAAAVAVPPVKVKGEEVFPAAVSAKMAEAAKARVVLAAGRKRKAGGVDGAEPRFRGVRRRPWGKYAAEIRDPWRRVRVWLGTFDTAEEAAKVYDTAAIQLRGRDATTNVHQSGDSASLDVPPEVAERVPQPPGASKNASPATSYDSGEESHAAAASPTSVLRSFPPSAVVATADTANKKQPPPPPLVVRETDESVDVFGCSFSDDGGFAGELPPLYTDFDLLADFPEPPLDFLSNLPVEPFSLAPFSSNNGSPDLHLDDAPSPAAAQVDDFFQDITDLFQIPVV

SEQ ID NO: 146997 - protein, 60 aa, Oryza sativa
  unsure (1)..(60): unsure at all Xaa locations
  Clone ID: PAT_MRT4530_47567C.1.pep
IPLPLTYLIYELSTIAYGQLRYKLEPRNAVTKRELLLXKSCDTPAKQLLILVPEHWILCA

SEQ ID NO: 146998 - protein, 253 aa, Oryza sativa
  Clone ID: PAT_MRT4530_47569C.1.pep
MAAPPVMEVDSPTTGDEEDEDVERQTTKPIGVMAPQDTWCRMDPKSLQQSEVDGHEGCSQNMLGYLHLASPAINKYDSRSLDFVPPHLKIPAGPIEESMWRDKLQNQLVLWLRRIHGVGWIPNPFNRAKSMGTKGAALKTQYTPTALSPIDTPYLRRMIKINVNIHGPNPPINIPELQGTIMDTTRLQVIMKEVSHLRYILKEAPHLGDIIKEIPHLQGMMEKVPHLQVTMKIATGLLMCHGIECSPPYGDGK

SEQ ID NO: 146999 - protein, 79 aa, Oryza sativa
  unsure (1)..(79): unsure at all Xaa locations
  Clone ID: PAT_MRT4530_4756C.1.pep
KGGGGLTXXDNXXIXXXXXLAXRXSXFGXLPRDVXLANXYRISRXXXQRXKXNRGDEXGAXTPLQNKXXQDVYXVAESS

SEQ ID NO: 147000 - protein, 121 aa, Oryza sativa
  Clone ID: PAT_MRT4530_47570C.1.pep
MTPTTARGRTQVPQLTDDKDQDNRTRVASAGDGDSDHLEERELRERAIAEFQRLVEYTFRLTHTPEAFVPVGWTAGLDRPESTPRLVPGDPIGTDAPVRTSPSCRKKKSCRLRSDGDGWAL

SEQ ID NO: 147001 - protein, 97 aa, Oryza sativa
  Clone ID: PAT_MRT4530_47571C.1.pep
FFFFLFVRSIAIFFYLELQSLHKFIRGNRLVVNTRVRGVNSSLTHVGPHFPGVGVAAHGQHLTSFHHPAAVWGRQFAAGATSAIHASTSLALKIFLH

SEQ ID NO: 147002 - protein, 106 aa, Oryza sativa
  Clone ID: PAT_MRT4530_47572C.1.pep
MLLAAVLLVAVPVAAATLHPVDYLALQAVRRALSDMPGSRFFASWDFTGDPCGFAGVSCSGDGRVVTLALGDPRAGAPGLSGALPAAALARLSELASLAVVPSLVS

SEQ ID NO: 147003 - protein, 386 aa, Oryza sativa
  Clone ID: PAT_MRT4530_47573C.1.pep
MAMAMACLNPLALSPRLAYGGRAAPRRCCSVVVPTSSARAAAGRCRWRLAAVAEEPQAVRQQEQQQRTEGSGEAGAEAAADASSKLVLVVGGTGGVGKETHISSPSLHSFSVTFSPLECHYCHFTMPLSDYVKLIMLIWDTHNLHKILAGQLVVASLLSRNIKTRLLLRDPAKAVTLFGEQDESVFQAYKADTRNAAELDPEIFEGVTHVICTTGTTAFPSKRWDGDNTPERVDWDGTRNLVSAMPRTIKRLVLVSSIGVTKYNELPWSIMNLFGVLKYKKMAEDFVQNSGIPFTIIRPGRLTDGPYTSYDLNTLLQATAGERRAVVMGEGDKLVGEASRLVVAEACIQALDIEFTEGQIYEINSVKGEGPGSDPEKWKELFRAVQ

SEQ ID NO: 147004 - protein, 498 aa, Oryza sativa
  Clone ID: PAT_MRT4530_47574C.1.pep
MSGDAFNMSVAYQPSGMAVPEWLNKGDNAWQMISATLVGMQSVPGLVILYGSIVKKKWAVNSAFMALYAFAAVWLCWVTWGYNMSFGHKLLPFWGKARPALGQSFLLAQAVLPQTTQFYKGGGGADAVVETPWVNPLYPMATMVYFQCVFAAITLILLAGSLLGRMNIKAWMLFVPLWLTFSYTVGAFSLWGGGFLFHWGVMDYSGGYVIHLSSGVAGFTAAYWVGPRSTKDRERFPPNNVLLMLTGAGILWMGWAGFNGGDPYSANIDSSLAVLNTNICAATSLLVWTCLDVIFFKKPSVIGAVQGMITGLVCITPGAGLVQGWAAIVMGILSGSIPWFTMMVVHKRSRLLQQVDDTLGVFHTHAVAGFLGGATTGLFAEPVLCSLFLPVTNSRGAFYPGRGGGLQFVRQVAGALFIICWNVVVTSLVCLAVRAVVPLRMPEEELAIGDDAVHGEEAYALWGDGEKYDSTKHGWYSDNNDTHHNNNKAAPSGVTQNV

SEQ ID NO: 147005 - protein, 134 aa, Oryza sativa
  unsure (1)..(134): unsure at all Xaa locations
  Clone ID: PAT_MRT4530_47575C.1.pep
MAAYTMMTLDLCALLALSASATTAITTMQLLALTFAMGTTDPXRQCTMHTLGVGSYTVMXMSQTMALLQQQCCMQLLGMMPQCHCGTSCXMMQSMQXVICAGLRQQPMMNMATQMPYMCNMASVNLQLCFCGSV

SEQ ID NO: 147006 - protein, 118 aa, Oryza sativa
  Clone ID: PAT_MRT4530_47576C.1.pep
MASLSSFLLATAMAALLVIGSYATELTFKVGPGSSTTSLNLITNVAISEVEVKEKGTGDWTGLKESSANTWTLKTGAKLKGPFSVRFLVKNGGYRVVDDVIPEAFKVGSVYKSGIQLK

SEQ ID NO: 147007 - protein, 656 aa, Oryza sativa
  Clone ID: PAT_MRT4530_47577C.1.pep
MASSGLAYPDRFYAAAAYAGFGAGGATSSSAISRFQNDVALLLYGLYQQATVGPCNVPKPRAWNPVEQSKWTSWHGLGSMPSAEAMRLFVKILEEEDPGWYSRVPEFNPEPVVDIEMHKPKEDPKVILASTNGTSVPEPKTISENGSSVETQDKVVILEGLSAVSVHEEWTPLSVNGQRPKPRYEHGATVVQDKMYIFGGNHNGRYLSDLQALDLKSLTWSKIDAKFQAGSTDSSKSAQVSSCAGHSLISWGNKFFSVAGHTKDPSENITVKEFDPHTCTWSIVKTYGKPPVSRGGQSVTLVGTTLVLFGGEDAKRCLLNDLHILDLETMTWDDVDAIGTPPPRSDHAAACHADRYLLIFGGGSHATCFNDLHVLDLQTMEWSRPKQQGLAPSPRAGHAGATVGENWYIVGGGNNKSGVSETLVLNMSTLTWSVVSSVEGRVPLASEGMTLVHSNYNGDDYLISFGGYNGRYSNEVFALKLTLKSDLQSKTKEHASDGTSSVLEPEVELSHDGKIREIAMDSADSDLKKDDANELLVALKAEKEELEAALNREQVQTIQLKEEIAEAEARNAELTKELQTVRGQLAAEQSRCFKLEVDVAELRQKLQSMDALEREVELLRRQKAASEQAALEAKQRQSSSGMWGWLVGTPPDKSES

SEQ ID NO: 147008 - protein, 163 aa, Oryza sativa
  unsure (1)..(163): unsure at all Xaa locations
  Clone ID: PAT_MRT4530_47578C.1.pep
YLLLSSSPPILLFLLLSPHLLPFPPPPLAASAGREVAAGAGREAAVGCVGGGXGAGREDPPLTCLXPMDPPSRAVEMRRXGGTATTTTVATCGLRSSGSATGRLQNGGSTASNRGSGGLQXGAEVASGAHGSGSGDHDHGGDMWARERLIRPHAWQRGGGGVP

SEQ ID NO: 147009 - protein, 83 aa, Oryza sativa
  Clone ID: PAT_MRT4530_47579C.1.pep
AHLMTREPGDSWLGQRIRELVLSPGSGPISSRAEALLYNADKAQHVDEVVIPALREGKVVVCDRYVDSTIAYQGAGRALDPGE

SEQ ID NO: 147010 - protein, 142 aa, Oryza sativa
  unsure (1)..(142): unsure at all Xaa locations
  Clone ID: PAT_MRT4530_4757C.1.pep
SNLFDYDLIDPRTSVPQYPLYPVYGYHPSTVVRQVGGLGTQGXTTPISTGPPMTGDENAVATNQGDSMSKYPPIETENGISTTSKLEKDSDTAKLCPSDMNHEPTKMTSEATRSWCPLHLAALAIFEIKSTATEKHDAHETT

SEQ ID NO: 147011 - protein, 108 aa, Oryza sativa
  Clone ID: PAT_MRT4530_47580C.1.pep
VDVELIVGGWRRCWPIRGGGRGGGGGGVGVGGNDQSHVGVDDAAFSFRAALLQATGMGVLGVSSGGDEEKPHQHQGQAHHCHPHLLHLVLLIDLLALRPFFLSNKLSS

SEQ ID NO: 147012 - protein, 100 aa, Oryza sativa
  Clone ID: PAT_MRT4530_47581C.1.pep
VRVVGSSPTRRSRSPADRNLYIVLISIHGLVRGENMELGRDSDTGGQVKYVVELARALAATPGVHRVDLLTRQISCPDVDWTYGEPVEMLTVPAADADDE

SEQ ID NO: 147013 - protein, 132 aa, Oryza sativa
  Clone ID: PAT_MRT4530_47582C.1.pep
MKAVYSLFERWVDPFREPDRLRPPSTTLGFLWHYARQAKWPLAVSLAVGGLLPLVEAGLFYFTGRLVDILDQAGKGGVERSWSALLQAAGPELLFMGITVLVIRLVVTAINTLLEDQTLSPGFYNMIRWQAN

SEQ ID NO: 147014 - protein, 431 aa, Oryza sativa
  Clone ID: PAT_MRT4530_47583C.1.pep
MAQGVMLWYDLHALAAAVALLVSSVLVGTSTAVNCGRKCGEVRIPYPFGIGVDCAWPGFDLSCNHSFTPPRPYTGNVEIKDISLEAGEIRLYTHVVSNCYTSYNTTEYESTSSQDDLRDTPFLFARSRNEFTAIGCGAIAFLWGRDDASYSTGCITTCASLDEAAHDGDDCTGLGCCQVPSIPPNLDILNISFDPGSLIGNPAWRESPCSYAFVAEKHWYNFSRHDFSHAGSKSFVNRTGDRSVPTVLDWAIRGNGSCSSATGAPACVSAHSYCVNATNGKGYLCNCSAGYSGNPYVTGGCININECELRREGPAMYPCYSGSRCYDTEGGYKCKCRFLHRGDGKIDKGCKPIIPATVVATIATAVAGGILAFVVLYILKEHRRRQQNRSFDKNGGNILNKMMDIKIFSEEELKKMTKNYCEKRRLGKATS

SEQ ID NO: 147015 - protein, 514 aa, Oryza sativa
  Clone ID: PAT_MRT4530_47584C.1.pep
KSPCSYAFMAEQGWYSFSRQDFSHAGSKSFVESDGGRSVPTVLDWAIRRNGLCSSATGAPACVSAHSYCVNATNGEGYLCNCSAGYSGSPYVTGGCININECELWREGPAMYPCYSGSRCYDTEGGYKCKCRFPHRGDGTGKGCKPIIPLRIVATLATVCAMVALLGLAWFIRCEHKAWEQRGFFESNGGQLLKDMGVTTFTQEQLDTITNKKRTKIGKGTFGEVYKGLHDDQEVAVKYSTAKSSIRRGKYEFVKEMAFRKSISSNGDGTLGQKASVNEIIVQSQMQHDNVVRLIGCCMETEVPMLVFEFIPNGSLETVLHGPDLRALSLPERLGIAIGSAAALAYMHSLGLQSIIHGDVKPANILLGKDLVPKVSDFGSSKLGLATKEVCADKNYIDPVCMKTNIVTQKSDVYSFGIVLIELITRKKAKYDGRNVQSDFVNCHTDNNARREMYDQDMLHTDAHSLQPDQCIECLDTMAAIAVRCLKDDVDERPTMAEVLEELKQLRASNELMV

SEQ ID NO: 147016 - protein, 70 aa, Oryza sativa
  Clone ID: PAT_MRT4530_47585C.1.pep
MKMHNSLACFGLAGDDKTGKRVKVKAKKQSPVPAAAANEEKERHTASKRGRATSRRWCASHEKGHGQFQP

SEQ ID NO: 147017 - protein, 63 aa, Oryza sativa
  Clone ID: PAT_MRT4530_47586C.1.pep
CISFDRWLKHTSALNDSEKRAIYDQEVLGCAPRMIHNDAWCWFFNIKLTFILAKNLKFYNTLT

SEQ ID NO: 147018 - protein, 118 aa, Oryza sativa
  Clone ID: PAT_MRT4530_47587C.1.pep
MSQRIHFLSRCQFESSQPLDPGVMVPKAEKKPAEKKPAEEKVHPDIGISSKAMSIMNSFVNDIFEKLEQEAARLARYNKKPTITSREIQTSVRLVLPGELAKHAVSEGTKAVTKFTSS

SEQ ID NO: 147019 - protein, 298 aa, Oryza sativa
  unsure (1)..(298): unsure at all Xaa locations
  Clone ID: PAT_MRT4530_47588C.1.pep
PSSSSPGGGGGDGQEHARRPRRSPGGGQDAHGGHGPPAPDPRQLDNAQPPSRDAASQTAPDTLPPXKTPXHAPTPXRPPPPPPPQPPPTPPPPPPPPPTPPPPPPPPPPPPPPPPPXXXPPPTPPPPPPPPPXPPPPPPPPPPPPPPPPPPPPPPPPPPPPXPPPPPPPPPPPPPPXXPPPPPPPPPPPXXPPPPPXPPPPPPPPPPPPPPPPPPPPXPPPPPPPPXPXXPPPPPPXPXXPPPPPXPXPPPXPPPPPPPPPXXPPXPPPXPPPPPPPPXPPPPPXPPPPPPPPPPPPP

SEQ ID NO: 147020 - protein, 121 aa, Oryza sativa
  unsure (1)..(121): unsure at all Xaa locations
  Clone ID: PAT_MRT4530_47589C.1.pep
LFLRVMAYYSPAGTVSNIAGFAPTRGGCWSTWLGSINVEEIXLRGIYADMPTPALPFVSGDMPMSSIPAPDVHFTPSTAEEVYKDITHSGVTIFSSRLRPPADACGCVPSSLARAGSGTGT

SEQ ID NO: 147021 - protein, 203 aa, Oryza sativa
  unsure (1)..(203): unsure at all Xaa locations
  Clone ID: PAT_MRT4530_4758C.1.pep
TPAGAAGPMRQLHPRARATDGRAPRGSHTPRPKAATSARPAEGNAPAPLWSPPATTGAAERRPREGWEGGSETAVHGSPRVDGDNGNGDRSGERRRRGSGRRGRRRSGGRRPKRRGGRGRRGCGEAEGGGAEVGGGPGXRRRRTGARRRRRRERATSRAQIRRGGRAARGGTGRRRCGEGLNRAGERGGGRGREETGAGGRPP

SEQ ID NO: 147022 - protein, 67 aa, Oryza sativa
  Clone ID: PAT_MRT4530_47590C.1.pep
FSPVGVVLAIIMGYCTCVHYPIVAQIPVTSISFSFSGQDETPAHNITLSTPFMSPLCNSQVEQPPQR

SEQ ID NO: 147023 - protein, 153 aa, Oryza sativa
  unsure (1)..(153): unsure at all Xaa locations
  Clone ID: PAT_MRT4530_47591C.1.pep
LKCVMNIKVFIWLLFSDRLNTRDMLDRKNCAPLNADLTCVLCSLQHRETLFHLFFQCPFSKRCXRKIGISWNTSLEFFQMLVLARLRFRGKGFLEICFIACWHIWKQRNAKIFQNVNPTFDSWWYAFRNDILLHMCRMNGELRQQVSDWITFL

SEQ ID NO: 147024 - protein, 68 aa, Oryza sativa
  Clone ID: PAT_MRT4530_47592C.1.pep
SRVNFQNQRAEKTGKQNPHPNQLGGLAEGPPSKRGGGGAHQQGKPPGGSWEPGTGNGAPLPWVQAPGG

SEQ ID NO: 147025 - protein, 147 aa, Oryza sativa
  Clone ID: PAT_MRT4530_47593C.1.pep
VLWVFFQKRCLLLGNKRCRAALFLRHLGSLCFLALLGQKKQRCFKVGIMPPLLFRPGPCVRVEKSPSWSFSTHVKKFFGCVLRLGQWVRPKGFCSCQLPRLGPHGDKPKDFFSLLSPSSQPGGFRQGNSFHLRAFNMISPFSNGPAK

SEQ ID NO: 147026 - protein, 485 aa, Oryza sativa
  Clone ID: PAT_MRT4530_47594C.1.pep
ICNVQSQHRAKLEVKFSLHFEAIIRGQEFGRLQIAWENPVTRRKSIGNMNKWFVNLPSNNHEKILKYWYLLIAYCMRYSSDWRDAREDGTIHECTVLFRVNLLSRENGAELSTLSPLVVVGVRAQPPVCVTDPRDGPTSSLRTNGIYSRSNRARAVCRAVWSADSARMSRRFIAARHRMPGRPTLFVPALAYLYRHVRRRAGSARHRLLVRSDARGNGEGRDADVCRSLSTSSFSCRVSPKEKTIESHIQKVKVNHAMDRSTAIEWNGAVAVAVGHACRSRGARQRVISAVHTKANGWDGESRPFPSQDRDLQRIFVSGRLMIGRECAGPLDTATHRTSVAPYVYQKILYRTSTVHRTRNTSLRVVRNYTWYVEGENDYNHRILRKMIMHINILKITFAYSTCGLCTHCLGIQEASSTQIGPLTGGPVSTRRPSSGPARDAAGCCAVTAHTSAASLESPLLPSHFTDRWGRHNYCHPENVLPPGS

SEQ ID NO: 147027 - protein, 97 aa, Oryza sativa
  Clone ID: PAT_MRT4530_47595C.1.pep
MEKTGISLRVALMAFLYFATSTCDPHAPRGLGKSRFSPSYGSAVRSRHRPKTPLPSAGSTRGGKGNGGKPKEKEGRGINSPDAGRPPLKPPHLHANR

SEQ ID NO: 147028 - protein, 832 aa, Oryza sativa
  Clone ID: PAT_MRT4530_47596C.1.pep
MAATAFTEEEKAVDDSLGYPKAYARLCRGGGGGGGGLPYGHGPPHGFLPYVLHPHEAMRAKDLNEMFPVADAEAAPTANPRGFANLLWKQLDHLGNAGFDPALFRVDAYGNVLYLHADSASPLAWDIDHWFPCARGGRTVPSNLRIVQAQVCRKKHNKLEFLVPWWDLQLGISVNQFLSIFASKNADFRNRAFTFLFVDGASEELTSMQAVEAHAFPHHFSDLTKKVGLAPAAIVSSRGSDSSVLKSLDANRPLRPNYPLIAAKKFTGEKDENFNVPMSNHGPNSTKENNNPDADGYISNPYLSIATARDSLRQREEAKKKQAELTELENEATELKQKNEEERVAIQDMEALLIKRRRRVEKCRRLAEAQSNYKAVLEKMIRDAMHQSVVYKEQLRMNQAATSTLMARLEAQRAMCDSSETELRRKYQQKDELEKQIKPFTDQARKRYRVDDDGLLEERHSLEERHSERVKYFPGIRLRSRNPLKQELRVFLEEDQRASDAYISLEEEEIAGETSTMGNFRNSPFKVINFPRRSMEDNTVDTERGRASVREKLEHLAIKERQRGRRRERTMSSRGSRATSTPVRSRDGNGKGKAAMVQCESETERSQTVSVPRTSSVPPSPPYRVTGMYGTPRYPAEKSVLLKKNNVIHRQGVGRSEGDANMNHTGKGTVDKWLQMLMEDQQQQEDPAAAYHSSEDHNTADEIASDEHQMQSRIDDESCRNEITECSDEIVEVGGDGATEQQDRCRNSFEIKERGEEKKIWFPRSDSSRGFRSLPSSPSKILGMRRGVECMSRKPKVVGDDNGRYGYEDSVSTSSSKFLTRCKQAIKKAVNK

SEQ ID NO: 147029 - protein, 49 aa, Oryza sativa
  Clone ID: PAT_MRT4530_47597C.1.pep
SMAPGFNSPLISTHSNPTHMGGFYCGLFKVGDSPQASVRLFRDFTCRTC

SEQ ID NO: 147030 - protein, 100 aa, Oryza sativa
  unsure (1)..(100): unsure at all Xaa locations
  Clone ID: PAT_MRT4530_47598C.1.pep
ELREEREAAGGQPRPQHLPWRPPQPVEPPRRRQPAHRRRLLALRIRSTIKAAAAPHPARRSSRGGTARIAGLARGASISPDSSTGSEGEPGNRRRCXGES

SEQ ID NO: 147031 - protein, 231 aa, Oryza sativa
  Clone ID: PAT_MRT4530_47599C.1.pep
MASQRLLLLLAVLLLTLLAATTAVVGGHGGDDVAGAEEAKPPDDDGAAAKLDVRARRWPRFPATDGQLVMGESRRKEEYICFPEHLCTCYSFFYDIVGRGEQLCCKHQLAARLAEAVSKHQDIEETSPPLSLCGGCGRAGDGGGGSDPDGVEAAGRTSSPPDPAALWPGRRGGGGPGVASSRSGGMGALGPTGREGGVEAGEGGGCPQCHVALPREESGPRWGGGHSFPKD

SEQ ID NO: 147032 - protein, 98 aa, Oryza sativa
  Clone ID: PAT_MRT4530_4759C.1.pep
VSSLIRHHQALHTLCFRLVCLCGIVTQVLHKCVHTRRTSLWTLITAKALILQTQLLGKAGTAWQVTRSRNSQGATHTQCTDTQDYRMECRYTRDFRVM

SEQ ID NO: 147033 - protein, 450 aa, Oryza sativa
  Clone ID: PAT_MRT4530_475C.1.pep
MESKGGKKKSSSSRSLMYEAPLGYSIEDVRPAGGVKKFQSAAYSNCSDQPAPMGVLSAADPPPVSAIGFEGYEKRLEITFSEAPVFADPDGRGLRALSRAQIDSVLDLARCTIVSELSNKDFDSYVLSESSLFIYSDKIVIKTCGTTKLLLTIPRILELAEGLSMPLAAVKYSRGMFIFPSAQPAPHRSFSEEVAVLNRYFGHLKSGGNAYVIGDPAKPGQKWHIYYATQHPEQPMVTLEMCMTGLDKEKASVFFKTSADGHTSCAKEMTKLSGISDIIPEMEICDFDFEPCGYSMNAIHGSAFSTIHVTPEDGFSYASYEVVGFDASTLAYGDLVKRVLRCFGPSEFSVAVTIFGGHGHAGTWAKELNADAYKCNNMVEQELPCGGLLIYQSFDATEDVPVAVGSPKSVLHCFEAENMVNPAPVKEGKLGNLLPWGEDALEENDGVFDE

SEQ ID NO: 147034 - protein, 234 aa, Oryza sativa
  Clone ID: PAT_MRT4530_47600C.1.pep
MAVQQEDHGSAGWCVDSNVRTDGGRSCDTVWTADSGIDGRWCRSPDEIQHRGAVRECDESVKVPAGDALRTIFGGQPNRLRAKACETKNSSSVEALPQPESPHPDLLTPPPVQAATPHSFHRRIQAPEDSRRQIRAPEDGQRQIHAPEASRKRIPLLLSKHRHCHRRSQSQPSSSPLLPSSWPVADPSIVPLSSLSAGGNGGGIGMEVGKECEGLRDPRMKNHWHPKPPDSQFH

SEQ ID NO: 147035 - protein, 65 aa, Oryza sativa
  unsure (1)..(65): unsure at all Xaa locations
  Clone ID: PAT_MRT4530_47601C.1.pep
LLLTVKLNLLFFRQIQNLNTPMNFYTFLLVLSMKVHKIYEXVYHAPTRHARASYIIQRREVKILS

SEQ ID NO: 147036 - protein, 44 aa, Oryza sativa
  Clone ID: PAT_MRT4530_47602C.1.pep
RWSRRPASPLRHHSGHYARRRQVTRLVVTGANAVLCKVLELKPH

SEQ ID NO: 147037 - protein, 1811 aa, Oryza sativa
  Clone ID: PAT_MRT4530_47603C.1.pep
MPRVYRPDLGVLRPCNPILACGLVAGEVGRWTSSSSSERTTWRKPEVGWMKLNFDGSRNDATGAASIGGAFRDHEGAFVAGYAERMIVGGASSFTAELAALRRGLELAARYGWRRVWAEGDSRAVVDVVHGRAGVRSEEDRRQCGEIAALLPALDGVAVSHLCRDENKVAHGFAKLGHKARRRRVWHVVPPNEVTVCDRSQTGQIADKNDRFVTGLTPVTSSADNRAPTLRLLPAEWRREEALEGVERSATSPPTSDEEGRRDGERRLLVYGDGSTPQGALQAAGALLRHPPVVPDPETPARCWLDDVADLVMTAQQRLGAGGRSSATKASGAATAGSVSSRRRARRAAAVTCRSSAIPSSTPPTQEDVRRGSDARLSIERRRNGRRAAHATEGVSSSGAPLRFGRGGQPPVPPVGGVGCRAFVASLRNVRWPPRFRPTITEKYDGSVNPAEFLQVYTTGIEAAGGDDRVMANFFPMALKGQARGWLMNLPPASGGVRHNRMLEKIASKEPQTTAELFQLADRVARKEEAWTWNSTGSGVAASAAPGSAARSGRRDRRRKKRSAHSDDEGHVLAIEGASRATQKRRPASDKKKEAGGPSRERPTGKWCTVHNTSLHDLADCHAVKSLAERTRKWEEERRQERREGKAPAAPSGNRRSEAKQKAPAEDIDDGDDDLEFQEPGATIATVDGGACAHASRRSLKAMKRELLAAAPTHEATRRARWSEVALTFDQTDHPPCVARGGQIAMVVSPTVCNVKLGRVLIDGAAALNILSPAAFDAIKAPGMVLRPSQPIIGVTPGHTWPLGHIDLPVTFGGSANFRTERVNFDVADLSLPYNAVLGRPALVKFMAAVHYAYLQMKMPGPCGPISVHGDLKVALACMEQRADHLAAASKPEGGNERLSTSVPAAPRQRMIMCDEVPVKEEDALVSFLRANADVFAWRPADMPGVPREVIEHRLAVRPGARPVRQKVRRQAPERQAFIREEVARLLEAGFIREVIHPEWLANPVVVPKANGKLRMCIDYTDLNKACPKDPYPLPRIDQIVDSTAGQIGRNVEAYVDDLVVKTRNQETLLSDLAETFESLRSARIKLNPDKCVFGVPAGKLLGFLVSARGIEANPEKIRAIERMRPPSKLRDVQCEAERAFTQLKAYLSSPPVLVAPEPDEPLLLYLAATPQVVSAALVVERDEDNPHPAHPHPVSTRPGREQGGEAPEPNGGQRPPTAGAGPPPACPTALGAPDPQDGPGATAGRPLLSPSDPEVVGTEAECAPCGLSDEERPGDAAPSEEDRPRRKAHRVTVVTSYPLGQILHNREGTGRVALADFVAEWTPAPEPVSAPEASSGPSQLPHTVNWVMQFDGSLSLQGAGAGVTLTSPSGDVLRYLVRLDFRATNNMAEYEGLLAGLRVAAGLGIRRLLVLGDSQLVVNQVYKEYRCSDPQMDAYVRQVRHMERHFDGIELRHVPRRDNAVADELSRIASSRAQTPPGAFEERLAQPSARPDPLGETDTPERPPRPVGVQASGPEGSVPGSPRLIAWITEIQAYLADKTLPEDREGSERVRRISKRYVLVEGTLYRRAANGVLLKCIPREQGVELLADIHEGECGAHSASRTLVGKAFRQGFYWPTALNDAVDLVRRCRACQFHAKQIHQPAQALQTIPLSWPFAVWGLDILGPFRRAPGGFEYLYVAVDKFTKWPEAYPVIKIDKHSALKFIRGITARFGVPNRIITDKGTQFTSELFGDYCEDMGIKLCFASPAHPRSNGQVERANTEILKGLKTKTFNILKKHGDSWIEELPAVLWANRTTPSRATGETPFFLVYGA

SEQ ID NO: 147038 - protein, 139 aa, Oryza sativa
  Clone ID: PAT_MRT4530_47604C.1.pep
GGAKPTYLKRKPGAPKKTGKKTNKSSRPGGPLNPTQGGISPPKSWQKKGGEDPAQGGAPQTGGLPPPPGGGPPGGGGPPLEGENREGAPPPQMVAKKKQTPGGRGKPPPGPEPGPHKKKGGGPPPPKGGGFPERVSQKL

SEQ ID NO: 147039 - protein, 75 aa, Oryza sativa
  Clone ID: PAT_MRT4530_47605C.1.pep
SRSRKKKKKKKKKKKKGKKKKKKKKKKKKKKKKKKKKKKKKKRAPGGAPGGAPGVNREFRAGPWRGSKFSLWGAD

SEQ ID NO: 147040 - protein, 1911 aa, Oryza sativa
  unsure (1)..(1911): unsure at all Xaa locations
  Clone ID: PAT_MRT4530_47606C.1.pep
MAERAVAHNLSPSASGDDSEQNPRRRARTPPPPSRRSLRREEALEGVERSATSPHAGDGEGRRDGERRLLVYGDGSTPQGALQAAGALLRHPPVVPDPETPTRRWLDDVANLVMTAQQRLGAGGRSSATKATGVATAGSVSSRRRARRAAAVTRRSSAIPSSTPPTQEDVREGPDARLNIERRRNDRRAAHASEGASSSGAPLRSGHGGQPPVSPVGGAGCRAFVASLRNVRWPPRFRPTITEKYDESVNPAEFLQIYTTGIEAAGGDDRVMANFFPMALKGQARDWLMNLPPASVHSWEDLCQQFTMNFQGTYPRPGEEADLHAVQRGDDESLCSYIQRFCQVRNTIPCILAHAVIYAFRGGVRHNRMLEKIASKEPQTTAELFQLADRVARKEEAWTWNSTGSGVAASAAPGSAARSGRRDRRRKKRSAHSDDEGHVLAVEGASRATRKGRPASDKKKEAGAPSRERPTSKWCTVHNTSLHDLADCRAVKSLAERTRKWEEERRQERREGKAPAAPSSNRRSEAKQKAPAENIDDGDDDLGFQEPGATIATVDGGARAHASRRSLKAMKRXLLAAAPTHEATRRARWSEVALTFDQTDHPPCIARGGQIAXDGGAALNILSPAAFDAIKAPGMVLRPSQPIIGVTPGHTWPLGHIDLPVTFGGSANFRTERVNFDVADLSLPYNAVLGRPALVKFMVAVHYAYLQMKMPGPGGPITVHGDLKVALACMEQRADHLAAASKPAGGDERLSTSVPAAPRHRMITCDEVPIKQEDALVSFLRANADVFAWRPADMTGVPREVIEHRLAVRPGARPVRQKVRWQAPERQAFIREEVARLLEARFIQEVIHPEWLANPVVVPKANGKLRMCIDYTDLNKACPKDPYPLPRIDQIVDSTAGCDLLCFLDAYSGYHQIRMAREDEEKTAFITPIGTYCYTTMPFGLKNAGPTFQRTTRISLGSQIGRNVEAYVDDLVVKTRNQETLLSDLAETFESLRTARIKLNPDKCVFGVPAGMLLGFLVSARGIEANPEKIRAIERMRPPXKLRDVQCVTGXAERALTQLKAYLSSPPVLVAPEPDEPLLLYLAGTPQVVSAALVMERDEDDPRFAHPHPVSTRPGREQGGEAPEPNGGPRPPTAGAGPPPACPKVPGAPDPQDGHGATAGRPRLSPSDPEVIGTEAECAPRGLSERDEDDPRSARPHPVSIRPGREQGGEAPEPNGGLRPPTAGAGPPPACPTVLGAPDPQDGPGATAGRPRLSPSDPEVVGTEAECAPRGLSDEERPGNAAPSEEDRPRRKAHQVTVVTSYPLGQILHNREGTGRVVKWAIELSEFDLHFEPRHAVKSQALADFVAEWTPAPEPVSIPEASSGPSQLPHTAYWVMQFDGSLSLQGAGAGVTLTSPSGDVLKYLVRLDFRATNNMAEYEGLLAGLRVAAGLGIRRLLVLGDSQLVVNQVSKEYQCSDPQMDAYVRQVRRMERHFDGIELRHVPRRDNAVADELSRLASSRAQTPPGAFEERLAQPSARPDPLGETDAPERPPRPVRVQASGPEGSAPSSLRLIAWIAEIQAYLADKTLPEDREGSERVQRISKRYVLVEGTLYRHAANGVLLKACQFHAKQTHQPAQALQTIPLSWPFAVWGLDILGPFRRAPGGFEYLYVAIDKFTKWPEAYPVTKIDKHSALKFIRGITARFGVPNRIITDNGTQFTSELFGDYCEDMGIKLCFASPAHPRSNGQVERANAEILKGLKTKTFNILKKHGDSWIEELPAVLWANQTTPSRATGETPFFLVYGAEAVLPSELTLRSPRATMYCEADQDQLRRDDLDYLEERRRRAALRAARYQQSLRRYHQRHVRARSLCIDDLVLRRVQTRAGLSKLSPMWEGPYRVIGVPRPGSVRLATGDGTELPNPWNIKHLRRFYP

SEQ ID NO: 147041 - protein, 1882 aa, Oryza sativa
  Clone ID: PAT_MRT4530_47607C.1.pep
MAERAKAHNLSPSASGDDSEQNPRRRARTPPPPSRRSLRREEALEGVERSVTSPPTSDGEGRRDGERRLLVYGDGSTPQGALQAAGALLRHPPVVPDPETPTRRWLDDVANLVMTAQQRLGTGGRSSATKAAGAATAGSVSSRRRARRAAAVARRSSAIPSSMPLTQEDVREGPDARLNIERRRNDRRAAHASEGTSSSGAPLRSGHGGQPPVSPVGGAGCRAFVASLRNVRWPPRFRPTITEKYDGSVNPAEFLQIYTTGIEAAGGDDRVMANFFPMVLRGQAWGWLINLPPASVHSWEDLCQQFTMNFQGTYPRPGEEADLHAVQRGDDESLRSYIQRFCQVRNTIPCIPAHAVIYAFRGGVRHNRMLEKIASKEPQTTAELFQLADRVAREEEAWTWNSTGSGVAASAAPGSAARSGRRDRRRKKRSAHSDDEGHVLAVEGASRATRKGRPASDKKKEAGAPSREHPTGKWCTVHNTSLHDLADCRAVKSLAERTRKWEEERRQERREGKAPAAPSGNRRSEAKQKAPAEDIDDGDDDLGFQEPGATIATVDGGACAHVSRRSLKAMKRELLAAAPTHEAMRRARWSEVALTFDQTDHPPCIARGGQIAMVVSPTVCNVKLGRVLIDGGAALNILSPTAFDAIKAPGMVLRPSQPIIGVTPGHTWPLGHIDLPVTFGGSANFRTERVNFDVADLSLPYNAVLGRPALVKFMAAVHYAYLQMKMPGPGGPISVHGDLKVALACMEQRADHLAAASKPEGGDERLGTSVPAAPRQRMITCDEVPEDALVSFLRANADVFAWRPADMPGVPREVIEHRLAVRPGARPVRQKVRRQAPERQAFIREEVARLLEAGFIRELIHPEWLANPVVVPKANGKLRMCIDYTDLNKACPKDPYPLPRIDQIVDSTAGCDLLCFLDAYSGYHQIRMAREDEEKTAFITPIGTYCYTTMPFGLKNAGPTFQRTTRISLGSQIRKAKTFESLRTARIKLNPDKCVFGVPAGMLLGFLVSARGIEANPEKVRAIERMRPPSKLRDVQCVTGCMAALSRFISRLGEKALPLFKLLKRSGPFIWTEEAERDLTQLKAYLSSPPVLVAPEPDKPLLLYLAATPQVVSAALVVECDEDDPRSAHPHPVSTRPGREQGGEAPEPNGGPRPPTAGAGPPPACPKVPGAPDPQDGHGATAGRPRLSPSDPEVVGTEAECAPRGLSEHDEDDPRSAHPHLVSTRPGREQGGEAPEPNGGPRPPTAGAGPPPACPTVPGAPDLQDGPGATAGRPRLSPSDPEVVGTEAECAPRGLSDEERPGDAAPSEEDRPRRKVQRPVYFVSEALRDAKTRYPQAQKMLYAILMASRKLRHYFQAHRGTGRVVKWAIELSEFDLRFEPRHAVKSQALADFVAEWTPAPEPISVPEASSGPSQLPHTAYWVMQFDGSLSLQGAGAGVTLTSPSGDVLKYLVRLDFRATNNMAEYEGLLAGLRVAAGLGIRRLLVLGDSQLVVNQVSKEYQCSDPQMDAYVRHVRRMERHFDGIELRHVPRRDNTVADELSRLASSRAQTPPGAFEERLAQPSARPDPLGETDAPERPPRPVGVQASRPEESAPSSLRLIAWIAEIQAYLADKTLPEDREGSERVQRISKRYVLVEGTLYRRAANGVLLKCIPREQGVELLADIHEGECGAHSASRTLVGKAFRQGFYWPTALNDAVDLVRRRAPGWFEYLYVAVDKFTKWPEAYPVIKIDKHSALKFIKGITARFGVPNRIITDNGTQFTSELFGDYCEDMGIKLCFASPAHPRSNGQVERANAEILKGLKTKTFNILKKHGDSWIEELPAVLWANRTTPSRATGETPFFLVYGAEAVLPSELTLRSPRATMYCEADQDQLRRDDLDYLEE

SEQ ID NO: 147042 - protein, 2005 aa, Oryza sativa
  unsure (1)..(2005): unsure at all Xaa locations
  Clone ID: PAT_MRT4530_47608C.1.pep
MAERAKAHNLSPSASGDDSEQNPRRRACTPPPPSRRSLRREEALEGVERSATSPPMSDGEGRRDGERRLLVYGDGSTPQGALQAAGALLRHPPVVPDQETPTRRWLDDVANLVMTAQQRLGAGGRSSATKATGAATAGSVSSRRRARRAAAVARRSSAIPSSMPPTQEDVREGPDARLNIERRRNDRRAAHASEGASSSGAPLRSGHGGQPPVSPVGGAGCRDFVASLQNVRWPPRFRPTITEKYDGSVNPAEFLQIYTTGIEAAGGDDRVMANFFPMALRGQARGWLMNLPPASVHSWEDLCQQFTMNFQGTYPRPGEEADLHAVQRGDDESLRSYIQRFCQVRNTIPCIPAHAVIYAFRGGVRHNRMLEKIASKEPQTTAELFQLADRVARKEEAWTWNSTGSGVAASAAPGSAARSGRRDRRRKKRSAHSDDEGHVLAVEGASRATRKGRPASDKKKEAGAPSRERPTGKWCTVHNTSLHDLADCRAVKSLAERTRKWEEERRQERREGKAPAAPSGNRRXPGATIATVDGXACAHVSRRSLKAMKRELLAAAPTHEAMRRAWWSEVALTFDQTDHPPCVARGGQIAMVVSPTVCNVKLGRVLIDGRAALNILSPTAFDAIKAPGMVLRPSQPIIGVTPGHTWPLGHIDLPVTFGGSANFRTERVNFDVADLSLPYNAVLGRPALVKFMAAVHYAYLQMKMPGPGGPISVHGDLKVALACMEQRADHLAAASKPEGGDERLGTSVPAAPRQRMITCDEVPEDALVSFLRANADVFAWRPADMPGVPREVIEHRLAVRPGARPVRQKVRWQASERQAFIREEVARLLEAGFIREVIHPEWLANPVVVPKANGKVRMCIDYTDLNKACPKDPYPLPRIDQIVDSTAGCDLLCFLDAYSGYHQICMAREDEEKTAFITPIGTYCYTTMPFGLKNAGPTFQRTTRISLGSQIGRNVEAYVDDLVVKTRNQETLLSDLAETFESLRTARIKLNPDKCVFGVPAGKLLGFLVSARGIEANPEKVRAIERMRPPSKLRDVQCVTGCMAALSRFISRLGEKALPLFKLLKRSGPFIWTEEAERALTQLKAYLSSPPVLVAPEPDEPLLLYLAATPQVVSAALVVERDEDDPRSAHPHPVSTRPGREQGGEAPEPNGGPRPPTAGAGPPPACPKVPGAPDPRDGHGATAGRPRLSPSDPEVVSTEAECAPRGLSERDEDDPRSAHPHPVSTRPGREQGGEAPEPNGGPRPPTTGAGPPPACPTVPGAPDPQDGPGATAGRPRLSPSDPEVVGTEAECAPRGLSDEERPGDAAPSEEDRPRRKVQRPVYFVSEALRDAKTRYPQAQKMLYAILMASRKLRHYFQAHRVTVVTSYPLGQILYNREGTGRVVKWAIELSEFDLRFEPRHAVKSQALADFVAEWTPAAEPISVPEASSGPSQLPHTAYWVMQFDGSLSLQGAGAGVTLTSPSGDVLKYLVRLDFRATNNMAEYEGLLAGLRVAAGLGIRRLLVLGDSQLVVNQVSKEYQCSDPQMDAYVRRVRRMERHFDGIELRHVPRRDNTVADELSRLASSRAQTPPGAFEERLAQPSARPDLLGETDAPERPPRPVGVQASGPEGSDPSSLRLIAWIAEIQAYLADKTLPEDREGSERVQRISKRYVLVEGTLYRRAANGVLLKCIPREQGVELLADIHEGECGAHSASRTLVGKAFRQGFYWPTALNDAVDLVRRCRACQFHAKQTHQPAQALQTIPLSWPFAVRGLDILGPFRWAPGGFEYLYVAIDKFTKWPEAYPVIKIDKHSALKFIKGITARFGVPNRIITDNGTQFTSELFGDYCEDMGIKLCFASPAHPRSNGQVERANAEILKGLKTKTFNILKKHGDSWIEELPAAVLPSELTLRSPRATMYCEADQDHLRRDDLDYLEERRRRAALRAARYQQSLRRYHQRHVRARSLCVDDLVLRRVQTRAGLSKLSPMWEGPYRVIGVPRPGSVRLATGDGTELPNPWNIKHLRRFYP

SEQ ID NO: 147043 - protein, 89 aa, Oryza sativa
  Clone ID: PAT_MRT4530_47609C.1.pep
AIRFSGLEAAPVDKTFDPALIFLPLVPTFFLGSPSLFFYPLNKPSFAFFSVGVFRTMLVGSPPNLDGSPFRRGLPPCTPAPSPNGGPAF

SEQ ID NO: 147044 - protein, 237 aa, Oryza sativa
  unsure (1)..(237): unsure at all Xaa locations
  Clone ID: PAT_MRT4530_4760C.1.pep
YTGQGGNVMQVKKKGEELKEPEDQKLITGNLALATSIEKQTPVRVIRGKHKSTHDKSKGGNYVYDGLYLVEKYWQQVGSHGMNVFKFQLMRIPGQPELSWVEVKKSKSKYREGLCKLDISEGKEQSPISAVNEIDDEKPPLFTYTVKLIYPDWCRPVPPKSCCCTTRCTEAEARVCACVEKNGGEIPYNFDGAIVGAKPTIYECGPLCXCPSSCYLRVTQHGIKLPLEIFKTKSRSW

SEQ ID NO: 147045 - protein, 190 aa, Oryza sativa
  Clone ID: PAT_MRT4530_47610C.1.pep
MAQQQRMVIVGEEHCGGGEDRELTVRKTTLFCPGDGLEAYDHGTGTLAFRVETYGRGGKPLFSARRSSILGVGSGAAAVLVDLLAPGAAGEFRVDGSFPRRCCRVVAVKAAAPAGGGGEEEEEEVVVAEVRRKVDEDAHVVMGRDVFVLWLRAGFDAAFAMGIVLVLDRITGDELNGDLSEDLAVASSPV

SEQ ID NO: 147046 - protein, 1721 aa, Oryza sativa
  Clone ID: PAT_MRT4530_47611C.1.pep
MTAQQHLGAGGRSSATKASGAATAGSVSSRRRARRVAAVTRRSSAIPSLTPPTQEDVRRGLDARLSIERRRNGRHAAHATEGASSFGAPLRFGRGGQPPVPPIGGVGCRAFVASLRNVRWPPRFRPTITEKYDGSVNPAEFLQVYTTGIEAAGGDDRVMANFFPMALKGQARGWLMNLPPTSVHSWEDLCQQFTMNFQGTYPRPGEEADLHAVQRRDDESLRSYIQRFCQVRNTIPCIPAHAVIYAFRGDVRHNRMLEKIASKEPQTTAELFQLADRVARKEEAWIWNSTGSGVAASAAPGSAARSGRRDRRRKKRSAHSDDEGHVLAVEGASRATRKGRPASDKKKEAGAPSRERPTGKWCTVHNTSLHDLADCRAVKSLAERTRKWEEERRQERREGKAPAAPSGNRRSEAKQKAPAEDIDDGDDDLGFQEPGATIATVDGGACAHASRRSLKAMKRELLAAAPTHEATRRARWSEVALTFDQTDHPPCVARGGQIAMVVSPTVCNVKLGRVLIDGGAALNILSPAAFDAIKAPGMVLRPSQPIVGVTPGHTWPLGHIDLLVTFGGSANFRTERVNFDVADLSLPYNAVLGRPALVKFMVAVHYAYLQMKMPGLGGPISVHGDLKVALACMEQRADHLAAASKPEGGNERLSTSVPAAPRQRMIMCDEVPRPADMPGVPREVIEHRLAVRPGARPVRQKVRRQAPERQAFIREEVARLLEAGFIREVIHPEWLANPVVVPKANGKLRMCIDYTDLNKACPKDPYPLPRIDQIVDSTAGCDLLCFLDAYSGYHQIRMAREDEEKTAFITPIGTYCYTIMPFGLKNAGPTFQRTTRISLGSQIGCNVEAYVDDLVVKTRNQETLLSDLAETFESLRSARIKLNPDKCVFGVPAGKLLGFLVSARGIEANPEKIRAIERMRPPSKLRDVQCVTGCMAALSRFISRLGEKALHLFKLLKHSGPFIWTEKAERAFTQLKAYLSSPPVLVAPEPDEPLLLYLAATPQVVSAALVVERDEDNPHPAHPHPVSTRPRREQGREAPEPNGGPRPPTAGAGPPPACPTVPGAPDPQDGPGATAGRPRLSPSDPEVVGTEAECAPRGLSNEERLGDAAPSEEDRPRRKVQRPVYFVSEALRDSKTRYPQAQKMLYAILMASRKLRHYFQAHRVTVVTSYPLGQILHNREGTGRVVKWAIELSEFDLHFEPRHAIKSQALADFVAEWTPTPEPISVPEASSGPSQLPHTAYWVMQFDGSLSLQGAGAGVTLTSPNGDVLRYLVRLDFRATNNMAEYEGLLAGLRVAAGLGIRRLLVLGDSQLVVNQAYLTDKTLPEDCEGSERIQRISKRYVLVEGTLYRRAANGVLMKCIPREQGVELLADIHEGECGAYSASRTLVGKAFRQGFYWPTALNDAVDLVRRCRACQFHTKQTHQPAQALQTIPLSWPFAVWVLDILGPFRRAPGGFEYLYVAVDKFTKWPEAYPVIKIDKHSALKFIRGITARFGVPNSIITDNGTQFTSELFGDYCEDMGIKLCFASPAHPRSNGQVERANAEILKGLKTKTFNILKKHGDSWIEELPAVLWANRTTPSRATGETPFFLVYGAEAVLPSELTLRSPRATMYCEADQDQLRRDDLDYLEERRRRAALRAARYQQSLRRYHQRHVRARSLCVDDLVLRHVQTRAGLSKLSPMWEGPYRVIGVPRLGSVRLATGDGTELPNPWNIEHLRRFYP

SEQ ID NO: 147047 - protein, 237 aa, Oryza sativa
  unsure (1)..(237): unsure at all Xaa locations
  Clone ID: PAT_MRT4530_47612C.1.pep
MAQQQRMVIVGEEHCGGGEDRELTVRKTTLFCPGDGLEAYDHGTGTLAFRVETYGRGGVCGGGAAAGDLALLGPEGEPVLTVRRRRPSLHHRWDGFLGDGXASGQKPLFFRRRSFILGGGSGAAAVLVDLLGPGAAGEFRVDGSFPRRCCRVVAVKAAAPPGGGGEEEEEKVVVAEVRRKVDEDAHVVMGRDVFVLWLRAGFDAAFAMGIVLVLDRITGDELNGDLSEDLAVASSPV

SEQ ID NO: 147048 - protein, 1670 aa, Oryza sativa
  Clone ID: PAT_MRT4530_47613C.1.pep
MTAQQRLGAGGRSSATKASGAATAGSVSSRRRARRAAAVGGVGCRAFVASLRNVRWPPRFRPTITEKYDGSVNPAEFLQVYTTGIEAAGGDDRVMANFFPMALKGQARGWLMNLPPASVHSWEDLCQQFTMNFQGTYPRPGKEADLHAVQRRDNESLRSYIQRSCQVRNTIPCIPAHAVIYAFRGGVRHNRMLEKIASKEPQTTAELFQLADRVARKEEAWTWNSTGFGVATSAAPGSAARSGRRDRRRKKRSAHSDDEGHVLAVKGASRATRKGRPASDKKKEAGAPSRERPTGKWCTVHNTSLHDLTNCRAVKSLAERTRKWEEERRQERREGKAPAAPSSNRRSEAKQKAPAEDIDDGDDDLGFQEPGATIATVDGGACAHASRRSLKAMKRELLAAAHTHEATRRARWSEVALTFDQTDHPPCVARGGQIAMVVSPTVCNVKLGRVLIDGGAALNILSPTAFDAIKVLGMVLRPSQPIIGVTPGHTWPLGHIDLPVTFGGSANFRTERVNFDVADLSLPYNAVLGRPALVKFMAAVHYAYLQMKMPGPGGPISVHGDLKVALACMEQRADHLAAASKPEGGNERLSTSVPAAPRQRMITCDEVPEDALVSFLRANADVFAWRPADMPGVPREVIEHHLAVRPGARPVQQKVRRQAPERQAFIREEVARLLEAGFIRVVIHPEWLANPVVVPKANGKLRMCIDYTDLNKACPKDPYPLPRIDQIVDSTTGCDLLCFLDAYSGYHQIRMAREDEEKTAFITPIGTYCYTTMPFGLKNAGIEANPEKIRAIERMRPPSKLRDVQCVTGCMAALSRFISRLGEKALPLFKLLKCSGPFIWTEEAERAFTQLKAYLSSPPVLVAPEPDEPLLLYLAATPQVVSAALVVERDEDNPHLAHPHPVSTRPGREQGGEAPEPNGGPRPPTAGAGPPPACPTVPGAPDPQDGPGATAGRPRLSPSDPEVVGIEAECAPRGLSDEERPGDAAPSEEDRPRRKVQRPVYFVSEALRDAKTRYPQAQKMLYAVLMASRKLRHYFQVHRVTVVTSYPLGQILHNREDTGRVVKWAIELFEFDLHFEPRHAIKSQALADFVAEWTPAPEPISVPETSSGPSQLPHTAYWVMQFDGSLSLQGAGAGVTLTSPNGDVLRYLVRLDFRATNNMAEYEGLLAGLRVAAGLGIRCLLVLGDSQLVVNQVCKEYRCSDPQMDAYVRQVRRMERHFDGIELWHVPRRDNAVADELSRLASSRAQTPPGAFEERLAQPSARPDPLGETDAPERPPRPVGVQASGPEGSVPGSPRLIAWITEIQAYLTDKTLPEDREGSERVQRISKRYVLVEGTLYRRAANGVLLKCIPREQGVELLADIHEGECGAHSASRTLVGKAFRQGFYWPTALNDAVDLVRRRAPGGFEYLYVAVDKFTKWPEAYPVIKIDKHSALKFIRGITARFGVPNRIITDNGTQFTSELFGDYCEDMGIKLCFASPAHSRSNGQVERANAEILKGPKTKTFNILKKHGDSWIEELPAVLWANRTTPSRATGETPFFLVYGAEAVLPSELTLRSPRATMYCEADQDQLRRDDLDYLEERRRRAALRAARYQQSLRRYHQRHVRARSLCVDDLVLRRVQTRAGLSKLSPMWEGPYRVIGVPRPGSVRLATGDGTELPNQWNIEHLRRFYP

SEQ ID NO: 147049 - protein, 1701 aa, Oryza sativa
  Clone ID: PAT_MRT4530_47614C.1.pep
MPPTQEDVREGPDARLNIERRRNDRRAAHASEGASSSGAPLRSGHGGQPPVSPVGVAGCRAFVASLRNVRWPPRFWPTITEKYDGSVNPAEFLQIYTTGIEAAGGDDRVMANFFPMALRGQARGWLMNLPPASVHSWEDLCQQFTMNFQGTYPRPGEEADLHAVQRGDDESLRSYIQRFCQVRNTIPCIPAHAVIYAFRGGVRHNRVLEKIASKEPQTTAELFQLADRVARKEEAWTWNSTGSGVAASAAPGSAARSGRRDRRRKKRSAHSDDEGHVLAVEGASRATRKGRPASDKKKEAGAPSRERPTGKWCTVHNTSLHDLADCRAVKSLAERTRKWEEERRQERREGKAPAAPSGNRRSEAKQKAPAEDIDDGDDDLGFQEPGATIATVDGGACAHVSRRSLKAMKRELLAAAPTHEAMRQARWSEVALTFDQTDHPPCVARGGQIAMVVSPTVCNVKLGRVLIDGGAALNILSPTAFDAIKAPGMVLRPSQPIIGVTPGHTWPLGHIDLPVTFGGSANFRTERVNFDVADLSLPYNAVLGRPALVKFMAAVHYAYLQMKMPGPGGPISVHGDLKVALACMEQRADHLAAASKPEGGDERLGTSVPAAPRQRMITCDEVPVKVALGDGPSKTTRIGGPTFQCTTRISLGSQIGRNVEAYVDDLVVKTRNQETLLSDLAETFESLRTACIKLNPDKCVFGVPAGKLLGFLVSARGIEANPEKVRAIERMRPPSKLRDVQCVTGCMTALSRFISRLGEKALPLFKLLKRSGPFIWTEEAERALTQLKAYLSSPPVLVAPEPDEPLLLYLAATPQVVSAALVVERDEDDPRSAHPHPVSTRPGREQGGEAPEPNGGPRPPTAGAGPPPACPKVPGAPDPQYGHGATAGRPRLSPSDPEVVGTEAECAPRGLSERDEDDPRSAHPHPVSTRPGREQGGEAPEPNGGPRPPTIGAGPPPACPTVPGAPDPQDGPGATAGRPRLSPSDPEVVGTEAECAPRGLSDEKRPGDAAPSEEDRPRRKVQRPVYFVSEALRDAKTRYPQAQKMLYAIMMASRKLRHYFQAHRVTVVTSYPLGQILHNREGTGRVVKWAIELSEFDLRFEPRHAVKSQALADFVAEWTPAPEPICVPEASSGPSQLPHTAYWVMQFDGSLSLQGAGAGVTLTSPSGDVLKYLVRLDFRATNNMAEYEGLLAGLRMAAGLGIRRLLVLGDSQLVVNQVSKEYQCSDPQMDAYVRHRAQTPPGAFEERLAQPSARPDPLGETDAPERPPRPVGVQASGPEGSAPSSLRLIAWIAEIQAYLADKTLPEDREGSERVQRISKRYVLVEGTLYQRAANEVLLKCIPREQGVELLADIHEGECGAHSASRTLVGKAFRQGFYWPTALNDAVDLVRQCRACQFHAKQTHQPAQALQTIPLSWPFAVWGLDILGPFRRAPGGFEYLYVAIDKFTKWPEAYPVIKIDKHSALKFIKGITARFGVPNRIITDNGTQFTSELFGDYCEDMGIKLCFASPAHPRSNGQVERAKAEILKGLKTKTFNILKKHGDSWIEELPAVLWANRTTPSRATGETPFFLVYGAEAVLPSELTLRSPRATMYCEADQDQLRRDDLDYLEERRRRAALRAARYQQSLRRYHQRHVRARSLCVDDLVLRRVQTRAGLSKLSPMWEGPYRVIGVPRPGSVRLATGDGTELPNPWNIKHLRRFYP

SEQ ID NO: 147050 - protein, 118 aa, Oryza sativa
  unsure (1)..(118): unsure at all Xaa locations
  Clone ID: PAT_MRT4530_47615C.1.pep
MPARGEPLPPPFRLYISPSRPATDLPGCASLGNTRGRCRRGRSSTGASAPLLSLLSVXLGWKRRRSRRRKEEEEREKKKKRQRTDRVYYILDGNLWYFKDQIIRLPISHLFALEQGKL

SEQ ID NO: 147051 - protein, 1904 aa, Oryza sativa
  unsure (1)..(1904): unsure at all Xaa locations
  Clone ID: PAT_MRT4530_47616C.1.pep
MAERAKAHNLSPSASGDDSEQNPRRRACTPPPPSRRSLRREEALEGVERSATSPPMSDGEGRRDGERRLLVYGDGSTPQGALQAAGALLRHPPVVPDQETPTRRWLDDVANLVMTAQQRLGAGGRSSATKATGAATAGSVSSRRRARRAAAVARRSSAIPSSMPPTQEDVREGPDARLNIERRRNDRRAAHASEGASSSGAPLRSGHGGQPPVSPVGGAGCRDFVASLQNVRWPPRFRPTITEKYDGSVNPAEFLQIYTTGIEAAGGDDRVMANFFPMALRGQARGWLMNLPPASVHSWEDLCQQFTMNFQGTYPRPGEEADLHAVQRGDDESLRSYIQRFCQVRNTIPCIPAHAVIYAFRGGVRHNRMLEKIASKEPQTTAELFQLADRVARKEEAWTWNSTGSGVAASAAPGSAARSGRRDRRRKKRSAHSDDEGHVLAVEGASRATRKGRPASDKKKEAGAPSRERPTGKWCTVHNTSLHDLADCRAVKSLAERTRKWEEERRQERREGKAPAAPSGNRRSEAKQKVPAEDIDDGNDDLXGFQEPGATIATVDGXACAHVSRRSLKAMKRELLAAAPTHEAMRRAWWSEVALTFDQTDHPPCVARGGQIAMVVSPTVCNVKLGRVLIDGRAALNILSPTAFDAIKAPGMVLRPSQPIIGVTPGHTWPLGHIDLPVTFGGSANFRTERVNFDVADLSLPYNAVLGRPALVKFMAAVHYAYLQMKMPGPGGPISVHGDLKVALACMEQRADHLAAASKPEGGDERLGTSVPAAPRQRMITCDEVPEDALVSFLRANADVFAWRPADMPGVPREVIEHRLAVRPGARPVRQKVRWQASERQAFIREEVARLLEAGFIREVIHPEWLANPVVVPKANGKVRMCIDYTDLNKACPKDPYPLPRIDQIVDSTAGCDLLCFLDAYSGYHQICMAREDEEKTAFITPIGTYCYTTMPFGLKNAGPTFQRTTRISLGSQIGRNVEAYVDDLVVKTRNQETLLSDLAETFESLRTARIKLNPDKCVFGVPAGKLLGFLVSARGIEANPEKVRAIERMRPPSKLRDVQCVTGCMAALSRFISRLGEKALPLFKLLKRSGPFIWTEEAERALTQLKAYLSSPPVLVAPEPDEPLLLYLAATPQVVSAALVVERDEDDPRSAHPHPVSTRPGREQGGEAPEPNGGPRPPTAGAGPPPACPKVPGAPDPRDGHGATAGRPRLSPSDPEVVSTEAECAPRGLSERDEDDPRSAHPHPVSTRPGREQGGEAPEPNGGPRPPTTGAGPPPACPTVPGAPDPQDGPGATAGRPRLSPSDPEVVGTEAECAPRGLSDEERPGDAAPSEEDRPRRKVQRPVYFVSEALRDAKTRYPQAQKMLYAILMASRKLRHYFQAHRVTVVTSYPLGQILYNREGTGRVVKWAIELSEFDLRFEPRHAVKSQALADFVAEWTPAAEPISVPEASSGPSQLPHTAYWVMQFDGSLSLQGAGAGVTLTSPSGDVLKYLVRLDFRATNNMAEYEGLLAGLRVAAGLGIRRLLVLGDSQLVVNQVSKEYQCSDPQMDAYVRRVRRMERHFDGIELRHVPRRDNTVADELSRLASSRAQTPPGAFEERLAQPSARPDLLGETDAPERPPRPVGVQASGPEGSDPSSLRLIAWIAEIQAYLADKTLPEDREGSERVQRISKRYVLVEGTLYRRAANGVLLKCIPREQGVELLADIHEGECGAHSASRTLVGKAFRQGFYWPTALNDAVDLVRRCRACQFHAKQTHQPAQALQTIPLSWPFAVRGLDILGPFRWAPGGFEYLYVAIDKFTKWPEAYPVIKIDKHSALKFIKGITARFGVPNRIITDNGTQFTSELFGDYCEDMGIKLCFASPAHPRSNGQVERANAEILKGLKTKTFNILKKHGDSWIEELPAVL

SEQ ID NO: 147052 - protein, 77 aa, Oryza sativa
  unsure (1)..(77): unsure at all Xaa locations
  Clone ID: PAT_MRT4530_47617C.1.pep
YSTGILDGSDETNFNKTTSTGKIFSSXEVGSPLVRRGESDXLDNRTPRPTQLHHACPRHRCLGNGRACSRTDETTTT

SEQ ID NO: 147053 - protein, 1596 aa, Oryza sativa
  unsure (1)..(1596): unsure at all Xaa locations
  Clone ID: PAT_MRT4530_47618C.1.pep
MAERAKAHNLSPSASGDDSEQNPRRRACTPPPPSRRSLRREEALEGVERSATSPPMSDGEGRRDGERRLLVYGDGSTPQGALQAAGALLRHPPVVPDQETPTRRWLDDVANLVMTAQQRLGAGGRSSATKATGAATAGSVSSRRRARRAAAVARRSSAIPSSMPPTQEDVREGPDARLNIERRRNDRRAAHASEGASSSGAPLRSGHGGQPPVSPVGGAGCRDFVASLQNVRWPPRFRPTITEKYDGSVNPAEFLQIYTTGIEAAGGDDRVMANFFPMALRGQARGWLMNLPPASVHSWEDLCQQFTMNFQGTYPRPGEEADLHAVQRGDDESLRSYIQRFCQVRNTIPCIPAHAVIYAFRGGVRHNRMLEKIASKEPQTTAELFQLADRVARKEEAWTWNSTGSGVAASAAPGSAARSGRRDRRRKKRSAHSDDEGHVLAVEGASRATRKGRPASDKKKEAGAPSXSARPASGAPCTTPPSTTSRTAXAVKSLAERTRKWEEERRQERREGKAPAAPSGNRRXPGATIATVDGXACAHVSRRSLKAMKRELLAAAPTHEAMRRAWWSEVALTFDQTDHPPCVARGGQIAMVVSPTVCNVKLGRVLIDGRAALNILSPTAFDAIKAPGMVLRPSQPIIGVTPGHTWPLGHIDLPVTFGGSANFRTERVNFDVADLSLPYNAVLGRPALVKFMAAVHYAYLQMKMPGPGGPISVHGDLKVALACMEQRADHLAAASKPEGGDERLGTSVPAAPRQRMITCDEVPVKEVALGDGPSKTTRIGGPTFQRTTRISLGSQIGRNVEAYVDDLVVKTRNQETLLSDLAETFESLRTARIKLNPDKCVFGVPAGKLLGFLVSARGIEANPEKVRAIERMRPPSKLRDVQCVTGCMAALSRFISRLGEKALPLFKLLKRSGPFIWTEEAERALTQLKAYLSSPPVLVAPEPDEPLLLYLAATPQVVSAALVVERDEDDPRSAHPHPVSTRPGREQGGEAPEPNGGPRPPTTGAGPPPACPTVPGAPDPQDGPGATAGRPRLSPSDPEVVGTEAECAPRGLSDEERPGDAAPSEEDRPRRKAHRVTVVTSYPLGQILYNREGTGRVVKWAIELSEFDLRFEPRHAVKSQALADFVAEWTPAAEPISVPEASSGPSQLPHTAYWVMQFDGSLSLQGAGAGVTLTSPSGDVLKYLVRLDFRATNNMAEYEGLLAGLRVAAGLGIRRLLVLGDSQLVVNQVSKEYQCSDPQMDAYVRRVRRMERHFDGIELRHVPRRDNTVADELSRLASSRAQTPPGAFEERLAQPSARPDLLGETDAPERPPRPVGVQASGPEGSDPSSLRLIAWIAEIQAYLADKTLPEDREGSERVQRISKRYVLVEGTLYRRAANGVLLKCIPREQGVELLADIHEGECGAHSASRTLVGKAFRQGFYWPTALNDAVDLVRRCRACQFHAKQTHQPAQALQTIPLSWPFAVRGLDILGPFRWAPGGFEYLYVAIDKFTKWPEAYPVIKIDKHSALKFIKGITARFGVPNRIITDNGTQFTSELFGDYCEDMGIKLCFASPAHPRSNGQVERANAEILKGLKTKTFNILKKHGDSWIEELPAVL

SEQ ID NO: 147054 - protein, 185 aa, Oryza sativa
  Clone ID: PAT_MRT4530_47619C.1.pep
MFQNPPLKPKPAVQYNITRMATTRPARSDPHLPPEEAARVEAEVRGYFDSMAPRRPSKPPRSDPSDAGEGGAEADADADLPELRRLRDLEAKPQKLVLDGGDVNGEEYVETQYYNGLNCIDKQHHTTGTGFIKVERPNGSSFNVTTVAYSSDSIIRCMSNPATNDWIPSSETVIPVSNKPSRSDS

SEQ ID NO: 147055 - protein, 74 aa, Oryza sativa
  Clone ID: PAT_MRT4530_4761C.1.pep
LSSQNIKNLAYMPMIDRSIVYLHCVRRNPPSVYFTNYLINKNLKDGLYNGPNNSIVVHCRRLFHFFMPCIASFC

SEQ ID NO: 147056 - protein, 80 aa, Oryza sativa
  Clone ID: PAT_MRT4530_47620C.1.pep
MFRSIVRSFDIFYVYIFFIKKLLSFLFLFYTFILLIYYIFFYFYHFFYISLFFYFSIFFYFLILTYIYIFFLFFLFFYSL

SEQ ID NO: 147057 - protein, 174 aa, Oryza sativa
  Clone ID: PAT_MRT4530_47621C.1.pep
MAGFALQQEGDQTLRLMPLSRLLSDRLPRSSLLYASRPQPPCPVVQSAALEQRRSRRLPGSPCLTAVLLQAPRPPAGHRARRSPRRRALAWPWSSVLVPQSSAYYLRGFRGGEGVGEIIGTRRYLMRDWARHERDSAFGAVPRFRASMKIGAGKLPPGGGFGATDTEGTFGFSE

SEQ ID NO: 147058 - protein, 148 aa, Oryza sativa
  unsure (1)..(148): unsure at all Xaa locations
  Clone ID: PAT_MRT4530_47622C.1.pep
XVLXSXFXAXXHRPXXFSXFCWSMFASMXCLQXLLXXQXXERMMNQLXGXKNXLXEKXXXXXTSXGXPVPXSTLSGSFXHXTXPXVXTXSXLGKNPGXXXTLNSXXXHHXPFXPSXXXSXCXXXIPDRXFXTXFXAXPSLCXXXGXXC

SEQ ID NO: 147059 - protein, 49 aa, Oryza sativa
  unsure (1)..(49): unsure at all Xaa locations
  Clone ID: PAT_MRT4530_47623C.1.pep
MYMKVKGNMFKNKXVLMESIHKXKAEKAXXKTLSDQFXAKLAKSKASRE

SEQ ID NO: 147060 - protein, 522 aa, Oryza sativa
  Clone ID: PAT_MRT4530_47624C.1.pep
MGCCGSSLRVGSHAPEKPPRRARPPPPPPQPHHPRRPSFTLNAHQAAASSSAASAAPAPAFAEFSLAELREATGGFAAANIVSESGEKAPNLVYRGRLQGAGGGGRAIAVKKFGKLAWPDPKQFAEEARGVGKLRHRRMANLIGYCCDGDERLLVAEFMPNDTLAKHLFHWENKAIEWAMRLRVAYNIAEALEYCSNEERPLYHDLNAYRVLFDENGDPRLSCFGLMKNSRDGKSYSTNLAYTPPEYLRNGRVTLESVVFSFGTILIDLLSGKRIPPTLALDMIRSRSIQAIMETNLEGKYSIEEATTLVDLASKCLQYEPRDRPDIKKLVSILQPLQTKSEVPSYVMLGVPKPEEVPKAPPAPQHPLSPMGEACSRMDLTAIHQILVSTHYRDDEGTNELSFQEWTQQMRDMLDARKRGDFAFRDKNFKQAIDCYTQFVDVGTMVSPTVYARRSLCHLMCDQPDAALRDAMQAQCVYPDWPTAFYMQAVALSKLNMQSDSLDMLNEASQLEEKRQKSIKGP

SEQ ID NO: 147061 - protein, 500 aa, Oryza sativa
  Clone ID: PAT_MRT4530_47625C.1.pep
MNLLSLMFVGVKKKKKKKKKKKKKNFMKEPAQVRTARGGAADGVEVGVEEEEEPPRSATVKQEEANAVLGAEGSRPFAMRELKEDHEVAAGSGVKAASGERNGIGSADAQGSSYSQESMQQFSSHHDVAMDLINSVTGVDEEGRSRQRILSFAAKRYISAIERNHDDPDAYYNWALVLQESADNVDPNSSSSKDALLEEACKKYAEATRLCPTLYDAYYNWAIAIADRAKMRGRTKEAEELWKQAILNYEKAVQLNWNSPQALNNWGLGLQLGELSAIVPAREKQTIIKTAISKFRAAIQLQFDFHRAIYNLGTVLYGLAEDTMRSGKPGVSASEFYSQSAIYVAAAHALKPNYSVYRSALRLVRSMLPLPYLKVGYLIAPPENSAIAPHKEWERSQFVLNHEELQQVNASDQPPSQSPGHVDSGRKLFRIVVADIVSVSACADLTLPPGAGLRIDTIHGPRFLVADNWETIDSWLDAIRLVYTIFARGRSDVLAGIITG

SEQ ID NO: 147062 - protein, 35 aa, Oryza sativa
  Clone ID: PAT_MRT4530_47626C.1.pep
MSDKCGNCDCADKSQSVKTGTSYGVGILEADMSHF

SEQ ID NO: 147063 - protein, 79 aa, Oryza sativa
  Clone ID: PAT_MRT4530_47627C.1.pep
LSWAPPLSKLFPSFPFSAKTWHPPGCKPKSSSRHQKMVGAGKKYFPHIVLAFPTIFFGFSLKRGPFKFIPLSFRTSVKY

SEQ ID NO: 147064 - protein, 60 aa, Oryza sativa
  unsure (1)..(60): unsure at all Xaa locations
  Clone ID: PAT_MRT4530_47628C.1.pep
XECNXRLPSLAPCLXXEFXRSVNSQVGXTHXXCNGAAGRXRKLNLXGLGNWTLXIXCHHR

SEQ ID NO: 147065 - protein, 101 aa, Oryza sativa
  unsure (1)..(101): unsure at all Xaa locations
  Clone ID: PAT_MRT4530_47629C.1.pep
MGGSKAEEKPAGGGGGGEDWWCYQFGNKDALIVKSSKKSPLALRMVVFAMTMICGIFICTMCMKQLGSDSLSRIVKNEVAEQLCNKSAILHXKGHFVHYPQ

SEQ ID NO: 147066 - protein, 278 aa, Oryza sativa
  unsure (1)..(278): unsure at all Xaa locations
  Clone ID: PAT_MRT4530_4762C.1.pep
KKKFIASAEGRGRADRVHGGGTHEAASRSTVDRVHPGSHRPAPWVPRVSRTXGCGRLMAGPHAAATRRARGRPSRRSRREAARLRPDGRRRRPLARRSGGRERGXGKGEKKRRSPAHSRSTATTKKAAGAEEGGGAARVDGVDGAPPVDERNGGVDEVGESRRXAAPRWEVVQGDDGGGPVLGGDGGERERRRELDSGEEEGRREAETNGGGRGRGGGSGGRKGMTGGPHPSARVAGGPARQRRSCGERPDGPRGEEREGEGDGPSRPKREREGKGTF

SEQ ID NO: 147067 - protein, 871 aa, Oryza sativa
  Clone ID: PAT_MRT4530_47630C.1.pep
MSTSPTAANHLLALLRRNAASPAVALRLFLHLTSAASPPSPHSTSFLARILAAAAAHDAALLPSLLRHLLSLPDPAPHLLALLSSSSSPLRLPLGFSLSAFRSLCALPSAPPPPTPVYNRLLLAALQEARFDLVESLYKDLLLSGAAPDVFTRNILLQALCAAGRMELARRVFDAMPERNEFSFGILARGYCRAGRSMDALGVLDSMPTMNLVVCNTVVAGFCREGQVDEAERLVERMRDEGLAPNVVTFNARISALCKAGRVLDAYRIFNDMQEKWERGLPRPDQVTFDVMLSGFCEAGMVDEARVLVDIMRCGGFLRRVESYNRWLSGLVRNGMVGEAQELLREMAHEGVQPNSYTYNIIVDGLCKEGKAFDVRKVEDFVKSGVMTPDVVTYTSLLHAYCSEGNAAAANRILDEMAQKGCAPNSFTYNVLLQSLWKAGRITEAERLLERMSEKGYSLDTASCNIIIDGLCRNNKLDMAMDIVDGMWNEGSLALGRLGYSFLSLLTDSSSSKRCLPDRITYSTLVSALCKEGRFDEAKKKLLEMIGKDISPDSVLYDTFIHGYCKHGKTSLAVKVLRDMEKKGCKPSTRTYNLLIWGFREKHNSDEILKLISEMKGKGICPNVMTYNSLIKSFCERGMVNKAMPLLDEMLQNEIVPNITSFELLIKAFCKTSDFSAAQRVFDASLSTCGQKEVLYSLMCTQLSTYGRWLEAMNILETVLELRISIHRFPYKQIIEGLCKVDEVDHGHRLLKLLMVKGYSFDPAAFMPVIDALSERGKKQHVDMLSQKMMEMAERDNGLAAPSGEFKPRSQKHGQDKHAESDWHALLHRDDSARTVMKITKRVKTGWGQRGNVYENKQQQNDDIYVLENTG

SEQ ID NO: 147068 - protein, 332 aa, Oryza sativa
  Clone ID: PAT_MRT4530_47631C.1.pep
MGGSKAEEKPAGGGGGGEDWWCYQFGNKKKGIFDSLACDPLLIKEYDVGQDALIVKSSKKSPLALRMVVFAMTMICGIFICTMCMKQLGSDSLSRIVKIEVAEQLCNKSAILHSEVHFVHYPQPITYSRSECKCTPVRFFAIISSQRSGSGWFETLLNSHMNVSSNGEIFSSKERRSNISSITKTLDKVYNLDWNSSASKNECTAAVGLKWMLNQGLVANHADIADYFNRRGVSAIFLFRWNLLRQLVSQLANNHDRYLKQLNGTHKAHVHTAYEKLLDVLDFLKVPRSKLVSRHVKIHTKPLSEQIENWDEVYNALNGTQYESFLNADYRI

SEQ ID NO: 147069 - protein, 93 aa, Oryza sativa
  Clone ID: PAT_MRT4530_47632C.1.pep
PLSYVDNFPPGQMIPAQACNDYMLFKQHGHINQAIVRHYHQLPLQRSSTANNRSFSIPAKCWHAPAVSNSFIKTLLTTGSIVAKRPLCSLHSS

SEQ ID NO: 147070 - protein, 113 aa, Oryza sativa
  Clone ID: PAT_MRT4530_47633C.1.pep
MATSAGFLARRAAQKERVRLLYRRALKDTLNWAVHRHLFYQDASDLREKFEANRDVDNPDVIDRLIDDAEAQYRNFQHPDPYIVPWAPGGSKFTRNPPPPKGIEIIYNYGKED

SEQ ID NO: 147071 - protein, 91 aa, Oryza sativa
  Clone ID: PAT_MRT4530_47634C.1.pep
MEDGKSRGLFQRRGAAAAAIVSYGSKGWRSGLESRGEYSYGANLHAGPHRLRNVRCVSYFWGCIMLLRVRPDGLYSPSKSSPWNYPIIHTF

SEQ ID NO: 147072 - protein, 61 aa, Oryza sativa
  Clone ID: PAT_MRT4530_47635C.1.pep
APPEALDNLERRILDDMKQAHEKYPRVDVKADEAEVLVMMSVTIIHQIGVISVADASLGGK

SEQ ID NO: 147073 - protein, 40 aa, Oryza sativa
  Clone ID: PAT_MRT4530_47636C.1.pep
MACRLSLRVAAPAAGWRPRVARGARRSATVRASDQLERRN

SEQ ID NO: 147074 - protein, 87 aa, Oryza sativa
  Clone ID: PAT_MRT4530_47637C.1.pep
KSFGPKWVLILCEQTFPSNQDNTCLFHVLCAITLGIQKHVKLSFFFLQHTILITCSKHLQLSPRLLFVNQQSTRVRPEKIKKTIIYA

SEQ ID NO: 147075 - protein, 85 aa, Oryza sativa
  Clone ID: PAT_MRT4530_47638C.1.pep
MDLDSGVHEGSEKIKTTVSRGAISGVVSLTNEPSSVPTQIQQHLSAFGYFCLPGLAGWMRIASPGAAQTPRLAGRMRITPGSRCP

SEQ ID NO: 147076 - protein, 97 aa, Oryza sativa
  Clone ID: PAT_MRT4530_47639C.1.pep
NVFVSKQQACSSSSSPCSCSPVAAAASCGAAPVPTSPPTQPRRRGVHPRSYLHHLHVGACHHHHQSVKVRRTVCEGPSSISMSHHQSKDRRTACEGP

SEQ ID NO: 147077 - protein, 553 aa, Oryza sativa
  unsure (1)..(553): unsure at all Xaa locations
  Clone ID: PAT_MRT4530_4763C.1.pep
PRTASPPSSTSAVAARSWELAPYDATPRQAAADHPAVAEGCLEALTLKSLPPPPPPPARAATATPAARAPSQRTPPTPATPAKAASPPATNSSSSPRTPAAPAPRPPQPPPATSPAPTKPSSPPAPKPPSPPAPSPSTTPSSPPAPKPSSPPPAATPTTKPSPPPSSPPAPRPSPPLPPRTPPPPPPAAAPKPSPSPPPAPTNSTTNSSSPSTSTPVQLSPNFYAQSCPSVELAVRDVVXGCDASVMIEGSGTERTDPANLSLGGFNVIDAAKRLLEAVCPVTVSCSDILVLAARDAVTFVSMMALCDFSFLVATIHSKTGGPLVPVSLGRLDGLVSLASNVRANIIDTGFSVDAMARSFSAKGLTLDDLVTLSGTHTHALECWRINCDFHFSPGLTVSTRLSIAGVAHWRAGGHTIGSAHCTTFGERFRVDANGSTVPADAAMNADYAGGLIRACSAVNNTVSSTAAVDCDEGSASRFDNAYFANLLAGRGLLRTDAVLVQNATTRATVEAFARSEGSFFASWAASFARLTSLGVRTGADGEVRRTCSRVNG

SEQ ID NO: 147078 - protein, 82 aa, Oryza sativa
  unsure (1)..(82): unsure at all Xaa locations
  Clone ID: PAT_MRT4530_47640C.1.pep
YLSDWIFLGXFGCGYKYGYFLPDTNXTDMVPGFPSDTDNHRVSRKNCFRIHVRLYSILIHIRDNPYLFPYSNYPYSFSYPIK

SEQ ID NO: 147079 - protein, 337 aa, Oryza sativa
  Clone ID: PAT_MRT4530_47641C.1.pep
MTAETTTVRWGGDQSAGVSANELRLYGDRRRWDKRGRRPRGLRGRGAAVQVVVGGGGNGRATQIWGQLVATREEETNGGGAIAGGGEAGAVGGGGVQRGSSRQRMRTAGDATDGQAKQAASHGRVGKMTDNLIGDCSTSSKKRKKACKSRGETRKLHEDNIFEEEFGSLKNSGQGAWSELSKVVASNLSESVVSLASFDGDIMHSACTGVVIKTDLFGTSYLTSASLIRSFDDESKIMPFVSIEVHLPKKQVAHGWLYKYDLQYNIAVIETKFFPGLRAINLEHQLQFESHSKVVAVGRCFKSGKLMATSGVLTDDPSGVYRKELMISTCEITMVPC

SEQ ID NO: 147080 - protein, 112 aa, Oryza sativa
  unsure (1)..(112): unsure at all Xaa locations
  Clone ID: PAT_MRT4530_47642C.1.pep
MRRDCIERVLLYYMGLGAGESNEEGRQRPDNNKDNQGWQGPGSEPLATVCRLRIRWQRNNNSGTAVAAQAVILPRRPRVDVKVTGHAGCKSGGPEVYRWRFXDGGTPLPEIT

SEQ ID NO: 147081 - protein, 353 aa, Oryza sativa
  Clone ID: PAT_MRT4530_47643C.1.pep
KLHEDNIFEEEFGSLKNSGQGAWSELSKVVASNLSESVVSLASFDGDIMHSACTGVVIKTDLFGTSYLTSASLIRSFDDESKIMPFVSIEVHLPKKQVAHGWLYKYDLQYNIAVIETKFFPGLRAINLEHQLQFESHSKAGVGGPLIDLDGNFVGMNFYAKKRTPFLPRSTITECMANFKTYRGELKKLDSTTGRSTNEIQESPATSKSYLEGLEGCSDSFELRNSSRKPENEQESSSSSDSEENPIENDPFFMETASPFLPVADGDVCLPEFGKFLIKELTSQGYPLPAVLDGGMRLVNTFENEFADDIWSKLTKKVASNMSRGVSSRAIADRRERAVSSPGIVRAYSEGKQ

SEQ ID NO: 147082 - protein, 62 aa, Oryza sativa
  Clone ID: PAT_MRT4530_47644C.1.pep
MEEDDDTVAVDGGGRRAVAWLAALEAKALLQASLPDAGQHLNQQGGMALYDVEAFMRVNLLL

SEQ ID NO: 147083 - protein, 37 aa, Oryza sativa
  Clone ID: PAT_MRT4530_47645C.1.pep
EVPEGRPSARVITTKAGSCSGAGQTEKSVALGQGRRV

SEQ ID NO: 147084 - protein, 159 aa, Oryza sativa
  Clone ID: PAT_MRT4530_47646C.1.pep
MGTNDPGTPSKATKASEPEQSPATTSGTTAPVYPEWPGFQAYSAIPPHGFFPPPVAASPQAHPYMWGAQPMVPPYGTPPPYMMYPPGTVYAHPSTPGVHPFNHYPMLANGNVETAGTAPGASEINGKNELGRTSGPSANGITLHRFFFFKKKYEFILVL

SEQ ID NO: 147085 - protein, 316 aa, Oryza sativa
  Clone ID: PAT_MRT4530_47647C.1.pep
MDGKGRHGGGGGGEDPLTLTLGSIYSSAPTPPPSPSLVVAPTPPPSSFLVAAPTLLSSPTPVVVPMLLPSPTRPVVFSMQPHFDLVPALPPSSPQVPQSSLSSLSAPGSTRHYRNSPRSSLLAPPSNRRRLNNPDEGQSPRGRGEEANGDNGVLVMATSFPWVTSADLPVLHCTLESMLLKGITSVEGKATCNRCSAEVPIAYDLDAKFREVRDYVAANIHIMDDRAPEHWMCPRLPDCGSCGKKACMWPQIPNEKREINWLFLFLGQMLGCCTLEGLKFFCKNTKNHCTGAKTRVLYYAYIEMCRQLDPQGPFNI

SEQ ID NO: 147086 - protein, 254 aa, Oryza sativa
  Clone ID: PAT_MRT4530_47648C.1.pep
MEKMEKLTQGHFGDEGESLANKLTSSRCTYLFMAPMHRSIIREKRIPWPRSGWDLIPFVALQLNVQVRGAVGGEVANGLRGLGSADAVRHRHRGGWIRPPAEGRTSRGGGGGGWRRDGCGGGGGVKVKAVLKRAEMEWLMAQLKTGDRRLAGHRSRPVSFVGTNHGSSTLQDERDRIYKEDEYRVFFVTYAARCGRFSAKVHPTGERVDGSLSWSFRLDATVEISISKFATFGAFSQDMASNIKDKLHDHNPQP

SEQ ID NO: 147087 - protein, 65 aa, Oryza sativa
  unsure (1)..(65): unsure at all Xaa locations
  Clone ID: PAT_MRT4530_47649C.1.pep
DGXYLIEIPPSYVLSTXLRLTAGKERNLLRRSTYDCITYYITSFDSLCTSSSVQCFHNVVVFSPV

SEQ ID NO: 147088 - protein, 736 aa, Oryza sativa
  Clone ID: PAT_MRT4530_4764C.1.pep
MADNEKGNKVRSQDIGTSSSRVNEAPDTSCVTLVQHLINHNRLLIEILQQHQTPILNLSQIQPQVQLEAVQALTPRVSMPPASRRTHGDVPHVDSKEASIICFMCDEQGHYARECPQQKRKTPMRTKDEVRKMIITSTEWPPPGMTKRQRRNTFRGAPQLTEHLLANGGRVSDSEDSDQVSSDDEDEKSPQGFNQNKMERKACSRCGEIGHVASSCATTCVHCEEDHPPDRCPTSRITCFFCEGTDHVPKDCQFSLLLTKKMANQPASSNGEKHQGNTNPRQDYSFSLTPVPGQRNQNEKRKCRVREDICCFNCQGMGHFADKCPKPRDIAASTSVHATPCNQKLAPQRIVIHASRSSPIARVATAPTPASALPQGVNAQFQPQPPVDKTEATFQLLQNWNYPAGATNVQVPTVQQQCKLSEFLKTETPTFAIVVEPMEASDWLRTVEKKLGLIQCTDQERVVFATHQLVGLASEWWDSYEASRPEGHTITWDEFSSVFKRSHVPAGMITLRKREFRYLKQEDLTVTEYLHEFHRLAHYAPEDVENDEDKQEKYLQGLKDEIAVQLLLEEYEDFEKLVDKAIQLESEHNRMKNCKRRIVSIPVFPCGNQRQRTEPLQITGSSVAHQEFPPQEDGHNADNNISNTNDDDTTNNHASCPISDHSNQACNVNIIHQGVDDSINDGTQNDNPSNCDSEKDSNGDSNYGFSERQHAQGPHCPRSILNTRSEEYLVEKGRKW

SEQ ID NO: 147089 - protein, 103 aa, Oryza sativa
  unsure (1)..(103): unsure at all Xaa locations
  Clone ID: PAT_MRT4530_47650C.1.pep
VGSWPVLLWLVTRTCIRTGPSQMAXRAIELAESRLLKDGWPEYYDGKLGRFIGKQARKFQTWSIAGYLVARMMLEDPSTLMMISMEEDRPVKPTMRRSASWNA

SEQ ID NO: 147090 - protein, 217 aa, Oryza sativa
  Clone ID: PAT_MRT4530_47651C.1.pep
MAASVLALAVAFLLGASGYGVDRGAAAASPAAEGVEVAYGSTIKLMHEKTKHRLHSHDVPYGSGSGQQSVTGFPEVDDSNSYWIVRPSPDSSAKQGDAIETGSIIRLQHMRTRKWLHSHLHASPLSGNLEVSCFGGDGQSDTGDYWRLEIEGGGKLWKQDQKVRLRHVDTGGYLHSHNKKYNRLGGGQQEVCGVREKRAENIWLATEGVYLPVNKSK

SEQ ID NO: 147091 - protein, 150 aa, Oryza sativa
  Clone ID: PAT_MRT4530_47652C.1.pep
PSPFYLSHTGDYYILQSHHNAFNQSSSTKFHTPLGSTPQSRHHQPVPHESTTHSFPHPARIQASSKATWPDWFEAICLLQRAEFTRSKGLQPVGPAAAELPVTNAIVGGLSKFAKCARGAKPLRWYWRDASPNSCHFANIDHGCLPPLTL

SEQ ID NO: 147092 - protein, 169 aa, Oryza sativa
  Clone ID: PAT_MRT4530_47653C.1.pep
MDMELSSSSSSTTVASSPASSPPLGRCVLRFRLPPAWTPEEDAVLERLAMEHGSRHWRRVAAQMPRRRSPAQCRDRWGDHLARDVFHRPFTAADDAELARLCLRLDDDAGFAAGRRWKDVSRAVYGRSSCAVKRRWRELRRSDAFLGALWRPRTTTTAPPANAAITTTC

SEQ ID NO: 147093 - protein, 443 aa, Oryza sativa
  Clone ID: PAT_MRT4530_47654C.1.pep
MPPRARTLLMPLAAATLLVASTIFLFAATGARWRPADTGLPVPAADFSAAVLESAVTDTTAAAKELSFVDENGRPDDPASSSAAAARCDPTHAAVRVFMYDLPPEFHFGILGCGAAAPRYPGGLNQQHSVEYWLTLDLLSSSSPPCGAAVRVADSRDADVVFVPFFASLSYNRHSRVVPPEKVSRDKELQEKLVRYLMAQPEWKRSGGADHVIVAHHPNSLLHARSVLFPVVFVLSDFGRYHPRVASLEKDVIAPYKHMAKTFVNDSAGFDDRPTLLYFRGAIFRKEGGNIRQELYYMLKDEKDVYFAFGSVQDHGASKARDTPSSNRLFDAIVSHCVPVIISDDIELPYEDALDYSKFSIFVRSSDAVKKGYLMRLIRGVSKHQWTRMWNRLKEVDKHFEYQYPSQKDDAVQMIWQALARKVPAIRLKSHRSRRFSRYDRGK

SEQ ID NO: 147094 - protein, 538 aa, Oryza sativa
  Clone ID: PAT_MRT4530_47655C.1.pep
MPPRARTLLMPLAAATLLVASTIFLFAATGARWRPADTGLPVPAADFSAAVIESAVTDAAAAKEELSFVDENGRPDDPASSSAAAARCDPSHAAVRVFMYDLPPEFHFGLLGWSPPTDGAADAAMWPDVGSGAAAPRYPGGLNQQHSVEYWLTLDLLSSSSPPCGAAVRVADSRDADVVFVPFFASLSYNRHSRVVPPEKVSRDKGLQERLVRYLMAQPEWKRSGGADHVIVAHHPNSLLHARSVLFPAVFVLSDFGRYHPRVASLEKDVIAPYKHMAKTFVNDSAGFDDRPTLLYFRGAIFRKEVKIDSWKVSPYSHPNVPIPNYPPNICGYMIHLCSLTEYVYILISKIPKTSKLTDVPTFELSKGGNIRQELHYMLKDEKDVYFAFGSVQDHGASKASKGMHASKFCLNIAGDTPSSNRLFDAIVSHCVPVIISDDIELPYEDALDYSKFSIFVRSSDAVKKGYLMRLIRGVSKHQWTRMWRRLKEVDKHFEYQYPSQKDDAVQMIWQTLARKVPAIRLKSHRSRRFSRYDRGGK

SEQ ID NO: 147095 - protein, 66 aa, Oryza sativa
  Clone ID: PAT_MRT4530_47656C.1.pep
MGADRQDAATMGADRQDAAAMGADRQDTAMGDGIRLMRIIFLPQAQTGDAEARDSGGGRGRRGGGA

SEQ ID NO: 147096 - protein, 84 aa, Oryza sativa
  unsure (1)..(84): unsure at all Xaa locations
  Clone ID: PAT_MRT4530_47657C.1.pep
LGEGRKGKERKLNVTEVKRAIPLSTKVINYNLPTACLLQDGSPPSVGLRQQDQSARSTNKISWRLLICQICCSFPXAWGLSYVS

SEQ ID NO: 147097 - protein, 593 aa, Oryza sativa
  Clone ID: PAT_MRT4530_47658C.1.pep
MALHLTAAPTIAPSAAAACRSLAPMPPLPAVSCSSRWWRGRRRCVPVVAMAAAAAADGERPHGHAAEAGTGRMNLNEYMVAVDRPLGVRFALAVDGRVFVHSLKKGGNAEKSRIIMVGDTLKKAGSREGVGFVDIRDLGDTEMVLKETSGPCDLVLERPFAPFPIHQLHQNEDYHLLFNKGRVPLTSWNGALLSSKLNESSEGNGNPGFAIFSPRLLNSHGWAVLSSEQDGLNQRSTSLANRISEIVGLYSDEDDADTEWAHGSFPLEEYIKALDRAKGELYYNHSLGMQYSKITEQIFVGSCLQTERDVKMLSETMGITAVLNFQSESERTNWGINSEAINNSCRENNILMVNYPIREVDSMDLRKKLPFCVGLLLRLIRKNYRIYVTCTTGYDRSPACVIAYLHWVQDTPLHIAHKFITGLHSCRPDRAAIVWATWDLIALVENGRHDGTPTHSVCFVWNSGREGEDVELVGDFTSNWKDKVKCNHKGGSRYEAEIRLRHGKYYYKFIAGGQWRHSTSLPTETDEHGNVNNVIRVGDIARIRPAPSQLQIRDPTVVKVIERALTEDERFLLAFAARRMAFAICPIRLSPKQ

SEQ ID NO: 147098 - protein, 125 aa, Oryza sativa
  Clone ID: PAT_MRT4530_47659C.1.pep
MGPEKGSLISATSRLVESDKIITHKVHKVCVLFVSSCGRVDDDRFIFCTICTYGLIVSPERSMAGLGQVGRKLQRKLCARGQVGCTLNSHIIHNHQIKLMNDRELRHDTTRLSALQYTTVYPDRI

SEQ ID NO: 147099 - protein, 54 aa, Oryza sativa
  Clone ID: PAT_MRT4530_4765C.1.pep
GVPHPYPNAQVARLPTPWILDTLHLRLHTLRTFCRRPASVVNHVKTYFYHRFKL

SEQ ID NO: 147100 - protein, 41 aa, Oryza sativa
  Clone ID: PAT_MRT4530_47660C.1.pep
EPSVLVLVTILDNTSRLPHSEQDYSWRILFHETITAPLYQV

SEQ ID NO: 147101 - protein, 111 aa, Oryza sativa
  Clone ID: PAT_MRT4530_47661C.1.pep
LLVRSPQGGYGGATIDTSGWEGTNSTYTDSTPCTMPDYYNQRRGALLRRLILVVIYVVTLFILDVFAVTNRGSSSQFSQRIAKPLENAERPDNFMLAKPRAPGTGDKDLLG

SEQ ID NO: 147102 - protein, 716 aa, Oryza sativa
  Clone ID: PAT_MRT4530_47662C.1.pep
MVDTKARVQCTWKVKDTSGQTGDIRAVRPAAAARQQQEYIKFEMKPGEALDDYLGRYNKILSDLRSVDSSYDVNYTQYEVSRHFLNGLDMMEDKGDEKTNDNKPNSIVKGGKKIRETLKKAFDQVYAPFGPLSDVDDESGDEDKGKNISVDPTVGPATGQTGSSASVRPAPGQTSSYVAYYGFDFCLCVDFGGEEGEHVDHGFRLFAAHDWYIVTGSGEDGRIFEDESDDDDDGEVGSAVRVQNVKQLQKSLLLCTFNDDIRRNKLLVEGLEFDETFGPVARIEAIRLLLTFAQGFEAIRPAQTASNRQDTNGQTGGIAAVRPAATVPTPEGRRPHDDVEQWREAAHTAAAAAAATANEAVPSSATTEQQEARPDDERAPKDHTGCECKPKVVMLPELLRAASHGDLQRLRVLLGVLHDDESPAPTTTTTTTSQDDDAVVLEVYRSAPLLPPPSTTAGEGEDEGTLSLLEGTTFQGDSALHVVASSGDDGDFLKSARLIYGKARHLLEATNNNGDTPLHCAARAGNVKMVTHLLELAGGDGAGDQRKKLILRKKNHQHETVLHEAVRLGNKDLIDKLMTEDPELARHPSNGATSPLYLAVILPNPQVAMQLHGYDKMLSYSGPDGQNVLHAAVLRQRGVAVAGNGAPSPPPDLAGGEVVDLGDGRAVVRWRRLRRPRPPLRQIRPERRQRTSAEAAQRLAADLGGGGWRRPCPPLR

SEQ ID NO: 147103 - protein, 274 aa, Oryza sativa
  unsure (1)..(274): unsure at all Xaa locations
  Clone ID: PAT_MRT4530_47663C.1.pep
IPGLQESARGQVGGGEDIFATIRWSQKLLYDNGQFSVDIPFQFPQYVNPLPKVFMKKEKIQLTLNSGVSNEIVLKGSSHPLKERSRQGEKLSFFHEAVVENWSNKDFTFAYSVYSGDLSGGMLVQPSTSDDYDDRDMFGIFLLPGNNQKRKVFRKCXVFIIDTSGSMQGKPLESVKNAMYTTLSELVQGDYFNIITFNDELHSFSSCLEQVNEKTIENAREWVNTNFIAEGGTDIMHPLSEAIALLSNSHNALPQIFLVTDGSVEDERNICRTV

SEQ ID NO: 147104 - protein, 425 aa, Oryza sativa
  Clone ID: PAT_MRT4530_47664C.1.pep
MAIGVGGCCAVLLAAALLFSSPATTYAYDSLDPNGNITIKWDVMQWTPDGYAAVVTLSNYQQFRHIQPPGWQLGWTWQQKEVIWSMYGAQAIEQGDCSMSKEGSNVPHSCKKHPTVVDLLPGAPIDLQIANCCKAGSLSAFSQDPANSAASFQIIVGHSGNSNETVRVPKNFSLMAPGPGYTCSRAMIVKPSRFLSPDGRRATQALMTWNVICTYSQFLAQKVPSCCVSLSSFDNDKTVDCPTCSCGCRNEKSTTGKCVKKNAPDLQSIIHGPGRWTWQPLLQCTSHMCPVKINWHLMLKDKEHYRVKITVTNLNYRMNFTEWNLVVQYHPILDITQISGFNYKSIQVGKINDTTMLWGVKPYYDLLMQAGPLGNVQGELIVRKDFRASSTSNNNKGRAFPVRVYFNGDNCVMPPPDAYPVSITA

SEQ ID NO: 147105 - protein, 138 aa, Oryza sativa
  unsure (1)..(138): unsure at all Xaa locations
  Clone ID: PAT_MRT4530_47665C.1.pep
GNLVTPAGTRSRNSPGRTHAVPVAPSPERRDVVRWLRPALPEPEATVRRLQVVVPAARWLRPAPVKAATPVPGGYGGSPVVPAATVVATAAAAAATPTGXTGGTEXRWGPHGXVIYLSNRATIIIIRSLSSLVLCGTI

SEQ ID NO: 147106 - protein, 389 aa, Oryza sativa
  Clone ID: PAT_MRT4530_47666C.1.pep
MAVTKLNPSAAPFHCSRRHLFFAPPPPPPPPMPAYQYHATGACAAAAPPPFPFFATYSCASLPFHGHLYPPCGYQAQMGPAPPGAAFAKGVLAAAPPPPHGRPPHKLMVCKGAPTVTDVKLRAQARAAARVGVAAAVRGWRPAPATAGPPRMLVAAAPCGMLHPAAVARRRGMSKVYKPRKPQRAGRERSPSPSPVFTTRPMSPTPPMQKLKPAHTTVMVRNIPNKLTRSDMVRLLDDHCARENRRRGRGGEPRAEYDLVYVRMDFGMCNKERSSNMGYAFVNFTTAEAARGLQRALHGCRWKRSAFDSGKIIDIRAARIQGKDALVRHFGRTTYYECDTDEYLPAVFSPPRDGSTAGAGAPSPPAVKTVGIRVPPRPITLLTHRGNVN

SEQ ID NO: 147107 - protein, 507 aa, Oryza sativa
  unsure (1)..(507): unsure at all Xaa locations
  Clone ID: PAT_MRT4530_47667C.1.pep
MALLALNRLISIRRERRRRRNKARSKRFPLGLSALHLSEGGSITKSVRRKYSPCQQDDSQGGKMMTNSGVTLPEDIWSYILSLMPMRDAARAACLFRAFLRSWRCHPNLTFNEDALGLNDNACETDFTSKVDHILKNHSGIGVKRFKLSIHCKLDNCDYVDSWLQFAITPGIEEITVMLSGNKPQFNFPCSLFSDKIAYSIRCLELGNCAFHPTIELGPLRNLKRLHLSCVRISGDELACLLSNSFVLEQLELKYCKKIVSLKMPCVLQRLNCLNVLECKRVQVIESKAPNLSSFSFSGNKVKLSLVESSQVKNLYMCSSNIICYARSDLPSIVPNVETLAVASHCEMVDTPMLPTKLLYLKHLTISLFAWTFSRAYDYFSLVSFFDASPLLEVFVLDIYQESMEHESIFESSSHLRQMPEYHHEHLKSVTISGFCSAKSLVELTCHIVENTTSLERLELDTTHGNARCSEDSSDECFPVSQXVLTESPRAVLAIRGYIEGKIPTNV

SEQ ID NO: 147108 - protein, 112 aa, Oryza sativa
  unsure (1)..(112): unsure at all Xaa locations
  Clone ID: PAT_MRT4530_47668C.1.pep
HHRLRGQSPAPSGARCYGQRGGGGGYGXGYGVVRGGGYGQRREXAATAVAVATVAAVLAXATVVATAPRAATPTGTGGTXRWAPHAQVIYLSNRATIIIIRSLSSLVLCGTI

SEQ ID NO: 147109 - protein, 95 aa, Oryza sativa
  unsure (1)..(95): unsure at all Xaa locations
  Clone ID: PAT_MRT4530_47669C.1.pep
MNGKELDGPQHHPSTRPTSRRSGWPEAAVATGGVPWCRGYGGGYRHARRSCRQSPTGNWRNLSRWGPHGXVIYLSNRATIIIIRSLSSLVLCGTI

SEQ ID NO: 147110 - protein, 1640 aa, Oryza sativa
  unsure (1)..(1640): unsure at all Xaa locations
  Clone ID: PAT_MRT4530_4766C.1.pep
RRLVGGGRHAAMAAAHEKGSRPRNRHDHDDRERRMQGDTGRGHRHNDEDDRDRRRDNNGGRRQDSRESSRRPRNPTPKPSDPSSSSSSSSSSSSDRHPRRTHDRRQPTAPSAGCRAFGRSLRDVRWPERFRPGAIEKYDGSTDPEEFLQVYSTVLYAAGADDNTLANYLPTALKGSARSWLTHFPPYSISSWANLWQQFVANFQGTYKRHAIEDDLHALTQNSGGSLREYVRRFNECRNTIPEITDASVIRAFKSGVRDRYTTQELATRRITTTRRLFEIVERCTHVDDALRCKNNKLKTGXEKKPATDAPESSKKKNRKSGKRKAQAEILAAEYANPPKRPDPQGSDAKKAWCPIHKTDRHSLEDCLVFKKSLEKHMALEKGKRVRVVEKDAEATPQESDSAYPDSDLHVSHITAVIQGRYPIVVEPTIRNIKVARVLIDGGNSINLLFASTLDVMGIPQSELTPTDQPFHGITPQSSSKPLGKITLPVTFGQANNFRTEQITFDVAEFDTAYNAIIGKTALAKFMAASHYAYQVLKMLGPKGTITIQGNAKLAVQCDKRSLDMVEHMPSPPATTEPPKKVSKTKKTPKPDGAIKIVPLSSANPDKTEFALITFLRDNADVFAWXPSDMPGVPREVIEHKLLVRPDAKPVKQRLWRFAPDRKQAIREELDKLLKAGFIREVLHPEWLANLVMVRKANGKWRMCVNFTDLNKACPKDHFPLPRIDQLVDSTAGCELLSFLDAYSGYHQISMAKEDEEKTAFITPFGVFCYVKMPFGLITVGNTFQRTVQGALSDQLGNNVEAYVDDIVVKTKTSDSLIDDLWETFDNLRXYRLMLNPEKCTFRVPSGKLLGFLVSGRGIEANPEKIKAIENMKSPKRLKEVQKLTGCMAALSRFVARMGERAQPFFALLKKQDKFVWTQEAEEAFIALKRYLSNPPVLVAPQPNEELFLYIAATPYSVSTVIAVEREKVQRPIYYVSEALHDAKTRYPQIQKLLYAVIMTSRKLRHYFQAHRVTVVSSFPLGEVVRNKDIVGRIAKWVVELSQFDVHFVPRTAIKSQVLADFVADWTMPDNKSDNQIDDETWTMAFDGALNSQGVGAGFILTSPSGDXFKHAIHLNFRATNNIAEYEGLLAGIRAAAALGVKRLIVKGDSELVANQVHKDYKCSNPELSKYLAEVRKLEKRFDGIEVRHVYRKDNIEPDDLARRASRREPLEPSTFLDILTKPSVKEVSGEINPDTPDISSEATEAERAVADIDTIDDWRTPLIKFINSEELPEDDAEAEKITRKAKIYCTIGNDLYKKAPNGVLLKCVSSDDGRHLLLDIHEGIYGSHAAGRTLVGKAFRQGFFWPTALKDACDIXTHKTTRTSAPVCPSYLAILVLGARYTRAIPTRTGRLQVPIXVAIDKFTKWIEAIPTGEIKADNAIKFIKGIFCRYGLPHRIITDNGSQFISADFQDYCIRLGVKICFASVSHPXSNGQVERANGIVLQGIKTLLWAVCTTPTTSNKETPFFLVYGSEAMLPSELRYQSTRIQRYSDEDQEEQRNDDVNLLEEHRERVAVRAASYQQALRRYHEKRIRARILSIGDYILRRVQSQAGRNKLSPKWEGPYTITQVLRPGAFKIADGDGRELANSWNIDQLRKFYV

SEQ ID NO: 147111 - protein, 253 aa, Oryza sativa
  Clone ID: PAT_MRT4530_47670C.1.pep
MKFNIANPTTGCQKKLEIDDDQKLRAFYDKRISQEVSGDALGEEFKGYVFKIMGGCDKQGFPMKQGVLTSGRVRLLLHRGTPCFRGYGRRDGERRRKSVRGCIVSQDLSVINLVIVKKGDNDLPGLTDTEKPRMRGPKRASKIRKLFNLAKDDDVRKYVNTYRRTFTTKNGKKVSKAPKIQRLVTPLTLQRKRARIAQKKQRIAKKKSEAAEYQKLLAQRLKEQRERRSESLAKRRSKLSAATKVRDHRIRPL

SEQ ID NO: 147112 - protein, 555 aa, Oryza sativa
  Clone ID: PAT_MRT4530_47671C.1.pep
MTKLKEYLVIESAEVGNEDGRQEDLLVKEGPGEHQENTIRDSDEAKNEDCSNSGSVTEAVVSSEEPSDRSSTEEPSDRSSTEEPSDSSSGGDSSSQSADSDGGSKEAPKMDSKAGNDDSSECTDQSSPRAVLDISVSGSVDSDESSSVEQPAESNHNTQWRNLISGLILRRRKSMARAGTFPQRTKTTGLKRYLERMRSGKNQIDCGAIAPEILPEISKWRPSWRSFDYSELCAATDKFSSENLIGKGGHAEVYKGHLADGQFVAVKRLTKGGNKEDRISDFLSELGIIAHVNHPNAAQLLGFSVEGGLHLVLQFSPHGSLASVLHGTKGALKWKARFNIALGIAEGLLYLHEGCHRRIIHRDIKASNILLTEDYQPQISDFGLAKWLPDKWTHHVVFPIEGTFGYMSPEYFMHGIINEKTDVFAYGVLLLELVTGRKAVDSSRQSLVIWAKPLLDSNNMKELVDPSLDVGYDPEEMAHILAVASMCIHHSSSSRPSMKSVVRFLKGDRESLEMMQMQRPKLMKPLMFDSGDSEDYTRSSYLNDLDRHKKLALEQ

SEQ ID NO: 147113 - protein, 102 aa, Oryza sativa
  unsure (1)..(102): unsure at all Xaa locations
  Clone ID: PAT_MRT4530_47672C.1.pep
DQPMRDAIEGMNAKELDGRNITVNEAQSRRSGAEXGGYGQRGGAEATVAAGYGGXGAVAYGQRREGGYXGGRWLRWRRGGGSYRWWLRQPQAAGNSDGNWRN

SEQ ID NO: 147114 - protein, 224 aa, Oryza sativa
  unsure (1)..(224): unsure at all Xaa locations
  Clone ID: PAT_MRT4530_47673C.1.pep
GRVPHNEIAAQICRQAGLVQKQGITNKGVHDGHEENFSIVFGAMGVNLETARFFTRDFEENGSLERTTLFLNLANDPTIERIITPRLALTTAEYYAYQLEKHVLVILTDLSAYCDALREVSAAREEVPGRRGYPGYMYADLSTIYERAGRVSGRNGSITQIPILTMPNDDITHPIPDLTGYITEGQVFIDRALDNRGIYPPINGLLSLXRLMKSAYGEGMTRKD

SEQ ID NO: 147115 - protein, 125 aa, Oryza sativa
  Clone ID: PAT_MRT4530_47674C.1.pep
SSPRSSRSGTGSSRGVSGFVTFSSEQAMRDAIEGMNGKELDGRNITVNEAQSRRSGGGGGGGYGQRGGGGGYGGGGYGGGGGGGGYGQRREGGYGGGGGYGGGRGGGGYRGGYGRLGGGTYAVTG

SEQ ID NO: 147116 - protein, 822 aa, Oryza sativa
  Clone ID: PAT_MRT4530_47675C.1.pep
MAASAVAVAFVVAVAAVLAAAASAAVTYDRKAVVVNGQRRILISGSIHYPRSTPEARRTRFPFLLLTMWPDLIEKAKDGGLDVVQTYVFWNGHEPSPGQYYFEGRYDLVHFIKLVKQAGLYVNLRIGPYVCAEWNFGFPALAAEMQKFTTKIVEMMKSEGLFEWQGGPIILSQIENEFGPLEWDQGEPAKAYASWAANMAVALNTSVPWIMCKEDDAPDPIINTCNGFYCDWFSPNKPHKPTMWTEAWTAWYTGFGIPVPHRPVEDLAYGVAKFIQKGGSFVNYYMYHGGTNFGRTAGGPFIATSYDYDAPIDEYGLLREPKWGHLKQLHKAIKLCEPALVAGDPIVTSLGNAQKSSVFRSSTGACAAFLENKDKVSYARVAFNGMHYDLPPWSISILPDCKTTVFNTARVGSQISQMKMEWAGGFAWQSYNEEINSFGEDPLTTVGLLEQINVTRDNTDYLWYTTYVDVAQDEQFLSNGENLKLTVMSAGHALHIFINGQLKGTVYGSVDDPKLTYTGNVKLWAGSNTISCLSIAVGLPNVGEHFETWNAGILGPVTLDGLNEGRRDLTWQKWTYQVGLKGESMSLHSLSGSSTVEWGEPVQKQPLTWYKAFFNAPDGDEPLALDMSSMGKGQIWINGQGIGRYWPGYKASGNCGTCDYRGEYDETKCQTNCGDSSQRWYHVPRSWLSPTGNLLVIFEEWGGDPTGISMVKRSIGSVCADVSEWQPSMKNWHTKDYEKAKVHLQCDNGQKITEIKFASFGTPQGSCGSYTEGGCHAHKSYDIFWKNCVGQERCGVSVVPEIFGGDPCPGTMKRAVVEAICG

SEQ ID NO: 147117 - protein, 162 aa, Oryza sativa
  unsure (1)..(162): unsure at all Xaa locations
  Clone ID: PAT_MRT4530_47676C.1.pep
MAAPDVEYRCFVGGLAWATDDRSLEAAFSTFGEILESKIINDRETGRSRGFGFVTFSSEQXMRDAIEGMNGKELDGRNIPVNEAQSPPSEGGGGGGYGQPGGGGGYGGGGGYGGGGGGGYGQPREGGYGGGGGYGGGRGGGGGYGGGYGSRGGGNSDGNWRN

SEQ ID NO: 147118 - protein, 166 aa, Oryza sativa
  unsure (1)..(166): unsure at all Xaa locations
  Clone ID: PAT_MRT4530_47677C.1.pep
PTRPPTRPKLVKQAGLYVNLRIGPYVCAEWNFGGFPVWLKYVPGISFRTDNEPFKAEMQKFTTKIVEMMKSEGLFEWQGGPIILSQIENEFGPLEWDQGEPAKAYASWAANMAVALNTSVPWIMCKEDDAPDPIINTCNGXYCDWVSPNKPHKPTMWTEAWTAWYT

SEQ ID NO: 147119 - protein, 260 aa, Oryza sativa
  unsure (1)..(260): unsure at all Xaa locations
  Clone ID: PAT_MRT4530_47678C.1.pep
MVSGRSRTVYPPCGSEFGTRQRWVGFSSPSRFGSGPVRFRFFLRFGGWWESMAAPDVDYRCFVGGLAWATDNRSLEAAFSTYGEILESKIINDRETGRSRGFGFVTFSSEQAMRDAIEGMNGKELDGRNITVNEAQSRRSGGGGGGGYGQRGGGGGYGGGGYGGGGGGGGYXGSAVKAATAVAVATVAAVVAATAVAVATAAATAAATAAATAAAAAATPTGTGGTERWGPHGQVIYLSNRATIIIIIRSLSSLVLCGTI

SEQ ID NO: 147120 - protein, 649 aa, Oryza sativa
  Clone ID: PAT_MRT4530_47679C.1.pep
MMMQLLLVIIILSTVMISSSDAYYQSCRCLGDGKNNQTSCDQAIDDSIKGSGQLIFRRIQPPITSVAFNVSFIGSLAFILRPVPAGGEYSNNSDAYGSLVFSGNTYNKTTTIITHSDCCSTGDSSSNVFVKMGALKNVSTFGVNITISRKASNIQIVQGNNYTISVWIDYNRAAEAADRSISVFVAKARETKPKEAIIVNKDDNISKGATLQGCIFSSMDLQRLHQISDMDVTFAYGQHVSHSPSRSLPTILASVLGPAGGAVIAAAVTWLYFNSSYRRWKKDFDQLAKSMQSLPGVPVKISFADIRKATNNFHDTMKLGSGAFGAVYRCKLQSLNLKEQPVEVAVKKFTRADTRSYQDFLAEVSIINRLRHKSIVPLISWSYNKGEPLLIYEYMPNGSLDRHIFARTDQLHGGHHTTIRQWDTRYNIVRDIATGLHYVHHEYEPKVLHRDIKASNILLDSTFRARLGDFGLACTVAVGRSSVSCGVAGTFGYIAPDYAINLKATQQTDVYAFGVLVLEIVTGKKAMLNDAQFGHITDWVWHLHQRGRLLEAVDGVLGTAGHGEFDIEEARRLLLLGLACSNPNPSDRPTMVVAVQVIAKLAPAPDVPLEKPTVVCFPPLTLPVGSSSSECTDYYVTAKGSLQIKSSMV

SEQ ID NO: 147121 - protein, 66 aa, Oryza sativa
  Clone ID: PAT_MRT4530_4767C.1.pep
LGVNSIIGEFHAHHPVYKTQHKTCTEGYTTTSNVTFNINRLLPSPRRKAKSDLQTGHGPTSIARHR

SEQ ID NO: 147122 - protein, 1017 aa, Oryza sativa
  Clone ID: PAT_MRT4530_47680C.1.pep
MASRGGGGGGDGNSPPPSVSSPDVRPSSPLPATNSSPPQSGRRGGGRRRRGSASPYPSSPSLGGFETPPHPGRRTPSGGAAARQQRQNWTGGRFPPTPSTPMSTDDVPLSSEAGDEDTPETDGGGGGGAGADATPVFVWGTNISVQDVNAAILRFLRHFRDPRDAGRVDPVMDEGKYMRAIHRILELEGGESLDVNAHDVFDHDPDLYGKMVRYPLEVLAIFDIVLMDLVARIEPLFEKHIQTRIYNLKSSVCLRNLNPSDIEKMVSIKGMIIRCSSVIPELKEAVFRCLVCGFYSEPVMVDRGRVTEPHICQKEQCKATNSMTLVHNRCRFADKQIIKLQETPDEIPEGGTPHTVSVLMHDKLVDAGKPGDRVEITGIYRAMSIRVGPTQRTVKSIFKKTDKSRLHVEDSMETDNPNANKTTEDDFLRDKVEKLKELSKLPDIYDRLTRSLAPNIWELDDVKRGLLCQLFGGNALRLPSGASFRGDINILLVGDPGTSKSQLLQYMHKLSPRGIYTSGRGSSAVGLTAYVTKDPETGETVLESGALVLSDKGVCCIDEFDKMSDNARSMLHEVMEQQTVSIAKAGIIASLNARTSVLACANPTESRYNPRLSVIDNIHLPPTLLSRFDLIYLILDKADEQTDRRLAKHIVSLHFENPNIEELEVLDLPTLVAYISYARKHIQPQLSDEAAEELTRGYVEMRKRGNSPGSRKKVITATARQIESLIRLSEALARMRFSEMVEVQDVVEAFRLLEVAMQQSATDHATGTIDMDLIMTGISASERQRRDNLVAATRNLVMEKMQLGGPSVRMIELLEEIRKQSSMEVHLHDLRGALGTLMTEGAVVIHGDSVKRWIQPSGGRKGHEAIKPSLPSSPLSSPDHYRLPLPLPILGELQIRFGVIGIDGLGLPTGGSDHWNHRYNQKRLWRIRYLYLFLAKDAVELNYIISSAIIVFSTILYSKHPSNVIDVSIVLLPVNKNNQRSIRFGIFSHVELKWTFKVKDKKLAFLIASERDKVRYE

SEQ ID NO: 147123 - protein, 465 aa, Oryza sativa
  Clone ID: PAT_MRT4530_47681C.1.pep
MDAEPSFPHAADGDDDEVYSGSTTMSPLSLTSPRAGSGSGGAHDDSSSPTTWHGLSDADAIAPPTSTHLLDAGGSLFGSPVSDRWFMFGDARQARCPALLAGACAVVLDATRPDGFAMVGPEGDVFAVSSDIGGAGSDPAGGAREISWRVALFIDPNAAGVLPLPDGPYLVHSTRRGGRWRVFVRTSPDEASGVRVYVVGTRSREDLADSLHIAVDTTDDGGEDGLARTWRVMVESGLDGDTGSWRTTVHTGGRATATASHEHVSRPISGVIRSSSSSSHSRSRSSEGSSSGQHQRQSRWDQPPPPPCCSGCGTTHRVEWVMTCCHRLLCVGCAEVNPCGCPEWQNRRGFAVPILPQLALEEECVVEGAIVPQLPRWQIFYARRTGSEVYHAFFRVQDVIHDRGSVLCQLFFYEMDGDSRRWHQVRFEIVELPSRYTWMRFPPMTEEDTLAFEFLVIQYRHRRRQ

SEQ ID NO: 147124 - protein, 57 aa, Oryza sativa
  Clone ID: PAT_MRT4530_47682C.1.pep
KTSHHLLWGRWGANPALCRVLKKNQKNSFPAFMFFNIATQKGFIQFGQQTPFFDIGN

SEQ ID NO: 147125 - protein, 406 aa, Oryza sativa
  unsure (1)..(406): unsure at all Xaa locations
  Clone ID: PAT_MRT4530_47683C.1.pep
SSSSLSAYGVPFPSSSLACIVAVTPRNSLVIXNLFVHXILVQESAEAQPXLNDHTRLYRSISKPGIYHSKPGANQIITNYSIIYYVFLNTSNTSRILRNDINDKLTHKTRKKTNKNQINSTXKDHPNDQPKPANGTSGSELKDDSTWTNERSTGNTSFEQXANDSATAATKSDTDRRPTEPIGERXMTTVNRRQHMEMTTLGPNKIRLDXDGIKTLGINYTGNGMGRRRTATEDGRRRASKGGEVLSTEATTFRRCAATTEGWPGFTSQLXIQWRQRRSLAMTXEQQGFAGDQNATASFGLTAMMELRWISASGRWLPGFAEPMEVTAQEGXDEAAARXRLERRRRLEREGERGESVSGDGGGREMXRIGRGRXGVLCIGTGARDQAHNDGKNSGKSRVLAGKRKD

SEQ ID NO: 147126 - protein, 82 aa, Oryza sativa
  Clone ID: PAT_MRT4530_47684C.1.pep
MASSQPATFHGRRHPASPTPWSVENGRGRGRGHHDEPTLIPPMPSPPPPLPPASIDKEEACNTFDEDDTDFNLPLIVSIDTF

SEQ ID NO: 147127 - protein, 152 aa, Oryza sativa
  Clone ID: PAT_MRT4530_47685C.1.pep
PTNQAARGGVRRQGHSCARRRRRGYARRRAVRRWGAAARGGSGGATRGGVRCGGARRWRRLAGVQRSGGVTGGVEGPRRPKILVPPLVGGKPPCHRQRNSGANRCSAGPHEVQAAAAAFFLLLLATVQTGQGTPVRPLLWHRSDRPWSGQAQ

SEQ ID NO: 147128 - protein, 258 aa, Oryza sativa
  unsure (1)..(258): unsure at all Xaa locations
  Clone ID: PAT_MRT4530_47686C.1.pep
MGTSAPAPLWASLYVPPLASPPDAQATTTAATPVGLVVPHRHTPRPRLLTPRPLTTPPLAMPASGAPPCVARPPATSPXPPTASPPSCRPLASPASHSHHACCRPPAPPRFPATAIVPPRLLAIAAAPSSSPRPPVPPPPSCLPRPSCLPPXPKPPAPPSPTPRPHHRSLDPTAATLDPAAEVLDLTVAAPDPPPCALPPHGLPGCRRGLEPHRRHPKQPCGGAVLCREMPTGRRRPRDEQPRPSASPLALSCSSSPL

SEQ ID NO: 147129 - protein, 117 aa, Oryza sativa
  Clone ID: PAT_MRT4530_47687C.1.pep
TIIENSRHRDGSIYRNKAFEGHFCITNRDETRLEPMMFSEPTDCRPSWETCSMHSACAMMQIFSLKLAKIPIDNDCIQLYGYIAVRDDLDKLLNYVVNYSRDNPIIMRQVHILFMFC

SEQ ID NO: 147130 - protein, 613 aa, Oryza sativa
  Clone ID: PAT_MRT4530_47688C.1.pep
MDISRSLFRRIASRDDNCSDKQKGKYDDIDELKDVAQVDKQLERYQRDTLRAIRPQQVYCMGFFENKNGLYRISREVELSVLTKPVELKIVAKEFENSLKYSGYKYIHQDKLRDIADEYNNSMKSEWPKIRDKELYFYRELSRIKKQKKEKSLVIETPRTQEIKIEQIKSEEPREEIQKLDKVLSEEEQWEVNEKLLLESYEEENNLIEEIENIEEEDNAEQYNDFIDSLDEEGLHNLDNAMEAMEVDLGIGKRKRYGEGSVKNEGERERPARAAGRWPPEKEEYSYHYIPGQYRHMGTKRRDFEKPIKFQNQKSDGAILNLAAHDPIDWPNIISIWKGLIVQKYIQNQHNIGNKVGDMITYLETFLGESAKVLWEQWVEKNPNNYEELKRAGSNPHNFANIVSNIIIAEDPELGYTTLQNERLKEIEKLTLTSWKDEITIRNLSMISDDMIIGLRFLQQSVQTTVIHEQGITFIPYQNNWRWQAACQSICTLDTIEIREVTESSSQETASLCPKKKKKKVISKGQRKKEKRKRDLKGPYSFSIGLGRNTVYPITLLSPRNNLSTKKITEIAPAALMVGGKLTWQTVGRPRRLPPSAKIAIRPLPPIQRAARG

SEQ ID NO: 147131 - protein, 575 aa, Oryza sativa
  Clone ID: PAT_MRT4530_47689C.1.pep
MEKLDYESEIKYYEDKLRDIADEYNNSMKSEWPKIRDKELYFYRELSRIKKQKKEKSLAIETPRTQEIKIEQIKLEENQKFDKVLSEEEQWEVNERLLLESYEEENNLIEEIENIEEEDNAEQYNDFIDSLDEVGLHNLDNAMEAMEVDLGTGKRKRYGDGFVKNEGERERPARAAGRWPPEKEEYSYNYIPGQYRHMGTKRRDFEKPIKFQNQKSDGAILNLAAHDPIDWPNIISIWKGLIVQKYIQNQHNIGNKVEDMITNLETFLGESAKVLWEQWVEKNPNNYEELKRAGSNPHNFANIVSNIIIAEDLELGYTTLQNERLKEIEKLTLTSWKETDEIENTNEEYESTDEELDLIDELAEIVHTIDDNMAEVSTDMSGIKKIHNQLAYNVEVYINGTKYIIDEITIRNLSMISDDMIIGLRFLQQSVQTTVIHELGITFIPYQNNVPYISEVRKRGGARIKPDNLEALNLECEERINEYELSENIDIYYISNSNIECIGLQAFAPNWYRDIKSKKDIEKIVQRLEDIQIIGEIPMKYWEKNAIECKINIINPEYIIKTSPIEATLKDIEEF

SEQ ID NO: 147132 - protein, 209 aa, Oryza sativa
  unsure (1)..(209): unsure at all Xaa locations
  Clone ID: PAT_MRT4530_4768C.1.pep
QPHPRARAADGRAPHGSRGARPKAASPAQPTGGGAPAPRWSPLATTGAAERRPREGREGGSETAVHGSPRVDGGDGNGDRXAVGRRRRGSGRWGRRRSGGWRPKRRGGRGRRGRGEPKEGDAETGEGPGRRLHPPTVVLHRRRPSSSARRRPSSSHRPRAPPRRRLSIQLHRRPAAPPTVPLPPLHRSAAVPPLLRRRRRPPRARKIAH

SEQ ID NO: 147133 - protein, 137 aa, Oryza sativa
  Clone ID: PAT_MRT4530_47690C.1.pep
MMYFPVYVSGRASSAAEMLVKSPLPSLATVTFGVSPTTNSSPLMSSSTSTSLPPAWLSMAWRSSMAAKAAPCWMMAMVLLEISRQSSSSIRQSRRASVTRVSLLARTASNTDDQSNPPARRSTAHMRPLAAACGEDR

SEQ ID NO: 147134 - protein, 1218 aa, Oryza sativa
  unsure (1)..(1218): unsure at all Xaa locations
  Clone ID: PAT_MRT4530_47691C.1.pep
MDIFRSLFRRIASRDDNCSDKQKGKYDDIDELKDVAQVDKQLERYQRDTLRAIRPQQVYCMGFFENKNGLYRISREVELSVLTKPVELKIVAKEFENSLKYSGYKYIHQGMYIIGIKGMTRKKLGAKVLITLLDKRWDTINKASLGYLEGDMNENMLITYIAPDLMMPVNEFIDKMSFGFXTKGYEEFKGTNLLISIEFIGRLTNRSATKYKINVNDVIEKMHSKGIKFMSPLTIDTEERAGEKWPISEFIKNKTLSQPENFISYQDSKGNVSIRFTNYKTRASDDLDAESTDRNIIDNRRHSISELMEKLDHESEIKYYEDKLRDIADEYNNSMKSEWPKIRDKELYFYRELSRIKKQKKEKSLAIETPRTQEIKIEQIKSKEPREEIQKFDKVLSEEEQWEVNEKLLLESYEEENNLIEEIENIEEEDNAEQYNDFIDSLDEVGLHNLDNAMEAMKVDLGTGKRKRYGEGSVQNEGERXRPARAAGRWPPEKEEYSYHYIPGQYRHMGTKRRDFEKSIKFQNQKSDGAILNLAAHDPIDWPNIISFWKGLIVQKYIQNQHNIGNNVGDMITYLETFLGESAKVLWEQWVEKNPNNYEELKRAGSNPHNFANIVSNIIIAEDPELGYTTLQNERLKEIEKLTLTSXKGIKEFSQHYLYNATTDKQGYNKGIVERYFNKLPDPLGSMIFEEYKKETEGAEINISQAITFVFKQLRKICTGIQAQRSMKHSDYNFCNKIIQIPLSYGEDRPRNKRNHRYQSRNNNNIKTKKRYFLRRSDNRAPFLHKXNVRRYNPKKTYDKTCRCFICNSPDHLSRTCPNKDQKRYSSKYEEQERVLIIDSVNENILVCDDEIKDDESIYSIIETDEIENTNEEYESTNEELDLIDELAGLKIETMDXLNCEHDWIRGKGDYNIKCAFCIYYPSQDNRVTCSICLKQACVECIKANKQKWRKEIELESDERILSSRVRVXLENRINKLEVELENLKINYDIKALPENKDIQNTEFKEQVITLKDSNTAKIIQLKDAITNFGNKYIVKLPFKEILGIRIPVKVKLSPKVLYKILALVDTGCIKNIIHDKYFIKCSEIVHTIDDNKAEVSTDMSGIKKIHNQLARNIEVYINGTKYIIDEITIRNLSMISDDMIIGLRFLQXSVQTTVIHEQGITFIPYQNNVPYISEVRKRGGARIKPDNLEALNLESEERINEYELNYNQLNSKKSSTR

SEQ ID NO: 147135 - protein, 448 aa, Oryza sativa
  Clone ID: PAT_MRT4530_47692C.1.pep
MALRPPRPCPAGVQQRQHDVDGAGNAKTSPEQKLELLDLQEEDDELIFLDADDEEGRQLREKLESLEREFCLLDEQRDNALFQIHVLEETVRFREELVRRLTAVTPLVVAQLDEVVDEHHAVVTLGDGCERKMCVGVAGSLDRGLLKPSANVALNGRSLALVGVPPSDVAACSAARFLVADADKPGVAYDDIGGCEAQKREVREAVELPLTHPELFAAAGVDPPRGVLLHGPLGTGKTMLAKAVARETSAAFFRVNAAELARHDGPRVVRDLFRLARDMAPAIVFIDEVDAIAAARQGGDDDDGGARRHVQRVLIELLTQMDGFDESTNVRVIMATNRADDLDPALLRPGRLDRKVEFTAPESPEEKRLVLQTCTAGMSLDGDVDLDALAARRDKLSAAEIAAVCRKAGMQAVRDRRGAVTADDFDKGYLAVVGKKPGDAATEFHFYN

SEQ ID NO: 147136 - protein, 49 aa, Oryza sativa
  Clone ID: PAT_MRT4530_47693C.1.pep
PHVQRRVRLLIYSTWMTSLGVIRLTGEIVSYAQSDCSTRPYACHGLVCS

SEQ ID NO: 147137 - protein, 200 aa, Oryza sativa
  Clone ID: PAT_MRT4530_47694C.1.pep
MVAVALCRASDQGASLLRQRLVEDRPAPDNVGIYGVMEVRHGNTRIRLMHAFEKFQARWYIGFDSTLVLTVNLVSPKDAIGLKSISASKFWNRPMGVIKSPAVRFLEDSVKKINLFKETYPEVTEFKEDAAYFLGMKMIRALFGGACPSCSFFQKLLLLEAAPNNPQLLRMKNELRSQKLGYRAFPDSQKLATKQLLLRI

SEQ ID NO: 147138 - protein, 95 aa, Oryza sativa
  Clone ID: PAT_MRT4530_47695C.1.pep
MNASRIIIFPIYAVVPISPYPTTTEIEIASTKLTENNPQSTTSLNQSKRKVLTTSFSRGPPKAANSQVIYRSRGAATEGAGGGQHPPIRPSSLLY

SEQ ID NO: 147139 - protein, 235 aa, Oryza sativa
  Clone ID: PAT_MRT4530_47696C.1.pep
MGANADPTGVLLGGPHHRNPSPAPALAQPPGASTAAALRHDPGLSVRWTPEEQAVLEGGLASYAADAAVVRYAKIAMNLPDKTVRDVALRCRWMAKKESNKKRKEESSKKNKEKKERANDSSSKGPAHLVARPNAAPYSLPVLPMDDDDVSYKTIGGQTGQILEHNAQILNQIYTNISNMQVQENIPLLCQTRDNILAVLKEIGDVPEIMRQMPPLPVKLNEELANSMLPRPPHT

SEQ ID NO: 147140 - protein, 58 aa, Oryza sativa
  Clone ID: PAT_MRT4530_47697C.1.pep
VKERMKNDGGRHDFSQLSSEEYTAIFISVNVMLAVLTGIVHNKYRSLAKNPRKEKGGR

SEQ ID NO: 147141 - protein, 142 aa, Oryza sativa
  Clone ID: PAT_MRT4530_47698C.1.pep
AGGPRCRLPGGAPPPIRVLLLLLFFLHLQLHHYTKSSLPILATHDRSTCLLVVVVVVYSRDRSSFSCSVISRGLYICFFLPLDRGVDRWMGRQNQAPRHAYILLYIYIYIFKYIYIYIHPSLGDPSSISIPVHGWLFNFCSN

SEQ ID NO: 147142 - protein, 123 aa, Oryza sativa
  Clone ID: PAT_MRT4530_47699C.1.pep
MASEDQPRPTSSPDEATASGGRGEKDVRCRHQLEGWMPDASFPSNADPAAPPSPHVWIRRRLRAMTMTRMPAVDSSDNDDDSNDKDSGDGLWILGHHHFPLMLPSCSTSSAATSIWALAPKRD

SEQ ID NO: 147143 - protein, 592 aa, Oryza sativa
  Clone ID: PAT_MRT4530_4769C.1.pep
MATEASTSAAAGAGGGSWVEGMSADNIKGLVLALSSSFFIGASFIVKKKGLKKAGASGVRAGVGGYSYLYEPLWWAGMITMIVGEVANFAAYAFAPAILVTPLGALSIIISAVLADIMLKEKLHIFGILGCVLCVVGSTTIVLHAPQEREIDSVAEVWALATEPAFLFYAVTVLAATFVLIFRFIPQYGQTHIMVYIGVCSLVGSLSVMSVKALGIALKLTFSGMNQLIYPQTWMFTIVVVACILTQMNYLNKALDTFNTAVVSPIYYTMFTSLTILASVIMFKDWDRQNPTQIVTEMCGFVTILSGTFLLHKTKDMVDGLPPTLPIRIPKHDEDGYAAEGIPLSFYVGAKSPNKLVHTLIQPLPMAEKEECKVLIDQASNEAGDPHQDDDCEDEDDDDSSSLILLTNLILSGTARLNVLLPTATILAFAIFAPLLTDDGKCTRLNRALTGALMLLCAASCVFFTLTDSFRSPTGRLRYGIATTSGIRTFCVGGRRRRRGGGKAGPREPERYRLRWSDLFHTALALVAFVTFAASHHDIVLCYYPGVPRKVVNTVPLVIGFVVSLLFVLFPSKRRGIGYPFLLSTDLVYLRR

SEQ ID NO: 147144 - protein, 51 aa, Oryza sativa
  Clone ID: PAT_MRT4530_476C.1.pep
MESKGGKKKSSSSRSLMYEAPLGYSIEDVRPAGGVKKFQSAAYSNCAKKPS

SEQ ID NO: 147145 - protein, 100 aa, Oryza sativa
  Clone ID: PAT_MRT4530_47700C.1.pep
IHWYAIQRRLSLEKKTIYGCVRAFHKCLERFMVYRTYLMSNFWTSGISSSVEFAPSLLGTCHRVQQHSFLSVRSDSTFGKYSDDVVRTCVGRTREFRIGT

SEQ ID NO: 147146 - protein, 190 aa, Oryza sativa
  Clone ID: PAT_MRT4530_47701C.1.pep
MKTILASETMEIPEGVTVQVAAKVVTVEGPRGKLTRNFKHLNLDFQLLEGGRKLQVDAWFGTRRTMAAIRTAISHVQNLITGVTKGYRYKMRFVYAHFPINASITNSNTAIEIRNFLGEKKVRKVDMLEGVTILRSEKVKDELVLDGNDIELVSRSAALINQKCHVKNKDIRKFLDGIYVSDKGTITEDA

SEQ ID NO: 147147 - protein, 61 aa, Oryza sativa
  Clone ID: PAT_MRT4530_47702C.1.pep
VICDHVKISFHFFILSPIHSILTLDLAHFFNSTAMLLLVDQARAAAALRSDVMPEAFKVLI

SEQ ID NO: 147148 - protein, 116 aa, Oryza sativa
  Clone ID: PAT_MRT4530_47703C.1.pep
WQPLTGAGYWEKSYIQLISSPSEVHSCLNNRMVHITYYTASTLMLLAMHEELVFYEKVIQTTGTYVTPPAWTGTGTPKHQSYAKVIGLQETPSTLKVARGMYTSFAGTGATLVSGV

SEQ ID NO: 147149 - protein, 169 aa, Oryza sativa
  Clone ID: PAT_MRT4530_47704C.1.pep
MATAASQASLLLQKQLKDLAKNPVDGFSAGLVDDSNVFEWQVTIIGPPDTLYDGGYFNAIMTFPQNYPNSPPSVRFTSEMWHPNVYPDGRVCISILHPPGEDPNGYELASERWTPVHTVESIVLSIISMLSSPNDESPANIEAAKDWREKRDDFKKKVRRIVRKSQEML

SEQ ID NO: 147150 - protein, 736 aa, Oryza sativa
  Clone ID: PAT_MRT4530_47705C.1.pep
MSGGGPPKKRNFKIELFKHRVELDPKYAERTWKVLEHAIHEIYNHNASGLSFEELYRSAYNMVLHKYGEKLYDGLERTMTWRLKEISKSIEAAQGGLFLEELNAKWMDHNKALQMIRDILMYMDRTYVPQSRRTPVHELGLNLWRDHIIHSPMIHSRLLDTLLDLIHRERMGEMINRGLMRSITKMLMDLGAAVYQDDFEKPFLDVTASFYSGESQEFIECCDCGNYLKKSERRLNEEMERVSHYLDSGTEAKITSVVEKEMIANHMHRLVHMENSGLVNMLVDDKYDDLARMYNLFRRVFDGLSTIRDVMTSYLRETGKQLVTDPERLKDPVEFVQRLLNEKDKHDKIINVAFGNDKTFQNALNSSFEYFINLNNRSPEFISLYVDDKLRKGLKGATEEDVEVILDKVMMLFRYLQEKDVFEKYYKQHLAKRLLSGKTVSDDAERSMIVKLKTECGYQFTSKLEGMFTDMKTSQDTMIDFYAKKSEELGDGPTLDVHILTTGSWPTQPCPPCNLPTEILAICDKFRTYYLGTHSGRRLTWQTNMGTADIKATFGKGQKHELNVSTYQMCVLMLFNSTDGLTYKDIEQDTAIPASDLKRCLQSLACVKGKNVLRKEPMSKDISEDDTFYFNDKFTSKLVKVKIGTVVAQKESEPEKQETRQRVEEDRKPQIEAAIVRIMKSRRVLDHNSIVAEVTKQLQARFMPNPVVIKKRIESLIEREFLERDKADRKLYRYLA

SEQ ID NO: 147151 - protein, 66 aa, Oryza sativa
  unsure (1)..(66): unsure at all Xaa locations
  Clone ID: PAT_MRT4530_47706C.1.pep
MFGAIAGGIASALAGGAMSKLFGGGQKAXSGGIQGDVLATDNNTVGMGDAGIKSAIQGSNVPNPDE

SEQ ID NO: 147152 - protein, 46 aa, Oryza sativa
  Clone ID: PAT_MRT4530_47707C.1.pep
QLIVYLYNSPSATGSPNSIPNLIGYILHIYRTLLDSLPCQIHMWPT

SEQ ID NO: 147153 - protein, 370 aa, Oryza sativa
  Clone ID: PAT_MRT4530_47708C.1.pep
CARYCLFIRTDLGVILSFQVSIAPIPGKRVEHQGVKIELLGQIELYHERGHFYDFTSLVRELDVAGEIYERKTYPFEFSTVEMPYDSYNGTNVRLRYILKVRIGRPYATIVVEYRDFCFQFLVARLFLMVSTIIIGLSICVFTCVVSVFGMLFLPTDEDRAKVRKTYADVMETYQSQYAMYKAWLDEDARASAILVASMEVHLTGDVVILASAHLVWTHLRDRYVSIGDALYLAMVRQEQSLQQRDALVDEFYTQTTQLSSIWCQLDSLVPDVCRTCKCCQRQRSHMDLRRIYDFLTRLRSEYESTRAQLLARHPRVTLMEALPEIRLREAGALVLPSGCSYYSFGTFITDSRFLYFAITYFFTSCAIYQ

SEQ ID NO: 147154 - protein, 108 aa, Oryza sativa
  Clone ID: PAT_MRT4530_47709C.1.pep
YCLPHPWRCALPQVCCRCPDAQPCPCPAAPAAQLIGIDEISSPLPSSSSPDDTTLTLIQQQQQDGKPQSQAAAAGLIIGRGQMRASTMLMNLISWGVSHSSIQEQRRN

SEQ ID NO: 147155 - protein, 596 aa, Oryza sativa
  Clone ID: PAT_MRT4530_4770C.1.pep
MTGGEEQGRRLFGVSLTDRPRWQQFLICSSGFFFGYLVNGICEEYVYNRLQFSFGWYFTFVQGFVYLGLIRLQGFTVKQMVNPWRTYVRLSAVLMGSHGLTKGSLAFLNYPAQIMFKSTKVLPVMIMGAFIPGLRRKYPFHEYISAVMLVIGLILFTLADAQSSPNFSMIGVAMVSGALVMDAFLGNLQEAIFKMNPDTTQMEMLFCSTVVGLPFLVVPMVLTGELMRAWTACSQHMYVYAVLVFEAMATFVGQVSVLSLIALFGAATTAMVRTLVLLLKVTTARKAVTLLLSYLIFTKPLTEQHVTGLLLISMGIVLKLLLENKENVPRRQVRKTVQHWDDKQREIREVEEEKAPLEWECGSHVNERNETGWIGPSIFEHFLHVLSAFLPSTESLKVLFSRRSLGLMGLSCAVISSVRWPTGPVRCLHPSVSHLLPSHHDDHSENPSPPAQPPPLPSALRSPSRSQALGLPLPFGLLHASRRSLSTSPRSNDELDASAEVLSDAASSVSVPADVPRGRRGVCTRLRPGAVPRGGGRGGRRLVCTGRRPAAPHRRRPFLDGAELVGLYCAHVTVDPDANCPTAAEPDEGYGNAARN

SEQ ID NO: 147156 - protein, 226 aa, Oryza sativa
  unsure (1)..(226): unsure at all Xaa locations
  Clone ID: PAT_MRT4530_47710C.1.pep
STGSYYRCAVDFCRAQXFATDFLEIRAKEPSVHVLVIPGNPGIVAFYKDFVEELYENLGGQASITAIGXFHIAKRMQSVDDCFRCMNKLITRLQKKVKLCVGLYPFLTLNKKSMKQSAIGYIARSSLLSKGVSSFVSFIGSLQASVTRGIMRRLLGPSWSVTAVEATCGHLLWLSEEPDWNFISAKQDQIAFLFDVDDHWGPLAHLEEVNRSFAIPKLLLLLYLRS

SEQ ID NO: 147157 - protein, 88 aa, Oryza sativa
  Clone ID: PAT_MRT4530_47711C.1.pep
MSIMNSFINEILEKHVKVNKTSHQAAWECARPQEYMWALGADRAPGASFGGACCLGAQPEDSVGNARCPGLSLAQDLLPAFYAGWWAR

SEQ ID NO: 147158 - protein, 56 aa, Oryza sativa
  Clone ID: PAT_MRT4530_47712C.1.pep
LSSHDKVTDVRWDNYIQVRYMLYWLPSLGRDILLGYAIWVKCSTMVPVHIESGSYL

SEQ ID NO: 147159 - protein, 187 aa, Oryza sativa
  Clone ID: PAT_MRT4530_47713C.1.pep
DDRGSGEGGEGGGDGRRRRGAEKATRPGETDGDGGGEGGGGGRRRRGVEKATRAGKTDGDGGGGEGGEAGGGDSAGEEGDADGSRPRPPSTPRAPVLLDAPPHPRPVRHCRHLQRAQLHAALASPKFQCRVWGPSVWSVPAWGRGWGRGRGEIIPRLRGWGWRQELFVSLGAGTGWQYPWVQPRCHP

SEQ ID NO: 147160 - protein, 39 aa, Oryza sativa
  Clone ID: PAT_MRT4530_47714C.1.pep
WLLWQDGEGQAMVGHDGPCGGEGQARGLAPKNQIGGDGR

SEQ ID NO: 147161 - protein, 80 aa, Oryza sativa
  Clone ID: PAT_MRT4530_47715C.1.pep
PPWGSWAPSQPALGPPRSSYGLSSFFPFPSPSPFLCAFPPLLFFLLPVSVPFFLPRCALLWAPCACFRLFGRRLDCPRSG

SEQ ID NO: 147162 - protein, 38 aa, Oryza sativa
  Clone ID: PAT_MRT4530_47716C.1.pep
HDYDRAYRLTTHRHSLARPVCACTGRLDTLTRRLHPCP

SEQ ID NO: 147163 - protein, 101 aa, Oryza sativa
  Clone ID: PAT_MRT4530_47717C.1.pep
MDSRSEPPPEKERNRATPPSMPSVTSTSRRSFSASPPLPSPPWRRVRVVVSSSPEFRRRFPALHPAGAPILRLFADSSGFNPLPAFTLSALRWGTPPCLQK

SEQ ID NO: 147164 - protein, 147 aa, Oryza sativa
  Clone ID: PAT_MRT4530_47718C.1.pep
CASRPCRRLRPWSAQRRPQSLIAAAPPSLRTSGAAPLPLLPASDTASPTPQPARPPSPPLPLPLPQLAAPLPLLPPPATPLLLAAGISAVVPSHCPPSRPVVSFSLRTASSPRPVIAPSSRCTVARPPSYHGLKAAASLAPMSSGVD

SEQ ID NO: 147165 - protein, 373 aa, Oryza sativa
  Clone ID: PAT_MRT4530_47719C.1.pep
MERELLEAFEAARKAADAVGEAAAAAGAGEGESPEAARCVDALRRLRGARVTTAALVSTQIGRRIRYLTKHPHSSIKATASDLLGHWKKVVIEEDKKNGALQNGKSSSTVVKVEKVEPMKVEKASPRATVNNNNMDTRVVNHKGGKVEKFSNAELRTQSIKVEKVQKVVHKVSSVEKPSPVQGGPPRLTSVVKCGDASRDRIRAILGDAFSRVSEETRKDDREEVRNIIEEVKACDPFRIAVMVECALFQKLGNFNGPNKQRYRSLMFNLKDDHNTDFRRRVLLGQVQPERIADLTPTEMASDTRKLENKKIEEKALFECERGGAPKATTDQFKCGRCGQRKTTYYQLQTRSADEPMTTFVTCVNCNNHWKFC

SEQ ID NO: 147166 - protein, 69 aa, Oryza sativa
  unsure (1)..(69): unsure at all Xaa locations
  Clone ID: PAT_MRT4530_4771C.1.pep
VVHMQDSYMKTVLICLSMXNHALAAEVSLSYANLCLGTLYKVCVRLSAKVITDDAKQSPDIVRNKLCDL

SEQ ID NO: 147167 - protein, 209 aa, Oryza sativa
  Clone ID: PAT_MRT4530_47720C.1.pep
MATLGQRAKEAVGGAWGCLDPVVPSHLKTGYSAQEFGAAERRQAVTLGWRAKEAAAGAWGVQIRWCRGDASENNTNSPEELQIQDELEADIEEDLEREIIDDMCRLTRHLQRLYQQRDLRQLTGSATSYQMPLYHTTTEVLSEINIRINLDGQCNINITKIEQDDDTENQRKTCPNAYQSDKRQGHVKARQTYTVSRRKQQNHPVAPWR

SEQ ID NO: 147168 - protein, 190 aa, Oryza sativa
  unsure (1)..(190): unsure at all Xaa locations
  Clone ID: PAT_MRT4530_47721C.1.pep
PRVRGKVEIRGDPAYVRAACEGSLRRLGVDCVDLYYQHRVDKKVPIEVTIGELKKLVEEGKIKYIGLSEASASTIRRAHAXELGIGIVAYSPLGRGFFSGGAKLVESIXQDVRKHLPRFQPANLEKNAEIFERVNVMAARKGCTPSQLALAWVHHQGSDVCPIPGTTKIENFNQNVAALSVKLTLLARTL

SEQ ID NO: 147169 - protein, 307 aa, Oryza sativa
  unsure (1)..(307): unsure at all Xaa locations
  Clone ID: PAT_MRT4530_47722C.1.pep
MAAAAPATAAVRRMKLGSQGLEVSAQGLGCMGMSAFYGPPKPEADMVALIHHAVAAGVTHLDTSDMYGPHTNELLLGKALQGGVREKVEVATKFAVSFADGKVEIRGDPAYVRAACEGSLRRLGVDCVDLYYQHRVDKKVPIEVTIXITRCVVVGKVCMIMIEISTFILDTEEXLVLLDNSCGILKFSLRMGMKEHLPRFQPANLEKNAEIFERVNAMAARKGCTPSQLALAWVHHQGSDVCPIPGTTKIENFNQNVAALSVKLTPGEMTELESYASTDVVQGDRYAQTAGTWKDSETPPLSSWKAE

SEQ ID NO: 147170 - protein, 80 aa, Oryza sativa
  Clone ID: PAT_MRT4530_47723C.1.pep
KSLYIEQLTHILNELVKKGMMAMQFQLGYLLPNVQAKNIADLTYWYPNNLKTTYYSFMSQTKAQLISISLLALLLAVLIM

SEQ ID NO: 147171 - protein, 367 aa, Oryza sativa
  unsure (1)..(367): unsure at all Xaa locations
  Clone ID: PAT_MRT4530_47724C.1.pep
MAAAAPATAAVRRMKLGSQGLEVSAQGLGCMGMSAFYGPPKPEADMVALIHHAVAAGVTHLDTSDMYGPHTNELLLGKALQXGVREKVEVATKFAVSFADGKVEIRGDPAYVRAACEGSLRRLGVDCIDLYYQHRVDKKVPIEVTIGELKKLVEEGKIKYIGLSEASASTIRRAHAVHPITAVQLEWSLWSRDVEEDIIPKKFIHCKKSLAPFXYFSYFHFRELGIGIVAYSPLGRGFFSGGAKLVESIXQDVRKHLPRFQPANLEKNAEIFERVNAMAARKGCTPSQLALAWVHHQGSDVCPIPGTTKIENFNQNVAALSVKLTPGEMTELESYASTDVVQGDRYAQTAGTWKDSETPPLSSWKAE

SEQ ID NO: 147172 - protein, 65 aa, Oryza sativa
  Clone ID: PAT_MRT4530_47725C.1.pep
MDGRRIGPRNFSTFGSSRRDPSLPEAALVSEIKAQRCWVVDMELGGGDERLIRAQHCLREGDVVH

SEQ ID NO: 147173 - protein, 260 aa, Oryza sativa
  Clone ID: PAT_MRT4530_47726C.1.pep
TAGPEPSRALPCPSSAQGRSQVVVVVGGGREPRRRQEEEEGRDGGGEEAAGGVRRRGVGDERRQLRRHHHGKQAAHVLLLATPSPSPTTLDRIPLHGHGALQMDSKSAPIQAVSLSTLGRFADYYLNGRWLLNYNFSTGATFFILLSCSLAVFCNMSQYLCIGRFSATSFQVLGHMKTVCVLILGWILFDSALTVKNILGMLLAVMGMVVYSWAVETEKKASAPIPRNKSDMLDDSEDVPLKARVSGLPSSDLEEGEMKS

SEQ ID NO: 147174 - protein, 85 aa, Oryza sativa
  Clone ID: PAT_MRT4530_47727C.1.pep
LPVLVKFVPPAGGVIPMALPEAGFPGWGPLKLLWGPLWGMGPPPPLKAPFSFWVPPGSGKSLFPKKVFPVNWMPAPLLVSNVPFF

SEQ ID NO: 147175 - protein, 47 aa, Oryza sativa
  Clone ID: PAT_MRT4530_47728C.1.pep
EETVNLLLELQYSIFLLEVLSRVLELDGAFCLWTYGRQFFSLAHGIC

SEQ ID NO: 147176 - protein, 497 aa, Oryza sativa
  Clone ID: PAT_MRT4530_47729C.1.pep
HWDKVNVAATDHSMVWDNITGGSFNLDEGIIEALFGTAAVNRKTKPADSKDASGGSTSAGLGRSNSPEQIFLLEPRKSHNISIILRSLTVGREEIIDALLNGHTELSTEVLEKLSRLNISKEEENTLLKFSGNPDRLAPAEFFLLRLLLDVPSPFARVNALLFKANYAAEVAQLKQSLRTLEMASQELRTKGLFFKLLEAVLKAGNRMNAGTARGNAQAFNLTALRKLSDVKSTDGSTTLLHFVIEEVVRSEGKRLAINRNYSLRRSGSLAKSTDGGNPAASSTSQGPSREERQNEYLNLGLPIVGGLSTEFANVKKAALVDYDTVVNECAILGNRLAGTKKLLETYGDDGFARGLRGFVKAAEQELNELKGNQEKVLELVQRTTEYYHTGATKDKNAHPLQLFIIVRDFLGMVDQACVDIKRKLQQQKKPTPPPSSSQPAAPAATTKGAADDAPAPAQKPPEEVDSKRKRVMPRFPNLPAHFMKDNADSDSSSDEE

SEQ ID NO: 147177 - protein, 68 aa, Oryza sativa
  Clone ID: PAT_MRT4530_4772C.1.pep
DSCDTEVGPILMMVIYPNKDFMIYLTTGNRTEKFQGFISASVFYEVLENYATCEFSWSQTYVALLYSF

SEQ ID NO: 147178 - protein, 143 aa, Oryza sativa
  unsure (1)..(143): unsure at all Xaa locations
  Clone ID: PAT_MRT4530_47730C.1.pep
CCVFVLDQNSKWMDVNADGLQVRARAGRKNPTTLPVCLKTGTGKGLAGAVCPTAQWCLXXVTNLNXVTLXFFPPMGPTDPAPPXXSEWSXFMXFPKSPLXPQGXVXKVXXXQXEKXXSXLRRPTPRXNSFSPXXXXPIXXRFX

SEQ ID NO: 147179 - protein, 145 aa, Oryza sativa
  Clone ID: PAT_MRT4530_47731C.1.pep
MATTTTTTTTMGGLHRLISRSSCSRRTFAASTPPQRPRAIAVRVRSSSAGVTKSQRQRQRQVKLTYLEINSWVWEVGGARILVDPILAGNLDFGAPWLFDAAKKRLKNLGVQDVLQPPGVDLLLNPRRSHCTCDARSLGPPRRRA

SEQ ID NO: 147180 - protein, 223 aa, Oryza sativa
  Clone ID: PAT_MRT4530_47732C.1.pep
QNATRLHNIISWLLILIFEQGFILLAVQAHLPQLRPPACDMMAAAAAEGGCEEASGVKAGIFFAALYLVALGSGCLKPNIIAHGADQFRRGGGGGGDGDGDDGGDGKRLSSYFNAAYFSFCVGELVALTVLVWVQTRSGMDVGFGVSAAAMAVGLVSLVAGVFFYRNKPPQGSIFMPIAKVFVAAVTKRKQVCPSSSSTTAASTSAAPVHRINKFRFLDKACV

SEQ ID NO: 147181 - protein, 98 aa, Oryza sativa
  Clone ID: PAT_MRT4530_47733C.1.pep
MARRATARGAGLPAPFVVIVSVLLLLLLGSLPLHEVAAAEDEDQIGGGGLEHGASALKPDRGPLWRGCCNQYKEGGSYTGRGRFGPCIPTQPCPKPIP

SEQ ID NO: 147182 - protein, 270 aa, Oryza sativa
  Clone ID: PAT_MRT4530_47734C.1.pep
MLPVLILFGLLFSLQCNFPACSATNNGSTLMAGQVLTGGNKLISSNGKFALSFFQTGSSKSSDNTTLPNWYLGIWFNNIPKFTTVWVANRDKPITDPIFKQSELRVSRDGILVILNKVAKSMIWSSQIENRPKTSRNNSVVLLDNGNLVIRDASNPSNVWWQSFDHPTDVFLPEAKIGRNKITGQKYSFTSKKNSEDPALGLYCMELDPSGSRQYYDKLCNSSTVYFSTGEWNGRYFNSVPEMSSNVLFDSQFIDNDEEEYFTYTPFDKT

SEQ ID NO: 147183 - protein, 112 aa, Oryza sativa
  Clone ID: PAT_MRT4530_47735C.1.pep
AKCLMNDGVTSCSSSPARMLGTFGYFAPEYAMVGKASLKSDGFSFGVVILELITERQSIHHHRPPAEAEESLCLWAEPRLHDSRLVVAELTDPVLQGLFPYVEMQIMAHLAR

SEQ ID NO: 147184 - protein, 261 aa, Oryza sativa
  Clone ID: PAT_MRT4530_47736C.1.pep
EELMRVQLETTTQLNQLKEVHGAWLPPWLVTHTARAKEMMLSHWNEHGKPAVNSLLQKASEKSVQAKKWAEPHVEAAKTKWIPVIKEKWVTMKTNAEPYVQKVSARAIELYQAPKEKKKKKKVKAHKIADPYFQEAKKVSKPYIDQVAKATKPHVEKIRIYLKPYTKRAVHIYGNFLEKATAYHQQAQATVLDYLHQHELTKEFATEELAWYLASALLIMPIYVFYNVLVETFCSKKKKKATRNVNANHGHRKHKRRHADK

SEQ ID NO: 147185 - protein, 210 aa, Oryza sativa
  Clone ID: PAT_MRT4530_47737C.1.pep
MSLEDYAYRQYSSRPTITYRSHPPAQLSRYESQKRRDWNTFLQYLRNHRPPLTLARCSGAHVIEFLRYLDQFGKTKVHASGCAFYGQPSPPGPCPCPLRQAWGSLDALIGRLRAAYEESGGTPESNPFAARAVRIYLREVRDSQAKARGIPYEKKKRKRSQAAQPAGVEPSGSSSAAAAAAGGGDAGSGGGAAATTTAQPGGSGTAPSAS

SEQ ID NO: 147186 - protein, 238 aa, Oryza sativa
  Clone ID: PAT_MRT4530_47738C.1.pep
MEGGGGGADGQAQPVAQAPPAMQPMQQLSRYESQKRRDWNTFLQYLKNHRPPLTLARCSGAHVIEFLKYLDQFGKTKVHASGCAYYGQPSPPAPCPCPLRQAWGSLDALIGRLRAAYEESGHAPESNPFAARAVRIYLREVRDAQAKARGIPYEKKKRKRTQQQQPPPPPPPPPQHQPGAAAGEASSSSSAAAAAVAAEGSGSSAAAAAATSQTGGGGGGSTTTTTASAAAPTTATRV

SEQ ID NO: 147187 - protein, 57 aa, Oryza sativa
  Clone ID: PAT_MRT4530_47739C.1.pep
STETLSGEMNYISLTDTVNMTVSSSWNIDGYRYCIVAHIWNIASICLGPPHGDASTY

SEQ ID NO: 147188 - protein, 61 aa, Oryza sativa
  Clone ID: PAT_MRT4530_4773C.1.pep
MDFSGGAGATLLEMYQNAWLLLLLVCRCHPDACPTLVATPRLEAKGSSLGRGSKKVGVRAG

SEQ ID NO: 147189 - protein, 79 aa, Oryza sativa
  Clone ID: PAT_MRT4530_47740C.1.pep
MASAPSTTASGLAPPPFSSARGARLLPGALLRLPPPPARWSEFEAEVLQSDLPVLVDFVADWCGPCRLIAPVVDWAAEK

SEQ ID NO: 147190 - protein, 52 aa, Oryza sativa
  Clone ID: PAT_MRT4530_47741C.1.pep
RARRRSRLREEPLGDGGCDGTVTGALGGGVGVEGAESEGGDRCKRTRTLRTR

SEQ ID NO: 147191 - protein, 180 aa, Oryza sativa
  Clone ID: PAT_MRT4530_47742C.1.pep
MASAPSTTASGLAPPPFSSARGARLLPGALLRLPPPPASVGSFRVVGPAAAPPGGRRIASARVRCGAAVRFIGQSEFEAEVLQSDLPVLVDFVADWCGPCRLIAPVVDWAAEEYEGRLKIVKIDHDANPQLIEEYKVYGLPSLILFKDGKEVPGSRREGAITKAKFKEYLEPLLSTSTVA

SEQ ID NO: 147192 - protein, 60 aa, Oryza sativa
  Clone ID: PAT_MRT4530_47743C.1.pep
AGHSLGSHLLHVPGCPTVLGVRHGPVRRAGAMMRKQRREHYLLEAMAFCLQTIFSLNLYV

SEQ ID NO: 147193 - protein, 110 aa, Oryza sativa
  unsure (1)..(110): unsure at all Xaa locations
  Clone ID: PAT_MRT4530_47744C.1.pep
FLLLEKHWVFFYRPSVRLTFYGHHLGKGTQFGPTGRRANETVTKXNSHHEPLLGKGTPLPPPGPKKTEKDQAVKAQETARRPQRPRGEDQQHSEGPAHNPKQRSIQGGGR

SEQ ID NO: 147194 - protein, 203 aa, Oryza sativa
  Clone ID: PAT_MRT4530_47745C.1.pep
MQIPLVNGREGLRGSQDPAKWFPPCIQKLEALSSKYRFPVYLKLTCPCFQRLSTCRGMYQMSMNENTQPQGPSFLEMLGHGDWLFNQPPIMQPQTTGMYNPEQMMGYAGSIQSYGEPCSYGGGSSTAQHDIGPLQHDEPPPITQPAQDYDDVDLRGVEVVRRSVRERYSPERLSLSGRRPPTGARRKGKKKETGTSRNFDDEA

SEQ ID NO: 147195 - protein, 95 aa, Oryza sativa
  unsure (1)..(95): unsure at all Xaa locations
  Clone ID: PAT_MRT4530_47746C.1.pep
ERRYLKWRWKPRRCDAPRFTARAALERLRGKRVVFVGDSMSRTQWESFICMLMAGVDDPKTVYXVNGNEITKTIRSFGGRFASIDLTVEIFRSVF

SEQ ID NO: 147196 - protein, 47 aa, Oryza sativa
  Clone ID: PAT_MRT4530_47747C.1.pep
ELVTDVNLRALVIGESVLNDAMAIFVYRTMSLFISQASAGENFFMMV

SEQ ID NO: 147197 - protein, 72 aa, Oryza sativa
  Clone ID: PAT_MRT4530_47748C.1.pep
MHDHRNQAEMDARPDEKRQGSNTGRKGKRDARHRRWNRHASRPRRLVDEPTAPPRRRAGTPPATRPSARRRS

SEQ ID NO: 147198 - protein, 41 aa, Oryza sativa
  Clone ID: PAT_MRT4530_47749C.1.pep
MLSLVGRAVRLSFAVARIFSKAAAFFFFYAITAGRLAQLRG

SEQ ID NO: 147199 - protein, 83 aa, Oryza sativa
  unsure (1)..(83): unsure at all Xaa locations
  Clone ID: PAT_MRT4530_4774C.1.pep
APPRRRPRAVVPPRSCPRAAVPXCAAPETEGAADPGEGXDPQDLEQGKSSLFLEHVDPNCEIVLFINKIACNYEPPTCDYAMP

SEQ ID NO: 147200 - protein, 707 aa, Oryza sativa
  Clone ID: PAT_MRT4530_47750C.1.pep
MGCVASKNAVSVTPAADSSGALRERSLPRAPEAAATVVSVTASSLRCSSAAAAGRRSEKKRDEAAVAAAGEEPSEKAVIAAATASRSFRLRSLRRSLEGEQVAAGWPPWLSAVAGEAIQGWIPLKADSFEKLEKVGQGTYSSVFRARELDTGKIVALKKVRFDNFEPESVRFMAREIQILRRLDHPNVMKLEGLITSRLSCSLYLVFEYMEHDLAGLSSSPDIKFSEAQVKCYMNQLLSGLEHCHSRRIVHRDIKGANLLVNNEGVLKIADFGLANYFDPNKNHPLTSRVVTLWYRPPELLLGSTHYDAAVDLWSAGCVFAEMFRGKPILQGRTEVEQLHKIFKLCGSPADEYWKKSKLPHATIFKPHCPYQSTLQDVFKEMPANALRLLETLLSVEPYKRGTASAALTSEFFKTKPYACDPSSLPKYAPNKEMDAKLREDSHRRKASRGHGPEASRKSRLSRAARETTTVNKQTDGKEESKTKANGTKDNSILDRTKVNGDARLFSDIQPVSVAQVKERSRHVKNDSREEIPFSGPLIVSSSSGFAWAKKPPEDRSFARSRTKSSSRGQFTAELDQDNKMPAKENQNLGLKEQPNRDMHIARANSKVREPHDAAKRAVLKKWSQLGRPDSFDSYDTYHSQNFSNAMYLGDTLSSKNSIKGDHDQGERVEYSGPLLSQSHKVDELLEKHERHIRQVVRKSWFSRGKK

SEQ ID NO: 147201 - protein, 120 aa, Oryza sativa
  Clone ID: PAT_MRT4530_47751C.1.pep
MAAARQLGYHVTSSSEIATTTCGGAASAGGTGGTRAWLGLAQQAAARPTRGSGAVVAATERAQQQHGMVAPLGHRRRQQRNSDYTTTATHKTKTWREKESSPGDDGGNPAATPGDNDDAR

SEQ ID NO: 147202 - protein, 1407 aa, Oryza sativa
  unsure (1)..(1407): unsure at all Xaa locations
  Clone ID: PAT_MRT4530_47752C.1.pep
MAAAVPILSDWWGLLPCATNPTKASAPSTRSARFERFATTALYEKPRYVTKQAAKLMDHDGKLDLLLRKMEETEKKREESDKRLEKLEEQSRAEFLALKLAVESRIPAVEKHVDLLHGSVVDLQEKMEKLQSVVQDPSRECSPAPDASGQTFSTPSPTSPNHDSDVLDPTLGNWASAGNTSGIGGSVPPMSCPQFDGDNPQMWKCNCEEYFEVYGINPKHWVRVAGLNFTGNAAFWLQSMRSKLVEVSWGEFTEHVCLRFTKDRQEVLIRQWFHMIQDSSVSAYVEKFDSVMHQLLAYNSSLPLNYFVTKFVEGLKKEIRSGVLMQKPQDLDSACSLALLQEEILEGVPSVSLKRVDSASFVKQFPRQFSLGPSTPKPVSVMSPESQSAFKVRADKLAALKSYRRSKGLCFTCGERWSREHKCSPSVQLHIVQELLEALQQDDSHQELADSDSVETVVMALSQQAFSGTESVTSFRLRGWVQGIEVLMLVDSGSSHSFLDVSLTSKLKGIRPLLKSVSVKVADGGILSCSSFIPACTWCTQGQYYQTEFKILPLGAYDVILGMDWNFSLSLKNPLPYPPGELVIITXPLLPHFKPVFIRPYRHNPAQKDEIEKQXLNAITVKGKFPLPVIDELLDELSGSKFFSKLDLRAGYHQIRLVAGDEHKTAFQTHSGHYEYRVMSFGLTGAPATFQGAMNDTLAPVLRKFALVFFDDILVYSPDLSSHLSHLRQVLQLLCQHQWKVKLSKCSFAQPQLSYLGHIISDKGVTTDQSKIEEVVNWKVPTTVKKLRGFLGLAGYYRKFVKNFGIISKPLTQLLRKDVPFVWSPAADQAFLSLKQALVSAPVLALPDFSLPFIVETDASDGGIGVVLSQQGHPIAFVSKALGVKTKGLSAYEKEYLAILLAVDHWRSYLQQGLQFKICYRKGSSNSAADALSRKYNDDSSELQLVSSCAPVWLKEVTDGYLEDNFSAQLLTDLSLKANARPPFSLCNGVLKYKGRVWLGNNLEMQNKVIAALHHSPMGGHSGFPITYQRIKALFAWPRMKQQIQRSIKGCQICLQAKPDRSKYPGLLQPLPVPDGAWQIISMDFIEGLPKSGRFDCILVVVDKFSKYSHFVPLSHPFSAVDVSQAFMCNVYKLHGLPSVIISDRDKIFTTLSKTPFEVLYGYPPGHFGIREDACSIPDLTEWLTERRLMTQLLKQHLGRAQQQMKQYADKKRSFWEFSVGDWVFLKLQPYVQSSVARRANHKLCFRYFGPFQILSKVGLVAYKLQLPPDSTIHPVFHVSQLKSAVGFSPSVQPQLPALSHLKVPVAVLDSRQSHRGNSVVPQVLVRWSGDVAGQETLEDHVELQQRFPGAPAWGQALSQGEGIVSSAGVPDLLQGAALKEGVKQTSKDRPARMIKRNPRVFGPKWA

SEQ ID NO: 147203 - protein, 143 aa, Oryza sativa
  Clone ID: PAT_MRT4530_47753C.1.pep
MMPSGGTWGRGAGQRRAGHGGTWFERRTRRRRRRSSTAAAAVFCYSCIPRSCAVRCSAIAAVTAPTQARHHVASCCSTSAPTTTPPSCWLPLLHECATVSPTTLRSTRAALRRAAATSRAVEGEREEEDRKRKRRKGQFGQGM

SEQ ID NO: 147204 - protein, 582 aa, Oryza sativa
  unsure (1)..(582): unsure at all Xaa locations
  Clone ID: PAT_MRT4530_47754C.1.pep
RSHVTDRIRYGYAQCRLLHLRRDMTTSPHDSYEVLDYNFARVESKLTFYDGKYDYVAYIDWELAVDNEFNKYDFFHAQMIKAASNKFTSSALFWWSYVSNKPETWDECKTLMRKYFVSSYYRCTLLEKLEHMKQGDKTVREYIHEFKVCIIYSGLKECNENTMRRFFNGLNFEVQVMLANVAYNHRHLFMLARSVKSKILQDFISNEQSFVSPVTNVLQGVQNNQQKEETNVLDKKAEKYEAPTMFEKSLQGKLNGAEINEVEQLLVEPIVDILLSQVDLFDVPCDKKELCDNASLISMPQLVNNRAISSVSSFCADFKHVFHISHEVEERELLSSLNTXGYVRFDDFCELDNFKEKLFAKSNLPCPTNAIFHIFGEYNGKGIYLVHRVYICSDLEPHVDVDKTWTLGRXIANHIISSLSCFDLKKQVGYHALRDEHHMKKPMTFFHEEEEDDVTMTTIDTIIAHIVNQQEDITIKSTKCWNPIRPLARVLISNSRQVCICAPFWAREYLMESYRSPLSNGSNLISKFHLSRPQSYEQRIRLIYTGXINNPRKGVSIAKAQHNNISYGCSWVVNNHASDLTH

SEQ ID NO: 147205 - protein, 396 aa, Oryza sativa
  Clone ID: PAT_MRT4530_47755C.1.pep
MAAAPYHQPTSLEEVRTLWIGDLQYWADENYLYNCFAHTGELQSVKIIRNKLTSLPEGYGFIEFISHEVAEKVLQTYNGTQMPGTEHTFRLNWASFSSGERRPDAGPDHSIFVGDLAPDVTDYLLQETFRVSYPSVKGAKVVTDPNTGRSKGYGFVKFADENEKNRAMTEMNGMYCSTRPMRISAAIPKKTTGSQLQYGAAKAMYPAAGYAVPQVQPVLPDSDPTNTTIFIGNLDQNVTEDELRQICVQFGELICVKIPANKACGFVQYASRASAEEAVQRLHGTTIGQQVVRPSWGRSPASKQDQSAVWSQQADPNQWASAYYGYGYDAYGYAQDPSYAYNSYAGYTQYPQQVEGATDMASAAGSHAPGMEKEEVYDPMNLPDVDKLNASYIAVH

SEQ ID NO: 147206 - protein, 84 aa, Oryza sativa
  Clone ID: PAT_MRT4530_47756C.1.pep
SFSLSFLILILRNISSSSYSSAYVSLPQHRYSTPTGSLYYHFPYLSFLTLFLFNVFLSILIYSSSYSLYLILSNSTFLKNLYFS

SEQ ID NO: 147207 - protein, 83 aa, Oryza sativa
  Clone ID: PAT_MRT4530_47757C.1.pep
FKCHLFLLVGQAATTGVGKPRWCLMFPHPSAIRQGQGGPCYSSSGRGRRIPLALSRPLPLWLQGPGRCLSPTLMSWTGGVRYS

SEQ ID NO: 147208 - protein, 77 aa, Oryza sativa
  Clone ID: PAT_MRT4530_47758C.1.pep
LVSLSRAMGSMPCTNKWPQRKRLRNSWFCVKLNGGKMIACDVLIVLFNLNLKLLIHENHINMIQINICAPQHFLMQF

SEQ ID NO: 147209 - protein, 35 aa, Oryza sativa
  Clone ID: PAT_MRT4530_47759C.1.pep
SVSPGGKTDRAMPVNMQLMRRSDRSALRSDPQDHM

SEQ ID NO: 147210 - protein, 88 aa, Oryza sativa
  unsure (1)..(88): unsure at all Xaa locations
  Clone ID: PAT_MRT4530_4775C.1.pep
VPERCVRQVRHGWLQHEHDXYLTQQLHLPLVAASNLLTNFTGTADSFAGHLWTTAAPSVLSQLGMLGLVVSALVPAXPAPCSAAAAAL

SEQ ID NO: 147211 - protein, 491 aa, Oryza sativa
  Clone ID: PAT_MRT4530_47760C.1.pep
GKNWGIFICWLLGNGCLFGFNGMVTIEDYYVYLFPPFVLTTTALFAYHEAKINTRMRNLARYMLFFLSSFGVIVLDVASSGRGGIAPFVGLCLIAAAFGVADGHVQGGMTGDLSLMCPEFIQSFFAGIAASGAITSALRFLTKAIFENSKDGLRKGAMMFSSIACFFELLCVILYAFVFPKLPIMKFYRTKAASEGSLTVTADLAAGGIKSQPENPLNMDYALDEDPKKCDRLSTKDLLIQNIDYAFDIFLIYVLTLSIFPGFLSEDTGAHSLGTWYALTLIAMYNVWDLIGRYLPLIKCIKLTSRKGLTGAILARFLFIPAFYFTAKYGDQGYMIFLTSFLGLTNGFLTGPEQNALGNVLVVCLLGGIFSGVVLDWLWLIGKGCRPVVRGDTGVELIAIDRSTRRKDARIVRPARLHFSSGNPRATATYARDTDPVVVVVTVGVRATSPWGGGLSAAIGGALGDHAWIGFPRKLCLHSRTVDRRRPWVGE

SEQ ID NO: 147212 - protein, 418 aa, Oryza sativa
  Clone ID: PAT_MRT4530_47761C.1.pep
MSLEVAGAGAPQAQGKFLGILVCWVLGNGSLFAWNSMLTIEDYYSILFPTYHPTRVLTIAYQPFAFGITCIPTYHEAKLNTRKRNLIGFALFLISSFALIMLDIGTKGRGGLGPFIGVCIISALFGTADASVQGGLVGDLSFMCPEFIQSFLAGLAASGVLTSALRLITKAAFENSQNGLRNGAILFFSITCFFELVCLLLYAYVFPKLPIVKHYRSKAAAEGSKTVASDLAAAGISNEHSIQAEEDPKKCDRLSTKDLLIQNIDYAFDIFLIYVLTLSIFPGFLSEDTGAHSLGTWYALTLIAMYNVWDLIGRYLPLIKCIKLTSRKGLTGAILARFLFIPAFYFTAKYGDQGYMIFLTSFLGLTNGFLTVCVLTEAPKGYKGPEQNALGNVLVVCLLGGIFSGVVLDWLWLIGKGW

SEQ ID NO: 147213 - protein, 335 aa, Oryza sativa
  Clone ID: PAT_MRT4530_47762C.1.pep
HASDSEAEKKPVVVEKANGGNGFDDLIPGFSGSGPQRSRKIIDDNKDEPAVRTSKSTASVLDDDPFVVLETNSASGSTYPSPSSFMDPLEHLNNSASSKGKNVDNTTDNDSLPDDSSAFNQVPKSDPLFTSEFNGDTKYMNPPSKARDSNPLHGSMNGNSARGSSTEDLGDAKTKSQSARYSDIYVDGSSSDRYATDGVGDQSPRSTESEDDIWLTVSEIPLFTQPTNAPPPSRSPPLLKQRPLQAKANGNYDGYVRQSNQNHNQYRDMPDQAEVSSLDEMEGFAKDKSQMPSYDDNFFGEAEQSERTSSDREEKERQARLDQEQEMKLMEEKKR

SEQ ID NO: 147214 - protein, 99 aa, Oryza sativa
  Clone ID: PAT_MRT4530_47763C.1.pep
MEGRRHGENESIVGQMVLGVHFYYHCLPTPCARLPQATASQHRPTPTRPPPHASNSGPPTQRPKDPKARPHPAPIYPALHCSYQYNGKMRGICTITTVH

SEQ ID NO: 147215 - protein, 60 aa, Oryza sativa
  Clone ID: PAT_MRT4530_47764C.1.pep
LTTPASLVISTVDRNLAQAQALLAFNVSSLEYGSRTRRVLWCTVGTHYHPLAGVLVMRFV

SEQ ID NO: 147216 - protein, 708 aa, Oryza sativa
  Clone ID: PAT_MRT4530_47765C.1.pep
MEREVGGTEPQPVLGRMVAIEDYILCRFLPPLSEFLLLVLNFYSLSLLHLNPNSIAFLSIFAHLCETYIGVEPFLDLFCFYYELRWMESNRVSGCVGFRLRDGLKSRYIPFQCPSSRSKWRARWFYLQIENSDFIFVVPEEQPDKILSWTAKPTLTPALRSFVKAIDDLRVRGLSGYEVAADFVGLNSKTVERCVGQLMISGPTMAGDIPVPLCEKEATEREAVINALPLTDVIGPLVDHQAAASLKERVVQETSDAATAVAASSGSRPQRRGRKFTSVLASDASPPPPRRQKLVTLGEKWARAKAAQDGSGETSSASPAVASTDVVVAPRSRKATPHCLAGDLGPVRGPPADVLSRGELQVEMGRLLEAGARGISREIAEARTAAASSANKRADKLERKLAEVREDLQKMRELVAGNERQRRGLEGRMAELESNLSELRGLLRVTYTGLHQLAGECGVKTTIPVNPDKFSLTSLLEELATAMEAISSKHTARIGEEASNGIYTGACHVLACVRDVDVEDVQQRGQPVAPAIIPALAFEAHASPDDVDEILPSTTGVATTSLDLESALTDQDRRIQYWKTKFEVAKLERTMLEVKKEQAVETLRGHEVWFNSYLKSCCTSMAEICRELRVPRGNPEESAAGYISWLNGACTQLEGVVKRIDGALKQECRRSSRYVGGHVLACIRDHRPNCTSSFSMKGSLVLGGLQRR

SEQ ID NO: 147217 - protein, 796 aa, Oryza sativa
  unsure (1)..(796): unsure at all Xaa locations
  Clone ID: PAT_MRT4530_47766C.1.pep
MDLGKSTSTNASLKRLQEDGALPGHGTMEREVGGTEPQPVLGRMVAIEDYILYGFLPPPSKFLLLVLNFYGLSLLHLNPNSIAFLSIFAHLCEAYIGVEPFLDLFRFYYELCWMESNRVSGCVGFRLRDGLKSRYIPFGXTKKWRARWFYLQIENSDPVFVAPEEQPDKISSWTAKPTLTPALRSFVKAIDDLRVRGLSGYEVAADFVGRRIQPLQARAHPAFDYSGPEDTTRVSPQGLNSETVEWHVDQLMISGLTMADDVPVPLCEKEATEREAAINAAASWKEGVIQEASDAAATAVTSGSRPPRRGRKFTSVLGSRRKASSPSASDVSPPPPRWQKLVTLGEKWARAKAAQDRSGETSSASPAAASTDVVVAPRSXTPHGLSGDLGLVRGPPADVLSWGELQVEMGRLLEAGAHGISREIAEARIAAASSANERANKLERELAEVREDLQKMRELVAGNERQXRGLEDRMAELGSNMSELRGSLRVTFTSLHQLAGESGVTTTILVNPDEFSLASSLAVLATAIEGIHSKHAARIGEETSNGIYTGACHVLACDRLAHPELDLQRVLEQGATNDARRGVMEEVGDLGEDVDVEDVQQRGQPESSPILPDLASEGHAWLDNMDEILSARTGTTTTSLDLENALADQDRRIQYWKTKFEVAELERAMLEVKKKQAVETLRGREVWFNSYLKRQDPEESATGYISXLNGACAQLEGVGNCIDEALKQECRRLSRYAGGHVLACIRDHRLXLHLEFLHEGFARSRRTPAEIDHLAKSMAPLAEKVFQSMDWRWPSR

SEQ ID NO: 147218 - protein, 206 aa, Oryza sativa
  Clone ID: PAT_MRT4530_47767C.1.pep
EDGALPGRGAMEREVGGTEPQPVLGRMVAIEDYILCRFLPPLSEFLLLVLNFYSLSLLHLNPNSIAFLSIFAHLCETYIGVEPFLDLFCFYYELRWMESNRVSGCVGFRLRDGLKSRYIPFQCPSSRSKWRARWFYLQIENSDFIFVVPEEQPDKILSWTAKPTLTPALRSFVKAIDDLRVRGLSGYEVAADFVGRRIQPLQAQAH

SEQ ID NO: 147219 - protein, 178 aa, Oryza sativa
  Clone ID: PAT_MRT4530_47768C.1.pep
MRSVKAAVAAYRYYQISRMVVVSGRAGRLQNMSTQRHNPTAPAERIYTQGEGSLFDKLEVDTGLNIIDVFAKLILQKFTDTMNRRELLLQSDKKAVAEAFWRGIMDGRVDDMVPTETMRTPWRSGSLLPHTQGYTHEEQQHDCAALAVEPSRRSGVAVRTGQRGTRAWSMTLRTTGGV

SEQ ID NO: 147220 - protein, 139 aa, Oryza sativa
  Clone ID: PAT_MRT4530_47769C.1.pep
MSLRVLNPNAEVLNKSAALHMNINAAKGLQDVLKTNLGPKGTIKMLVGGAGDIKLTKDGNTLLKEMQIQNPTAIMIARTAVAQDDTSGDGTTSTVLFIGELMKQSERCIDEGTHPRFLVDGFDVAQRATLEFLEKFKTS

SEQ ID NO: 147221 - protein, 704 aa, Oryza sativa
  Clone ID: PAT_MRT4530_4776C.1.pep
MASSLVSRTHLTPRPAAAASTASPCSARFAVRRRRGLVGGVRCQAQASDMDGHYMRRCVELARKAAGHTSPNPMVGCVVVRDGRVVGEGFHPKAGQPHAEVFALRDAGDLAENATAYVSLEPCNHYGRTPPCTEALINAKVKDVVVGMTDPNPIVASKGIERLRSAGIDVRLCVDEEASCRKLNEAYIHRMLTGKAFATLRTTLSMNGVVINQIGSGADQPEGYYSQLLKEYDGVIISSNFAKTNTLPVSREAGAKQPLYIIIAQCENSQLNIPFLKEERAAEAVVLSDSPITVEPAGVDVLVLDQMNLDAILQLLAQRGLCSVLVDFREAGGGIASLLNNFQDDKLVQKVVVELLPVWAVSKGPSDLAFGGSQSFPLKDVEHSELSLSLSIMASESECVAVAEPPHVHVHLHPDGTEPLAHIAVDYCPEACHHASEDGEIHVTYDDRGGARWRSRCRFLPGGAVAATIRAPAGDTAGLNYNLYLSSLEGSRDMDEIDFEFLGHDKCAVQTNFHVAGGGGREQIHVLPFDSSDGFHHYAIAWGADAIEWRIDGELIRREERVAGEPWPEKPMFLYASVWDASHINDGKWTGTYHGRDAPYVCSYRDIRVPLALSLEDEEDPYKCACVGDASAAIAAADAAEQVDAGDAPAAAAAADAAEEVDAGDAPAATAAADVAEQVDAGDVPASAAAADAVKEVDAGAGKD

SEQ ID NO: 147222 - protein, 148 aa, Oryza sativa
  Clone ID: PAT_MRT4530_47770C.1.pep
MKVKILQWHAVASWTWDAQDETCGICRMAFDGCCPDCKFPGDDCPLIWGSCNHAFHLHCILKKTFLELRNVVFKYYVLIFSANADGHNLLSETGRKLHLVHVVLSRVQAPGSLATVGKSRDLPFYMAPNFRLLEFLGSFLLGYNVNSV

SEQ ID NO: 147223 - protein, 214 aa, Oryza sativa
  Clone ID: PAT_MRT4530_47771C.1.pep
MGGEVEADTWDLCGSHAESAARRSKLELKPLRDLVCTGFLDVNGPLDGPSTSPPTGRHQLRCRIQSQHPRICEFGLSTAVSRAGDWWRRRRDSPGQRVPQPADEVRDSGRRTAHCCFICRAGVLSAGECRVAVGVDPLEVLDRLPDRGAVHQMNRREAGNSTRSTVRAPKLVSGDWSNVSVSQFRGVSSDSEVGVAVWAGCGFFRLLLFRDMMD

SEQ ID NO: 147224 - protein, 120 aa, Oryza sativa
  Clone ID: PAT_MRT4530_47772C.1.pep
GHAFGHAFGHAFGPQFHVPFTFLFFSGGGTGDDRVRGGPPSLLAVAGAGYSSPPVTTPASASASPGSGGGDLAAIGPAFGPGFGFRAAGHGSRGSGGTIQFPNTGDPLFMHGLSRRNTPS

SEQ ID NO: 147225 - protein, 47 aa, Oryza sativa
  Clone ID: PAT_MRT4530_47773C.1.pep
AVRVHTANSSLQPRPGRSQGVRVGRFINASGTTGFPTGKRAVLPRYS

SEQ ID NO: 147226 - protein, 38 aa, Oryza sativa
  Clone ID: PAT_MRT4530_47774C.1.pep
MAEVAGSGGCCARPMMTKEGPSLDLSSNGGEAFGGPGA

SEQ ID NO: 147227 - protein, 67 aa, Oryza sativa
  Clone ID: PAT_MRT4530_47775C.1.pep
RYRMFMYFCPSPAPIAPLRRTQHRIEVILHGHIITAGKPNHSQCIAPAQLHNEPLENKNIAYRYYIG

SEQ ID NO: 147228 - protein, 100 aa, Oryza sativa
  unsure (1)..(100): unsure at all Xaa locations
  Clone ID: PAT_MRT4530_47776C.1.pep
GKLGRPPGPGPNFPAPGRGFPPPRVGGPPFPFPALYKVPAIFQPPPLQQGGVFFFFXTPAPGPAFLALNLPPLFGVFPHFFLAPGGLSPPGGGWGLILKG

SEQ ID NO: 147229 - protein, 162 aa, Oryza sativa
  Clone ID: PAT_MRT4530_47777C.1.pep
LGIDFRRLLLVSSPLRRLRRSPSRERAGAPGAGAVVRPVASARILVSGDGTLQVDYFTFSPSIADYIRDASLVISHAGSGSIFETLRHGKPLIVVVNEDLMDNHQSELAEELATRKHLFCASPQTLGETIQEMDIETLNPYVPGDAKPVVSLINKFFGFPDD

SEQ ID NO: 147230 - protein, 172 aa, Oryza sativa
  Clone ID: PAT_MRT4530_47778C.1.pep
MGDRERRTVFVTVGTTCFDALVKAVDSPQVKEALLEKGYTDLIIQMGRGTYVPSKVSGDGTLQVDYFTFSPSIADYIRDASLVISHAGSGSIFETLRHGKPLIVVVNEDLMDNHQSELAEELATRKHLFCASPQTLGETIQEMDIETLNPYVPGDAKPVVSLINKFFGFPDD

SEQ ID NO: 147231 - protein, 128 aa, Oryza sativa
  Clone ID: PAT_MRT4530_47779C.1.pep
MEQELGGAGRRGWCSSPLGAAQRRSSTAWELAIARCKGRGMASDAVRRRMERRPRRLDAKHLGAAHGARKGVASSFSLCGGGVERGRRWSRDAVDLTIGVVDGGGEPSVVVAGDMHTNDNTIWGFEEM

SEQ ID NO: 147232 - protein, 120 aa, Oryza sativa
  unsure (1)..(120): unsure at all Xaa locations
  Clone ID: PAT_MRT4530_4777C.1.pep
DIPDELDAAGLLAPVVATLVVSTGAPSPSSIMLPSPSTTSHRPVLPRCPXREXEKETSVACFTRHGQPTSAPCHYHHPDGAPAGRGRCXPPMRDGARRSSSNTTQXNRGLRARLGVDHPP

SEQ ID NO: 147233 - protein, 122 aa, Oryza sativa
  Clone ID: PAT_MRT4530_47780C.1.pep
SNKRNNEIIIYLGFFYAYKENDYYYTLHFRLSKYFDLGQSQTTFIFKSITNINIRIFSVVTSVLHRVFIRSLRTNFSSSDSVAHLPVQSPTSNPTQKTKSQSQVPSPNTNGNPSQNPRENHY

SEQ ID NO: 147234 - protein, 101 aa, Oryza sativa
  unsure (1)..(101): unsure at all Xaa locations
  Clone ID: PAT_MRT4530_47781C.1.pep
PSHPEGLLGWAMAELAKSNLSARCLGAEVPRASAIMAGADIPARKPSRRLAGLGHGRAGXVQPQRQVGAEVPRASAIMAGADVPARKPSRRLAGLGYGRAC

SEQ ID NO: 147235 - protein, 125 aa, Oryza sativa
  unsure (1)..(125): unsure at all Xaa locations
  Clone ID: PAT_MRT4530_47782C.1.pep
PATCRRSWRRRGRSWRRSGPRSRRWPAASSPCRRSSATPXRAQQDQGTRRRRRRRRWRGGRQGDRPAGGGPQVRRDRRRQATAAPAVAVPRRVPEEEVRXRSPTRRRRWHQRTTARHRRRHCRTW

SEQ ID NO: 147236 - protein, 101 aa, Oryza sativa
  unsure (1)..(101): unsure at all Xaa locations
  Clone ID: PAT_MRT4530_47783C.1.pep
FXXXXQNFXMGHTLLXTKXXXXKGKXGTPCFXNXSXXIHIFXCPXXWLKXCLKXLALXXPRXNISLQLIACLKETLKIAFLXSACXHKKSVVGSTXPFLSX

SEQ ID NO: 147237 - protein, 179 aa, Oryza sativa
  unsure (1)..(179): unsure at all Xaa locations
  Clone ID: PAT_MRT4530_47784C.1.pep
MNYRAASVRVRVTSTLSCPPLPPAAPRAQPHARRFIGCTTPRFSSTQRCRREQSITGDGVTPSPXENYHIANSRILVIFGXEIXSIKGSLSRSLDFMTLDLQPMYALTFRSVLIXYHIIVSXLVSTGLYYCYIASSSADCLYIIIYIGHIVDSSKPYHYRLVSAXGWNYSIGLSADRLI

SEQ ID NO: 147238 - protein, 60 aa, Oryza sativa
  Clone ID: PAT_MRT4530_47785C.1.pep
PPRYPPQGALSLDCSAGFCARAVSPRTLSVSRFPGALCGLDPGFSIQPPPCVGFGLLVTA

SEQ ID NO: 147239 - protein, 56 aa, Oryza sativa
  Clone ID: PAT_MRT4530_47786C.1.pep
LTIQCLINQFGLFAPLLFACHFFGAFACPAFLSSLSPGFTWLSLHIHFLSALKTHH

SEQ ID NO: 147240 - protein, 44 aa, Oryza sativa
  Clone ID: PAT_MRT4530_47787C.1.pep
MMRWFEGFEEDSAACDTDEIVVEGFDKTSRQVGSTYSCFVNFGG

SEQ ID NO: 147241 - protein, 28 aa, Oryza sativa
  Clone ID: PAT_MRT4530_47788C.1.pep
GVVFFFFFFFFFFFFFFFFFFFFFFLPP

SEQ ID NO: 147242 - protein, 53 aa, Oryza sativa
  Clone ID: PAT_MRT4530_47789C.1.pep
MTQSQTQFGLLLRNKLPGQLHHIVIDDNHTCKRHCSVQPIFRLLFILVQEISQ

SEQ ID NO: 147243 - protein, 157 aa, Oryza sativa
  Clone ID: PAT_MRT4530_4778C.1.pep
TQKTGPLALANFTVPLGVTPPPPPLYWALQGGFPFPFRFCHFFERPFLSPFLLFPPLAKRGFSSNPFFLGPPRFFPFPRFLTSAPSFFFRSPILKILPPLPPFVNLYPFKPPPPFFFFFFFFFFFFFFFFFFFFFFFFFFFFFFFFFFFFFFFFFFF

SEQ ID NO: 147244 - protein, 201 aa, Oryza sativa
  unsure (1)..(201): unsure at all Xaa locations
  Clone ID: PAT_MRT4530_47790C.1.pep
SPRCRRGRGVRQHMHAVFAAVGARDAAHGEAVAELTRKVEEQEQRMKEFMEVVGGXGAAKHTGKEVQEHAAERRKHKSTLGEALERRGDGGGWSSPRRGAGRRRGCRQQRHWRRGAEAATSGCGGDGGNTWGGEEGGAHIPCARVVAVVVVAGEVGRGEGGRWRKEGEWWREFIIAVAGEVGVMVVRLVEKGWFCSWRMIL

SEQ ID NO: 147245 - protein, 214 aa, Oryza sativa
  unsure (1)..(214): unsure at all Xaa locations
  Clone ID: PAT_MRT4530_47791C.1.pep
GGKXFXLXGRXKQXGVVIXGTXGKNKXPVXXXGDWGXTFXXGXXWPWLGRXGLTXIKGTKXXSPAGXAXLEXLNPPGXRDLAXXXSFLIFWXGXXLGXXXXXXXFXXLVFFXGFXPPXXLXXXXPXLLXXIKKNXXFLRXXXXXXFXXXIXXXSXXSXXRXXFSXKKKKKKKKXNKKXXXKXKKKKKKKKKKKKKNSRGGPVPNSPYSESYYNX

SEQ ID NO: 147246 - protein, 60 aa, Oryza sativa
  unsure (1)..(60): unsure at all Xaa locations
  Clone ID: PAT_MRT4530_47792C.1.pep
DFNGXXFXXXLNXAINFSHKDIPVTIYERALCNSDGSPPVSFVQGNYTVEPCVCLVINTS

SEQ ID NO: 147247 - protein, 406 aa, Oryza sativa
  Clone ID: PAT_MRT4530_47793C.1.pep
MAPFASGGGYCSEAWSYVASLEEHAADAAAANFTLAIAHHGDLESPEFWLGLPEESKNMAYRLATARCELSRAVVVCHSEPGAWYPPMYESLPCPPTGYDEPAFVIGRTMFETDRVSPEHVRRCNQMDAVWVPTEFHVSTFVKSGVDPSKVVKVVQAVDVGFFDPAKHAAIPLPIGVPVMVPDDSRLDPVNSKGKGFVFLSVFKWEQRKGWDVLLRAFLQEFSGADDVVLYLLINAYHSDTDFDRKIRSFVKDSSIEKPMDGWAEVRLIDEHIPQSALPRLYKAADAFVLPSRGEGWGRPVVEAMSMELPVIVTNWSGPTEYLNEENGYPLDIDRLTEVTEGPFKGHLCAEPSVDRLRTLMRHVFSDREEARRKGKKAREDMVERFSPAIVATIVADKIQQALAST

SEQ ID NO: 147248 - protein, 484 aa, Oryza sativa
  Clone ID: PAT_MRT4530_47794C.1.pep
MVAAVRAPVKPEMVELSPAAMERYSSDADTTAPNSSLSSAASSTGSLARCSSLSRLSFDCSPSAAVAAAATSCSPPRASVLLRPHRSGDVAWAAIRAASTTSAAPLGPRDFKLVRRIGGGDIGTVYLCRLRSSPERESPCMYAMKVVDRRAVARKQKLGRAAAEKRILRQLDHPFLPTLFADFDATPHFSCAVMEFCPGGDLHSLRHRMPSRRFPLPSARFYAAEVLLAIEYLHMMGIVYRDLKPENVLIRADGHIMLTDFDLSLQSTTSPSLDGDTDTDDEASGGASCFPDHLLRFKRRRNAVAAPRPRFVAEPVDARSCSFVGTHEYVAPEVASGGAHGAAVDWWAYGVFLYELIYGRTPFAGATNEATLRNIVRRPLAFPSGSGSCGPADADARDLIARLLAKDPAARLGSRRGAADVKSHPFFKSLNLALLRSSRPPVVPGAGAGAAPLHRSQSCKAAPTTPPPPTTTKPANATARFDLF

SEQ ID NO: 147249 - protein, 67 aa, Oryza sativa
  unsure (1)..(67): unsure at all Xaa locations
  Clone ID: PAT_MRT4530_47795C.1.pep
KXNLGWXLNXXLVXXNLNGGXXAGXPLDXXXNTGTPYGHYADPSLXWXGNCQEQIWLTSTRAEFGTS

SEQ ID NO: 147250 - protein, 996 aa, Oryza sativa
  unsure (1)..(996): unsure at all Xaa locations
  Clone ID: PAT_MRT4530_47796C.1.pep
MARQSSREAQRWRMLADVGEEAVRGRRRPAPRLARRGGCDGGGGGGGLDLAGLLSPGGPRPLPFSSSSMAWHGDRRGERSVGWRPPARRQAWLGGGVEAGRSGGGGGVEAGGSALQVSSSINSIATAYSYRSMSDTHGTGAPTSCTPSSHDYTKPALVVVVVVMATVSGAMSVVGVERLIRGRFTLFSMVRFLLRSTFVLILPLLSSMSRDTVHRPSVLFVLLWMLLVELMRKKVSSMARSSGADGGAFSRATGGRFRLMGHCDEATKLAWIGWLIFQNTYYSDSKCGDHKVLAMFAVLWSLVVAKLLQRVFNEWKAQESLTAAGNTHLIAGYMQLVVDKEATAAAAAAAAAGTALARCKYVVMGEEKLVVHAVKKKKHDVVTTTITTPHCGYGVGTYPQHQSEQKHVNLLVDMAKCDEVVTVXEDQEKDKAATVVVLLLLHRHRQPVHXYIYQLCFSFALFKLLRRRFEHYPMVEAGSQTSRQLLLEELLVGGAKKTFRVMRQELDFLDSYYDAGSPVAMSSPWLFIVNYFFSLVFVSTYLAAIIVVLVDVEYNMGTFKSHLPSPGLYIAVSILLVVTLVAVEFTDLLTNYILSNWFMVHLFCLQAGDGGGRVWRWVCKPAIWMFIAGRFLLFYSFQCMLRLSCRGVNVDKIKLKQVSILRVCEPVHKVLTWSPQVKLATEGQTAIVNFLEDVVRDSLKDDGNVAIVSMPKLSGLQPKKGVDDTATQVVLACHLATELLEMKHVVMVDKEAKKEKKKMKREDRRAHDLHRGVATALSRYCMYLVARSPELLPDNERWVADRYGDMRAFLDEAASRRRRRCCCCLRRRLWKCGCWRTFLMDDMVVDAAADPAAQAGVALFRKLHARTTTTEGGAVVVSAWKELADFWVRMVVYLAPSSDVEGHAMALADNGGDLITYLWAFCTHAGIIRDPNPSDKSLVIRPSELDPAVPTVVSSSSSLPPSSSPASPPAAAGSGRVSASRGRPSRTTRSPAAAAT

SEQ ID NO: 147251 - protein, 105 aa, Oryza sativa
  Clone ID: PAT_MRT4530_47797C.1.pep
CRPPPTTTASLFLPTVRPDPPRCRQPRDVAEAPPPPRSRTTPATPGRFVPARALLLRPPLAAATVASPPSPDDHRPSPTPPSPRRSEEDETRREEGETSPRPHLF

SEQ ID NO: 147252 - protein, 316 aa, Oryza sativa
  Clone ID: PAT_MRT4530_47798C.1.pep
MADDDEIALEPGYVFHPSDDGLITLFLRPSIAKIPFEDRLINHADVYSANPAELVGEHRPAPGTHGSSSVWYFFCSPRFTSKRKTSGRRQRAVGGGGGGESVWKSEGGKKAVIGADGRRVGYLQKFSYGVYESSSSGSARTFTRLGWCMTEYGLDDDAIDGADKQVLCKVYRSPRAVCAEARTAAAAKSADSPCSGSKRKADDGADHPEAPPSARPRQEEAGSEQPAILPELDLDALLSAPMDDSLGVEFDTATTEQYMRYLMNDEPLPWAPTMEVAGGGDEFIETTNGPCMGEEEIIQRLASGETLDDILGSNPN

SEQ ID NO: 147253 - protein, 108 aa, Oryza sativa
  Clone ID: PAT_MRT4530_47799C.1.pep
PRSAPPTLLLRRRRPPPCRAPASPGRRCGESGRRSGRPPASRGGAPAAAPPAPSPSPCPPSPARTPAPAPATSMTSSSIQASKRTPSDWRYTAAAAHSRTLSSSQLSW

SEQ ID NO: 147254 - protein, 70 aa, Oryza sativa
  Clone ID: PAT_MRT4530_4779C.1.pep
LHKLASSIVAPLFFFFWWFFKHRGVSTKYFSLFIFFFYSTLEHLTLFKFFTTFCLKKGQPTIGCFKQTWP

SEQ ID NO: 147255 - protein, 206 aa, Oryza sativa
  Clone ID: PAT_MRT4530_477C.1.pep
MAEEEAKKVEVEVTEAPPAAAAAAETEPAAKDVAEEKAVIPAPAPPAEEEKPPVDDSKALAIVEKVADEPPAEKPAQGGSNDRDVALARVETEKRNSLIKAWEENEKTKAENKASKKLSAILSWENTKKANIEAQLKKIEEQLEKKKAEYAEKMKNKVAIVHKEAEEKRAMVEAKRGEEVLKAEEMAAKYRATGHAPKKLIGCFGA

SEQ ID NO: 147256 - protein, 90 aa, Oryza sativa
  Clone ID: PAT_MRT4530_47800C.1.pep
NNLSINFVQLSKLNFHFKFIRLVMSYKMSEKEVIAKNDNKETETKDVTSQKRSINEVTSEDSNSVLDGLDDDSNSNVAQGKLNNSKSKKQ

SEQ ID NO: 147257 - protein, 389 aa, Oryza sativa
  Clone ID: PAT_MRT4530_47801C.1.pep
METPREPLTGRSRTVPPGIDTVRVIDGRPRLRPPPAGCSNGDGSIRSRMTSSMSPAPAPAYAQVMEDMEKGKELAAQLQGLLRDSPEAGRFVDQILHTFSRAMRALDKAAVSAAGGEGSEVQSEVTCGGGASAGGKRKAPAADRKANCRRRRGVFEKGIEEIGKIRKTRTQQSSGNSVVVKNLDDGQAWRKYGQKEIQNSKHPKAYFRCTHKYDQLCTAQRQVQRCDDDPASYRVTYIGEHTCRDPATAPIIAAHVIHQVAAGDNDDGCGGLQAGSRLISFVAAPAAPVDAAAAPTTSTITTVTAPGPLLQPLKVEGGVGSSDQEEVLSSLTPGSSAARGGAAAAESRVPSGRTRAMSRPPCTGATTPSPAWSSSRTTRLSSIWTTLWV

SEQ ID NO: 147258 - protein, 242 aa, Oryza sativa
  unsure (1)..(242): unsure at all Xaa locations
  Clone ID: PAT_MRT4530_47802C.1.pep
GFMGLGRGQLSIMDQLVEKGVISDSFSLCYGGMDVGGGTMVLGGMPAPPDMVFSHSNPVRSPYYNIELKETHVAGKALRXDPKIFNSKHGTVLDSETTYAYLPEQAFVAFKDAVTNKVNSLKKIRGPDPNYKDICFAGAGRNVSQLSEVFPDVDMVFGNGQKLSLSPENYLFRNGKDPTTLLGGIVVRNTLVTYDRHNEKIGFWKTNCSELWERLHISEVPSSAPSDSEGDMAPAPAPSGLP

SEQ ID NO: 147259 - protein, 141 aa, Oryza sativa
  unsure (1)..(141): unsure at all Xaa locations
  Clone ID: PAT_MRT4530_47803C.1.pep
MLHKVRESLLRDKASWLHYRDLGLGLVRHHEEATSRVVRELTGXIHGSPPNPHAILRTTALQLADALGLHACAVWMPAAGQPHDLVLMHHLTTRPDAADLLLEVGDACTVTTDDPNVVDVMPSKVTKVLKPDTALAIVDGH

SEQ ID NO: 147260 - protein, 559 aa, Oryza sativa
  Clone ID: PAT_MRT4530_47804C.1.pep
YVDKVKLGEPGYRVRYYAEKFKEEAELKPIDQVQRDVVQKYVEGLCWVMRYYYQGVCSWQWFYPYHYAPFASDLKCLAELEITFFLGQPFKPFDQLMGTLPAASSNALPKYYGDLMNDPNSPLKSFYPKDFEIDMNGKRFAWQGIAKLPFIDERRLLAETQKLEETLTDEERFRNRTMFDILYVRETHPLAAQIAFLYQMCSQSPNASYIIPIDPAASGGMNGFLCLSERNCYSIVVTSPVKGFNGIAQNRVLNATYLNPQYHKHIPEPPEGVIIPAKILKPSDFKPFPILWHEDNSRRQPRERPQVSGALSGSVLGEAAHRLVKNSLQIKSGYSAGLLDMPYRGAPYGPGNRPRPAGPLGYERGFVENSYNGHMSRSVPNSHPQFFGDAQANRQNVRILERPNYRNNDSAIHSGMSQLTIQDGPRMHQNNRMQNSGFSPNQPHPNQYAGFPPQRPMQNSGFTPQRPAQYSGFPHQRPVQIGLQHQPAVNGIQPPLPPSAWIGRPISGVPAGVPAKQDPRMAMDRQPKQDNSRSQHDKRQQATKVVYRVKGQGPNGLSE

SEQ ID NO: 147261 - protein, 106 aa, Oryza sativa
  Clone ID: PAT_MRT4530_47805C.1.pep
MAGESRRRRRAAAEAVAWCLALGVVALLLVGSVEKEEEVVVVRGARLAAARPCEEIYVVEEGETLHSISDRCGDPYILEQNPHVHDPDDVFPGLVIKITPRPGRRN

SEQ ID NO: 147262 - protein, 178 aa, Oryza sativa
  unsure (1)..(178): unsure at all Xaa locations
  Clone ID: PAT_MRT4530_47806C.1.pep
DAWENLRTEYLMVRKGVDLQAKGCYSAMQVAMRFKHQNRTVPRSVASLLSDHHGGCGGXALCRRREYXLSCINSPDVEHGGAAXSRRRIGYFPCLTAEDDVLNAGASATAAAALHRIEYYGYAVAAAYSPAPSSTGFMVRDELLTPGDECSTPGLSPLLGTTGGFFVRIFNYSAEEEE

SEQ ID NO: 147263 - protein, 88 aa, Oryza sativa
  Clone ID: PAT_MRT4530_47807C.1.pep
PSRQTWWTTVATVTYASTAARGKRCTGTRTHRARTTSLGGATDASGQTRTPGKQNHAAATGAVLTAARRIAYAVTVRRVDRAAACRRH

SEQ ID NO: 147264 - protein, 101 aa, Oryza sativa
  Clone ID: PAT_MRT4530_47808C.1.pep
PNYDRLCNFALVLLLQLYWIWVSNRHYVTLLLGLVLMTGGKAAVKMRQLGDQQGRDWWWASYIIGHALYIPHIYSYTQQVLFTPKFGTYGRNTGKLPKFGK

SEQ ID NO: 147265 - protein, 62 aa, Oryza sativa
  Clone ID: PAT_MRT4530_47809C.1.pep
MWRSTQAKGQRPKSKLCNQENYAGEGYMGEWHVTKHEGSAWTRIHAKERTRGPSSPGKPLPS

SEQ ID NO: 147266 - protein, 484 aa, Oryza sativa
  Clone ID: PAT_MRT4530_4780C.1.pep
MEGWPDLLAPRPHLLLLAPRRPVAASARHYGAAPQRCSLPQLLATLAMYYYKLICEMRMTSAPLSAAVDCSGVAGWEDLSFEGRGRGGGGLGSGDGLGKTRAPAAAAIHARRSVEHGSSGPVALVRGVTFRVVNKCPFPVWPAAAPNAGHPVLAGGGFLLPPGQSRRVSAPPTWNGRFWGRTGCNFTSTATNHHGNAAASCLTGDCGGRLACNGTAGAPPATLVEVDLHEDQSKGSSYDVSLVDGYNLPVAVWTKPPTPGAAAADRKCVIPGCAKNVNAVCPPELQVTAAAAVVACKSACVAFGTDAFCCRGAHGTAETCRGSAYSRVFRDACPAYVSYPYDTAAARCYAEGVRDTSASGAPETSDGLNGLWSTIVGESREQMGTAIIGRIYAGQPSVVEKQQRTTSSRLGIGSARARADACNDDDAWCLRRWIERRGEQGRRGGCDDGEGCGMEEKGMGVPGRTAATVRKEERGRERIGDAGG

SEQ ID NO: 147267 - protein, 635 aa, Oryza sativa
  Clone ID: PAT_MRT4530_47810C.1.pep
MKATPPPAKRRRGPRLAVLALVFCSLLVPIAFLFNRFPAVYVTDERPQQEIDLPSFGRMGLERSGGVTVVKPEDGSGANAETKDTPEMIHRGGINSHHHSDNVPSKVSANPKVPPPPKIEPLKPKAKSVPVPVQRTEVISGNNMKPAKVQNADDVEKAKACQLEFGSYCLWSIEHKEVMKDTIVKRLKDQLFVARSYYPSIAKLKGKEALTRGLKQNIQEHERVLSESIVDADLPSFIKSKIEKMDQTIGRAKACTVDCSNVDRKLRQILHMTEDEAHFHMKQSAYLYNLGVHTMPKSHHCLNMRLTVEYFKSAPLDSDDSAVHKFNVPDHRHYVILSKNVLAASVVINSTVSNSEETENVVFHILTDAQNFYAMKHWFGRNSYRESAVHVINYEHIILENLPEFSSQQLYLPEEFRVFISNLERPSEKTRMEYLSVFSHSHFFIPEILKDLKKVIVLDDDVVVQRDLSFLWNIDMGDKVNGAVKFCGLRMGQLRNLLGKATYDPQSCAWMSGVNVIDLEKWREHNVTENYLQLLKKFQHNDDEASVRAAALPISLLAFEHLIYPLDERLTISGLGYDYAIKEELVRNSVSLHYNGNMKPWLELGIPDYRKYWKRFLTRDERFMDECNLEKLVLS

SEQ ID NO: 147268 - protein, 53 aa, Oryza sativa
  unsure (1)..(53): unsure at all Xaa locations
  Clone ID: PAT_MRT4530_47811C.1.pep
RCIFFFALLAIAACSASAAFDAVTQVYRQYQLLPHLMLLQQMLSPCXEFVRTQ

SEQ ID NO: 147269 - protein, 46 aa, Oryza sativa
  Clone ID: PAT_MRT4530_47812C.1.pep
SDSTIQAKIPSILRQQPHLTCRLIFRTCMDWMPPRSIHSSGRATYR

SEQ ID NO: 147270 - protein, 113 aa, Oryza sativa
  unsure (1)..(113): unsure at all Xaa locations
  Clone ID: PAT_MRT4530_47813C.1.pep
STSFILPQHRHPLNRPIHFFTFCLLLLCIGSLSQQLFGQITILWQTTRCGNPYXCTFDRLXSFEPIREDEGFKLAQSEFFDVSNEXFQCTGLFVVRRXVNEPKSLLLSQYTNG

SEQ ID NO: 147271 - protein, 61 aa, Oryza sativa
  Clone ID: PAT_MRT4530_47814C.1.pep
PPMLKKIMVVVGGQTSAVIPVNNGTTLERKEVLGAAPNQKKKNSPKIILLSKNPPNGISFF

SEQ ID NO: 147272 - protein, 597 aa, Oryza sativa
  unsure (1)..(597): unsure at all Xaa locations
  Clone ID: PAT_MRT4530_47815C.1.pep
MPTVSVGRDRFFVALGRTYTQEEFEVLCFEFGIELDDVTTEKAIIRKEKHLEDDDGEVDGDDDEVIYKIEVAANRYDLLCLEGLARALRIFTGTEATPMYKISCIPRDSMLLMHVKPQTSQIRPYVVCAVLRGVTFDEARYNSFIDLQDKLHQXNICRKRTLVAIGTHDLDTLKGPFSYEVLPPQEINFVPLKQEESFRADKLMEFYKSDMKLKKFLHIIENSPVYPVIYDSNRTVLSLPPIINGAHSAITLKTRNVFIECTATDLTKAKIVLNTMVTMFSEYCENKFEVEPVEVVSHDGSKTIYPDLSCYKMEVSLSEVVGPIGISLDETKVISLLNKMQLQAESCPSKGEPRISVSVPPTRSDILHARDLVEDVAIAYGYNNVPKSKPKCMTIGGRQPLNRFSDKLRAEVARAGYMEVLTFTLWSXEGNFDMLNRTQDVNKAVIIANPRTSEFEVVRTSLMSCLLKTLKHNIDHPRPIKIFEVGDVVTLDGSRDVGASNNRRLAALYCNKQSGFEEIMGLVDRIVNVVRAPHIKFGQNYYVPTNEPEFFPKRQCKIVMSDGKQIGYLGIVHAEVLRKFGIPDPCTFVEIDVEALL

SEQ ID NO: 147273 - protein, 81 aa, Oryza sativa
  Clone ID: PAT_MRT4530_47816C.1.pep
MGGHTRRILNLLLQLYRLLVRRTKCPFIAASRNRLFMSKTKRAPVSLRRLAKFMEGKEENTIAVIVDTSTDDKRIQEIPIM

SEQ ID NO: 147274 - protein, 93 aa, Oryza sativa
  Clone ID: PAT_MRT4530_47817C.1.pep
GRTGPQVGMDNMRMRLSELEKECSTMRQEIQSWGVARRWWASRVPKKFNLKLKSQMCSAQEGSVSEQHKSMSAKLDKLQAKVSRQKKQLAGDA

SEQ ID NO: 147275 - protein, 141 aa, Oryza sativa
  Clone ID: PAT_MRT4530_47818C.1.pep
LYALHRTLPPSTAAAFTVATSTDVLWHRRLGHLGQDALARLRTILPMTKEHSTGLYHACQLSRNTRLSLALQVGDLFHALTLFCLGRPRRLPRHSLRHTRHRPTPLERHKAAPLPPLCARLHRPTHLGRPTASTPPQQRRH

SEQ ID NO: 147276 - protein, 356 aa, Oryza sativa
  unsure (1)..(356): unsure at all Xaa locations
  Clone ID: PAT_MRT4530_47819C.1.pep
SSAFLPQGGRLTLINYVLSIILTYYMCSLELSLTVIKAIDTARKNGLXRGNNPNSTRKYLASWELVCRLKDKGGLGVINLRNQNVVLLLKHLDKFYRNVDLPWVDLIWKSYCTSKSLHLVSNRAYNKDEFVKMACSKPLEDXFMLPMNAEAYGEFLVLQSELDNVHLSEGLGDHWSYIWNVDKYSAQRFXKMNYSCLQPPRPLVWIWKTKRVMKIKVFAWLLSLDRINTRDMVDCRHYAKENDDLTCVLCSGGIREIRLHLFFTYPFSLRCXQYLGFDWSPYLNFFQMIVLVRIRFGXEGFLEIFFTXSWYIWKQRNGLIFHNVPPTFHGWKVQFRKELLLHMCRMKEPLKQLVFD

SEQ ID NO: 147277 - protein, 212 aa, Oryza sativa
  Clone ID: PAT_MRT4530_4781C.1.pep
MQASRGDGAAATMGRRCGMEEKGIGSAGEDGSDGNRRLGESPKPISPLPLELMPKRGATAVDLPSTLPSSRGGRMMGRRLSTTGLTSAETIWPDAIWLPLLGSQLPSLSSPRRRHEDARVDAELRRVPPSRHRTKLPHGSDVVTAVLPIRVVDGSSMTSSPCTALNPFKVNSRRPPTLPPCPRGRCTGRWTPLRTMNGKGETLIPPLPLSVT

SEQ ID NO: 147278 - protein, 79 aa, Oryza sativa
  unsure (1)..(79): unsure at all Xaa locations
  Clone ID: PAT_MRT4530_47820C.1.pep
LLPSPHLSPPPSLRPSFAEVLAWAKEKTPSVRNAWMIKEVDWGPNXDLLQVYFYLTASLLVHRRQEIKFYIFWIRIRAS

SEQ ID NO: 147279 - protein, 51 aa, Oryza sativa
  Clone ID: PAT_MRT4530_47821C.1.pep
KPYRQYMTENSAVGHQAVCILPKKVITQPSKIAPVIRFPGRTVSSCLDCDF

SEQ ID NO: 147280 - protein, 112 aa, Oryza sativa
  unsure (1)..(112): unsure at all Xaa locations
  Clone ID: PAT_MRT4530_47822C.1.pep
MWATGHGMAQARPCLGRGLSGRHGPTDAPGRAVPAHSLYFVCRAWPVGPXVPGQPSVQAGRPRHGPAVGPGRHGPXPCRAVPCLGRAKKPCHGPGLRVSGLMAIYSGRRVIG

SEQ ID NO: 147281 - protein, 94 aa, Oryza sativa
  unsure (1)..(94): unsure at all Xaa locations
  Clone ID: PAT_MRT4530_47823C.1.pep
LRGPSGVRSPREXTGRGVNPXRRRRFPLPPPGRRCRKRPGLGSXCKDGGGGAFAVERGPGPARGSRSAFGGGCXDPTANHLSDGXGWDDEEQQS

SEQ ID NO: 147282 - protein, 316 aa, Oryza sativa
  Clone ID: PAT_MRT4530_47824C.1.pep
MARWAARHGTAQARPCLGRGLSGRHGPTDAPGRAVPAHSPYFMYRAWPAGPSCRAGPTVPGQPSVPVGRPRHGPTVGPGQHGPDPSRAVPCLGRAKKACRGPGLRASGLMANYTRQERSVSQIDEGPYRNMEKKVEELKKSIKNSYNLDQMVNEANVEAHYKWTGPEIWKDTAGKVDIFVTSVGSGGTLAGVGKYLKEKNQSIRIVAVEPAESPVLSGGKASKHRIQGIGVGFETEILKAHKPIITYEVKTIYSEDAITKARMLAREEGLLVGISAGANIAVCLELAAKEENKGKMIVTMLPSGADRYLSSDLFKY

SEQ ID NO: 147283 - protein, 288 aa, Oryza sativa
  unsure (1)..(288): unsure at all Xaa locations
  Clone ID: PAT_MRT4530_47825C.1.pep
GWLRFCDRFSKIFTPGSTTAQRARXATPKGRGRGSERRHPYHHAKRRGXDDDERARRXVSGTTEXTTSAAILGRRRDAAGTRLDDVEPRTKTTMGLQRLTXKRERLDGGTNATTMTGPARGXDDDDELRRGSGGGEASPRATLSLRCRRWRWRRRPAHWHGGRGCRSGCRRDRGRGGAGDGVPAKFGRRRGXGRRREHASDGHRAKRRAGRRRGGGCDAEDGDGTAYRRTGEEGEAAGGGRRHGRADDSREGWYDHGEMRDEAKTRERKEGVPFYRRGEGAGHGRGWN

SEQ ID NO: 147284 - protein, 835 aa, Oryza sativa
  Clone ID: PAT_MRT4530_47826C.1.pep
MEHYSRGGGGGEGRWVVMRDIVINNKTVCTTPGPMLVATFAVSPDLRTTEKFMVTTTVLMTFLGAALFAVGVLGRFSGRHRGHSSATRIFFRASFALFLPFMSFMFSQAKGRDLPFRAYLILLWMLLVELLRKKVFAMVAPAGDAFSRGVGRYSLFDAVEDAARMIWIGYLVYSYVHGFAVKSLFVILWIFSVAKLCKRAACIHLAKGSFDLAKNATLVSGYMAQLVGEHRQLDLQVVDDGGDVRGNRTMRACNYTVMGESELKINRTPHGFEIDGLEDILAAGGTSGDGDGNGKTEEQLVRVSTIWKLAESDPLFKYNVRRRQKLEDICLGIALYKLLRRRIERCHMAERGTPEARAFVLRGLLALGGGDRGGEAADAERAFDVVEMELRFLVEYYQAIIPLALPKPGIFIANFAFSVVFILLYCIAVLLVTGNGNMFRVLGSLFRGFIGISIDTVVQFRCFRHQVSALVGMVCSSSDLIVTFLLTLTLFSVETYELALYLLSDWFAASMLCNYARMRINRDHQRRQAAQQRHAQRAIRSGLWVRHRSRPVIKAHQVTMLKLHQLHPRRVWMLASRILSRRLAGLRPAVVTAEAKVAIVAALKAFLESDGGDGGDLQFTSCVAVLRRHGFFHHGPEWACDSSKGAATVILAWHLATALLEARCDGEPLPRKGEAAVTLSRYCAYLVSYEPGLLPDDPEWTEKAYNDVKSGLGSFFRSCSCATAGRREKLVRFGDDWEAEAPSAMARGVKLGKLLEDRASESTEGFEEVWTMLLEFWAALLVVVAQRPSAGPEGHALALANGGEFITHIWAMITHAGVRVHRHHDYQSFPVTHVV

SEQ ID NO: 147285 - protein, 292 aa, Oryza sativa
  Clone ID: PAT_MRT4530_47827C.1.pep
MRRLGCLCILISCMLVLVYASDYRDDIFGRDKANQEGAKAINEKNGFNFPFILFGGLLSMLTYVTPFVVHWSTGSNPNALKIVYTNTDFIKTGMATLAWLSFSLCQLHGANGKIVGAPAVAIYSAGLIIYGTSLVFKWSPSGVMSDAVCHTTMLSMLLIVILLLDVGVFGHLKREHKIANTISALATLTQVASSLLPHGDLCKGCICQDQAPDAKVPRIRNRRKLVVYIRSLEAGFTLYWAGCCIYRYDHTYFRIANITSVILSCIASYISIFEALKPVLGDNDEEALKTVI

SEQ ID NO: 147286 - protein, 726 aa, Oryza sativa
  Clone ID: PAT_MRT4530_47828C.1.pep
MMAPARSIVQHTQPPGTPTHYTGMLPLARVLGIDTEASLFQAAAAGVQSSKSRFFRARLGLHLTKKDGWMQRQQVRSTTFKRFCTTGLPSDVVIEVGDMTFHLHKFPLMSRSKKLHDLITNRESRAAGGGEQDEEEEEDAGEIREEEVVLEVDEDSDVHRIRLPDFPGGAEAFEQAAKFCYGVKLDLTPATAAPLRCAAERLGMSDDHSDDNLISRADRFMSHTVLRNPRDAIRALRSCEGLLPLADDLGLVSRCVDAIAAKAAASTPTALFGWPINDAAAAAAAAAGDRPRRKNNAGAGATWFDDLAGLSLATFTRVIAAMKERNVGPEIIEGALIAYAKRSIPGLSRSGRHVGGATAAAAAAPSSDGEQKALLETVIANLPEETIKSNAHTGTAVGATTARVLFGLLRTTSILQASESARDMLERRIAARLPDAALDDLLIPSYSYLVETLYDVECVERIVRYFLEGRDADDGNDDGSELETPGREASRRAMLAVGRLMDAYLGEIAADANLKPDKFCDLAWALPDGARVYDDGLYRAVDIYLKAHPGLREEEKEKVSGVVDGRKLTLEACTHAAQNERLPLRTVVQVLFFEQLQLRRAIARTIMANEGGAAGQGEEEGDSDAGGTWRVATRGNQMLRLDMDSMRNRVQELERECTSMRKAIEKMDRRGGGSTPGERGATPAMEGRWGSMVTKRFGCKFPAQVCQSQQRTVVARPRRPRIEQSP

SEQ ID NO: 147287 - protein, 51 aa, Oryza sativa
  Clone ID: PAT_MRT4530_47829C.1.pep
CSFISTVPKNLYPFFLRKESNSALAYQMLKLSWLLSSNLGNQFLHVSLKQS

SEQ ID NO: 147288 - protein, 106 aa, Oryza sativa
  Clone ID: PAT_MRT4530_4782C.1.pep
TKCTCSPIHQISYSQAKGNMALVPVFAAAARYPPPWSTGIVFFVLGLALVPGVQGGPAGVHRDEVHDSSVVNHVIERLALGESLGEEAPAVPRIQDHRISDLQPNW

SEQ ID NO: 147289 - protein, 160 aa, Oryza sativa
  unsure (1)..(160): unsure at all Xaa locations
  Clone ID: PAT_MRT4530_47830C.1.pep
SSCERGSCWAFSAVAAIEGINKNGELVSLSEQELVDCDDEAVGCGGGYMSCSSSSSATTASPVTTEASXPYHTVNGACQAAKLNQSAVSIAGYRNVXTSSEPDLARAVAAQPVFVIVDAGNFMFQLYGSGVYTGPCTXSADVNHGVTVVGYGESPNTPAT

SEQ ID NO: 147290 - protein, 99 aa, Oryza sativa
  Clone ID: PAT_MRT4530_47831C.1.pep
MGRGVRQIACRHLTRDLTEGINKNGELVSLSEQELVDCDDEAVGCGGSTAAVSTQGRAPPSADVNHGVIVVGYGESPNTPATDGPPFPRVVGRRRQTSP

SEQ ID NO: 147291 - protein, 350 aa, Oryza sativa
  Clone ID: PAT_MRT4530_47832C.1.pep
MVGPTWPHISFSPLLFLLLSHHLSPLLPPGATGPREGPAAAAGDAGEGQWAGRRRERWVFAHGVGADSARGLVEEIGAAAPPVSDELSSCERGAGSCTTADEKQRRFEVYRSNVELVEKFNSMGNGYKLADNKAMPGESSDDILPKSVDWRKKGAVVEVKYHEDCGSCWAFSAVAAIEGINKNGELVSLLEQELVDCDDEAMGCGGSFLIRADHGCEEGKGRRRRVVWWCGNTGEGATHQRRVRCQDRSWRDDTSDGKGSARFTGTGDDGGLGASRRHARSEATSACASRRSAGTRWRAESGIAHHCHSPTAATLARSSAPPTSRAAAYPPSPLRSRARPPTSPLRPLRP

SEQ ID NO: 147292 - protein, 488 aa, Oryza sativa
  Clone ID: PAT_MRT4530_47833C.1.pep
MAAAAAAVGVVALLLLLPLAASAYGDGLGRAAVGVNWGTMTSHPILPCEVVRMLAANGVARVKMFDADPWTAAPLAHTGIQVMLAVPNDQLARLAGDPRRAYRWAEQNVSAYLEAGVDVRYVAVGNEPFLKSYNGSLINVTFPALKNMQRALDKLGLGDHVKAVVPLNADVYNSPENKPVPSAGSFRKDINALMVDIVNFLNMNNAPFVVNIYPFLSLYQNPNFPLNFSFFDGGSKPVYDKGVVYTNVFDANFDTLVWSLRKAGVPDMKIIVGEVGWPTDGDKHANVRYAQKFYDGFLKKMVRNIGTPLRPGWMEVYLFALIDENQKSVLPGRFERHWGLLTYDGKPKFSMDLSGDGLDNLVGVEVEYLPAQWCVFNKDAKDKFKDLPAAVNYACSNADCTPLGYGSSCNNLSHDGNISYAFNIYFQTMDQDVRACSFEGLAKITTINASQGGCLFPVQILSASERVVPLRFLPTSFLILLMVVSILT

SEQ ID NO: 147293 - protein, 89 aa, Oryza sativa
  Clone ID: PAT_MRT4530_47834C.1.pep
WHGDQSGDPHPSLHNMGSGPCTASFGGTVIEIDSVALWGSNWRATDRLWAGALKLNMKLSIQGNALEGGIINADVCVASSSTLQEGDGL

SEQ ID NO: 147294 - protein, 455 aa, Oryza sativa
  Clone ID: PAT_MRT4530_47835C.1.pep
MDTSLSIAVAAAAVVLLLLVRGADAEIRTTLIVSDARPLILFEQFGFERGGKATISIRRSFWNLRRGSRRTAVDPSLMGFVLISGTQFPKINNASAYAAADPGDNGDDGGGSYCVLTSEYALPVLRLGDVPPGGVTTTVSIDDPDQYAVVFSNCQDGVEVTVDVYTEMYNVRDGISDGPRDYLPVGLRPLPTIYTVVSEVYFAFLALWACVCVRHRATVERIHAVMGALLLFKALKMACAAEDSWYVERTGTPHGWDVAFYVFGFFKGVLLFTVIILIGTGWSILKPYLQEREKNMLMIVIPLQVVENLLLVVIGETGPTGQDWVVWNQVFLLVDVICCCAVFFPIIWSIRSMREASKTDGKAALNLQKLTLFKRFYLVVVGYLYFTRIIASAFLALLSYKYQWGVNVAIEAASLAFYLFVFYNFQPVAKNPYLYIGDTVEDAAVEREMDDEGRF

SEQ ID NO: 147295 - protein, 155 aa, Oryza sativa
  Clone ID: PAT_MRT4530_47836C.1.pep
VFLNYWSPGQNGLPLPFPTTFQPETLSGKTRGGLLTNLLTIIAVGLMARFPGGNPVSPLALLIRPPPGKRRLANGAFFPFFVNCLLALGGRVPVRGLTSFKGGIPVFPELRDYPRKNTFNQKATKGPEPNKGLIGGGFSLGSPPLRTLPKFTPKF

SEQ ID NO: 147296 - protein, 307 aa, Oryza sativa
  Clone ID: PAT_MRT4530_47837C.1.pep
MYQPNPISSSGQTHGNPTAHEQMELGNNAIVPSNGGNNNPNMAARQRLRWTNELHDRFVEAVTQLGGPDRATPKGVLRIMGVPGLTIYHVKSHLQKYRLAKYIPDPSADDNKDEDKDPRNLLSALEGSSGMQISEALKLQMEVQKRLHEQLEVQRQLQLRIEAQGKYLQKIIEEQQRVIGAGASRATSSEQLPDSEKTNPPTPVPISESPVQGAPHSKNSQSQVEPTKSPSHDDALPCGEPLTPDSSCRPGSPTLSPKHERAAKRQRGSDAGDVTAFADGEFVLPPGIFESSTGSEFQECSMPYSGH

SEQ ID NO: 147297 - protein, 70 aa, Oryza sativa
  Clone ID: PAT_MRT4530_47838C.1.pep
MNWRNVTGFSLLHNSTANSALGDGRISYEEFVAMMKSGTDWRKASRQYSRERFKTLSNSLIKDGSITMAR

SEQ ID NO: 147298 - protein, 135 aa, Oryza sativa
  Clone ID: PAT_MRT4530_47839C.1.pep
MSGGDSSPMDFNESVSHTQMQGAIDQTMKRVEDLFAKMDATNSIERMEKRLPTITDKLDDIDGRLPLLRDGTHKHGEVVKVYFDWEMIVEKKFHSHVVPKGYRVRQATSEFKDFAIIWWNGLCETEDGFQSRRGG

SEQ ID NO: 147299 - protein, 45 aa, Oryza sativa
  Clone ID: PAT_MRT4530_4783C.1.pep
FLVNHLHNKKVGFFFYVANSSFSYLVCQFVQVSSHRMHECINVKM

SEQ ID NO: 147300 - protein, 262 aa, Oryza sativa
  unsure (1)..(262): unsure at all Xaa locations
  Clone ID: PAT_MRT4530_47840C.1.pep
LDNTCLPTENGGLGILHLVKFARAFRIWWLWHEWKLPKKTWVGMETHVMTQTILFAAATTIKIGDGPPXFWNLVWLNGQRPKDTAPRAYELLRKKNXTLKKAIPNSQWVQELGLPIAQGMTIDLIDQLVQLWNTVQGVQLTPXETDDITCKXTIHRQYSVGSAXKAQFIGLTKTSYEALIXKPWVLRKCRSFACLVIQNRVWTSDKQVTRGXPNNTYYPLCRHTPETSFHLELDCRYTXRIWEMHATWTACEQLRLGSWEAT

SEQ ID NO: 147301 - protein, 81 aa, Oryza sativa
  unsure (1)..(81): unsure at all Xaa locations
  Clone ID: PAT_MRT4530_47841C.1.pep
MMDAWVLLYSLLQGLRSTXGLHDRRRSSNIDFGHARTGGRIXALLVWAIEGIKTSXTLSYLAPLTVEDLLKQIEYLLRSKW

SEQ ID NO: 147302 - protein, 182 aa, Oryza sativa
  Clone ID: PAT_MRT4530_47842C.1.pep
MNIATTFGKVVVLAFGAWVGLKDGGVVTGLAAYGVIMATVSTASDLTQAFRTGYFMLDRSPPRWAQRHNGDLDLRPDRGRPAQWLVGLVTLRHINRGWRPGRHTARVTGSITARHASSSPPTTAAAATTIAIKSTVATVHVKHATTTRDGSGSRKSDGTDVPERPAASAPGSGSHFPLSLQG

SEQ ID NO: 147303 - protein, 403 aa, Oryza sativa
  Clone ID: PAT_MRT4530_47843C.1.pep
LDIYLKVLFQILYDFSNKIVYMSCTSAAPPAYSRSAPPSPTPLAVVARVPRDCDIFRGEWVPAADGDDDGAAPYYTNATCGEIQEHQNCMKYGRPDLGFLRWRWRPERCELPRFDAAAFMEVVRGRSMAFVGDSLARNHMQSLMCLLSKVENPKDVSTTKDPEFRTVRYESHNFTVAAFRSPYLVTANQSSDPAGGMWDLYLDEPDAAWATAVAGFDYVVVSTANWFNRPTMFHEAGRLVGCHHCLVPGVADLKRTYSLRAAFRTALRALTAGAGGAGFDGTVIVRTLSPTSHFEGGEWNKGGDCRRTRPTAARMAGLDLDFHTVQVEEFRRAEAAAAAASGGAARLLLMDTTAVMVARADGHPSRYGHWAHEKVTLYNDCVHWCLPGPIDVWNEMLLQMLLL

SEQ ID NO: 147304 - protein, 74 aa, Oryza sativa
  Clone ID: PAT_MRT4530_47844C.1.pep
MEQFEQPPSSLEATEPPEAEIGHRVEDLWEVAEPQLSPSEKLNSCFEDIVVASFPCPLGSQDHCYNSYFSVRLF

SEQ ID NO: 147305 - protein, 298 aa, Oryza sativa
  Clone ID: PAT_MRT4530_47845C.1.pep
RSPSRRPSCPTSCSGTTSSPSPGTGSGRPSSPASASPSTRSSTVMDLPRPMEGLGEAGPPPFLCKTYEVVDDPGTDTVISWGFAGNSFVVWDANAFAAVLLPRYFKHSNFSSFVRQLNTYGFRKVDPDRWEFANEGFLRGKKELLKTIKRRRPPPSSPPSSSSSSSSSQHQQQPAAACLEVGQFGRDGVVNRLQRDKSVLIAEVVKLRQEQQTTRAQMQAMEERISAAEQKQQQMTVFLARAMKNPGFLQMLVDRQAGQHGARNRVLEDALSKKRRRPIDAHRRHRRLAAHRSRRGNR

SEQ ID NO: 147306 - protein, 167 aa, Oryza sativa
  Clone ID: PAT_MRT4530_47846C.1.pep
MPLFASKFAPLIPRLRRLSTAAAAATATAAGEDPKLSRIADQLLELSPAELDDYSALLRLKLRLSLTSSAASGAAATGAAGDAASGSAGAEEAAAVKTSFDVKIEKYEAAAKIKIIKEVRAVTDLGLKEAKELVEKAPVVVRSGLPKEEAEALAAKLKAAGAAVALE

SEQ ID NO: 147307 - protein, 114 aa, Oryza sativa
  unsure (1)..(114): unsure at all Xaa locations
  Clone ID: PAT_MRT4530_47847C.1.pep
YLFFYYIFIFLFLIIFFIFYILFIXFYFTFFYYYFYILFIFYYLIIFIYFSILYIYFLYFSIYYFKIYLYFFIYLILFLFFFIFSNFILLITFYIFFYXNLNYFLSLYLYIFIY

SEQ ID NO: 147308 - protein, 38 aa, Oryza sativa
  Clone ID: PAT_MRT4530_47848C.1.pep
PLSRRSSSARWNVGLSNVLVSCSGSPHIWLFAPECVLG

SEQ ID NO: 147309 - protein, 97 aa, Oryza sativa
  Clone ID: PAT_MRT4530_47849C.1.pep
MADSSSSSMTNQLRETQKQETTIRAHILKPNTSNHHHHQQQQQQQQQQQQQQGEDLSKKKQQEEETSPRWPVGGHGGGGTWRSDLRIPGLVEVGSGG

SEQ ID NO: 147310 - protein, 51 aa, Oryza sativa
  Clone ID: PAT_MRT4530_4784C.1.pep
VVLAPVVVSAFQPLETGEPSGLSLRAVRDRITFNSTLVSILDRQVCHYFRI

SEQ ID NO: 147311 - protein, 107 aa, Oryza sativa
  unsure (1)..(107): unsure at all Xaa locations
  Clone ID: PAT_MRT4530_47850C.1.pep
SGVIRAVGPLQMSLVDEDGDGGGRGRARRRRGIATAAVGHGRGGGGXRRRGTGAAAVGDGHGGGGGDRGRAQQRRGTATAASEQAGCCEEAAAASAAARRRRRRRPR

SEQ ID NO: 147312 - protein, 71 aa, Oryza sativa
  Clone ID: PAT_MRT4530_47851C.1.pep
RSELISSPSYVGPKHAVNIRYHTQARPLLPGAFPPPVAFGFTSYQESRTRYLNIVMHHRVSQLLAPGSYKF

SEQ ID NO: 147313 - protein, 77 aa, Oryza sativa
  Clone ID: PAT_MRT4530_47852C.1.pep
RTRGLRECDNEYSRNFMKILGTLRERDPSYHQLCRVVRQGEQPREGFLLLSNLVEDQMSGTSSYMDWILQIHRQTQS

SEQ ID NO: 147314 - protein, 282 aa, Oryza sativa
  Clone ID: PAT_MRT4530_47853C.1.pep
IPNLQTYTILNDPDLAPFRASPEFKELQEEALRGGEDIGSGFRRDLKLISEVQAPFRGVRRFFYVALTAAAGISTFFTIPRLILAVQGGDGAPDLLETVGNAAINIGGIVVLVALYFWENKKEEQQITQISRNETLSRLPVRLSTNRIIELVQLRDITRPVILAGSKASITRAMQRAERYRTELLKRGVLLIPVIFGASQKAQTKSRLKAEERFKADIVSPEQWESWIRDQQESEGVTPGEDVYIILRLDGRVRRSGRGMPNWNDILQELPRLEELLSKLER

SEQ ID NO: 147315 - protein, 68 aa, Oryza sativa
  Clone ID: PAT_MRT4530_47855C.1.pep
VLQNQLAQALLCFPLIEKPQLACGDGGAHNMALILLIRHLSSLMVPLPLLLHCLCCIYLQMMLTRDQL

SEQ ID NO: 147316 - protein, 49 aa, Oryza sativa
  Clone ID: PAT_MRT4530_47856C.1.pep
MEEDCSLLIVEALRWTVTRFHRTTERMDRRQSSCNVSHASRMVEGLDQD

SEQ ID NO: 147317 - protein, 54 aa, Oryza sativa
  unsure (1)..(54): unsure at all Xaa locations
  Clone ID: PAT_MRT4530_47857C.1.pep
SPERAANXNYLERYAXLTLVLKESLKIYWAINYWIINLDDKAFXMPKHVTLKAL

SEQ ID NO: 147318 - protein, 1600 aa, Oryza sativa
  unsure (1)..(1600): unsure at all Xaa locations
  Clone ID: PAT_MRT4530_47858C.1.pep
MAKQNEGFEKTLLEIQAAIGTMVVKQGETQEMLLKLDKSVAGWRPQVDAAIQGLHEEGGNSSNTSQASRMAEEGSHQTPLLPTPSTPPLFSGTAASELGPDGHRVANFHRGKASGVVHTLGPPPVKGTYQIPTEFSVPHGIEFGANSSRGNRDLHGEQGFNHRLPKLDFPQFDGSDPQGWRLRCEHYFGVYGTHPNLWVWVATIYFMGRAASWLRSSRAHEVFVDWGRFCEAVNRKFDRNQHRQLIRQLDQIKQTGSVSEFYEWFDDLMNQLLTYDPMYNTLNLVHQFIEGLRFDIRKAVLLHCPKDLESALVLALLQEELSERNQEQRKFGDGSQKFKNAYPLPLPPTKALKSEEKKGGELNRGTNLSDKVSALRSFRRAQGLCYLCAEKWSPTHKCSGTVQLHAVQELFALFPDNVNEDQAGISSEDSDSSLLAMSVHAVQGTDSQSTIRLQGKIQGLNILMLVDSGSSASFVSDQLADRLTGVQFLAHPLSVKVANGQVLHCQKEMPSAEWFVSGQKFLTTFKVVALGGYDAILGMDWLTKYSPMHIDWQLKSIHLIVMGHEVLLRGVQSNTSDCALISSQHLQHLHSIDSLSSIPDAVQSLVQEFSHLFEEPSGLPPARDYDHTIPLIPGAVPVNVRPYRYTPAQKDEIEKQVKDMLQKGIIQPSASPFSSPVLLVKKKDGTWRFCVDYRHLNAITVKNKYPLPIIDELMDELAGACWFSKLDLRLGYHQIRMAVGEEAKTAFKTHNGHFEFKVLPFGLTSAPATFQGVMNTVLADQLRQNVLVFVDDILVYSRTLEEHKNHLRQVFETLSKHQLRVKLSKCSFAQTQLSYLGHIISADGVSTDPEKIQVVRQWPVPVSVKDVCSFLGXAGYYRKFVRHFGIISKPFTELLRKGQPFIWTQHHQKAFDTLKQSLISAPVLVMPDFQKMFVVETDASDRGIGAVLMQDQHPVAFLSKALGPRTQVLSTYEKESLAIILAVDHWRSYLQHEEFLIRTDHRSLAFLDNQRLTTSWQHKAMTKLLGLRYRIVYKKGLENGAADALSRRSSDGLPILSALSVGLPDWLQDVVSGYKSDPEALQLLHSFKEGTPHSAHFELQNGILYFKKRVWVGNNRQFQQQVLANLHTAALGGHSGIQVTYQRVKQLFAWPGLRQTVQDFVHSCVVCQQAKPEHVPYPGLLQPVQIPEHAWQVISMDFIEGLPRSASYNSILVIVDKFTKFAHFLPLSHPFTAVSVAQLFMDRIHSIHGLPLAIISDRDRVFTSXFWKELFRRSGTQLRMSSSYHPQTDGQTERVNQCLEMFLRCFVHACPSRWSQWLSLAQFWYNTSFHSALMLTPFEAMFGHKPRHFGLSVDSVGVPSALDSWMQDRHNMQSLIHHHLVRAQQRMKSQADSKRTDRVFAVADWVFMKLQPYVQQFVMTRANQKLAFKFYGPFQILQRVGSVAYKLQLPATSLIHPVVHVSQLKKAVAASEVVQSTLPRLDPDSGHLATPVEVLQQRLRRRGDKMIVQALVRWSGTSSSTTSWEDLEELRHRFPSATAWSQAVFQGRGNVTSGTGTPDDEQEQVSKIAGSVQSTAQQRHVRVTRPNPNSRVALPFRRPC

SEQ ID NO: 147319 - protein, 78 aa, Oryza sativa
  Clone ID: PAT_MRT4530_47859C.1.pep
YGGKLEGNAKRGILPMASMSKLAQGATKDKSGEKKIPSATGDQAKQFRVGKFCWASPFKKMQRKKSDKKRRPPNLSSC

SEQ ID NO: 147320 - protein, 133 aa, Oryza sativa
  Clone ID: PAT_MRT4530_4785C.1.pep
MGQGVRQQIDLLTIELHHRAADLVPRRPLPLLAGRRAVGECQEMGENRGELEGEAVVGETPSPHPNPILHHRVPQSPCSTGRRVMEGAPGEGEDRGEREEQVVVGEEKPGREGKAAAAQERGKEEKGWVNSGG

SEQ ID NO: 147321 - protein, 120 aa, Oryza sativa
  Clone ID: PAT_MRT4530_47860C.1.pep
RGHRRAHAPRQRKSRRRRRCRCIPACSRGAWPGRRRRRRSRTSRRSRRGWRARRWRRRTWRGGATPRRRSTRRSCPSPRRTGGTAPSRTPARRRAARPPWRSHHRHQPTTGWRGARRRWR

SEQ ID NO: 147322 - protein, 120 aa, Oryza sativa
  unsure (1)..(120): unsure at all Xaa locations
  Clone ID: PAT_MRT4530_47861C.1.pep
PRVRPNVRLHVRTNKADDAHDGMPLTVAQKAVIALTVRAIDACVVSPADKPLXRMQADITTTAGQRYNYKNALDALYSNAADEGVVAMKKGAGATVKGAMTMKMEMXGCYDQSAALWRDT

SEQ ID NO: 147323 - protein, 1377 aa, Oryza sativa
  Clone ID: PAT_MRT4530_47862C.1.pep
MLLKLDKSVAGWRPQVDAAVQGLQHDMEELKLHVLKLEKQSEEGGNSSNTSQASRMAEEGSHQTPLLPTPSTLPLFSGTAASDLGPDGHRVTNFHRGKASGVVHTLGPPPVKGTFQIPTKFSVPHGVEFGANSSRGNRDLHGEQGFNHRLPKLDFPQFDGSDPQSWRMRCEHYFGVYGTHPNLWVRIATIYFMGRAASWLRSSRAHEVFVDWGRFYEAMNRKFDRNQHRQLIRQLDQIKQTGSVSEFYERFDDLMNQLLTYDPMYNTLNLVHRFIEGLRFDIREAVLLHCPEDLESALVLALLQEELSERNQEQRKFVDGSQKFKNAYPLPLPPTKVLKTEEKKGGELNRGTNLSDKVSALRSFRRAQGLCYLCAEKWSPTHKCSGTVQLHAVQELFALFPDNANEDQASISSEDSDSSLLAMSVHAVQGTDSQSTIRLQGKIQGLNILMLVDSGSLASFISDQLADRLTGVQFLAHPLSVKVANGQVLHCQKEMPSAEWFVSGQKFLTTFKVVALGGYDAILGMDWLTKYSPMQIDWQLKSIHLTVMGHEVLLRGVQSDTSDCALISSQHLQHLHSIDSVAVNVRPYRYTPAQKDEIEKQVKDMLQKGIIQPSASPFSSPVLLVKKKDGTWRFCVDYRHLNAITVKNKYPLPIIDELMDELAGACWFSKLDLRSGYHQIRMAVGEEAKTAFKTHNGHFEFKVLPFGLTSAPATFQGVMNTVLADQLRQNVLVFVDDILVYSRTLEEHKNHLRQVFETLRHIISADGVSTDPEKIQVVRQWPVPVSVKDVRSFLGLAGYYRKFVRHFGIISKPLTKLLCKGQPFIWTQHHQEAFDTLKQSLISAPVLVMPDFQKMFVVETDASDRGIGAVLMQDQHSVAFLSKALGHRTQVLSTYEKESLAIILAVDHWRPYLQHDDFLIRTDHRSLAFLDNQLLTTSWQYKAMTKLLGLRYRIVYKKGLENGAADALSHRSSDGLPILSALSVGLPDWLQDVVSGYKSDPEALQLLHSFKEGTCHSAHFELQNGILYFKKRVWVGNNRQLQQQVLANLHTAALGGHSGIQDFVQSCAVCQQAKPEHVPYPGLLQPVQIPEHAWQVISMDFIEGLPRSASYNSILVIVDKFTKFAHFLPLSHPFTAVSVAQLFMDRIHSIHGLPQAIISDRDRVFTSIFWKELFRRSGTQLQMSSSYHPQTDGQTERVNQCLEMFLRCFVHACPSRWSKWLSLAQFWYNTSFHSTLMLTPFEAMFGHKPRHFGLSVDSVGVPSALDSWMQDRHNMQSLIYHHLVRAQQRMKSQADSKRTDRVFAVGDWVFMKLQPYVQQSVMTRANQKLAFKFYGPFQILQRVGSVAYKLQLPATSLIHPVVHVSQLKKAVAASEVV

SEQ ID NO: 147324 - protein, 233 aa, Oryza sativa
  Clone ID: PAT_MRT4530_47863C.1.pep
MDAGDAWGRSSSSSSSAAAAARRLQARYDLYMGFDDADAAGVEEVEARGGGEAYNCPFCGEDFDFVAFCCHVDDEHAVEAKSGAKSPKNIFRVPFFVVFVEKGLKRWHLPVAEPSKDLHSDSSDNNFLLNKFPDDKTAERAEPSLSEKDQKERAQRSKFVRGLVLSTIFEDDNFAATPPHAWTHRLRLDLLLPYARRRHGRRRCHRCNDDEDDLYDDGEDMRWESMFQDLKPT

SEQ ID NO: 147325 - protein, 1876 aa, Oryza sativa
  unsure (1)..(1876): unsure at all Xaa locations
  Clone ID: PAT_MRT4530_47864C.1.pep
MAKQNEGFEKTLLEIQAAIGTMVVKQGETQEMLLKLDKSVAGWRPQELKLHVLKLEKQSEEGGNSSNTSQASRVTEEGGHQAPLLPTPSTPPLFSGTAASDLGPDGHRVTNFHRGKAPGVVHTLGPPPVKGTYQIPTEFSVPHGVEFGANSSRGNRDLHGEQGFNHRLPKLDFPQFDGSDPQGWRMRCEHYFGVYGTHPNLWVRVATIYFMGRATSWLRSSRAHEVFVDWSRFCEAVNQKFDRNQHRQLIRQLDQIKQTGSVSEFYERFDDLMNQLLTYDPMYNTLNLVHRFIEGLRFDIRKAVLLHCPEDLESALVLVLLQEELSERNQEQRKFVDGSQKFKNAYPLPLPPTKVLKSEEKKGGELNRGTNLSDKVSALRSFRRAQGLCYLCAEKWSPTHKCSGTVQLHAIQELFALFPDNANEDQAGISSEDSDSSLLATSVHAVQGTDSQSTIRLQGKIQGLNILMLVDSGGSASFVSDQLADRLTGVQFLAHPLSVKVANGEVLHCQKEMPSDEWFVSGQKFLTTFKVVALGGYDAILGMDWLTKYSPMQIDWQHKSIHLTVMGHEVLLHGVQSNTSDCALISSQHLQHLHSIDSVAGLVQLCATLSDSTDQLSSIPDAVQSLVQEFSHLFEEPSGLPPARDYDHTIPLIPGAVPVNVRPYHYTPAQKDEIEKQVKDMLQKGIIQPSASPFSSPVLLVKKKDGTWRFCVDYRHLNAITVKNKYPLPIIDELMDELAGACWFSKLDLRSGYHQIRMAVGEEAKTAFKTHNGHFEFKVLPFGLTSAPATFQGVMNTVLADQLRQNVLIFVDDILVYSRTLEEHKNHLRQVFETLSKHQLRVKLSKCSFAQTQLSYLGHIISADGVSTDPEKIQVVRQWPVPVSVKDVRSFLGLAGYYCKFVRHFGIISKPLTELLRKGQPFIWTQHHQEAFDTLKQSLISAPVLVMPDFQKMFVVETNASDRGIGAVLMQDQHPVAFLSKALGPRTQVLSTYEKESLAIILAVDHWRPYLQHDEFLIRTDHRSLAFLDNQRLTISWQHKAMTKLLGLRYRIVYKXGLENGAADDLSRRSSXDVVLGYKSDPEALQLLHSFKEGTSHSTHFELQNGILYFKKRVWVGNNRQLQQQVLANLHTAALGGHSGIQVTYQRVKQLFAWPGLRQTVQDFVQSCAVCQQAKPEHVPYPGLLQPVQIPEHAWQVISMDFIEGLPRSASYNSILVIVDKFTKFAHFLPLSHPFTAVSVAQLFMDRIHSIHALPQAIISDRDRVFTSIFWKELFRRSGTQLRMSSSYHPQTDGQTERVNQCLEMFLRCFVHACPSRWSQWLSLAQFWYNTSFHSALMLTPFEAMFGHKPRHFGLSVDSVGVPSALECWMQDHHNMQSLIHHHLVRAQQRMKSQADSKHTDRVFAKAVAASEVVQSTLPRLDPDSGHLATLVEVLQQRLRRRGDKMIVQALVRWYGTSSSTTSWEDQEELRHRFPSTTAWGQTVFQGRGNVTSGTTDDEQEQVSKVAGSVLSTAQQRPVHHKKQRSNYVRIDAFPRESRKMLAYGCNYTSNHQSGQTTQPCKSGGQQEAMRKTRQKATQNDPSYLHMINRILRIWVRSWTIWGSFWQLEILGEAAAARNSSKQALILSPSVRKGKGIWIWYIEKDGPNDGKKCQARGLLDYVKDFDFVFHLHLMLLILGHANALALSLQRKDKDILEAMLELTEFNDRFNEINSSLLTHMAAFSPKDSFDSFKHDHLIELAKSYPDDFDARQLKDLDHELQIYIDNVREDERFGKLGTISQLAKLMVDTKKHLAFPLVYRSLKLVLVLPIATASVERCFSAMKIVKTALRNRISDEFMNDAILWFVEKALLATIPNDDVIALFQNMGITRRVEVEV

SEQ ID NO: 147326 - protein, 233 aa, Oryza sativa
  Clone ID: PAT_MRT4530_47865C.1.pep
MDAGDAWGRSSSSSSSAAAAARRLQARYDLYMGFDDADAAGVEEVEARGGGEAYNCPFCGEDFDFVAFCCHVDDEHAVEAKSGVCPICATRVGVDLIGHLTMQHGSYFKMQRRRRVRKISSGSHSLLSLLRKDLRDGSLQSFLGGSSYVSNPPAAAPDPFLSSLICSLPVAEPSKDLHSDSSDNNFLLNKFPDDKTAERAEPSLSEKDQKERAQRSKFVRGLVLSTIFEDDNL

SEQ ID NO: 147327 - protein, 109 aa, Oryza sativa
  Clone ID: PAT_MRT4530_47866C.1.pep
MQHWQLGCIFFGGWGKLAPILSVPPPTSTKIKTDLVMVIVLTTKQLELDSYTATITECTSGSPLFLLDFPLPIILVENSGRCKTNEHGEKHSDPFLPIVKWDGKPVGDE

SEQ ID NO: 147328 - protein, 1893 aa, Oryza sativa
  Clone ID: PAT_MRT4530_47867C.1.pep
MAKQNEGFEKTLLEIQAAIGTMVVKQGETQEMLLKLDKSVAGWRPQELKLHVLKLEKQSEEGGNSSNTSQASRVTEEGGHQAPLLPTPSTPPLFSGTAASDLGPDGHRVTNFHRGKAPGVVHTLGPPPVKGTYQIPTEFSVPHGVEFGANSSRGNRDLHGEQGFNHRLPKLDFPQFDGSDPQGWRMRCEHYFGVYGTHPNLWVRVATIYFMGRATSWLRSSRAHEVFVDWSRFCEAVNQKFDRNQHRQLIRQLDQIKQTGSVSEFYERFDDLMNQLLTYDPMYNTLNLVHRFIEGLRFDIRKAVLLHCPEDLESALVLVLLQEELSERNQEQRKFVDGSQKFKNAYPLPLPPTKVLKSEEKKGGELNRGTNLSDKVSALRSFRRAQGLCYLCAEKWSPTHKCSGTVQLHAIQELFALFPDNANEDQAGISSEDSDSSLLATSVHAVQGTDSQSTIRLQGKIQGLNILMLVDSGGSASFVSDQLADRLTGVQFLAHPLSVKVANGEVLHCQKEMPSDEWFVSGQKFLTTFKVVALGGYDAILGMDWLTKYSPMQIDWQHKSIHLTVMGHEVLLHGVQSNTSDCALISSQHLQHLHSIDSVAGLVQLCATLSDSTDQLSSIPDAVQSLVQEFSHLFEEPSGLPPARDYDHTIPLIPGAVPVNVRPYHYTPAQKDEIEKQVKDMLQKGIIQPSASPFSSPVLLVKKKDGTWRFCVDYRHLNAITVKNKYPLPIIDELMDELAGACWFSKLDLRSGYHQIRMAVGEEAKTAFKTHNGHFEFKVLPFGLTSAPATFQGVMNTVLADQLRQNVLIFVDDILVYSRTLEEHKNHLRQVFETLSKHQLRVKLSKCSFAQTQLSYLGHIISADGVSTDPEKIQVVRQWPVPVSVKDVRSFLGLAGYYCKFVRHFGIISKPLTELLRKGQPFIWTQHHQEAFDTLKQSLISAPVLVMPDFQKMFVVETNASDRGIGAVLMQDQHPVAFLSKALGPRTQVLSTYEKESLAIILAVDHWRPYLQHDEFLIRTDHRSLAFLDNQRLTISWQHKAMTKLLGLRYRIVYKKGLENGAADDLSRRSSDGLPILSALSVGLPDWLQDVVLGYKSDPEALQLLHSFKEGTSHSTHFELQNGILYFKKRVWVGNNRQLQQQVLANLHTAALGGHSGIQVTYQRVKQLFAWPGLRQTVQDFVQSCAVCQQAKPEHVPYPGLLQPVQIPEHAWQVISMDFIEGLPRSASYNSILVIVDKFTKFAHFLPLSHPFTAVSVAQLFMDRIHSIHALPQAIISDRDRVFTSIFWKELFRRSGTQLRMSSSYHPQTDGQTERVNQCLEMFLRCFVHACPSRWSQWLSLAQFWYNTSFHSALMLTPFEAMFGHKPRHFGLSVDSVGVPSALECWMQDHHNMQSLIHHHLVRAQQRMKSQADSKHTDRVFAKAVAASEVVQSTLPRLDPDSGHLATLVEVLQQRLRRRGDKMIVQALVRWYGTSSSTTSWEDQEELRHRFPSTTAWGQTVFQGRGNVTSGTTDDEQEQVSKVAGSVLSTAQQRPVHHKKQRSNYVRIDAFPRESRKMLAYGCNYTSNHQSGQTTQPCKSGGQQEAMRKTRQKATQNDPSYLHMINRIPRIWVRSWTIWGSFWQLEILGEAAAARNSSKQALILSPSVRKGKGIWIWYIEKDGPNDGKKCQARGLLDYVKDFDFVFHLHLMLLILGHANALALSLQRKDKDILEAMLELTEFNDRFNEINSSLLTHMAAFSPKDSFDSFKHDHLIELAKSYPDDFDARQLKDLDHELQIYIDNVREDERFGKLGTISQLAKLMVDTKKHLAFPLVYRSLKLVLVLPIATASVERCFSAMKIVKTALRNRISDEFMNDAILWFVEKALLATIPNDDVIALFQNMGITRRVEVEV

SEQ ID NO: 147329 - protein, 503 aa, Oryza sativa
  unsure (1)..(503): unsure at all Xaa locations
  Clone ID: PAT_MRT4530_47868C.1.pep
MEKRKRIASKEDLHGQMMKRKKWRLQLSNLPEDILCTIVSKLPLREAARTSILSSQWNRTWCSHTNLNLSYRSIMSRRYIERDIRPEGRKLNAEEFIRRVDAILQQHNGGGVEKIEVIGLLENENAYHINGWVNFAIKSKTKQLVLDFRSFHWPIDEPYNFAFQIFDAANMENLQSLKLGSISLKPPADFKGFQNLKRLKLLDVGITDEDLQLLLSNCNCLEFLGIYCCKLITSLRTTHLSTQLKHLYVYECPCLKEIELNSGLTTLEYIGPLIPLAPPGIYVLTNLRIKSLDISDSLQYIFTELPSTLPQDYFARQTNQIYLSKTSEIGIGIFWPKEMGCXDILDFACILEAAPLMEKLEFHMWMNCRDHLRYRKAHGKLRTLPPCPHYHLKEVNIAGFYGQKDQLELAHHILRNSVVLQAMNIDPRPIAACDPSRMAILEAFNFVDGSKVAMKYLCKADHRNVVHVSDVSRKDVENVPAYRLVSPFWIEFDKTKRSGLLIR

SEQ ID NO: 147330 - protein, 68 aa, Oryza sativa
  Clone ID: PAT_MRT4530_47869C.1.pep
SLSLRRKSIDIIITMVYGEKGKNISMVYEDYFGSRNEAHIGEMACGPKWEIFILFYFFGKRRFFLLLL

SEQ ID NO: 147331 - protein, 1885 aa, Oryza sativa
  unsure (1)..(1885): unsure at all Xaa locations
  Clone ID: PAT_MRT4530_4786C.1.pep
MSYYVDPCTSVPQYPLYPVCGYHPSTVARQVRALGTQGSTTMPSSFVDNNVNTSSSQALSTSTMLVWTQVGEIVFPVYTTMPISIGPSMTENENAVATNQDGSMSKNPPVETENGLPTTSKLGKDSDAAKSCPSDINHGPTKMTSEAIRSWCPIHKTKKHTLQDCWVFINVRAELRACKERGIQRISPTRDVYCPIQKTKNHDLSSCKVLLGAMKTPSPKSYVPVRDNGKEQGATPASDRFVGVIDLDPHEPSVLHLLEDYGSSTTSAPREVLVIDDVGTTAQANAEAANQSITPAQHIRAIQAILRETPYDPVLNDDLERWTERLRESVTNLSNAFEEAVTAGTPRSATNRRPQXATPPPRGTGDLRDQINGRREARRTRDDANRSRRHVSSRRHDRGDRPNEDRECNDRERRGPDNTGHGRRRNDDDEGDRRRNNSERQRQDSWDPGRHPRNXRFRPGAIEKYDGSTDPEEFLQVYSTVLYAAGADDNALANYLPTALKGSARSWLMHLPPYSISSWADLWQQFVANFQGTYKRHAIEYDLHALTQNSGESLREYVRRFNECRNTIPEITDASVIRAFKFGVRDRYTTQELATRRITTTRRLFEIVERCAHVDDALRRKNDKPKTGGEKKPTADASESNKKKNRKNGKRKAQAEVLAAEYANPPKRPDPQASDTKKSWCPIHKTDRHSLEDCLVFKKSLEKHMTFEKGKRVRVVEKNEETPPHESDSAYPDSDLHVSHIFGGSTTRYPIVVEPTIRNIKVARVLIDGGSSINLLFASTLDAMGIPQSELTPTDQPFHGITPQSSSRPLGKITLPVTFGQANNFRTEQITFDVAEFDTTYNAIIGRTALARFMATSHYAYQVLKMPGPKGTITIQGNAKLAVQCDRQSLDMVEQTPTPPATFEPPKKPSDMPGVPREVIEHKLMVRPDAKPVKQRLWRFAPDRKQAIREELDKLLKAGFIRELLHPEWLANPVMVRKANGKWRMCVDFTHLNKACPKDHFPLPRIDQLVDSTAGCELLSFLDAYSGYHQISMAKEDEEKTAFITPFGVFCYVKMPFGLITVGNTFQRTVQGTLSNQLGNNVESYVDNIVVKTKTSDSLIDDLRETFDNLRRYRLMLNLEKCTFGVPSGMLLGFLVSGRGIEANPEKIKAIENMKSPTRLKEVQKLTRCMAALSRFIARMRERGQPFFALLKKQDKFVWTQEAEESFIALKRYLSNPPVLVAPQPNEELFLYIAATPYSISTVIVVEREKVQRPVYYVSETLHDAKTRYPQIQKLLYAVIMTSRKLRHYFQAHRVTVVSSFPLGEVVRNKDIVGRIAKWVVELSQFDIHFVPRTAIKSQVLADFVADWTMPDNKSDNQGDNETWTMAFDGALNSQGAEAGFILTSPSGDQFKHAIHLNFSATNNTAEYEGLLARIRAAAALGAKRLIVKGDSELVANQVHKDYKCSNPELSKYLAEVRKLEKRFDGIEVRHVYRKENVEPDDLARRASRREPLDPGTFLDVLTKPSVKEINGKSGPSTPDISSEVTEAERAVADIEITDDWRTPLIKFISSEELPEDDIEAEKITRKAKIYCMVGNDLYKKAPNEILFKCVSLDIHEGICGSYAAGWTLVGKAFRQGFFWPTALKDACDMQAHKATCTSAPDNPSDLAVLVLGARYIWAIPTRTGRLXFLFVAIDKFTKWIEALPTGEIKADNAIKFIRGIFCRYGLPHCIITDNGSQFISADFQDYCIGLGVKICFASVSHPQSNGQIERANDIVLQGIKTHVYDRLMSQDKKWVEELPSVLWAVRTTPTTSNKKTPFFLVYGSEAMLPGELRHQSTRVQKHSDENQEEQRDIDVNLLEEHRERVAVRAASYQQALRRYHEKRIRARILSISDYVLRRVQTQAG

SEQ ID NO: 147332 - protein, 60 aa, Oryza sativa
  Clone ID: PAT_MRT4530_47870C.1.pep
MAADLASGNATTMAAVSGDDDHDEMGIWGATLQAFPLQAHFQPAEPRIRLPARLGSDMEP

SEQ ID NO: 147333 - protein, 156 aa, Oryza sativa
  Clone ID: PAT_MRT4530_47871C.1.pep
SGQKEGDEFRRNSDVLEILRLTLFSRICRRGVRKIPEKILEHDKVIWFGDLNYRIALSYADTKNFLMENNWDVLFERDQLKIERDAGRVFKGWNEGKIFFAPTYKYSYNSDAYASETATSNKKRRTPAWYAPILIRGNSVYDLVVYLYISKFSFFN

SEQ ID NO: 147334 - protein, 116 aa, Oryza sativa
  Clone ID: PAT_MRT4530_47872C.1.pep
MAVHDALRLGQLYFVLPVSALHRPFSDQDMAALTVKAIAALGASATAAAAGGNSSSISVSSRGKNASPASKQRQQTTARVAPIRRGSTEVALLANAQDCRCRGRAPSRKAMSDPTY

SEQ ID NO: 147335 - protein, 782 aa, Oryza sativa
  Clone ID: PAT_MRT4530_47873C.1.pep
MAEKGRTEMEVRPGGVALITISNPPVNALSIHVLYSLKDHYEEALRRNDVKAIVVTGKGGVFSGGLDINTFGAIQRNKAEQLKVDYVSIDVMTNTLEAAGKPSVAAINGPALGGGLEISMVCQARISIPTAQLGLPELQLGVIPAFGGTQRLPRLVGLTKALEMMLMSKPIKAEEAHQLALIDAIVSPNDLLNTACRWALDISESRRPWVHTLSRTDKLESPDEAREILKFARAQVQKQAANLRHPLVCIDVIEEGIVSGPQAGLRKEAIAFQDLVFSDTCKSLVHVFFSQRATSKVPGITDLGLMPRKVSKVAIVGGGLMGSGIATALMLSNYPVVLKEVNDKFLDAGIDRIKANLQSRVRNGKMTKEIYEKTLSLLTGVVDYERFKDVDLVIEESNTSNCYLAIYFIEQYWMAVVENVKVKQQVFADLERYCPSHCVLATNTSTIDLDLIGEKTNSQDRIAGAHFFSPAHVMPLLEIVRSNHTSPQVVVDLLDVGKKIKKTPVVVGNCTGFAVNRMFSPYTSIALLLVDRGMDVYKIDQVCTEFGMPMGPFRLLDLVGFGVALASGMQYLENSPGSVDKSMLIPLMFEDKRTGEASQKGFYKYEGNRKAIPDPDIFKYVEKSRRMAGTVPDLELLKLDDKEIVEMVFFPVINEACQVLSEGIANKASDLDIASIFGMGFPPYRGGIVYWADSIGAKRIHARLSEWEMKHGQLFRPCSYLSERAAEGVPLSSTAKNNAKARISLDVMTYYMQLGFLYGCLKGLIDWCIDRNFLLVQRFIVS

SEQ ID NO: 147336 - protein, 44 aa, Oryza sativa
  unsure (1)..(44): unsure at all Xaa locations
  Clone ID: PAT_MRT4530_47874C.1.pep
KKSGWVVLIHSYLIVVFGNDMVVLTIHVVCCVSWEQCLLTLVXL

SEQ ID NO: 147337 - protein, 82 aa, Oryza sativa
  Clone ID: PAT_MRT4530_47875C.1.pep
VGDEAWPVVQALLIPVRKGSRRCSSELHREEQCQGPDVSLILLPSCVFQPRLMKNSNNAASVRVSDFTGCCEVWSKESQEIE

SEQ ID NO: 147338 - protein, 541 aa, Oryza sativa
  unsure (1)..(541): unsure at all Xaa locations
  Clone ID: PAT_MRT4530_47876C.1.pep
SSTCSLRERGALVAYASRQLRLHEMNYPTHDLELDAVVHVLMIQRHYLIGNRSEVFGNRSEVXTDHKSLKYIFTQTELNLRXKRWLELIKDYDVGIHYHPRKANVVADALSWKVHCNVLLTSPHHPELCKELERLRINMVKLGTLATPVVQPTLEDQTREAQEGDLEIMNIRELIKKDKASEYSVDDKGIVWFGKRICMPTKKEIRNLILQEAHESAYSIHPGSTNMYQDIKSHFRWSGMKQDIAEYVALCDIFQRVKAKHQKPAGLLQPLKILQWKLKEIGMDFRTGFPKTSSCYTSIWVIVDRLTKVAHFIPVMTTYSGKKLAELYMTRVMCRHXCPQKIVLDRGTQFSSHIXKKLHEXIGTNLNFSIAYHPQTDGQTERVNQVLEVMLRACALDFAGTLDLCLPYAEFSNNNNHQASIQMAPNKALYGRKCRTPLCXMDIGEKTIFGPDILKEAEEPVKVIRERLRAAQSRQKNYADNRRRDLEFKVGDHVYLRVSPLRGMKRFGIAGKLAPRFIGPYPISSHHGEVAYRLELPAELA

SEQ ID NO: 147339 - protein, 164 aa, Oryza sativa
  Clone ID: PAT_MRT4530_47877C.1.pep
MMGVGGGLGMEATNCGALLRELQQIWAEVGESEGEKNKVLSEIERECLEVYRRKVDDANRTRVQLHQSVATKEAEVASLVATLGEHKLYLKKDKSVVPLKEQLAAVVPVLENLKGKKEERLKQLSDIQSQIETIRSELSEYSDGDDKADSLIVDENDYQQEAYI

SEQ ID NO: 147340 - protein, 553 aa, Oryza sativa
  Clone ID: PAT_MRT4530_47878C.1.pep
MMGVGGGLGMEATNCGALLRELQQIWAEVGESEGEKNKVLSEIERECLEVYRRKVDDANRTRVQLHQSVATKEAEVASLVATLGEHKLYLKSFLVLVSKPAKDKSVVPLKEQLAAVVPVLENLKGKKEERLKQFSDIQSQIEKIRSELSEYSDGDDKANSLIVDENDLSTRKLNNYQAQLHALQKEKSDRLHKVLEYVNEVHCLCGVLGIDFGKTVNGIHPSLHQNGLEQSTNISNSTLEGLANTISNLKAEQRSRIDKMGAEVERLTKLKARRLKEIFMKKRSELEEICRSAHIEPDASTAPEQTNEMIDSGMIDPSELLAKLESQILKAKEESLSRKDIMDRINKWISACDEEAWLEEYNQDSKRYSAGRGAHINLRRAEKARILVTKIPAMVDNLINRTFAWENARNKPFLYDGGRLISVLEEFRLNREQKEEEKRRYRDQKKLESILLKEKEAIFGSKGSPKRAVSLNRRTNGYRSSGTTSGLMTPNPRRSSLGGATPELLTPRSCSGHYNRYFSDSRRLSATQLNFGDDSLSTFTSISGSEPESPSLG

SEQ ID NO: 147341 - protein, 55 aa, Oryza sativa
  Clone ID: PAT_MRT4530_4787C.1.pep
YTVRRCCTEPPSVGHCCIMRPSDVAATCRVQACSCITAAPGGTGLLREMAGLSSR

SEQ ID NO: 147342 - protein, 222 aa, Oryza sativa
  unsure (1)..(222): unsure at all Xaa locations
  Clone ID: PAT_MRT4530_47880C.1.pep
GAEVDGGRWAPLCLPEDRVQKFLFPQAFKHKKIQAFKPPLPPPRRRRCRAPPASTAAAQSPAAASTAARCRNASPPAPDSRRPRLDPPRTAAGVRERPPVPGSAARRRPRPDPLPAALRRPDPPPAVLRRPDPPPAALRWPDPPRLHLRPCPSRPWITAPLPAPXVAVVTVANPLCFLRRQEEEVVEEKEEERLEDRRCRGGAARGRRRRAKTQFFMAGLLE

SEQ ID NO: 147343 - protein, 271 aa, Oryza sativa
  Clone ID: PAT_MRT4530_47881C.1.pep
MATADPVVGRAAAAAYPEVGSGDGGESGGGGGEGGEGGDGSVAAVNPEAGSGDGDRSSGGEGGGSESGGGLGRQRYWNSRLSTERQRLVDHVFKNSDVVCDVFSGVGPIAISAARKVKYVYANDLNPTAVEYLARSIVLNKLERKIEVFNMDARRFISSIYSSQHVHPVTQVVMNLPNDAAEFLDVFRGISWNHHLAVPSCVMPNIHVYGFSKAEDPEYDFHERINLTLGENVSDVEMHRVRLVAPGKWMLCASFTLPVSVAFAKPNYIAC

SEQ ID NO: 147344 - protein, 78 aa, Oryza sativa
  unsure (1)..(78): unsure at all Xaa locations
  Clone ID: PAT_MRT4530_47882C.1.pep
SNETVCSKEIQRXLNNQMXQTAIGVNERXLSLARAXTYLLVXQPTMISCQRYGDNMXXMCLHXVPRQSLNSMVGDVAG

SEQ ID NO: 147345 - protein, 66 aa, Oryza sativa
  Clone ID: PAT_MRT4530_47883C.1.pep
MTSLDFETSIFNKEKVFLAGHEEEGPAQAQNLRDSLAEAKSDIVLHKNFADRGLATEAQAQMEQFE

SEQ ID NO: 147346 - protein, 236 aa, Oryza sativa
  unsure (1)..(236): unsure at all Xaa locations
  Clone ID: PAT_MRT4530_47884C.1.pep
AGRPFASSSPPLLLLLLLLLLLFFFSLPCATICLLRLLVPAAARIRPDPPAAATVTTAAKSTAGGRREGEVEGASAAGEGGGGGGGRGGGLGEEENGHSPPPAATTTRSGRSATATASSXALSGPPPARPRGCRRRRFIYKRRRVLHLDDLVSASLSIPAIDIGTSPSSASSSAVAWRPCISLRCGIAMPTSPSLPPPPSGEQGQFGPIKPHSSENAIENAQNGQNGKVVVSARFI

SEQ ID NO: 147347 - protein, 112 aa, Oryza sativa
  unsure (1)..(112): unsure at all Xaa locations
  Clone ID: PAT_MRT4530_47885C.1.pep
PFPTTPRRRPWPPSRRSRKPPAERSWRQPRPCXRCRRSPRRPCRQSGTSLKRWSQHRSRRPWSPCPPSGMSPRKQHSRRHPCVLLIRTHAHLSLDTLEQLLQFAIRLCWTEF

SEQ ID NO: 147348 - protein, 131 aa, Oryza sativa
  Clone ID: PAT_MRT4530_47886C.1.pep
RVLPSSCPTMPPRSTTRSTPPPPPPPRRTRSPPPPPPPSPSLSSRMPPPPLHLQAPPGPPPRRPRLCLVEHPGHRHRHAGGGGGSASRPSPSSASSSAVAWRPCISLRCGIAMPTSPSLPPPPCVRSPPPP

SEQ ID NO: 147349 - protein, 49 aa, Oryza sativa
  unsure (1)..(49): unsure at all Xaa locations
  Clone ID: PAT_MRT4530_47887C.1.pep
APRNGWSWGPRRCSGTLXQRLTWPTNHSSSKFTRTSSSVVAVVXVGSRR

SEQ ID NO: 147350 - protein, 119 aa, Oryza sativa
  Clone ID: PAT_MRT4530_47888C.1.pep
MPTISITTNIPKYKIPSTFLADTSKLVSQVLQTPELYIAVRVKAGQQMNWCNDESPCGLGNLTGTGNFGIDENKQYASIIYDFIEKKLGIPQDKFYLSFVEQKPSDIGVRGTTLEDIIQ

SEQ ID NO: 147351 - protein, 47 aa, Oryza sativa
  Clone ID: PAT_MRT4530_47889C.1.pep
MVNLWVFPLIWKWFFVPGSKKKKKKKKKKKKKKKKKKKKKKKKKKKK

SEQ ID NO: 147352 - protein, 309 aa, Oryza sativa
  Clone ID: PAT_MRT4530_4788C.1.pep
GGPRVPLLRPIFPQAPRAPPMRPAPPGGPVPRAEGGFHRGPGRGLPSPPPGPHPPGKPAPARVPPPPALDDIRFELGGRLTELVAPHRETAQAPLCRFGRGLRVRSQALAVCGKIACQEETRDTDDVYRFGPLGSDEAWHISIGANVPSPGCNTLAPAEDECLEALVLTGWGEACVRPPCKPHKGSGHLGPRGRGRSNPTPPRGNQEEGGYLTLGPDVPEGARPRGRFHLPQASGRNTPGPISPTVGPVSVIEQKPNGLKLRISVTVSWPSVMGGLFKTATPLEQRANLGEQICLARRYGNAASVGERN

SEQ ID NO: 147353 - protein, 109 aa, Oryza sativa
  Clone ID: PAT_MRT4530_47890C.1.pep
MWGRKHEVRTAHRQEIVSRGNEIDGDNEDFVEVTSSLAIRPAMAERDWKTGQGVAKGVRRDRRDGAQCTRRSQIRGGREASDGRAKPASMWRSAADVQGRGRCDRGWWT

SEQ ID NO: 147354 - protein, 140 aa, Oryza sativa
  unsure (1)..(140): unsure at all Xaa locations
  Clone ID: PAT_MRT4530_47891C.1.pep
MVDNGDDNDAAAIHARILSYARRRCSRRPPLAAPRLLRSQRQPAPLPPTSAPIPMPDEPPXAAAAPTPPSAPPPPRAAPPRSSSPPASARRDRRPAAVLRSPRQPAPHPPTSAPIPDADEPSSXPRPRPRRPAPGWARLC

SEQ ID NO: 147355 - protein, 402 aa, Oryza sativa
  unsure (1)..(402): unsure at all Xaa locations
  Clone ID: PAT_MRT4530_47892C.1.pep
LKMILCAYEKLSGLKINFHKSEMFCYGKAKEREDIYESLFGCKMGSYPFRYLGLPMHYRRLANXDWKELEDRIQKKLSSWKGKLLSTGGRLILINSVLSSLAMYMLSFFEIPKGILKKLDYYRSRFFXQCDEHKKKYRLAKWSVLCRPKSSGGLGIQNLEIQNRCMLSTWLFKLINEDGLWQNMLRRKYLAKKKPLXQVQKHPGDSHFWASLMTAKESFQSLGYFKTCDGKQVRFWEDCWIGSQPLEKEYPNLYNLVRNKNAVVAEVLGRTPLKVAFRRAITGRNLQDWYNLVSKAVNVTMSDQKDQFIWKANKDELFMVNSMYKVLMYNGVIPRKTLIWKLRIPLKXKIFLWYLKEGVILTKDNLAKRRWRGSLSCCFCNSKESMHHLFFDCLMARYIWSA

SEQ ID NO: 147356 - protein, 74 aa, Oryza sativa
  Clone ID: PAT_MRT4530_47893C.1.pep
KQKNSIQKDRSSKIPITCSARQKKKSKQEYYFRGKEILTVPTTTIGAYGRTYLEWFELRRGFNELNVTCHNILK

SEQ ID NO: 147357 - protein, 327 aa, Oryza sativa
  Clone ID: PAT_MRT4530_47894C.1.pep
MGRLPLLLLLAAAAVSTAGGAPVYRADYLVDGNQLVDMQYHMGPVVSGSPTNLYLIWYGRWEAAAQAVLRDFLASLSAPAAPSPAVSDWWARAPRLYADQTGAHVTGAFAVAGERSDAGYSHGASLRRIDMQSVIRSAVYAYPDPLPLDPYSGVYLVLTSPDVQVEEFCRAVCGFHYFTFASVVGVTVPYAWVGNSATQCPGKCAYPFAAPDYGGGAGGQQVLRPPNGDVGVDGMVIVLGHELAELATNPLVNAWYAGDTPTAPTEIADLCLGVYGDGGGAGGLVGNVSRAADGASYNVNGVNGRRFMVQWLWNPVRGACYGPNSSS

SEQ ID NO: 147358 - protein, 84 aa, Oryza sativa
  unsure (1)..(84): unsure at all Xaa locations
  Clone ID: PAT_MRT4530_47895C.1.pep
FFFFFFFFFFFEQGEKKXHNXTXXXRXVSQEKXANATKXXXTTXLDRXTXXXVFXXXKXXYNXQXXSIPXXSKKLXAXISKSRA

SEQ ID NO: 147359 - protein, 115 aa, Oryza sativa
  unsure (1)..(115): unsure at all Xaa locations
  Clone ID: PAT_MRT4530_47896C.1.pep
YTVLSGRAHLHLVAFVGHRLPSQTNTNLFCTLCPHSCAXHFRVGHPSXIASGQAHLTSEFFRDWLPEKKLQLVDTSILLIILSPGPGCWLSVDYCLFLSLEAQFVSCVMLLSIRY

SEQ ID NO: 147360 - protein, 94 aa, Oryza sativa
  Clone ID: PAT_MRT4530_47897C.1.pep
RVGGRVGAKWSASTTTFAAIAIAVLLAAGHALPAMVVHCAAARGGAATTTAAGAVRRLLVRVVVSPPTGDSYLGRVNTNPGPSPGPGHSGAARG

SEQ ID NO: 147361 - protein, 445 aa, Oryza sativa
  unsure (1)..(445): unsure at all Xaa locations
  Clone ID: PAT_MRT4530_47898C.1.pep
RPGSEARTRRRRLPGLLAGRRIRXSYGLVSGRSSSGHGREPPGDAAANGAERSRPQXVAAAERPFKKTCHSSVPTSSTLCEPHVWPGLLESLLHQIIALLSSFQDLLAFSATCHSWRAALSSFPSVYTFNFPPLCLKLNTPNIRPLRVLLKDNLLSYCKWQLDDPSKRNISLRCSAPPDAPNRMRYLGCSYGYLIFSYHEKNCLFVDAYTSTKLKSPKLNFMGDRDIYYGILTAPLNSPNSHLILCSRSSIFYWQVGTNSWTKHGYGGEHILQIVLFKGEIFAMDVLGRLHTMQFAPELSIQEVAVLRREEMVTGPRSGPWLVACGEMLLMVDLSTDRDQLPRTFQVFRLEFSAETVECVKMERLENQALFVNLDGRDPTFSCTSPERWGGKSNWIYVAKPSGDSGEPWTAVELGQPVPSRIDRVPDFQVDNMWVVPSLIYDVNQ

SEQ ID NO: 147362 - protein, 115 aa, Oryza sativa
  Clone ID: PAT_MRT4530_47899C.1.pep
MVVAIDYGLPVPRTPTNDSGKANKKEGEARGSKERGRQRRAPRASLLSSPPPLPPRRLAGAALLAQTLVTVDNLVRLTSNLPRATLASVRSPLRKPQSSAATDFSPPTVSMHAHT

SEQ ID NO: 147363 - protein, 594 aa, Oryza sativa
  unsure (1)..(594): unsure at all Xaa locations
  Clone ID: PAT_MRT4530_4789C.1.pep
MEDEPLPAALVAFSPAPVVVVVVVLSSSSSSWRSSLRQAVLVRRPRFVKCCSPVVVFVLGSASSSLVPAASRLRPRIAAEAVPSPFVSVVPVCLHRARSSLSFPRLVAWWANEGYTSCGPVVEMSWHRXGVLLLGGSILPACPGGSGRRXGVGSVLLFMARMGWELCHVFRPYTVVMFNREKGKNVRGYASSNSSFQLNPPLASRELTRAHPWSIPSMLLSSQLPLVGSQDQNQYVFDRAFATQINELPMPEEHVPFCHDCREXGHYALNCPWVYAKEAPSFGLTGQTSLNQPPRTKSSLQPSVQSREPNGENPLNPGNCFPPSLSYHVGSRTKQAKGKKSKNQKRKAPMRTEEEVRKMTITSTEWPPAGITIPRRQRGNTFRGARQLTQHLLSHGGRVSDSEGSDQVSSDVEDESPRHLGEEEMESKACTRCGEIGHIASRCLTLCPHCEEDHPPGECPTRKVTCFLCEGTNHVPKDCQLSVLLTKTAEIQRTTLRLSHQLVSSNSNLDDIIHSTNAPPAAPDSAVNHSNNTFNTNHSLHRRPQQRIVVDGRSCVSPRPTPGRAKGNQSQECDTKQKTVICFKXQSEGSFSCE

SEQ ID NO: 147364 - protein, 122 aa, Oryza sativa
  Clone ID: PAT_MRT4530_478C.1.pep
HHKIGEHTQNQRQMTPSHWSKIVARALDDVEGMLQPTAIATTDLLEGAARGGGGQIQRPSSSSLPDLASVPPPLPSPMNPLAASYWASAVARRAARERLRWRGKAGERRKEDRELKERKRHR

SEQ ID NO: 147365 - protein, 164 aa, Oryza sativa
  Clone ID: PAT_MRT4530_47900C.1.pep
WPSLVKLAVTAAMPRRMVAVAEPHSPSPLSPLLASSPRRIWEREGREREEGRVEPPRHPLLILPRAAATATLLLRRLSPQTLISSTLTKSRRPMGGDWSLCYRPSFSLPLNDARHHQSGALPTTPPASCEEKEGWEGIEQEGTAVEHPPPPLLSIVRCCRPTSS

SEQ ID NO: 147366 - protein, 248 aa, Oryza sativa
  unsure (1)..(248): unsure at all Xaa locations
  Clone ID: PAT_MRT4530_47901C.1.pep
PRRRAQPHSTPTDDVTMATIDTTVVHIKIKPSKFCNLVRPPATVSTSNGHQICMRAPFXVHEYLMESSQSHLSNGSSFIAKFHPSRPKSQKEARVSARPSICLFFGTPTYLVYSFLXCNSDCFYLVLACFFDLLAGIRLICTGKINNPRRGVSIAKAQHNVLYGCSRITNVSLKSXLPTTHRKIGPTTALSVERNLGFINWFQVIRLSSIVHIHIDVNESRHTYTSRFIKIYMNVDNVRKSYTVKRRK

SEQ ID NO: 147367 - protein, 292 aa, Oryza sativa
  Clone ID: PAT_MRT4530_47902C.1.pep
MHRKTVVTKTQLAIRAGRYDRAPRGGLTGISRSVRPTGEPWSDWLAMCPGWFALGWPIQSRQSRGWLPPPRRLVEVLSGDLSEEIVEEARRRFVSGLEFITFGVKEKLPLVTEAWVVLSVGRLPPCPPLDKGGIWRKEYVVHVRTYKRWRRLDVLVGPCRAICVTGDPAATRHHVQRNFSEQGRPVQGPKFQGASTLGLYSISWLAGPIDRRRRRRRSKIGAEAFSKMRPPRLKLFRSRRSIFDRPNSHSPSTRWSFGPESLTPDGGLAAVPDRWPDTAPAHTADFVRELHP

SEQ ID NO: 147368 - protein, 198 aa, Oryza sativa
  Clone ID: PAT_MRT4530_47903C.1.pep
MGEELAGRPRPAGGRTLGRSSSGGQMRGRCSLGGHGWPGAGEELAGGRGSPDAGEGLVRAAGHGGGARSDDYLLDPIAISAFYTVQKGVTVVCSASNSSPQPGSVTKVLHGSLRLPQGQRYAMINAKNANASNVPSDNSTLCFPGSLDSDKVHGKIVVYTRGVNARVEKGLVVKQAGSCDLSACGCEPARKRAVARKR

SEQ ID NO: 147369 - protein, 335 aa, Oryza sativa
  Clone ID: PAT_MRT4530_47904C.1.pep
MPIPNDVDMILSNRLYVQCSDVTMATIDTTVVHIKIKPSKFCNPVRPPATVSTSNSRQICMRAPFWVHEYLMESSRSHLSNGSSFITKFHPSRPKSQKEAHVSARPSICLFGTPLYRVSIHLCASCLSSNSDCFYLVLACFFDLLVGIRLICTGKINNPRRGVSIAKTQRNVLYGCSRVVNVSPKSYLSSTHRKIGPTTAVSVERNSGFIRWYQSFRCSRLVRLEFRVLVTFCTTVVATTVSLLLSGPTKTESACCHGSIFVVFKSFYRSVLVLHEGFVVYPGLVLVPWFCFAREEEEGERNIEDLLGFGWVEGKKKKEKKRIGKKKKIRSGGNP

SEQ ID NO: 147370 - protein, 173 aa, Oryza sativa
  unsure (1)..(173): unsure at all Xaa locations
  Clone ID: PAT_MRT4530_47905C.1.pep
DKTCNLERNVIANKIISSLSCCDWKKQVVLNGLHEEHHMEKPRTVFREEGEDDVTMATIDTTVVHIKIKLSKFCNPVRPPATVSTSNGRQICMRAPFWVHEYLMESSRSHLSNGSSFIAKFHPSRAKSXKEGAASPIMXAYGLVTSSGTPAQRACRLDRPSACSSEPQLIIRI

SEQ ID NO: 147371 - protein, 209 aa, Oryza sativa
  unsure (1)..(209): unsure at all Xaa locations
  Clone ID: PAT_MRT4530_47906C.1.pep
QKFAARDVTMTTIDTTVVHIKIKPSKFYNPVRPPATESTSDGRQICMRAPFWVHEYLMESSRSHLSNGSSFITKFHPSRPKSQKEARVSARPSVCLFFGTPTYHLXLNSYLQYQIAFYLVLACFFDLLAGIRLICTGKINNPQRGVSIAKAQHNISYGCSRIVNVCPKSXVITTHRKIRPTKALSVERNSGSISANHEMCFCHEQSRYT

SEQ ID NO: 147372 - protein, 288 aa, Oryza sativa
  unsure (1)..(288): unsure at all Xaa locations
  Clone ID: PAT_MRT4530_47907C.1.pep
IPDVTLATIDTTVVHIKIKPYKFCNPVRPPATVSTSNGRQICMRAPFWVYEYLMESSRSHLSNGSSFIAKFHPSRPKSQKKTRVSARPSVCLFGXPLYRVSIYLCASCLSSNSVALYLVLACSRLLAGIRLIYTGKINNPRRGVSIAKAQRNVLYGCSRIVNVSPKSXLSSTHRKIGPXTTALSVEWNSGSIRWYQSFRCSRLVRLEFRVLVTFCTTVVAGPVSQLSSGPTKTESARCHGSIFVVFRSFCRLVFEFLSCIASVRCCVVMVCRDGAPVMLRVRKKEGGY

SEQ ID NO: 147373 - protein, 79 aa, Oryza sativa
  Clone ID: PAT_MRT4530_47908C.1.pep
PFPAASRACPKVGLTRRWQLLRGGSEPSSTGGGDFFNNGGVFFDSRLWRYGLGVGRVLLVWARRGAVAGFRTSKLRLQG

SEQ ID NO: 147374 - protein, 274 aa, Oryza sativa
  Clone ID: PAT_MRT4530_47909C.1.pep
FRLLGTDGSVEDERNICRTVKEQLATRGSKSPRISTFGLGSYCNHYFLRMLASIGKGHYDAAFDTGSIEGRMVQWFQKASSTIVINISIDATKYIREFEVDSEYIQDISAKCPLCVSGRYQGKLPETLTAKGYLADMSEISIELRVQHVKDISLDKVLAKQQMDLLTAKAWFYENNQLEMKGVKLSIQNSIPSEYTRTILLQNFVEKMNMCYFVDWSRLPVKNDLSLFVKPNAMYEFCSCYYSLAKKKKKKKKKKKKKKKKSDVAQRTDARVRD

SEQ ID NO: 147375 - protein, 236 aa, Oryza sativa
  unsure (1)..(236): unsure at all Xaa locations
  Clone ID: PAT_MRT4530_4790C.1.pep
VTSPTAVAARRNGRLGRRTLAGERRREDANGGHQHVEDDAANTPVTKTAAEEQRTTTATRRKRRKPSGXRRRRSSGDLRRRRRGGRGRRRLGDHDDGLPERRRRLERRRRTAGAAAATAKLGHTALGLFRRREAKAKVATGRGDTGGPFKGARRRRRRPTATATAKESSGRTNPRRTRIQLFPKRFSQRFQRRKGRGDPGECFPSIDSAGEGKERPDLEGKRRRRETRVSGGGGRR

SEQ ID NO: 147376 - protein, 264 aa, Oryza sativa
  Clone ID: PAT_MRT4530_47910C.1.pep
MWLFWAVQFSTSTLSLVGRGPGEVHISRSRGRTPSWKWRTKSKPRLVAQAQLKRPEVRANPSPSHRVSALSRGSRKPSRHRQRQHGCRPLIAPPESTREPVRHHVGPGETGVARRKTTARGGRARADRISEDQRARIDKPPRDNQLLSRSRRGGAVARPHNKRIPLRARVTRVCAPTPRRQRDADVVWVVGRSIDDSVYTIVDRRKRSQLIKPMLRAARTLIYLLTTKFDMFGQKFAAKTYGILEFVRDECRVRQGHILYLGYK

SEQ ID NO: 147377 - protein, 1035 aa, Oryza sativa
  Clone ID: PAT_MRT4530_47911C.1.pep
MPVYRIRGVDVDFPYDAYDCQITYMDRVLESLQQVTPQSPPIPPRRRGIGNPSIPFDLSDGGELAGSIRQGKNALLESPTGTGKTLCLLCSALAWRRTFGEFLRGGGGGGGGGGGGGGGGSQQPPYGSQPSGSQHSGGSASQSSRYPVIIYASRTHSQLRQVIKELKATSYRPKMAVLGSREQMCIHEEVSKLRGRQQNNACHYLCKKRWCRHHNSVAEFMRNNSELGSEACDIEDLVNIGRTKGPCPYYISRELSKSVDILFAPYNYLIDPGNRRSLNGIPWDNAVLIFDEAHNLESICADAASFDLLPNNLSSCIAEAQECIQLCSAKRTFENSADKQFDPENYAILKALLMALEKKISEVVIDSKELGHTKPGNYIYEFLSELNITSETSKKLIDTIDGASLLLEEALSVTLVEHIEFLITIDNCLPVHAKQLSVCIFPAHLGNSAETGPGMKAKATVCRLETIRDILDIIFRGGGQSHAKYYRFHVNECQQNSGDALKVLGKVSRTLSWWCFNPGLAMEEFLKLGVRSIILTSGTLSPLDSLALELNLEFPVRLENPHVIASDQIWVGVVPVGPSGHPLNSSYRTRETLKYKQELGITIGRQLRTPNINFARIVPDGLLVFFPSYSMMDKCINCWKDRVSEGLDFADRAGRAVIVTGMPFATPTDPKVRLKRDYLDKLGSASNKNSKALTGEEWYVQQAARAVNQAVGRVIRHRHDYGAIIYCDERFVWQNYQSQMSYWLRPYIKCYKKYGEVVQGLTRFFRDKVSIDSSKPNETDFNDNIVLLADKHKPQETISALAVTTANENQRTALSVNPTTKRSNYIKFAQITPANRSTLSMKHGCSSTSQLLYSGDKLSTDAQVIDLAADVATSHLAGYRFKSLGPKKAKVMVGSKDVCFDDGSPKLQHNVESRALAGCLGEQSTASSKKSNITHAPGNSGAIHEKSGGQESNAGPAFLKLAREKLSTAEYRDFVEYMKALKLKTMHIKDSLDAIAKLFSSPERLPLLEGFRVFVPKNHLSLYEQLVQSYTVPNT

SEQ ID NO: 147378 - protein, 132 aa, Oryza sativa
  unsure (1)..(132): unsure at all Xaa locations
  Clone ID: PAT_MRT4530_47912C.1.pep
FKKKKKKKKKKEKKKKKKKKKKKKKKKEERKKKAKREEKKRRKREKKREKKKIGKKRPPLFGKRTDGLSTRGNQQPGSGKKNFRNIKKRLKRNSKKTFGRKVGKTLLKKXKKKSKKTVQKKVKRMKKKRDKL

SEQ ID NO: 147379 - protein, 68 aa, Oryza sativa
  unsure (1)..(68): unsure at all Xaa locations
  Clone ID: PAT_MRT4530_47913C.1.pep
XFPRRPTRPKXFGSGGLDCLSVTGFSEFNEGHPSGHVRHPNILPVLGIVETYDCCYMLHPKSLYTLXN

SEQ ID NO: 147380 - protein, 2496 aa, Oryza sativa
  Clone ID: PAT_MRT4530_47914C.1.pep
MLEDQVAFLLQKYLGNYVRGLSKEALKISVWRVTMSIMRSSDWEVLCRSKVSCQAVLVSAPQQFIQVLFGDCESTHLDAVTRHYKSIALRVATVIQNLGNLSVWTIYFCLSLTVMAWKPGMWCMAKNMQGDVELTNMQLKPEALNSLKLPVRVKAGFLGSVKLKVPWSRLGQEPVLVYLDRIFILAEPATQVEGCSEDAVQEAKRSRVREMEMKLLESQQQLKSELNSSWLGSFISTVIGNIKLSISNIHIRYEDTESNPGHPFAAGLALSKLSAFTVDDRGKETFATGGDLDRVKKSVELESLALYFDSDSSPWSVDKSWEDLLPSEWSQIFEFRKQDSSNPPSKTHTYILRPISGKAKYTKIQLDEAKKTGQALQNAAVDLDDVTLSLSKDGYRDVLKMADNFSSFNQRLKYAHYRPSLPVKSDPRSWWKYAYKVVVHETKKASGNLSWEQLLKNARLRKTYVSVYASLLKSDMSRLVVDDNEDIKKLDRELDIEVILQWRMLAHKFVEQSAETHQYAQQNKQQSWWSFGWTGSSKDEGDSKSFSDEDWERLNRIIGYKENDDYIPVQQDMKLMQFYFEIRMKHNASKLIIDNSEYLADLSCEDFCCNLKMYPEAKIFDLKLGSYKLLSPYGLLAESASVTDSLIGIFSYKPFDEQLDWSFTAKASPCYITYLKDSIDQIVAFFKSSPTISQTLAIETAAAVQMTLDEVKRTAQQQMSRVLKDQSRFSLNLDIAAPKITVPTKFRPDDIHETKLLLDLGNLILRTEEIWDSRASEEQDMYLNFNLVLSDVSAFLVDGDYHWNERSNEVNLLIQLESALYPSTRMAVRVPSLGFHFSPARYHRLMEIFKIFQDNDSDKNSSDLAHLWDQADFEGCLRNKQVHQVPMELTSGVQNILALHDSGQILEDTGALIMLFDNEEARRIWQNRLQGAIYRASGSAALSSFPEVAFPSETHSFKGSFQDVSIEKLFVAGILDELKICFSCGYESNHKLKKVLLAKESSLFEFRAVGGQVELSMKGGNLLIGTILRSLEIEDQYNYPGSPVPRYLARSFINSVQTNEVPTPSRKNSAGPRGTALKKSDSEERFFEASDDFDEFETPMLHERSISDYFSTQNFLPTSLPSLQPPAFSRIPGLLPDIELQSAGFTSGDITFESFVKAQIVIYDQQSPQYNNLDNRVVISVATLTFFCHRPTVIAIMEFMNAINLANVPDADKNKDTTSDPVEHNMVEEPKSDLEAGPVIKRLLAKGKSRTVFHLTSSMAEAQILLMNENGDRLATLSQNNLSTDIKVFTSSFSIEAALGNLKISDDSLSCNHPYFWVCDMRNPGGSSFVEIDFSSYNVDDEDYSGYDYSLSAQLSEVRIVYLNRFVQEIINYFMGLVPKSSDSVVKLKDNVTNSEKWVSKTDMEGSPALKLDVSFSRPIIVMPRETNSSDFLELDVLYIKIQNKFQWIGGDKNEMSAIHLEILTVTSRKISGILGIVLPYDDYAVFLISVENIYFLDKKVKDINLTIGMNMVCGETIIQDVEGLSFEIHRSLRDLMHQLPAVEASIKVDVLKAALSNREYEIISECALSNFSETPHVVPALDDPRYGTTTAESHVSSSSSSESIQDLSQDAETWITNKISVSINLVELSLHSGSTRDSPMASMQASGAWLLYKSNTREESFLFATLKGFSVFDDREGTKDELRLAIGKSATVRDTSSADGYDNPNELDSGERRIQKDLGLEPIPSMLIFDAILRKSSSTVSVCVQRPKFLVALDFLLAIVEFFVPSARSLLSNDEDKDLLHMTSPLVFSDQVYYQERSTMSISPQKPLIVDNEKFDYYIYDGKGGKIYLRDREGKILSGPSAERFIHVLCGKGLQFRNVTIVNGEYLDSCISLGSNCWYSASENDHVYLVSENEGLLSTHSEEITEDVVKNISANRSTEFIIEIQAIGPELTFYSTSRNSGENLALSTKVIHARTDAFCRLIMKGDSMEMSGNILGLKMESNGIRVIEPFDMSVKYSNASGKTNLHLLVSEIYMNFSFSILRLFLAVEEEISAFLRMSSKKMSLMPQVLRRLILFSRWNDSPTKGVLALNTNIVRVKRPLSYKLVWRSGPPQTNELQHSEKDLKNKPSNVDRFCSVWLPVAPVGYVALGCVSSTGTAEPPLSSVFCLSASLVSSCGLRDCIPLSGNANMSFWRVDNAFGSFLPGDPAHMRVDGNAYDLRHMLFNDADSSKTSSIGQDSHNDASQIERSALTSGRLFEAVASFKLIWSNNGMSSPKKLSIWRPMLSEGMFYFGDIAVNGYEPPNSAVVLRNSGDDTFLRAPEGYQLVGRIKKHRGTEGVSFWFPQAPPGFVALGCVASKSSPAKEDLHFLRCIRSDMVKGGQFSEESVWDSSGARTSESFSLWTVDNDVGTFLVRSGFRKPPRRLALKLAGPPTSSSSDSIIIDAEIKSFSAVSFDDYGGMMVPLFGISFNSVGFSYHGGPQHLNATVGLSFAARSYNDKYNSWEPFIEPTDGFLR

SEQ ID NO: 147381 - protein, 2445 aa, Oryza sativa
  Clone ID: PAT_MRT4530_47915C.1.pep
MLEDQVAFLLQKYLGNYVRGLSKEALKISVWRVTMSIMRSSDWEVLCRSKVSCQAVLVSAPQQFIQVLFGDCESTHLDAVTRHYKSIALRVATVIQNLGNLSVWTIYFCLSLTVMAWKPGMWCMAKNMQGDVELTNMQLKPEALNSLKLPVRVKAGFLGSVKLKVPWSRLGQEPVLVYLDRIFILAEPATQVEGCSEDAVQEAKRSRVREMEMKLLESQQQLKSELNSSWLGSFISTVIGNIKLSISNIHIRYEDTESNPGHPFAAGLALSKLSAFTVDDRGKETFATGGDLDRVKKSVELESLALYFDSDSSPWSVDKSWEDLLPSEWSQIFEFRKQDSSNPPSKTHTYILRPISGKAKYTKIQLDEAKKTGQALQNAAVDLDDVTLSLSKDGYRDVLKMADNFSSFNQRLKYAHYRPSLPVKSDPRSWWKYAYKVVVHETKKASGNLSWEQLLKNARLRKTYVSVYASLLKSDMSRLVVDDNEDIKKLDRELDIEVILQWRMLAHKFVEQSAETHQYAQQNKQQSWWSFGWTGSSKDEGDSKSFSDEDWERLNRIIGYKENDDYIPVQQDMKLMQFYFEIRMKHNASKLIIDNSEYLADLSCEDFCCNLKMYPEAKIFDLKLGSYKLLSPYGLLAESASVTDSLIGIFSYKPFDEQLDWSFTAKASPCYITYLKDSIDQIVAFFKSSPTISQTLAIETAAAVQMTLDEVKRTAQQQMSRVLKDQSRFSLNLDIAAPKITVPTKFRPDDIHETKLLLDLGNLILRTEEIWDSRASEEQDMYLNFNLVLSDVSAFLVDGDYHWNERSNEVNLLSVIDKCGIALKLQQIQLESALYPSTRMAVRVPSLGFHFSPARYHRLMEIFKIFQDNDSDKNSSDLAHLWDQADFEGCLRNKQVHQVPMELTSGVQNILALHDSGQILEDTGALIMLFDNEEARRIWQNRLQGAIYRASGSAALSSFPEVAFPSETHSFKGSFQDVSIEKLFVAGILDELKICFSCGYESNHKLKKVLLAKESSLFEFRAVGGQVELSMKGGNLLIGTILRSLEIEDQYNYPGSPVPRYLARSFINSVQTNEVPTPSRKNSAGPRGTALKKSDSEERFFEASDDFDEFETPMLHERSISDYFSTQNFLPTSLPSLQPPAFSRIPGLLPDIELQSAGFTSGDITFESFVKAQIVIYDQQSPQYNNLDNRVVISVATLTFFCHRPTVIAIMEFMNAINLANVPDADKNKDTTSDPVEHNMVEEPKSDLEAGPVIKRLLAKGKSRTVFHLTSSMAEAQILLMNENGDRLATLSQNNLSTDIKVFTSSFSIEAALGNLKISDDSLSCNHPYFWVCDMRNPGGSSFVEIDFSSYNVDDEDYSGYDYSLSAQLSEVRIVYLNRFVQEIINYFMGLVPKSSDSVVKLKDNVTNSEKWVSKTDMEGSPALKLDVSFSRPIIVMPRETNSSDFLELDVLYIKIQNKFQWIGGDKNEMSAIHLEILTVTSRKISGILGIVLPYDDYAVFLISVENIYFLDKKVKDINLTIGMNMVCGETIIQDVEGLSFEIHRSLRDLMHQLPAVEASIKVDVLKAALSNREYEIISECALSNFSETPHVVPALDDPRYGTTTAESHVSSSSSSESIQDLSQDAETWITNKISVSINLVELSLHSGSTRDSPMASMQASGAWLLYKSNTREESFLFATLKGFSVFDDREGTKDELRLAIGKSATVRDTSSADGYDNPNELDSGERRIQKDLGLEPIPSMLIFDAILRKSSSTVSVCVQRPKFLVALDFLLAIVEFFVPSARSLLSNDEDKDLLHMTSPLVFSDQVYYQERSTMSISPQKPLIVDNEKFDYYIYDGKGGKIYLRDREGKILSGPSAERFIHVLCGKGLQFRNVTIVNGEYLDSCISLGSNCWYSASENDHVYLVSENEGLLSTHSEEITEDVVKNISANRSTEFIIEIQAIGPELTFYSTSRNSGENLALSTKVIHARTDAFCRLIMKGDSMEMSGNILGLKMESNGIRVIEPFDMSVKYSNASGKTNLHLLVSEIYMNFSFSILRLFLAVEEEISAFLRMSSKKMSLMPQVLRRLILFSRWNDSPTKGVLALNTNIVRVKRPLSYKLVWRSGPPQTNGGSTHGNANMSFWRVDNAFGSFLPGDPAHMRVDGNAYDLRHMLFNDADSSKTSSIGQDSHNDASQIERSALTSGRLFEAVASFKLIWSNNGMSSPKKLSIWRPMLSEGMFYFGDIAVNGYEPPNSAVVLRNSGDDTFLRAPEGYQLVGRIKKHRGTEGVSFWFPQAPPGFVALGCVASKSSPAKEDLHFLRCIRSDMVKGGQFSEESVWDSSGARTSESFSLWTVDNDVGTFLVRSGFRKPPRRLALKLAGPPTSSSSDSIIIDAEIKSFSAVSFDDYGGMMVPLFGISFNSVGFSYHGGPQHLNATVGLSFAARSYNDKYNSWEPFIEPTDGFLR

SEQ ID NO: 147382 - protein, 301 aa, Oryza sativa
  unsure (1)..(301): unsure at all Xaa locations
  Clone ID: PAT_MRT4530_47916C.1.pep
LFLKRKRGLLRQRLGFAVDRAHGSGSRERTAEIDPSKTDGRDRSGLRRLTADGHDDVSGDVTSGGGSAAQRXGALARRRTTARRRGRRAPGRRARGGELTDDQNVGGGDLRLDDDGGAPAVYSDGEGADEDGGDLATTMATSXRAMTTTGTTAKHGWSDGDDCGSXLHGARALPTARDEDNGGGGGKEAAAKAHGDRRRERNIGVRRKEIDPIRPRIHELPKRFRRXFQKRKGRGDPEDCFPSIDFTGSGKTRWAPPVSGRTRARERRLLLDWADWAGEREXILGRLSAQSQKRLLKNLFQ

SEQ ID NO: 147383 - protein, 194 aa, Oryza sativa
  unsure (1)..(194): unsure at all Xaa locations
  Clone ID: PAT_MRT4530_47917C.1.pep
MTSAVTSSPATAXAARARKLAGERRRDDANGGHQHVERDAANSPRRRRGERGRRXLGDHDGDLPERRRRPERRRRTAGAAATTAARGYTALGRFRRRETKARVAAGARRRRRRPTATGDAKETSEEKVEEIPKIVSPQKISPDRERRDRIXEGDDGGAALGFRAXRRHEEDDDSDRWAPPVSGSELARAAAAAN

SEQ ID NO: 147384 - protein, 260 aa, Oryza sativa
  unsure (1)..(260): unsure at all Xaa locations
  Clone ID: PAT_MRT4530_47918C.1.pep
NGGHQDVERDAANSPMTKTSAEDERTATTMRKKRRRSSSRRRRRCSGGLQRWRRGGQGRRQLGDHDGDLPERRXRPERWRRTAGAAATTTARGYTALGRFRRRETKARVATGSGDTGDPFKGVGGRWRRPTATGDAKERSGFGGKRPIRFDLESTDFQTILADDSKREKVEEIPKIVSPQSISPDRERRGRIXEGDNGGAALXGFGRRRPEVDDGSDRWAPPVSGRTRARERLRLRAGPTWAGGRERGFWADGPKPKEDF

SEQ ID NO: 147385 - protein, 352 aa, Oryza sativa
  unsure (1)..(352): unsure at all Xaa locations
  Clone ID: PAT_MRT4530_47919C.1.pep
MDSPATPVGLSPPLLSLVLCNEPCYTKAVHGNERPRSIXPKRTAEIDRVYGGSRQXGHDDVSDDVTTGGGSAARSXQARRRTTARGRERRAPGRRARRGELTDDQNVGGRXTDGGGVEEEAATVFGLRTATVLRRSSXRRRDGGGRQRFGDHDGDLPERRRRLERRRRTAGAAVTTAARGCTALGRFRRRETKARVAAKRGDTGGPYKGARARRQRPTATGDAKETSRFGGKRPIRFDLESTNFQSEIDDDSKREKVEEIRKIVSPHTFTKSEDCGGQLPVGSRRRQLVLKMITPISRGGDVASREDDSTSWRHMRRPVGEDVGVQQRRHNSPAVQAETPVGGGEGKLAVKT

SEQ ID NO: 147386 - protein, 63 aa, Oryza sativa
  Clone ID: PAT_MRT4530_4791C.1.pep
TKLLLQLPVIKFTVHRASSWCAFPLLLEYVMRVLNAANPCFVSLPFLKVEGPCVVIPLDIIYN

SEQ ID NO: 147387 - protein, 811 aa, Oryza sativa
  Clone ID: PAT_MRT4530_47920C.1.pep
MGDDVLGRGSRRDQEIVLVDIVDDDDHDDVPAVRRQDSLYVDATRAGGANHRGGQEESWARTLKLAFQCVGILYGDIGTSPLFVYSSTFKDGVRHPDDLLGALSLIIYSFALFTIVKYVFIALRANDDGDGGTFALYTLISRHAKVSLIPNQQAEDELISKYNTGKPQATLRRARWMKELLETNRAVKIWLFLLTILATAMVISDAVLTPAISVLSAVGGLKEKAPNLTTDEIVWITVATLVVLFAIQRFGTDKIGYLFAPIILLWLLLIGCVGIYNTIKFDTGVLRAFNLKYIIDYFRRNKKDGWISLSGILLCFTGTEALFSDLGYFSIRSIQLSFSFGLVPSVLLAYIGQAAYLREHPEHIANTFYRSTPNVMFWPTFILAVAASIIGSQAMISCAFATISHLQTLNCFPRVKILHTSRQYSGQLYIPEVNFLLCVGACLVTIGFKTTVIIGEAHAICVVFVMIITTLLLTIVMLLVWKVSIWYVALFFIVFMSSESIYLSAVLYQFVHGEYVPVAMSVFLMIVMTVWHYVHVKRYEFELEHTVPRDKVKELLERRDIQRVPGVGLFYTDLVQGIPPVFPHLIEKIPSIHSVLIFVSIKHLPIPSVDRSERFIFRHVDKEEYKVFQCVARYGYRDPMEEAKDFVDALTENLQYYIRDVNFYTTGGDQHIFRSTSYASSIAESFASYEKHSGHAVYAEEMLTPAESFSEHTKQLSGRSKHFKQFQVENMNMQKMEKVQQEQQAILREMENGVVYILGESDIVASPHSSLLNKIIVNYIYSFLRKNCRNGEKMLSIPRSQVLKVGIAYEI

SEQ ID NO: 147388 - protein, 54 aa, Oryza sativa
  Clone ID: PAT_MRT4530_47921C.1.pep
NVWPYYGSSIARSTLAVIKQWVLYASFQSTPLSRLNKGVCSRSRTSSRSRSRTS

SEQ ID NO: 147389 - protein, 73 aa, Oryza sativa
  Clone ID: PAT_MRT4530_47922C.1.pep
MHCPSGIAGVGASASCRYPSYRRATGVGAFTATTIVPQASPASGRQHSIEESYLSSCSSISPQLRHARRLLVC

SEQ ID NO: 147390 - protein, 646 aa, Oryza sativa
  Clone ID: PAT_MRT4530_47923C.1.pep
MAIAAPLFRLAAAAAVVMGVVSPAVKAAGGGNSSTACPLDLGYVRSFPWDTAPCMPPVANQTACCTTLLSVLGVGLAARLRATGHFRLPSANASAACLGAFSDELASPPLSLQDTLVPACWPVSSQLAISPSYCAGVTTAKQYVATVGNAAVLGSLNSSCGSDLADLSLCSSCLAAAIDASGRLVAAAAKGTNPQNCFYLTVLYAAGVSSSAGPTSPGTANCALGLALSTPSSSSSPASSSNHTNMAVATAIPVASALLVSVIAALLVWRRRQDSIRSKSRRLSGERRLSRPRPNVGSVLFSLGELAKATCGFAERNLIGRGGFGVVYRGVLDDGSVVAVKKMLDPDMEGGDEEFTNEVEIISHLRHRNLVPLRGCCISDDDADEGKQMFLVYDYMPNGSLDHYIFKDGGDGGRRPPPLSWAQRRGVVLDVARGLEYLHHGVKPGIYHRDIKATNILLGTDMRARVADFGLARRSREGQSHVTTRVAGTHGYLSPEYALYGQLTEKSDVYSFGVLVLEVMSGRRALDLSDPSGVVLITDWAWALVRAGRAAEVVAAALREREGPAGVHAMERFVLVGILCAHVTVACRPTMPEALRMLEGDMDVPDLPERPQPYGQRIAFDEGEANFSASSVLSGPPFMDFGDMLR

SEQ ID NO: 147391 - protein, 747 aa, Oryza sativa
  Clone ID: PAT_MRT4530_47924C.1.pep
MHHNPLLERLDWVFTSAPWTLDFPNTTVVPLTRNISDHVPCVVKIDTKIPKSTIFRFENYWVEMEGFFDIVQHVWQIDPGFEDPAKCISFKMKVLRKILLAWSKNLSKLLLLLSNCNKVIDFLDLVEETRLLSVFEWNLREIVKMQILKLLEFRKIYWKKRCTNRWMLLGEENTKFFQSIATERYRINTVSQVIDQNGQTVHSHEQKASLFLQCFKNRMGVTRDPEMVFDLSTLFPRHTDLECLVDMFSTQEIDSLVSIIPADKAPGPDGFNGFFMKKCWPIIAQDYYRLAAHFHAECTDLETLNSSYITLVPKKNSPETVNDYRPISLMGLSLKFLTKLMADRLQGVILKLVSENQYGFIKGRTIQDCLAWSFEYIHQYQQSKREIILLKLDFEKAFDTIEHSAILAVLQHMGFHEKWIHWVKMVFSSASSAVLLNSVPGKSFKCKRGGGDSSGFPIIQYADDTPILLKASQKEIFCLKAILNMFAQSTGLKLPVTVIKAIDTSRKNCLWRGNNPSSTRKSLASWERVCMPKDKGVMGVISLRVQNTAMLLKHLVKFYDGADLPWVRLISQTYYESRVPHLVLNKGSFWWRDIVSLSDIFRAVAKCSVQSGKSVLFWNDLWNDDLKCASYPNLFSITLFRNDSVWDMCSRPLEDSFILPLSDTAYGEFLQLNEELNHLQLQPGRDSTQGTCLTEDIVQKRMMISRVPCVTHIKEKLGFISSLHVPLVWLVGSKWAFLGIVIWSFSK

SEQ ID NO: 147392 - protein, 108 aa, Oryza sativa
  Clone ID: PAT_MRT4530_47925C.1.pep
MVRGCDAVASPTTPATAVHHCHHHRSSARSRNPNFGRKGRVEGEELTGEKVATGEDSYPRRACVVAAASGLRRAAPRHAIPAAAAPPLVVPPLRCTPSRGFFPRHQRS

SEQ ID NO: 147393 - protein, 74 aa, Oryza sativa
  Clone ID: PAT_MRT4530_47926C.1.pep
TDRKFKCTCICMGMFGTAPAPAPPLLELELSQTVSGPVWHSSSSNSTPPGARAQPNSFSSTKTGNGVGWSSLTK

SEQ ID NO: 147394 - protein, 73 aa, Oryza sativa
  Clone ID: PAT_MRT4530_47927C.1.pep
GNVRVLLLSEAELYVLAVLTAKQRARRSPPLYRPLSEAARQLSSAYHRRQQLRQGNTAEDRSADDDVGERCAR

SEQ ID NO: 147395 - protein, 99 aa, Oryza sativa
  unsure (1)..(99): unsure at all Xaa locations
  Clone ID: PAT_MRT4530_47928C.1.pep
LGERPQWGHAIPPNWXHLTHQALGHATHQVIMVPFPIHAIAHGQWPNHVGGSKCLDMPGAPTLPHGSRLSLPPFHQCGTPFHPQYLYGRQIHTVALAAI

SEQ ID NO: 147396 - protein, 106 aa, Oryza sativa
  Clone ID: PAT_MRT4530_47929C.1.pep
MPPSTTPAVGSATPPSETPSPTTLPEALLSASPAGLTSKAHLPHADSTNQALPCVATHLHSLPRSTPTTVQRISLHALLPMHRTITAYSPSTQRRRCRSLLVLLSR

SEQ ID NO: 147397 - protein, 1715 aa, Oryza sativa
  unsure (1)..(1715): unsure at all Xaa locations
  Clone ID: PAT_MRT4530_4792C.1.pep
MTSSLVDNSVNTNLSQVLPASTMLVWTQVGEIVFPVYTTTPISTGPPMTGNENAVATNQGDSMSKNPPAETENGASTTSELKKDSDAAKPCPSDMNREPTKMTSEATRFWCPIHKTRKHTLQACWVFLNVCAKIRACKERGIQRISPTRDVYCPIQKTKNHDLSSCKVFLSAMKALSPKSYVPIRDNDKEHGATPTSDRFVGHIRAVQAILRETPYDPVLNDDLERWTERLRESVTNLSNAFEEVATAAHPEQPPTGDANGEDPERRESPQRATPPPRGTGDLRDHINGHREARRTRDNVNRSRHHVSSRRHDNGNRGNRSNEDRDQDNHHDHNDRERWVPDNTGRGRHHNNDDDGDRRRDNSGRRRQDSRDPGRHPRNRMPEPSNPSSSSSSSSSSSSDRHPRRTHDRRQPTAPNAGCRAFGRSLRDVRWPKRFRPGVIEKYDGSTDPEEFLQVYSTVLYTAGADDNALANYLPTALKGSARSWLMHLPPYSISSWADLWQQFVANFQETYKHHAIEDDLHALTQNSGESLREYVRRFNECRNTIPEIIDASVIRAFKSDDALRRKNDKPKTGGEKKPATDASESSKKKNRKNGKRKAQAEVLAAEYANPPKRPYPQSSDTKKVWCPIHKTDRHSLEDCLVFKKSLEKHIAFEKGKRVRVVEKNEEAVPHESDSAYPDFDLHVSHIFGGSTPYSSKREYKKVECEVCSTWQGAAPKMKWSEQKIEFSEEDHPKTAVIPGRYPIVVEPTIRNIKVARVLIDGGSSINLLFASTLDAMGIPQSELTPTNQPFHGIIPQSSSRPLGKITLPVTFGQANNFRTEQITFDVAEFDTAYNAIIGRTALAKFMAASHYAYQVLKMSGLKGTITIQGNAKLAVQCDKRSLDMVEQTPSPPATTEPPKKPSDMPGVPREVIEHKLMVRPDAKPVKQRLRRFAPDRKQAIREELDKLLKAGFIREVLHPEWLANPVMVRKANGKWRMCVDFTDLNKACPKDHFPLPRIDQLVDSTAGCKLLSFLDAYSGYHQISMAKEDEEKIAFITPFRGALSDQLGNNVEAYVDDIVVKTKTCDSLIDDLWETLDSLRRYRLMLNPEKCTFGVPSGKLLGFLVFGRGIEANPEKIKAIENMKSPIRLKEEAEEAFVALKRYLSNPPVLVAPQPNEELFLYIAATLYSVSTVIVVEREKVQRPVYYVSEALHDAKTRYPQIQKLLYAVIMTSRKLRDYCQAQRVTVVSSFPLGKVVRNKDVVGRIAKWVVELSQFDVHFVLQTAIKSQVLADFVADWTMPDNKSDNQVDNETWTMAFDGALNSQGAGAGFILTSPSGDQFKHAIHLNFRATNNTAEYEGLLVGIRAAAAFGVKRLIVKGDSELVANQVHKDYKCSNPELSKYLAEVRKLEKRFDGIEVRHVYRKDSIEPDDLARRASRREPLEPGTFLDILTKPSVKEVSGEVSPDTPDISSEVTKAERAVADIETTDDWRIPLIKFINSEELPEDDTEAEKITRKAKIYCMVGNDLYKKAPNGVLLKCVSSHDGRHLVLDIHEGICGSHAAGRTLVGKVFRXRYTWAVPTRTGRLQVPIXVAIDKFTKWIEAVPTGEIKADNAIKFIKGIFCRYGLPHRIITDNGSQFICADFYDYCIGLGVKICFASVSHPQSNEQVERANGIVLQGIKTRVYDRLMSHDKKWVEELPSVLWVVRTTPTTSNKETPFFLVYGSEAMLPGEL

SEQ ID NO: 147398 - protein, 257 aa, Oryza sativa
  unsure (1)..(257): unsure at all Xaa locations
  Clone ID: PAT_MRT4530_47930C.1.pep
ETSCWEVGGILLGVNLAVFDIGSISEGDFYVKFQLRNKEDGFKWVLMAVYGAAQPDLKEQFLTELAHTCSNESQPLLVGGDFNIIRSQEEKNNNSFDPRWPFLFNEVINSLNLREIDLSGRQFTWANNLENPTYEKLDRVLMNTEWEQKFPLVTCQALPHAISDHSPIILRSGSHAHFGNXLFRFELGWLQRDGFYEMVPKEWHNINKGNTPMERWSHRIAHLRQHLSGWARSTSGAYKKEKLKLLPNLIALQHIPL

SEQ ID NO: 147399 - protein, 151 aa, Oryza sativa
  unsure (1)..(151): unsure at all Xaa locations
  Clone ID: PAT_MRT4530_47931C.1.pep
SASGWTPTTSPRSCGGRSATPRWWSCAPSTPTSSCASPPPTSTRTATTPARRPRPRTTATAGTLLLTSAAAAAAAAAVATTXPMTMATXATTAAAAAGTRSTGSRRRTRSTGSRRRTTRRRRRRRRTRTPSCTTSTPTTTRTAAPSCSCTS

SEQ ID NO: 147400 - protein, 292 aa, Oryza sativa
  Clone ID: PAT_MRT4530_47932C.1.pep
MEPLQEAAAAAAGGRKRRRRGGGRNRRKHQASSSSGAAASASPPSPPAKRQRGDDAAPKGRGSKPKPASLLDKMRARLSGGHFRMLNEKLYTCSGQDAFDYFTNEPDLFDVYHAGYREQMSHWPEQPVNVIINWLKSHSASWTVADFGCGNAAVSKNVKNKVFSIDLVSEDPSVIACDMAHTPLESSSVDVAIFCLSLMGTNYPSYIEEANRVLKPSGWLLIAEVRSRLDPNTAGADPDKFCEAISKLGFSLVSKDAKNKMFILFHFRKKEKSKVVKNIDWPQLKPCLYKRR

SEQ ID NO: 147401 - protein, 219 aa, Oryza sativa
  Clone ID: PAT_MRT4530_47933C.1.pep
VNPVAAVMKERVRRRRIPAFGEWNYDGDGDLGGGGGCYGYGYRDGDWPVTQYFDSAMQARGLVISLPPSPKPPKKGKEVFQKARYMAFACCNLTVFLTAVKWIDSGALGEEEVVDEKQRQRQHKVVVGLAVAGGEHGAARKQGKQSRVADGGAHAAMGYKGCRPAVVKAVDRDLYEIPPDMLCNKPRPLLGWCPMKLRRQLGEMWLYGLVPWWTLDTDE

SEQ ID NO: 147402 - protein, 89 aa, Oryza sativa
  Clone ID: PAT_MRT4530_47934C.1.pep
HEASPLLSPRHSHTRRTAARARWLSPRRPQPASPASRRPRAPPPPPRAASSSRRSTGGRRRRTGAARRCLWPSSPRRRRGGGRQGSPTP

SEQ ID NO: 147403 - protein, 114 aa, Oryza sativa
  unsure (1)..(114): unsure at all Xaa locations
  Clone ID: PAT_MRT4530_47935C.1.pep
VPGTPSTGSWSPSSLACCRACRVGSRRGPGPRPXPPPACTPCSPSPHGPRRQPLCSASPASSPPRALLLPPPAPPPPCAASASASRPPPPPPQVRRCQSTSPPSWVVLVRAAGR

SEQ ID NO: 147404 - protein, 244 aa, Oryza sativa
  Clone ID: PAT_MRT4530_47936C.1.pep
MASGDPVDAPAAAAESMEVEADQCLDLTSCQLHDLSEVEIPPTLEELELTANRLAAVDPRIGRLPGLRKLSFRQNLLDDAAVAPLSTWADIAGLQELVFRDNKLTTIPDASIFKGLLVFDVSFNEISSLKGLSKVSSTLKELYVSKNEVAKMEELEHFHALQILELGSNRLRNLRVLDVSSNKLTAIEDVETLSSGLVSPPSIEVGDVAEVGCVSGTAELERIGGVDANSRGSEPSSNLFIHVE

SEQ ID NO: 147405 - protein, 59 aa, Oryza sativa
  unsure (1)..(59): unsure at all Xaa locations
  Clone ID: PAT_MRT4530_47937C.1.pep
FRSTTFLKRRNNSKTEYNHRTQQATPTMQTCKRIXGWFVAICIKAVVKHFIEQKSKTVD

SEQ ID NO: 147406 - protein, 51 aa, Oryza sativa
  Clone ID: PAT_MRT4530_47938C.1.pep
RVELEFDRFPYLKAGGNSRNPFGKLHRDNFPLPSRSQNRAPSVTKLVHQGF

SEQ ID NO: 147407 - protein, 82 aa, Oryza sativa
  Clone ID: PAT_MRT4530_47939C.1.pep
LNPIPLLLLSSPSCLRFSAAPHPPSGQATVAPHGTCHTPAHHRVGAHSRSTSRQPVSVAPMEGRDAARRSAVGRSAAAGAVR

SEQ ID NO: 147408 - protein, 214 aa, Oryza sativa
  unsure (1)..(214): unsure at all Xaa locations
  Clone ID: PAT_MRT4530_4793C.1.pep
KGFIASAEGXGRADRVHGSGAHAAASRSTVDRVHPGSHRPAPWVPHVSRTRGSGRMTAGPHAAAARCARRRPRQRXRREAVRPRPYGRRRRPXHGGAAAERGEGKRETKRRSTAHPGSTATTEMATGAEEGGGAARVDGVDGAPVVGDRNGEVDEVGEDAAKPKEAAPRWEVVRGDDGCGPELGGDGGERERQRELDSGGERGRRVAKTVVGCR

SEQ ID NO: 147409 - protein, 85 aa, Oryza sativa
  Clone ID: PAT_MRT4530_47940C.1.pep
MGLGGIDVGNRSDGWVCRGVPCLVDMLMPGNTAILRNARIDMFKGSMRLAVDKWGRVEVTEPASFAVKEDNNLSLVEYELVNVPE

SEQ ID NO: 147410 - protein, 363 aa, Oryza sativa
  unsure (1)..(363): unsure at all Xaa locations
  Clone ID: PAT_MRT4530_47941C.1.pep
QETQLRGRGGGAAAHDGREVGGGGGQAXPFTAAQYEELEQQALIYKYLVAGVPVPADLLLPIRRGLDSLASRFYHHPVLGYGSYFGKKLDPEPGRCRRTDGKKWRCSKEAAPDSKYCERHMHRGRNRSRKPVEAQLVAPHSQPPATAPAAAVTSTAFQNHSLYPAIANGGGANGGGGGGGGGGSAPGSFALGSNTQLHMDNAASYSTVAAGAGNKDFRYSAYGVRPLADEHSPLITGAMDTSIDNSWCLLPSQTSTFSVSSYPMLGNLSELDQNTICSLPKVEREPLSFFGSDYVTVDSGKQENQTLRPFFDEWPKARDSWPDLADDNSLATFSATQLSISIPMATSDFSTTSSRSHNGIYSR

SEQ ID NO: 147411 - protein, 87 aa, Oryza sativa
  Clone ID: PAT_MRT4530_47942C.1.pep
ILSLLSPFLRRPSSPKRPSHGRTARAHATRRHATAQARTAAAPAASRSRSRRWSRAPPCGQPPAWGQTSTASVAAWGRVQGARDAAS

SEQ ID NO: 147412 - protein, 801 aa, Oryza sativa
  Clone ID: PAT_MRT4530_47943C.1.pep
MEDWNGEWGRFGPPVVCVSKIETGSGSREVGEMARGNGGVSRDGNGRIQRPTSLHPCPQAATDAVAIPPPGGSVPDSLDPASGSDRRGGCPPPRWRLLAQRRPYSISTTETGWRLVLRPCAPVQWRAGVWRAPVRCGRGLAAWGMGAVEKRRQEGDERRRRGIEFRGENVPTLVYPMGEAIARDFSSARGHGHMAGQTGHRMAVQGPNQDPLDNIQISFPSARAEKPHITGALFDRTSHYLGHTAGALYYFGLQAPNGGIHGSLTGISIGVGVSSTQKAPPPSEVKVMKSATRLSVVTTTVFYMLCGCMGYALPDNLLTGLGFYESFWLLDVANVVHLVGAYQVFVQPIIVFIERWASCRWPDSAFIAKELRVGPFALGKQQRVRDHAFDGIMEVQKRVRRFLALHSLLLYAAAPTALAGGGGGAVSVPFSRLGALARRQLRLAPLDAGRFLLRHPHAFHLFLHPVHRVLHARLTPRAAAALRLEADAVASSLPASIVRIRKLLLLAPPHHRLRLEHIRLLRRDLGLPDDFAESIIQAHPALFRLTPDQFVEFVPSPSDPPGLSVAAVERAREQHYREHRNPGAGEEDVRFAFPTRFPPGFKIGKYFRIAVWKWQRLPYASPYADVSGHDLRSLEARRRMEKRAVAAVHELLSLTVEKRTTLERLALFRDALGVPKKIKEFLLKYQGIFYISTRGNQGKLHTVFLREAYYKGELVEPNEIYAARRKLEELLMLNPQKANLDRMFTSMGRGWDELGGGRRGGAELREEFLGEASDRRTNTKVDGEYGGDSGDDSGVESLYIE

SEQ ID NO: 147413 - protein, 91 aa, Oryza sativa
  unsure (1)..(91): unsure at all Xaa locations
  Clone ID: PAT_MRT4530_47944C.1.pep
SVRSAPMRITPRYLIIQSSVYVVQVIIPLLYRLLVNMRYIKNXXAVRGRLAAGQARFALYGIAWYIFFFPFFFSSLRANPRVRPRVRPRVR

SEQ ID NO: 147414 - protein, 149 aa, Oryza sativa
  Clone ID: PAT_MRT4530_47945C.1.pep
MAIKDRFTGNPGRLTALATSGKFQASGEDYSLTRGSAWIEPQYTAIHEHPNSHLGQMWELIQAWAAFHGRMVDSNKTGGSPAGTSKQTLSAEEMDDQLEQFTSLMQQKFLSGEDFGHMDYSRIDNDEMLDDHWSKEANYDAGEKYFEED

SEQ ID NO: 147415 - protein, 146 aa, Oryza sativa
  unsure (1)..(146): unsure at all Xaa locations
  Clone ID: PAT_MRT4530_47946C.1.pep
LPRGQAVPAAARFAVAGGSXRRAPPTAPLCRRSTALAPLHRSAAAADLSTARKLARXRSTAATAAPQPLPPSLSLSLAVVHMRLRHRPFVVHERRRPRPNGFVGRXSSSTAEPCRRPFLRRPXPKLIVGRSSSTDRLEADTITHVA

SEQ ID NO: 147416 - protein, 53 aa, Oryza sativa
  unsure (1)..(53): unsure at all Xaa locations
  Clone ID: PAT_MRT4530_47947C.1.pep
SGFSLWDPNPFGPRIPRMFKLGLSIDKDEFFXAYPDIPPLEDHPGESKMEEVD

SEQ ID NO: 147417 - protein, 73 aa, Oryza sativa
  Clone ID: PAT_MRT4530_47948C.1.pep
MGNGDVYDAMTFLKALSRRSPFLAIVIFSLLGRRNYGEDHGALGERLGDGSSQDGEPTHIKFESTSGSRSSPH

SEQ ID NO: 147418 - protein, 108 aa, Oryza sativa
  Clone ID: PAT_MRT4530_47949C.1.pep
MNKFITESNILQQAQQAHYNTRTDVADRCLCKGTEKPEIARGQARRPYPAAPELGPIECSVGAAAAAREWGGHRCSRVGGYHRRERCSLVRNAPSGLKSGEDFTTACG

SEQ ID NO: 147419 - protein, 79 aa, Oryza sativa
  Clone ID: PAT_MRT4530_4794C.1.pep
MSWHRAGVLLLGVQSCLPVPGVPAVDGIGSVLLSMARMGGMVGLGWLGTSWDPGSGCQFGLNHRRPWVKAVREALEKKS

SEQ ID NO: 147420 - protein, 428 aa, Oryza sativa
  Clone ID: PAT_MRT4530_47950C.1.pep
MPPSPSAAGAASPSNSSAASASDPTPSWWESVSQARSRILALSSILPAPADSDVAALADSDRPARALLRSSAAYVALSAALRSGGGADDPACHWLYDTLLSPDPDLRLAALAFLPLLSSLYLLRLPPALPSSLSGFEAVLLAVYSSEAKNRQGKPVLVQVPDLSVPSLYHTPLSSPSSKSPRRPQPPPIPPPAGNVVVGVLSPPLEPQAAVKSTKRAGIIGVAFEAYYAKISQMPPASKVDACNAVAAWAGQYCKCRFELDEKELEEEEADSLGSVSPLSSEAENGKALEEEMAKMRVNGDTNGRNCGEREGRVPLPWELLQPVMRVLGHCLLAPLNPTEVRDTAAEAVRVVYARACHELVPQAILASRSLIELDKSARKAAKEAAAAASGAIVSVGTAGSTASSSRPSSKPNTPGKQRKPDVLLLSK

SEQ ID NO: 147421 - protein, 47 aa, Oryza sativa
  Clone ID: PAT_MRT4530_47951C.1.pep
TASKNGYSNSLVGQLDGCYNKNCSSRACSAERVNITCDITYKNCLIY

SEQ ID NO: 147422 - protein, 49 aa, Oryza sativa
  Clone ID: PAT_MRT4530_47952C.1.pep
GKGKFIRIINNGRPALSNTVPKKVSIGHTKKQIEDIGRGRGHYEAEMRG

SEQ ID NO: 147423 - protein, 324 aa, Oryza sativa
  Clone ID: PAT_MRT4530_47953C.1.pep
MPMPVPTQLNRSNPLLFSPILSTSGLFIGVGWTLTTYLLEIKLARDRKNARVKYDWFIFNKMIDSNAMSYKDFVADIANSYPWGPNETVTIGYVNMVHKISHHVTTDQDMLEMFEKFVDIKVIPMIIRIHGMNENIDELDHTLVKANICVPDTSSLATPSQVDFSQPSSSTLPSHILVPSDKDDGVNESEDESMASDGMPEHIPSTIYDKDDTPMILGSIYSNIDEFRLAIAQHAIKFRLAKCAAQGCKWRIHASVVADGVTIMVKTNPFPHECSSTRRSETIKAASKFWICEKEQQPGKDFNLHVYFAGPDPWKGYCWLYGPK

SEQ ID NO: 147424 - protein, 894 aa, Oryza sativa
  Clone ID: PAT_MRT4530_47954C.1.pep
MADSMLSTVPSWLPVGMDPLTTYLLEIKLAGDRKNARVEYDWFIFSKVIDSNAMCYKDFIDDIAKSYPWGPNETVTVGYVDMVHKITHHVTTDQDMLAMFEKFVDIKVIPMIIRIHGINESIDELDHTLVKASACDPDTPSLATPSQVDFSQPSSSTLPSHVIVPSDTYLVNPFSMAEHVGVDEEGIYLDEEEAVVGHADETRGEGAVNEVSEDESWATSEDESEDASEDDGVNESEDESMASDGMPEHIPIATYDKNDPPMIVGSVYPNINEFRLAIAQHAIKKEFEYNIIRSEPGQYTASCAAKGCKWRIHASVVADGVTMMVKTNLVPHECSSTRRSETIKAASKFWICEKVKDWLLEDASVGAKELQRRIHETHKVKINYKRVHAGRELAITKLYGSWRESFDMLYRYKAQIEKSSPGSFFIIDHHTVLEEIKFRRLFFALKPCIHGFLTGCRPYLAIDSTFLTGKFKGQLAIACAVDGHNWMYPVALGIFDSETAENWMWFMEQLKDAIGTPSGLAICTDAGKGIDSAVHEVFRNAEHRECMKHMVTNFKKKFTGKIFDDNLWPAAYAWSPYFYEKHMAAIQEVKPEAVAYLKKYHKRLWSRSQFSTISKVDYVTNNLAESFNNLVKDWKALHLYDFLERIRWWLLVKWDKRQRIGKKFEGCILPHIVKELNEKSRDLNMVVTRNGDFEAEIEVKGAYEKLIPSLPDKAQWPKADHGFFLAPPILKKSAGRPRTMRYKGCTEKGSKRSRRHKCPICKSYGHHWHNCKEGDPEEVAAMIAERGPPKKRTKKTNEATSETSIMAAPIVTPIMAYPPRSTSLTGSNQLEQSNMIVALPCLGEETPTVAPKMTKSKTKGKPSCSSTPGSPAMSTRSKNKSPAMGTRSKRKLMD

SEQ ID NO: 147425 - protein, 709 aa, Oryza sativa
  Clone ID: PAT_MRT4530_47955C.1.pep
MGRGVRQTASRHLTLDLTDNEEAVAGQADETRGEGAANEESEDESWATSEDTSEDASEGDGVDESEDESMALDGMPENIPSATYDKNDPPMIVGSIYPNIDEFRLAIAQHAIKKEFEFNIIRSEPGQYTAKCAAQGCNWRIHASVVADDSVENWMWFMQQLKDAIGTPRGLALCTDAGKGIDSAVHEVFRNAEHRECMKHMVTNFKKKFTGKIFDDNLWPAAYAWSPYFYEKHMAAMEEAKPEAVAYLRKYHKRLWSRSQFSTVCKVDYVTNNLAESFNNLVKDWKALHLYDFLERIRRWLLVKWDKRQRIVKAFISLRIVGQGTIAQVQVDQLELADDDADDTAGDSQQRARASPHSSERAGGRACNHRHHLVQPLNHTEVRIPIHHSDGSDAAAATEGDDRRARSDDNDGCADDRDLREVMVYGGGRWRDGEEGGEARDSTIRREDNRRRRRGLGGMGRQRVGGVRRRRAEEEGWGAGECDAELQIGERGSAMRIGEMRRGATGGSSSATRARVFQRWHGGDWWGGPRWRRGWERSAWAEQIGEGVPTVARRRSARSEQIGGEIGSGEGDRRTTTLATPVQPWWKTAMAATRTAGAIDGGGSGGAIWWRTAWAAGRIDGGGSAGRWGRTVGRRGGTASRGGRRGRAGERKDGEKRAGARKPESQGGEKRMQRDWSAMVWTDRSVWSVDLVGGSSDESLTTTTTVFFK

SEQ ID NO: 147426 - protein, 326 aa, Oryza sativa
  unsure (1)..(326): unsure at all Xaa locations
  Clone ID: PAT_MRT4530_47956C.1.pep
GRRRRPPARAGSAAPAAVVGPRVLGRGSPRRPVTPPRSHEPPTTPSPTAQISPPTQIPPPPPPPXSPSPPHPTMAQPEKVSXPKRPASNPLAQPPPPLDPRGPPNKPLASPPPPPPPQQAGVTGGFPQQPLPPPPPRMAQYPQPPAMAAPPPGPYQHRMPLMPMPGPPSQPPPPQAMYQAHPQYPMPGSLPPPPPRPPSFAPENALPPSSPPPPSPPPPPPSSPPPVPPSPTAAPPPRYPPPLGPQPSPXPTHSASSPATPPPPASSHLGDELCCCQPFPTPHTLATNSAIGGLFHWSSVGARPPPELERIPPGARWCYPNLARRG

SEQ ID NO: 147427 - protein, 50 aa, Oryza sativa
  Clone ID: PAT_MRT4530_47957C.1.pep
YTECDKGESCAANLRIMYILVLLAGISLTIERNTTFISLTAIYLNSILQK

SEQ ID NO: 147428 - protein, 262 aa, Oryza sativa
  Clone ID: PAT_MRT4530_47958C.1.pep
MGSRVKEEERNERAIRALLKLPGNRRCINCNSLGPQYVCTSFSTFVCVSCSGIHREFTHRVKSISMAKFTSQEVSALQEGGNERGKEIYLKHWDFQGQPLPDIRSATKPDDYHRLLIDVDRLRNFIKIVYVDRRFTAERIGNHQPQAKGSRDDTYRNNNIDSSRGVQRGPYGGTSEDNHGPQHSTASTSEDQNNLNKHPVPAKVDQKNRTTTQSRQEQQEKLPNSIEKSSKHLALGSRSTTAGSLLLRIESRSRAGGGWGAG

SEQ ID NO: 147429 - protein, 717 aa, Oryza sativa
  Clone ID: PAT_MRT4530_47959C.1.pep
MADSMLSTVPSWLPVGMDPLTTYLLEIKLARDRKNARVEYDWFIFSKVIDSNAMCYKDFIDDIAKSYPWGPNETVTIGYVDMVHKITHHVTTDQDMLTMFEKFVDIKVIPMIIRIHGINESIDELDHTLVKASACVPDTPSLATPSQVDFSQPSSSTLPSHVIVPSDTYLVNSFPMAEHVGVDEEGIYLDEEEAVVGHADETRDEGAVNEVSEDESWATSEDESEDASEDDGVNESEDESMASDGMPEHIPIATYDKNDPPMIVGSVYPNINEFRLAIAQHAIKKEFEYNIIRSEPGQFTASCAAKGCKWRIHASVVADGVTMMKHMAAIQEVKPEAVAYLKKYHKRLWSRSQFCTICKVDYVTNNLAESFNNLVKDWKALHLYDFLERIRRWLLVKWDKRQRIGKKFEGCILPHIVKELNEKSRDLDMVVTRNGDFEAEIEVKGGSGFRHVVNLEHKTCTCREFQISGKPCIHAIAFITSIRGRLADYVDDCFSVHRFRAAYEKLIPSLPDKAQWPKADHGFFLAPPILKKSAGRPRTMRYKGWTEKGSKRSRRHKCPICKSYGHHWHNCKEGDPEEVAAMLAERGPPKKRTKKTNEATSETSIMAAPIVTPIMAYPPSQNFNFTEDNRTLNNSSGSSISIRSRSLTGSNQPEPSNMIVALPCLGEETPTVAPKMTKSKTKGKSSCSSTPGSPAMSTRSKNKSPAMGTRSKRKLMD

SEQ ID NO: 147430 - protein, 105 aa, Oryza sativa
  unsure (1)..(105): unsure at all Xaa locations
  Clone ID: PAT_MRT4530_4795C.1.pep
WTFSRANEGYTSCGPVVEMXVWQRVGALLLGAQFCLPVPGIPAVGGIGSVLLFTARMGEGLCHIFTTGSKAMECGMVGLGWLGTSWDPGSGCQFGLNHRRPWVKA

SEQ ID NO: 147431 - protein, 287 aa, Oryza sativa
  Clone ID: PAT_MRT4530_47960C.1.pep
MGSRVKEEERNERAIRALLKLPGNRRCINCNSLGPQYVCTSFSTFVCVSCSGIHREFTHRVKSISMAKFTSQEVSALQEGGNERGKEIYLKHWDFQGQPLPDISDVDRLRNFIKIVYVDRRFTAERIGNHQPQAKGSRDDTYRNNNIDSSRGVQRGPYGGTSEDNHGPQHSTASTSEDQNNLNKHPVPAKVDQKNRTTTERENANTGKHQYLDGLQKTGGSSENNLKDTTKSVSSVVEPSKETNRKVLPIRLPDPPRSHKATTSTTPAEIQKVVPPRAADPSSKTTT

SEQ ID NO: 147432 - protein, 164 aa, Oryza sativa
  Clone ID: PAT_MRT4530_47961C.1.pep
NEEAVAGQADETRGEGAANEESEDESWATSEDTSEDASEGDGVDESEDESMALDGMPENIPSATYDKNDPPMIVGSIYPNIDEFRLAIAQHAIKKEFEFNIIRSEPGQYTAKCAAQGCNWRIHASVVADGVTMIVKTNPFPHECSSTRRSETIKATSKFWICEK

SEQ ID NO: 147433 - protein, 183 aa, Oryza sativa
  Clone ID: PAT_MRT4530_47962C.1.pep
PLNRANSAPVNSQLWGAASQASIQGSHALPSNHGSNILAGTLASQRPAVDTTSSRGKALPEDIFTMSYHPYAANWDWRANPQLNMGYGQYNMQYPVGAANFPSLSSMRGALPHTGSTSMLPRAPFTGFVNSDLITPQILPPMTTNNHQFIVQQHDVKVTHQMQNASFPINQSHLPQVGGNPFF

SEQ ID NO: 147434 - protein, 68 aa, Oryza sativa
  Clone ID: PAT_MRT4530_47963C.1.pep
MKIFFFSIYVQFPSLSSMRGALPHTGSTSMLPRAPFTGFVNSDLITPQILPPMTTNNRNFFLLCFAIF

SEQ ID NO: 147435 - protein, 297 aa, Oryza sativa
  Clone ID: PAT_MRT4530_47964C.1.pep
MQAAMPAAVTHDDLSLRKAQERRAARSSGRAAVALVSLSVLCGIVGFILCLAAEGSRSEASHYLMTVGGGGANAAANNGQVDVCFYNSSGRAPLAFAIGAFLMLAVAMFAEHAYMLLAVAAPDSSAAGLAVAEGHPRVPSDPARLTWQTCCLFFVTWICFGLAEVMLMVGIAVESGHVSDWRKPRAVCHRVRPGVFAAAGILGLITVVVGFVVYVTALQTNKLRAQHPVGGYYVGHGAPHPGMPPPPMPYGPHPHPHQPPPPAAAATAPSAPEITPAACQVQPSRAACVTKQCADAV

SEQ ID NO: 147436 - protein, 161 aa, Oryza sativa
  Clone ID: PAT_MRT4530_47965C.1.pep
MSRCFPFPPPGYEAKPRSEHNDLLKKGKHKEKKHKKESKERRGRERKEKNSDRRKDKHSKKHKREKHKDKRKNKDDDRYTNQTLEKATLRNADLDNGRFKEKIQHEAVKDIKPANELVTQILDQEGHANHTSSSTGKLLPSTKSFGSAGSKGKRRSLSSVI

SEQ ID NO: 147437 - protein, 226 aa, Oryza sativa
  unsure (1)..(226): unsure at all Xaa locations
  Clone ID: PAT_MRT4530_47966C.1.pep
LFPTQFRRRARAQREEARGGALLRCGDDDACDDGARXTMAPVALKDGGQRRDYHPCAHPLLCEWRRRTAASGGGAAAAVLHLPLPPAYTCRFRHRLRSRQPAASTRHSRRLRLPQSPASARHHPPPPLAAARQLCVASSHYSPPPLTAARCFARPRPAVRRRRIEGEGPGPKVLAPVGPVVKQAQCDLGGPRLLGRAAHSNTERVDREAVGASNDFDLLNQMDSLL

SEQ ID NO: 147438 - protein, 59 aa, Oryza sativa
  unsure (1)..(59): unsure at all Xaa locations
  Clone ID: PAT_MRT4530_47967C.1.pep
PIPNLTSTMRDXHPNQLLLATYVASCPPSSKSDPQLAQPAAGEHNVRGGVALAHHRRTS

SEQ ID NO: 147439 - protein, 127 aa, Oryza sativa
  Clone ID: PAT_MRT4530_47968C.1.pep
MAGKTLHKFAIPSADNVPIGPPSQHGRCMYTIKGVSPDVIRLQLFPFPLFGRAKQWFYTNRAIVNTRKKRSTAFLSRFFTMGKINALRGRISSFQQTRDETIPEAWERLQEYVAICPHHGIDEWLIL

SEQ ID NO: 147440 - protein, 73 aa, Oryza sativa
  Clone ID: PAT_MRT4530_47969C.1.pep
CENAGESLAMPWAGSTTTASVGAVSLLGGVVMAFFHNPHKSLGENLVPIFGRTAAALRVVSSLGASLRRSSNA

SEQ ID NO: 147441 - protein, 161 aa, Oryza sativa
  unsure (1)..(161): unsure at all Xaa locations
  Clone ID: PAT_MRT4530_4796C.1.pep
SYFSYNQLTGSFPSWATQNNLQLNLVANNFDLGSTNNGQLCPQYSXPGLNCLQKDTPCLRGSPEYYSFAVDCGSNRSIRGSDNTMYELDFTDLGSSSYYVTSETRWGVSNVGKYFQSPNDSKIIYSNEKIQNAVVSELLQTCRMSPSSLRYFGLGLENGIT

SEQ ID NO: 147442 - protein, 142 aa, Oryza sativa
  Clone ID: PAT_MRT4530_47970C.1.pep
KMLRQAANMYTPVVFEIFRREFEMFVDSVIYSCGEDGNAFEYRVAVTDRPGEHYVRFDSGDLSVVCSCKKFEAMGIQCCHVLKVLDFRNIKELPQKYFMKRWKKDVKSASTGNQSPHSMVVYDLRPLVTKEYAHIFLCISGF

SEQ ID NO: 147443 - protein, 55 aa, Oryza sativa
  Clone ID: PAT_MRT4530_47971C.1.pep
PPPPPTLKINPKFPKKKKKKKKKKKKKKKKKKKKKKKKKKKKKKKKKKKKKKQHN

SEQ ID NO: 147444 - protein, 50 aa, Oryza sativa
  Clone ID: PAT_MRT4530_47972C.1.pep
RSSSINCRLLRGKPPAKRIQNGNAFYYGRIIAVLSLHQQFLERFSVITPS

SEQ ID NO: 147445 - protein, 386 aa, Oryza sativa
  unsure (1)..(386): unsure at all Xaa locations
  Clone ID: PAT_MRT4530_47973C.1.pep
MVEVEEVSNKMQVQMRLHPAAAAEEEDADLPLPALFDKASHLHSLASSSSLEQEGIRKGVDLLRRCDEMVSKVGLFSSNETKDDISTANLKYLLVPYYLGEMTERVAQEDRIPVLKASQDHLKEFISICEALELISEDELEISRQKXNLIPWQIXQHRRLHGSRYATRLQKKTQGVARKERXQSCRRHKMICRLSFLSVKHWSLCLMMRLKYXMDSYYLIGSIEGFDLLDMLKKEEEIVPAVKEGKRRMVMHLLVKCLMNVQKGLKHGTIMLPTVHHTPNQLIQSLSCCEGLTSERERMAAQVFQPSYRLPTMSIEEAGLREMKMMEKWQERTAKMIQESNSAWHKDGSRSAQEDEDAEEEKARGWDDWKDDNPRGAGNKKLTPCG

SEQ ID NO: 147446 - protein, 418 aa, Oryza sativa
  Clone ID: PAT_MRT4530_47974C.1.pep
MVEVEEVSNKMQAQMRLHPAAAAEEEDADLPLPALFDKASHLHSLASSSSLDQEGIRKGVDLLRRCDEMVSKLGLFSSNETKDDVSTANLKYLLVPYYLGEMTERVAQEDRIPVLKASQDHLKEFISICEALELISEDELELSRQKQPDTMANRRAQKVARFKRQKAAETKLLEIKERKERRRRSLRAAALSAPIEAGEEDAFEDDGEEEREAWLATISLALCKAFDLLDMLKKEEEMLLAVKERQAKDGNAFAREMLDERTKKAEAWHHNAANRAPYSKPADPITCATFAQDVIEGRASVSQAHEHKHQPLIFGPASLVGGGLTSERERMAAQVFQPSYRLPTMSIEEAGLREMKMMEKWQERTAKMIQESNSAWHKDGSRSAQEDEDAEEEKARGWDDWKDDNPRGAGNKKLTPCG

SEQ ID NO: 147447 - protein, 137 aa, Oryza sativa
  Clone ID: PAT_MRT4530_47975C.1.pep
CGRRRSSGPRRPAGGGARRTAALVGVAAAGWRRRKADGGACRGRGGRLEEARGGRRRLSGPRRRRDGWRRRSSGRGGGGRRQGCIHHHRFQRAMATRPTLVKITKKLLVAGHNNNHLHHQMGLTTMATMKIQTASLS

SEQ ID NO: 147448 - protein, 82 aa, Oryza sativa
  Clone ID: PAT_MRT4530_47976C.1.pep
GSVPVIHKMVSSPLAWSTKHFITSYSMVLKIIQHMAFQLCYDNSSMVFAVVLSFHILGTHLSVVVCYWFAIPIQVRVLQVSH

SEQ ID NO: 147449 - protein, 82 aa, Oryza sativa
  Clone ID: PAT_MRT4530_47977C.1.pep
PPLFFFFFCSSKGLKLRTSGEQAVRPNAYGIDHGNDTSPVTPILYKTPDSRERLKALHTCTDTRPSALIIAQDFDSSSKGRG

SEQ ID NO: 147450 - protein, 44 aa, Oryza sativa
  Clone ID: PAT_MRT4530_47978C.1.pep
LILFIHSSQRDGSMEVFLPLSYQPCTHTQLQSNASNKNTTYILS

SEQ ID NO: 147451 - protein, 262 aa, Oryza sativa
  unsure (1)..(262): unsure at all Xaa locations
  Clone ID: PAT_MRT4530_47979C.1.pep
NLAFLLESNRAAAAAATKGAVRGGGSGGGGGGDAGERAEAEGEELPGGARRRIAAAPTTEAAGARRAPVQAPPPHRHPGEAQGRREGRRCRRLLRETRRERCGEEQGSQRQXTKKQNLEPTADSKAAEISGKDGPVGDENASVDENRRKRKRGKAVDLRFKELDEAVAVSKKQKRKKYLDEKKKKRKGDKMETLPEFPGREKVKFGEVVEAPPKLSFPKVKNALDATREMLRKEAIENYRNIKGWTSRPGLQLPTLAENKSL

SEQ ID NO: 147452 - protein, 663 aa, Oryza sativa
  unsure (1)..(663): unsure at all Xaa locations
  Clone ID: PAT_MRT4530_4797C.1.pep
PGLEWCIPGLEIELCSRDGCSERLGLCNRMPRYKPEYLFGTEGFVQELRTMSFLIGFGIAPLYAQIPHDRDEEKCGVKVTLNSNREDIPSVMFEAGGGSYIHACQEVARIAIGELRESYNDRLADTEYRYHPRQPQGSDCGSYFEPAGIENDATTRHLVEMLWAMDETRAEIVIAAQDREDRNRGKICKLEDKVDHLEKELAALKGEAPPQKARVRXTARKRALFVPRYQLAPKVRLVEKEATPADPPVVNXTNPVEAGDWLHAIEKKLDLLQCTDQEKVSFASHQLHGPASEWWDHFRLNRTTPEPISWLEFNAAFRKTHIPSGVVSLKKKEFRSLTQGSRTVTEYLHEFNRLARYAPEEVRTDEERQERFLKGLNDELSYPLMTGDYHDFQKLVDKAIRQEDKYNRMEQKKRRIAHFKAQQGNSQRPRLTLGPQSMPQGAPRPVASPTQQQPAKREQGSKPGVCFNCGDPGHYADKCPKPRRVKVVPAQNNPSAPAAKARVNHVAAAEAQGAPDVILGTFPVNSVPATVLFDSGAMHSFLSMSFAGNQGMEVKELRRPLMVSTPSNQALSSQRSPSVRIEIQGVPFLANLILLESKDLDVILGMDWLARYKGVIDCANRKVTLTSNDGRVVTVHALSSESIRSRLNQLTLEEIPIVREYPD

SEQ ID NO: 147453 - protein, 505 aa, Oryza sativa
  Clone ID: PAT_MRT4530_47980C.1.pep
MGAASERKCTACGGTGGDEVQIDIDRRRTSHWCSSWSTSSARPPRPRSSSSPAPTGSTTPPAPPAFRLEMGVVGLAENYHACVGGGGSVLEVSYHGMAVAMGRVPRFCVHGKRAGGERADGVASAEATSVREELRGLIRSERQIVGAAEFSVEGEIKGFGYLRCKALCVVGRRGLGRRERQVGAVRAAPADLTRMHRERMAFISSRGRRRVAETASAFVMLLSSGVYTGTGQSHPATSSPTMPRPKRRRSPLPPPAPPGFPTERKHHLPELQPPAVAAASPGVAGVPADLGDALLRCGKLLDKLLEHEDGWVFAEPVDARALRLVDYYLRISDPMDLGTVRRRLERRRYADPWAFAADVRLTFNNAMSYNSAGDPVYESAAELSEIFEAGWPSVLAAPPRPPDAERKRRLSGLLPRLPVGAQVTVAEIMKKRDGCLREVNGMMEVDLDRADSATLDELDRMVAEHGAALAGVVKVKQGALVITDQEHNANFSGWTISLFTVGLLG

SEQ ID NO: 147454 - protein, 406 aa, Oryza sativa
  Clone ID: PAT_MRT4530_47981C.1.pep
MSPARGGTPEEEGGGADVEKAAAETGGVCSLVTGTLVTWCSSLVVASLWQWNGDKHTSYKLLAKSIFGPWGYWYVSFFQQVASIGNNIAIQIAAGSSLKAVYKHYHTTDDGAMTLQQFIILFGAFELLLSQLPDIHSLRWVNAACTASTIGFAGTAIGVTIYDGHRIDRKEVDYSLQGSAASKIFRAFNALGTIAFSFGDAMLPEIQSSVREPVRMNMYKGVSTAYSIIVMSYWTLAFSGYWAFGSGVQPYILSSLTFPRWTIVMANLFAVIQITGCFQIYCRPTFAQFEQRIQAKDAGYRARMWRLVYTSAYMVVITLISAAMPFFGDFVSVCGAVGFTPLDFVLPALAFLKAGKLPENPGLRHAVKVITSAVAVLFSIVGALACIGAVRAIALDVKTYKFFHDM

SEQ ID NO: 147455 - protein, 78 aa, Oryza sativa
  Clone ID: PAT_MRT4530_47982C.1.pep
FVFFFFFFFFFFFFFFFFFFFFWAQKKLYGWGKNPSSFWAPPPWKGGKTSRTNPPKEESLLGGPGRPTLGAPPCLHGD

SEQ ID NO: 147456 - protein, 1008 aa, Oryza sativa
  Clone ID: PAT_MRT4530_47983C.1.pep
MLTKFETKSNRVKGLSFHPRRPWILASLHSGVIQMWDYRMGTLLDRFDEHDGPVRGVHFHATQPLFVSGGDDYKIKVWNYKTHRCLFTLHGHLDYIRTVQFHHEYPWIVSASDDQTIRIWNWQSRTCVAVLTGHNHYVMCASFHPKEDLVVSASLDQTVRVWDIGALRKKTVSPADDILRLTQMNTDLFGGVDAVVKYVLEGHDRGVNWASFHPTLPLIVSGADDRQVKLWRMNDTKAWEVDTLRGHMNNVSCVMFHAKQDIIVSNSEDKSIRVWDATKRTGIQTFRREHDRFWILAAHPEMNLLAAGHDNGMIVFKLERERPAFSVSGDTVFYVKDRFLRFFEYSTQKEVQLAPIRRPGSEAKKGAGGSAVFVARNRFAVLEKSSNQVLVKNLKNEIVKKSPLPIAMDAIYYAGTGNLLCKAEDRVTIFDLQQRLILGELQAPAVKYVVWSSDMESIALLSKHAVVIANKKLVHRCTLHETIRVKSGAWDENGVFIYTTLNHIKYCLPNGDSGIIKTLDVPIYITRAIGNNIFCLDRDGKNKLITVDASEYIFKLALLRKRYDHVMSMIKNSQLCGQAVISYLQQKGFPEVALHFVKDEKTRFNLALESGNIQIAVASAKEIDDKDHWYRLGIEALRQGNVGIVEYAYQRTKNFERLAFLYLITGYMDKVGFMCKIAGQNNNLMGQFHNALYLGDAMKRVEILENAGQLPLAYITAATHGLTEIADRLAAELGENIPSLPEGKTRSLLIPPAPLTASGDWPLLRVMRGIFEGGLDATGKAELEEDDEAAGADWGDEDLDMVDASEAMANGGDGFDAEEGEANEEDGEEGGWDLEDLELPPEAETPKNAGNALSVVFVAPPPGMPVSQIWTQKSSLAGEHAAAGNFDTAMRLLSRQLGIKNFAPLKPLFLDLHMGSHSYLRALATAPIIPVAVEKGWSESASPNVRGPPALVFTFSQMEDRLKAAYKATTEGKFPEALRQFLNILHTIPLIVVDSRREVDEVKELIEI

SEQ ID NO: 147457 - protein, 1219 aa, Oryza sativa
  unsure (1)..(1219): unsure at all Xaa locations
  Clone ID: PAT_MRT4530_47984C.1.pep
MLTKFETKSNRVKGLSFHPRRPWILASLHSGVIQMWDYRMGTLLDRFDEHDGPVRGVHFHATQPLFVSGGDDYKIKVWNYKTHRCLFTLHGHLDYIRTVQFHHECPWIVSASDDQTIRIWNWQSRTCVAVLTGHNHYVMCASFHPKEDLVVSASLDQTVRVWDISALRKKSVSPADDILRLTQMNTDLFGGVDAVVKYVLEGHDRGVNWASFHPTLPLIVSGADDRQVKIWRMNDTKAWEVDTLRGHMNNVSCVMFHAKQDIIVSNSEDKSIRIWDATKRTGIQTFRREHDRFWILSAHPEMNLLAAGHDSGMIVFKLERERPAFSVSGDTVFYVKDRFLRFFEFTTQKEVQLAPIRRPGSVSLNQSPKTLSYSPTENAVLICSDVDGGSYELYIVPKDSAGRADYLQDAKKGAGGSAVFVARNRFAVLEKSSNQVLVKNLKNEIVKKSPLPIATDAIYYAGTGNLLCKAEDRVTIFDLQQRLILGELQAPSVKYVVWSSDMESVALLSKHAVVIANKKLVHRCTLHETIRVKSGAWDENGVFIYTTLNHIKYCLPNGDSGIIKTLDVPIYITRVIGNNIFCLDRDGKNKLVTVDASEYIFKLALLRKRYDHVMSMIKNSQLCGQAVISYLQQKGFPEVALHFVKDEKTRFNLALESGNIQIAVASAKEIDDKDHWYRLGIEALRQGNVGIVEYAYQRTKNFERLAFLYLITGYMDKVGFMCKIAGQNNNLMGQFHNALYLGDALKRVEILENAGQLPLAYITATTHGLTEIADRLAAELGENIPSLPEGKARSLLIPPAPLTASGDWPLLRVMHGIFEGGLDATGKAELEEDDEAAGADWGDEDLDMVDASEAMANGGDGFDAEEGEANEEDGEEGGWDLEDLELLPEAETPKNAGNARSAVFVAPPPGMPVSLIWTQKSSLAGEHAAAGNFDTAMRLLSRQLGIKNFAPLKPLFLDLHMGSHSYLRALATAPIIPVAVEKGWSESASPNVRGPPALVFTFPQMEDRLKAAYKATTDGKFPEALRQFLSILHTIPLIVVDSRREVDEVKELIEIVREYVLGLRMELKRKELRDDVNRQQELAAYFTNCKLQXRVHMRLVLGSAMGLCYKQKNFATAEHFARMLLENNPNEAQARRARQVQQQCSGKKDSSELNYDYRNPFVVCGATYVPIYRGQKDVSCPYCGSRFVPSIEGQLCTICELAVVGADASGLLCSPTQLR

SEQ ID NO: 147458 - protein, 65 aa, Oryza sativa
  Clone ID: PAT_MRT4530_47985C.1.pep
CRTKDTFYCAMLNSRLNPCCLEMRCALTTGHMCLPVNSVPLLAGVRGFPMVSYFIAWRGHGHGFF

SEQ ID NO: 147459 - protein, 62 aa, Oryza sativa
  Clone ID: PAT_MRT4530_47986C.1.pep
VRNGFKVLKGWKFALSLQIPPETHTPATQTSYLTTPTLKLPFPTNCSHQPNMPTYIPPLGAR

SEQ ID NO: 147460 - protein, 79 aa, Oryza sativa
  unsure (1)..(79): unsure at all Xaa locations
  Clone ID: PAT_MRT4530_47987C.1.pep
LLLWLRFLNSPCCYSGRWSLIRVVLSRLLHVGNDWKLSNLLHQHMHLHLDQECLSLLMRLKSRDMTPKGDDSAAALXDV

SEQ ID NO: 147461 - protein, 55 aa, Oryza sativa
  Clone ID: PAT_MRT4530_47988C.1.pep
MEDSGKVGEASAGNSSLTASRAHIGPLVFERVHPRGDTVEEEDLAWLSVGTRGKI

SEQ ID NO: 147462 - protein, 913 aa, Oryza sativa
  Clone ID: PAT_MRT4530_47989C.1.pep
MPILLCDYILNELVLVFVWVVHVLVFGIILCPLAAFYIFGLLITTGLSVWRLIQRDYGEADGGANLRPALNVVYSIAVLQGVLFCYRFASRSVGRELVVDVLTKYNFDSFGSSRALVEYLHETRTGCEKDPSFVEGRNLVTYAVELTRSESPNDFLSGARILATLLDQPELSEQHRMIKLLVISASSSQVLDKLLQTMDCNARPKNAEARELAARIVAHLAGNLHLEQFPGGIQFIASLLDGPVEEEEEDDDDNIYYRVLLDYNKELMRQGLLILGKLAADANCRQAIVDTEGLLTKIMEPLRSGLLHLNGHNDTWSDTVYASMEVMRRLVTAPGKTGEEVRRRISGDMEAMASMERILKCKECSDLLLQSLEIYTRLHERTLSNKESWRSLINILVHTFTQFYVKDDIRGLAGEKLAALSSHGHGKENAKIILQVKEEVIDDLTKMLANPNERNKFKIRAAQILEQLCIHLTDDDEYLQCLKKALKIAMPTVLSIALGEGYPSSNLLATVLSLCATMLRNFTNAEDFARLFDDEITSAGFSFPWRGITSAGFSFPRRLKHIVIRNSYPSISCLKTLKLITEIFMLMVRHGSGYTKEETDSLMESLSEAAVEMSDLENFMLISRNNRDGTKTLDFIVKEAKEELMQRERELQKRERFFSKLNLRAGYHHIRMAKGEEYKTAFQTHIGHYEENMLRILVPSDIVKGYASNPFPAQLLTELVVHPQARIDFSLHQGLMKYKGRWFRQPRSKALVACLQQAHPFSAIDVARLFMVNVYKLHGLPQVIISDRDKIITSLLWEQLFANVVAKRANHKLSFKHFRPYQILARIGKVAYTLQLPGDSLIHPTFDVSQLKSTCKDFKHQVQQHLPSDCWSHQIPKHILDTRVVTKGEATWEDEADLQILFPKALTWGQVKL

SEQ ID NO: 147463 - protein, 140 aa, Oryza sativa
  Clone ID: PAT_MRT4530_4798C.1.pep
MTAPWRLTVVAGEQCAPKRWTTTSQRLRQKRCFGPHCLMLGNAFTNKEELFTWAKNNNRDCSTSTALTEQAILHLAMQIHTTGTAQEASGLLFSVVLLDVNEPDVAATTRMVIDARWRVALVGVENLHAQIVLYMEIVDG

SEQ ID NO: 147464 - protein, 45 aa, Oryza sativa
  Clone ID: PAT_MRT4530_47990C.1.pep
MRTNKPVSDEVHVHEDRVSDIGNNVPVIWLSHSRTCSHAIHGDDE

SEQ ID NO: 147465 - protein, 78 aa, Oryza sativa
  Clone ID: PAT_MRT4530_47991C.1.pep
GSSRLMVLAALGVVNGCRKGSRLSARADRESGRPGRCREKPAAASVRGERLSSSEQEYRCYGFFLSVSPGVKYTPSIE

SEQ ID NO: 147466 - protein, 78 aa, Oryza sativa
  unsure (1)..(78): unsure at all Xaa locations
  Clone ID: PAT_MRT4530_47992C.1.pep
PRVLPLVLPLVLPLVRQQAVPSKRQWLRGLSXLFFHSLYPSISTFYLIVLYLLSPTLPRPLPPSAQGHSFFFLLVLSF

SEQ ID NO: 147467 - protein, 355 aa, Oryza sativa
  unsure (1)..(355): unsure at all Xaa locations
  Clone ID: PAT_MRT4530_47993C.1.pep
MAINDWFAGCSGRFTALTTSGNGDLIPRGRAAQKEGSNVMGFRPGVLGPLDRLRVHCLVFILSALVLGLRIEKEVLAQDATPIVITPVVHEGRLLGKWTVGKKRFYDNDYKAVAEAFSSVPQQLAILEPYIEGHMNEIRAWNPRRAATWISKEHKCKFPEWLKEKNLPFGESLXRLATGPSSLMNSWQWYDIGGYTFYMIGKDKKSAGXNSGVRVEALDAIGENKSYYGXIQDIWELDYGINIQVPELXCQWVKDTTGLSIDYYGFTVLERSKLSHKDDPCVLANRVAQVFYVKDPSDERMDITVPGKQHIFGIXDNTKDASVYNQYDDVPLFTDLPNQIKRIETPLDEKKFSSV

SEQ ID NO: 147468 - protein, 41 aa, Oryza sativa
  Clone ID: PAT_MRT4530_47994C.1.pep
MSTRIGDTEIYCIFGERAKRKLMLVHGDGSPMEGSWIGGPT

SEQ ID NO: 147469 - protein, 44 aa, Oryza sativa
  Clone ID: PAT_MRT4530_47995C.1.pep
VEVLHDRGLETYMDYENGGCENMYHVVSPSILLNPIRIYKSLLD

SEQ ID NO: 147470 - protein, 130 aa, Oryza sativa
  Clone ID: PAT_MRT4530_47996C.1.pep
MARGVAVAAKGGAGGKKKGSVSFVIDCSKPVEDKIMEIASLEKFLQERIKVAGGKAGNLGDSVTVTRDKTKVTVTSDGAFSKRYLKYLTKKYLKKHNVRDWLRVIAANKDRNVYELRYFNIAENEGEEED

SEQ ID NO: 147471 - protein, 72 aa, Oryza sativa
  unsure (1)..(72): unsure at all Xaa locations
  Clone ID: PAT_MRT4530_47997C.1.pep
MAAPDVEYRCFVGDLAWXHDDRSLEADLSTYGKNLDFKIINDRETRKTTRISLTXLSSEQWKRYAIQGKNHD

SEQ ID NO: 147472 - protein, 108 aa, Oryza sativa
  Clone ID: PAT_MRT4530_47998C.1.pep
AHLAPAPVHLALALVHPSRFLWRREKPNLHAPSISRVPIALPPALACPPTASAFPKSRRRRCKHERSKGGGKSNRFPMAAAPIVADGGGGDAERNQRRLFRAKRLRFR

SEQ ID NO: 147473 - protein, 76 aa, Oryza sativa
  Clone ID: PAT_MRT4530_47999C.1.pep
MPPIAIAIARIHLRSRMMAYPLPREVKAWIKRNEKKKKKEDYGVRALTGDDGCGGISGTPAPVLAGRRSAEATRDS

SEQ ID NO: 147474 - protein, 111 aa, Oryza sativa
  unsure (1)..(111): unsure at all Xaa locations
  Clone ID: PAT_MRT4530_4799C.1.pep
MEEYVTAGSTTPPPHLHQLLSGTGAAPPPSSHDDAHPHPHPQSRRTVPARRLRQRLEHEVSELKKQLRNEEAVHDILPPALPHXATALPAAPVPAPAVLPRLPALIPXKAK

SEQ ID NO: 147475 - protein, 466 aa, Oryza sativa
  unsure (1)..(466): unsure at all Xaa locations
  Clone ID: PAT_MRT4530_479C.1.pep
MESKGGKKKSSSSRSLMYEAPLGYSIEDVRPAGGVKKFQSAAYSNCAKKPSXDSPFGFSILCSDQPAPMGVLSAADPPPVSAIGFEGYEKRLEITFSEAPVFADPDGRGLRALSRAQIDSVLDLARCTIVSELSNKDFDSYVLSESSLFIYSDKIVIKTCGTTKLLLTIPRILELAEGLSMPLAAVKYSRGMFIFPSAQPAPHRSFSEEVAVLNRYFGHLKSGGNAYVIGDPAKPGQKWHIYYATQHPEQPMVTLEMCMTGLDKEKASVFFKTSADGHTSCAKEMTKLSGISDIIPEMEICDFDFEPCGYSMNAIHGSAFSTIHVTPEDGFSYASYEVVGFDASTLAYGDLVKRVLRCFGPSEFSVAVTIFGGHGHAGTWAKELNADAYKCNNMVEQELPCGGLLIYQSFDATEDVPVAVGSPKSVLHCFEAENMVNPAPVKEGKLGNLLPWGEDALEENDGVFDE

SEQ ID NO: 147476 - protein, 550 aa, Oryza sativa
  Clone ID: PAT_MRT4530_47C.1.pep
MGASTSTSNPSLEAQEQETLASASLALPLLRAAFSRSNGSLAEALSPPPAAFRSDSPPVPPRFHDLVARLGPAIASLFFSDVGPAGDAAGWLGFLRGFNRCCARVPASQSLALLLRVYAAACADAGAPCGLQFHPDEDGAGGEGKVVGELAPGEIAVLLWMCWVMAWSGSAPGVSGGQEGGGKGEPVLLPDVTHLVLSALVSAGAVADDAGVWGWEVSRGGKGVKVQEFTSWVLSTAAGLGNCLSRYVQERFRSCAADPVEERSVSTGNTSSCNPDVYLLTRGRAWAISLSLRNTLSEKFLSASVIGMDTEDLLYRSSVHGKGLSRFWSCVEGYKGPVLILLSAFSRSGGDNVDTDQRWGIGILTEEGLQNKDTFYGSSASLCSTYPIFRMLPPSADSSLRPYCASDLAGKEKNFIYCHLHPQIRVYEAKPKPVGLGFGGTIGNERIFLDEDFSKLTVRHHAVDKTYQHGSLIPNQGYLPVEASVLDVEVWGLGGEATRRQQDMYKKREDIFSEQRRKVDLKTFGNWEDSPEKMMMDMISDPNAVRREDR

SEQ ID NO: 147477 - protein, 231 aa, Oryza sativa
  Clone ID: PAT_MRT4530_48000C.1.pep
MGIFTVRSAYKLASKAELCSENSGEWRKKFMEEYLECPSPAESSCLRVEASTGLSGQYNQRNNAGTLSAPRTMPRYCSSPDKNLMTRKDGCGSIGIVVRNSTGQVLLTSWRFLRKCAAAEEAELLACSEGLKIVAEWLPMPVILESDCATVIARLQAKGEERSRWTFLLRETKAMMTFIQEVKLAHCNRDCNRVAHELAQFAKQSGHSAVWRDSAPSCIMQTLQQDCIPIT

SEQ ID NO: 147478 - protein, 53 aa, Oryza sativa
  Clone ID: PAT_MRT4530_48001C.1.pep
IIPYRGIFMDFFLFILINKAKSNALLSKDMCLRCLKTSAHGSVSYNVPYPVLY

SEQ ID NO: 147479 - protein, 174 aa, Oryza sativa
  Clone ID: PAT_MRT4530_48002C.1.pep
SRTAAARRRRRLPSPPAMPALSRRLCCLLPWLWTPPSSFSAELPPSRRRPPKAARSTLRWPAAVPPRLPPLPSTPASVRPRRPPRPPSPSSLPPSRRCLPRPLPRPQASRASPPRASPTRRHSSTTRSRTPTKREREGARGSGTPSSPTPSSSSTAHAERRMKSGTEMRKEGGD

SEQ ID NO: 147480 - protein, 87 aa, Oryza sativa
  unsure (1)..(87): unsure at all Xaa locations
  Clone ID: PAT_MRT4530_48003C.1.pep
GTRELNACQARQTPIYPLIPYRSKIVTHIRLIRFFHWPKSXTPRCPSYPPTELIPSSRKSDLYFSWSKFKNKXVVLELEVNKLKKKK

SEQ ID NO: 147481 - protein, 406 aa, Oryza sativa
  unsure (1)..(406): unsure at all Xaa locations
  Clone ID: PAT_MRT4530_48004C.1.pep
MAIEKATSVVAAATAASRGGTASPESGLSSTATPWMGGVLNVSTSGRRGWDTQGVRAQGKPNTAHAVWRVHGGGIRHGWSMRDLLLNPIEEVAIPARGKEKVGEVGRAGAMQKEEIKCFNCGESGHHQGFFSLKVDIPDMEKVAQFRGILTVEKGNGSVQKVATEMSHLFKEKKWDWNVKQISSNDFLIDFSSEDERRQVTKFGGFVFAKKHDIVRAISDIVGEFKEIDEESLKGEGAVREAEVDHDGTGSVEGGXMRMMIMQMIXMMTTLLGWGVKRMVKRKRIVPRRSHLKVQIPAEKDVGNTVIEVGKEGEDKAVVLWKSEDFSQPDIFDQMSQEDDKSNDLLKRMDVDLKLGGVKLFTDEEEEKCAIPTDSDIEMMRAEEDEDNEKFVLDSGMGEQNKGEIF

SEQ ID NO: 147482 - protein, 166 aa, Oryza sativa
  Clone ID: PAT_MRT4530_48005C.1.pep
MANRFPPCLFPLPISSPLRSLLSPLILSHPGTDVHLLKVAHDGIGQRRMRKEEAATHGGGCVDLLHCAMHEEGGGSGFPIRAHTFPKFSLRMKLIMKDLSVISHAFYVKLILNECSCVHMLGQGLQTKCLIAGWDKASKQNFYGCWHMRHRRLRFVLRRSNWSSNI

SEQ ID NO: 147483 - protein, 99 aa, Oryza sativa
  Clone ID: PAT_MRT4530_48006C.1.pep
MGRGKIVIRRIDNSTSRQVTFSKRRNGIFKKAKELAILCDAEVGLVIFSSTGRLYEYASTSMKSVIDRYGRAKEEQQHVANPNSELKEFCSVFIYITEN

SEQ ID NO: 147484 - protein, 92 aa, Oryza sativa
  Clone ID: PAT_MRT4530_48007C.1.pep
TRSRRRSRPRPLPPPPIPPCTPLAASSPELRRIQSPPQSPPSPRPSSPPCNPTVYSPPCRRRRQGGPFPSPQAGVVSSQPVASGSLFVLLYP

SEQ ID NO: 147485 - protein, 46 aa, Oryza sativa
  Clone ID: PAT_MRT4530_48008C.1.pep
PASGKGNIPGLGLPPGFALIGGVPGIFLLPKISKPQFRSVSMGGGP

SEQ ID NO: 147486 - protein, 171 aa, Oryza sativa
  unsure (1)..(171): unsure at all Xaa locations
  Clone ID: PAT_MRT4530_48009C.1.pep
LIFFCVFHLKIYLVKLRAEPPLPPPVGASRRRHAPLLPXVHDSAAAAAILPSTQRHRRRRLRVVAVVQPXPVRSRVCLATAADPCAVAALVASPLLSKPPPCAIACLLACRFRRCEGGDYNPGTVHCFELSYARGLVTTTQMVTCSAWAHDDMVTYCGVVSCGYSGTPLAR

SEQ ID NO: 147487 - protein, 163 aa, Oryza sativa
  Clone ID: PAT_MRT4530_4800C.1.pep
SGTRASIHRGQGPPRRSTAGPWEPTARIGSKPIGRPRGGAAGAWARHETGSAEPWCWAACGLRRQQPAVPNGGEQPEDGGAHGQWRCTRKGRGAGGGAHRACGPTRQSGRSPAAERGGGAPRGGSGDGGSAAFREQEPAADGRRDREARGDESGEDRRTRRDC

SEQ ID NO: 147488 - protein, 98 aa, Oryza sativa
  unsure (1)..(98): unsure at all Xaa locations
  Clone ID: PAT_MRT4530_48010C.1.pep
RTXXXHAASSCFCSRKDXNRRRREREEGRGRGEGGSLLLALPMSAASSSGAGGPSSTTCSPTTCSARCWRGWCPKRTGPFGLVXRRLAPDPXLRXAAL

SEQ ID NO: 147489 - protein, 1055 aa, Oryza sativa
  Clone ID: PAT_MRT4530_48011C.1.pep
MTIDLSMPGSSGLLDDVGGKKHMNFFSNRYVLALTGAAGIGGFLFGYDTGAIIGAAGGGWINDTYGRRKSTLVADMLFALGSLVMCAAGGPYILILGRLLVGLGVGIASVTAPVYIAEAAPSEIRGGLVSTNVLMITGGQFFSYLINLGFTEDEKAKAISVLEKIYDSDRLEEEVELLASSSMHEFQSDGTGSYLDIFKSKELRLAFFAGAGLQAFQQFTGINTVMYYSPTIVQMAGFTSNKLALLLSLIVAGMNAAGTIVGIYLIDRCGRRRLALTSLAGVVVSLAILAMAFILQSSSDICSNALNGACQGALGWFAVAGLALYIAFFSPGMGPVPWAVNSEIYPEAYRGMCGGMSATVNWVSNLIVAQTFLSIVGLVGTGLTFLIIAGIAVLAFIFVALYVPETKGLSFEQVELLWKERAWGNQGNRQSLLGAAPYIGWVKNQVVLVSNLVYMGRTAQLSKGRIGSPSPSEMSATASPASALPFRAGKSGVFRPGPTVRRRVRVCPFPAQLAQPRPIGRDHRPPPSRSAGVRRASRATPPLLTSHDRDALRPRPRPTPTRRTSRTARTIRRPLAFRATEQVVSASYWFKFQGNNLLVQALGLLALQAYLPSLHPPPCNIEAELSNCEEVHGFNTVILHIGLYTWAFSEGCIRACTPSLGADQFDHEDPSESRQQSSFFNWFTFGISLGGFIGLILIVWLENYKGWDIGFGVCALLILLGLLIVATGLPFYRNQVPEGSPLTRILQVLVVAFKNRKYELPEKLEEAQENRNGLDSIEVPRPTNFLKFLDKASINHGEDGAWSVCSTMKVEETKIVLRMLPLFISSMIGYISNPLLLTFTVQQGSMTNTRLGKIHISPATLFVIPITFQMLMLAVYDRFLVPFMRKRTGYACGITHLQRVGLGFASMIVASAVAAVVERKRKEAAVQMSLFWLAPQFFLLGVSDVTSFVGLLEFFNSEAPKDMKSIGTALFWCELGLASWMGTFLVELVNKATRHGHHRGWLEGTSLNNSHLDLFYWVVAVIGLLGFLNYLYWAKKYAYRHNPRMVTPSADQDSP

SEQ ID NO: 147490 - protein, 152 aa, Oryza sativa
  Clone ID: PAT_MRT4530_48012C.1.pep
MHAEPAAPPHLRRSRPPPELRGGGRLSRRLHRRPRHDRPAVDEPSPSTAPPVARPSSSRESSTSALAEPRGDGSASPELAGDGSASPELREGGEGEQPPETVARESNRRSSTSSHRVASRAVGGSGSDTPARCRQEAKERERGEGRQRERSD

SEQ ID NO: 147491 - protein, 193 aa, Oryza sativa
  Clone ID: PAT_MRT4530_48013C.1.pep
MTIDLSMPGSSGLLDDVGGKKHMNFFSNRYVLALTGAAGIGGFLFGYDTGVISGALLYIRDDFPAVRDNYFLQETIVSMALVGAIIGAAGGGWINDTYGRRKSTLVADMLFALGSLVMCAAGGPYILILGRLLVGLGVGIASVTAPVYIAEAAPSEIRGGLVSTNVLMITGGQFFSYLINLGFTEVDIQPPFN

SEQ ID NO: 147492 - protein, 126 aa, Oryza sativa
  Clone ID: PAT_MRT4530_48014C.1.pep
KAKAISVLEKIYDSDRLEEEVELLASSSMHEFQSDGTGSYLDIFKSKELRLAFFAGAGLQAFQQFTGINTVMYYSPTIVQMAGFTSNKLALLLSLIVAGMNAAGTIGGIYLIDRCGPRLLALTSLA

SEQ ID NO: 147493 - protein, 125 aa, Oryza sativa
  unsure (1)..(125): unsure at all Xaa locations
  Clone ID: PAT_MRT4530_48015C.1.pep
QWADRGERGRASGRGRSRTGTRGKGAIXRNGRPKSAERAASTSXPRSTASSTSSTPSTEAEEISWNVCPVRTSTTNAMTDPPIDGSVQEMRQXTGDAISAEPPSSGPRRGRANSTQRRERPVNQD

SEQ ID NO: 147494 - protein, 109 aa, Oryza sativa
  Clone ID: PAT_MRT4530_48016C.1.pep
KHVKKNLHFFCSMVVAQPHICNIEQTGGCDNLVQFGHEKYSECQCLIVQHSLLVWWKFDRVSRTESCLILHCSPPSTKTRYLFLNKAGMDLPSGIEEDAHYLCSELKYA

SEQ ID NO: 147495 - protein, 39 aa, Oryza sativa
  Clone ID: PAT_MRT4530_48017C.1.pep
DKVRDKYHKDFVVDEDQRWLLHRWKGRVLYALSTWVAQH

SEQ ID NO: 147496 - protein, 104 aa, Oryza sativa
  unsure (1)..(104): unsure at all Xaa locations
  Clone ID: PAT_MRT4530_48018C.1.pep
RRLGVXGSNRAPXRLNADAAXACISASXXHQPRPRRDVTSKLSSRGGLVWLIASYYNTTPRGTNHQQSFPKKDRVSRRVTLSPLTSSCSSKIFFXKSMKIIMQH

SEQ ID NO: 147497 - protein, 59 aa, Oryza sativa
  Clone ID: PAT_MRT4530_48019C.1.pep
LVNCGRPLLIGFQGRTIGIESSRSGNYLAVFVRSCGRILVILGQIKRNKGGVKRSYSNE

SEQ ID NO: 147498 - protein, 88 aa, Oryza sativa
  unsure (1)..(88): unsure at all Xaa locations
  Clone ID: PAT_MRT4530_4801C.1.pep
FHLRSHQVKKEERGGGKMGLAFRKLFNRLFSKKEMPILILLPLADRKTTILYKLKLGEIVTTIPPLGFNVXTVEYQNLSFTVLDVGGQ

SEQ ID NO: 147499 - protein, 58 aa, Oryza sativa
  Clone ID: PAT_MRT4530_48020C.1.pep
FSYACTSNVNAELICLSIVCHHVLRASPVSCLSPSGNYQSYLASQHHVRQVILSISVI

SEQ ID NO: 147500 - protein, 134 aa, Oryza sativa
  Clone ID: PAT_MRT4530_48021C.1.pep
WTRHQVPQSHRTFLLLLPIPITPLDRHYLVDNKPWRTLLCGSHKSYSSRSSPRGWIRRSTSSKTNKRTCSSPCRRAPRWGPCDGARTLTQRISSACALEHMIYTPARLPTTTIGGLLGDSALMQRHSEGIAIHS

SEQ ID NO: 147501 - protein, 133 aa, Oryza sativa
  Clone ID: PAT_MRT4530_48022C.1.pep
MENKGSENERSLANNAAAAAAGDVEEETTKPFRFAPEVEKWTAAEKEATLAFFRAANAEAAKYMEMTEEDVVEEYRRAGKLHRYDPDKEWQKRYARAARAHPPPPCAISRLPHIQQYLKYLEEDDQKQFSLIN

SEQ ID NO: 147502 - protein, 55 aa, Oryza sativa
  Clone ID: PAT_MRT4530_48023C.1.pep
KLIEHQIQNKKWGAVQKHQLVVSWDALPYQCCLHAPIILCDEGFTGDRLKQPRVH

SEQ ID NO: 147503 - protein, 55 aa, Oryza sativa
  Clone ID: PAT_MRT4530_48024C.1.pep
LVQKGGHQLHERQETSHSRKSTPICRSWTHIITATHCLSALKGRQSYSQVPRTSH

SEQ ID NO: 147504 - protein, 55 aa, Oryza sativa
  Clone ID: PAT_MRT4530_48025C.1.pep
MAVAPLGGTLPQRHALAAWKHMGRRRIAGHCSWNKMRINRLQEGYMKQPAEPSTG

SEQ ID NO: 147505 - protein, 158 aa, Oryza sativa
  unsure (1)..(158): unsure at all Xaa locations
  Clone ID: PAT_MRT4530_48026C.1.pep
MPCWQADPRWRWRRCRRRAWRFGDRHRGGDGLFAVLGATAAVVSLRRACVGGAVDGNVVVGVTLVVVSLRRACAGGGXAGVGVCVALDGVAVVTSRTLVTCSTLAGAIPGADSSSVGGSGRLVVNILLQADAFRILVNGCLFCPESCGSTLQVALFLA

SEQ ID NO: 147506 - protein, 89 aa, Oryza sativa
  unsure (1)..(89): unsure at all Xaa locations
  Clone ID: PAT_MRT4530_48027C.1.pep
ALFSSHQTSPXLLTFHHIISHPKLSYTHKLSTFFPNYQLFPNFSPISRTKHSLSFKLFLQISNFSITSKLSYTQTSIFSVTSFQFQPNF

SEQ ID NO: 147507 - protein, 395 aa, Oryza sativa
  unsure (1)..(395): unsure at all Xaa locations
  Clone ID: PAT_MRT4530_48028C.1.pep
MVKKKPAGDAEADERRRLRSLAFSNGLLQRGEPAAPRSALAPSTAVSRLQGRDIVRRGGQRKSRFLFSFPGLLAPAAAASGGRVGELADLGTKNPLLYLDFPQGRMKLLGTHVYPKNKYLTLXDDVFESLIVFSEAWWIGTKEEENPQELKLDFPKEFQNDEAVADSDFKGGAGASCDEAVSINKPPKETTTGSLSPKIESDIDSSEDSDLKDEDNTQSTSQAPSVRQSARTAGKALKYTEISSGDDSSDNDDEIDVPEDMDEKMKSPAVKNESQSEDIKPADWSAQPISAKKEPLVQATLSSMFKKAEEKKGPAAKKQRASPEEKHPTGKKSAGRSQKRRKTQVEDDKIEVLSSSSQVVPSSQLILTAYDRITTWTMIAMRTGLSDVQLKLKGM

SEQ ID NO: 147508 - protein, 529 aa, Oryza sativa
  Clone ID: PAT_MRT4530_48029C.1.pep
MTGFGLLVQTISSGASGHIDEGAADEEEARWSSWRRKELRGGAVVAHGTGWCACGTTSTPIWRSRSGNTTPAPLVRNELERLGLTTRMDTDIGIIIDFGFSLLPFITLLIDMESWTLSLPPPFPPRSSASSLTSACQRREEIELSCKRHVNAMQGRAQRVVQGRDIVRRGGQRKSRFLFSFPGLLAPAAAASGGRVGELADLGTKNPLLYLDFPQGRMKLLGTHVYPKNKYLTLQMSRSTKGVVCEDVFESLIVFSEAWWIGTKEENPQELKLDFPKEFQNDGAVADSDFKGGAGASCDEAVTINKPPKETTTGSLSPKIESDIDSSEDSDLKDEDNTQSTSQAPSVRQSARTAGKALKYTEISSGDDSSDNDDEIDVPEDMDEKVKSPAVKNESQSEDIKPADSSAQPISAKKEPLVQATLSSMFKKAEEKKRCTRSPKGSPATKGPAAKKQRASPEEKHPTGKKSAGRSQKKRKTQVEDDEIEVLSSSSQVVPSSQLILTAYDRITMWTMIAMKTGLSDVQLKLKGM

SEQ ID NO: 147509 - protein, 686 aa, Oryza sativa
  Clone ID: PAT_MRT4530_4802C.1.pep
MANPMSMNTKNQFDFRTKSIGGWSGYVAAYMGQGSFTPREHVAFLLMWLKKFLFCGSSCGPTTNWQFVAKALESKKQFPLGKILLGYLYQMLNNASAKIAVGLVVGAGGPWWLLQSWLNLMVMKVVNRPSVTEAEFPRLEPIVEDDGEERTHRRCMSYGEYASTPTNAGAKLSAELLKDWFCSFYEGFQKDARVWFPYEDSANLDLPSDFRFEDINHERYQKAKEVLSTAISPCILPVGIHQGRNIKVSYEFYHPMSSARQLGLGQLPIGLFFADKIQCRGEITSTLMMDRLHNLLGPPLGNIDNIELAGFKSRNFDRWWGEWKLHLFHQSASMYMTDLFPDVIPQTIDSSPPRQSNSGRDIEYAPGLIPNGGGPSPPVIGYHAPKTSTLLQGLIREPTDAGKKRRTRSSAMDALALAPKKRAKSKKTKPTDDLPALYPSIEQALDEEQIGEDVDQAAANVSDIEETPLASPKQTPPTPSAPTHFSRKKKTAMKKKPASTILKLAPSPPPPPSPSVQQSSSDQTPSAVGSHHIEEEEQSVAPTIPVLADLFSFDIRDYLDEAEEDTSSKALAPLSNDVKKTLEDKLADVLTPAAYLEQHQFNLEKAKLRLAERWERKEIEATIQVNRQLLHKEKVKLDQLSEGPIKSNIDWLEARKIDLLAQLEECNAKLDMKHKKLADLPKSIEE

SEQ ID NO: 147510 - protein, 118 aa, Oryza sativa
  Clone ID: PAT_MRT4530_48030C.1.pep
MEGERGSRFVRGCSCANEEDPRVRYKRMAPHTLALCLGVRGNDLLLWRMPAAWQRRACMHGLHWTRHGFPLATIMVGAICHSQGQGRDRIAALVFGASDRPEWRPLQSTELSCFDLCV

SEQ ID NO: 147511 - protein, 257 aa, Oryza sativa
  unsure (1)..(257): unsure at all Xaa locations
  Clone ID: PAT_MRT4530_48031C.1.pep
MRAPHGSDSGRAVHGGPGPQTGKERRTTWCTRGADAAHTQRPRGSHAXAAEPTAPIYPRPARAGGSSRPGAMARRRRGTGGDRRTAAAIRQTAAARRRLSGGATREKRGGRRKGKEGRPHRRGMGLRRRTSTEEGWTRXDLGRANPTAAAALAAARGGRSSERGGGGWVYGAGAMESSGEAGGKRKNEEEDAGMDYIGAERSGTTGSGPISPADVGRLERRTSGCDILPPLASSSTLTPKGSRWLKFSMVNNSNEWS

SEQ ID NO: 147512 - protein, 68 aa, Oryza sativa
  unsure (1)..(68): unsure at all Xaa locations
  Clone ID: PAT_MRT4530_48032C.1.pep
FFFFFFFFFXKSNXNPXKAHELDPNVQFTKKKQIRAKKKGDRXHPXPXPPPPXPPTXIIXXTTTXCCR

SEQ ID NO: 147513 - protein, 340 aa, Oryza sativa
  Clone ID: PAT_MRT4530_48033C.1.pep
MAVTRVGRSTVDRVHRPGRSGAPRGAHVAPTRRTRSGHVAATRAAEPTAPIYPRPARGRGLKPTRGYGTAAARHRRRPADSGGDSADGGGATTFKRRCSQGKERRKKEGEGGASSPKGSDRRGGKRRRPATRNNGGRDGAPAANLDGGGVDEVDLGRANPTAAAALAAARGGRSSERGGGGWVYGAGAMESSGEAGGKRKNEEEDAGMDYIGAERSGTTGSGPISPADVGRWRWRERRDSKFESRPSRGRGRAGEGFEGCGRGGRTCGLGRRGAGKAGAGGCEAAAADGGRPEVRDGPDRLERRTSGCDILPPLASSSTLTPKGSRWLKFSMVNNSNEWS

SEQ ID NO: 147514 - protein, 269 aa, Oryza sativa
  unsure (1)..(269): unsure at all Xaa locations
  Clone ID: PAT_MRT4530_48034C.1.pep
AADARGRLKPTRGHGAAAARHRQRPADGDGDSADGGGATREKRGGRRKGKEGRPHRRGPTGVEGDDGDRRRGTTEGGRQAADGVRDDLRNEMERIRGREXEREHRKREXPAEGGGRGVSYRRTTGMGLRRRTSTEEGXTRWTSATRTQRRRRCGAAAALAVAGGGRSSERGGGGWVHGAGAMESSGEAGGKRKNEWNSNPGRLGGAGERERGLRGAGGADARAAVADXAGKTGAGGCEAVAADGGRPAVRDGPDRLGRRTSGCDFDYWQ

SEQ ID NO: 147515 - protein, 215 aa, Oryza sativa
  Clone ID: PAT_MRT4530_48035C.1.pep
MESSGEAGGKRKNEEEDAGMDYIGAERSGTTGSGPISPADVGRWRWRERRDSKFESRLSRGRGRAGEGFEGCGRGGRTRGRGRRGAGKAGAGGCEAAAADGGRPEVRDGPDSHPPDIYPDFVSISRLRREGKGALISVLRIAVSVLNVKALVPVTLDLTAGNYTRWRGLFFVTLGKYALTDYVVLDTPPTNQPDWMQMDCVVLGWLYGTISADLL

SEQ ID NO: 147516 - protein, 47 aa, Oryza sativa
  Clone ID: PAT_MRT4530_48036C.1.pep
EEREGGRGSGEGEGAHRGALIGAVDSFRPVGEAGDSAVGRWRRWIGR

SEQ ID NO: 147517 - protein, 88 aa, Oryza sativa
  Clone ID: PAT_MRT4530_48037C.1.pep
METPAAGGSGAAPGRPTGQRGTVAAAARHRAGCSAAADPTGVWTTAWAKPAMERPGWISRQSWRPGGQRLRLYLTDTKFLNFYLTNVS

SEQ ID NO: 147518 - protein, 75 aa, Oryza sativa
  unsure (1)..(75): unsure at all Xaa locations
  Clone ID: PAT_MRT4530_48038C.1.pep
GSPGVRDTFNMDKGFYVTKHCGFAIPGNCRRXQASLDWATLFTWVRNWPITRRAPLDCDFPVGAQGVGVSLGSKV

SEQ ID NO: 147519 - protein, 214 aa, Oryza sativa
  Clone ID: PAT_MRT4530_48039C.1.pep
MELAAIASASASICSAYRHLSATPADDNGDDNGARPLSSSEELSKSSSSSRRMAKPAELRRRCYAVLKQQRTRLYILRRCVSMLLCWHEHDLPVNKYNGHRIARTDKASMPTVYSESLFVEGRYALSSGGDGEKEGSDFSSSTFLTISMHGIHSAAKNTVRRKVHTSSKTIVATLTGLRSLGDSYRHPLCGDGSPGNDGEKARPKLVAAIFSPS

SEQ ID NO: 147520 - protein, 187 aa, Oryza sativa
  unsure (1)..(187): unsure at all Xaa locations
  Clone ID: PAT_MRT4530_4803C.1.pep
GVQNPAGRSQLRSRQEGRTPSGERRKSTGAGVNENKKPSESEGAGSSSGGSALKYSRKKVVNTLTSVLTARCKHACGITEKPKEVVEDIDKLDGDNQLAVVEYIEDIYNFYRTAQLERRPTDYMSSQVEVNPKMRAILADWIIDVHYKFELMPEDLXLTMYVIDRYLSLQPVLRRELQLVGVAAMLI

SEQ ID NO: 147521 - protein, 196 aa, Oryza sativa
  unsure (1)..(196): unsure at all Xaa locations
  Clone ID: PAT_MRT4530_48040C.1.pep
MEQQFILRVPPXVAERIERLMNQAAGASSSNPDDASLDLSFSEDGRSGTFMIGNESFPASLLDLPTVMESYKTYNDSVLIKTADIGQMIMVREEDDPAPEGIEYTHGLTPPMRDARRRRFRREPDLNAELVHRVEKHLMNIMHGVSVNQNASVIGAGEGGKKAAPAPATKRNVQRPAANGEEAEAERSDSDESVDP

SEQ ID NO: 147522 - protein, 72 aa, Oryza sativa
  Clone ID: PAT_MRT4530_48041C.1.pep
MEADISVEIGIIGTLVDNGPSEDEGRRVDDGPEDTMMGAKNMLRRLMGEVGEKARGVKWGEDEWKGGRHLKY

SEQ ID NO: 147523 - protein, 139 aa, Oryza sativa
  Clone ID: PAT_MRT4530_48042C.1.pep
PGHLHQLLLCLIVMQFSQARYSGYQPNRPLISVLACLRNALQGSQLMRARMSSLLFSLACLLHDVMGEGESRRRAYKLSSTCSYTCVARAPRYPELLYATDQERSEQIDSELLVALCVPFPPQLLFGCSTFLIGLPCQR

SEQ ID NO: 147524 - protein, 74 aa, Oryza sativa
  Clone ID: PAT_MRT4530_48043C.1.pep
FCIQIVIIPTFTEIEVKYLALQEIPWLIDVLKNIIEWGMRRRRGRRRNRGNLHHDSWRGRTRACVLRGRRRNSL

SEQ ID NO: 147525 - protein, 265 aa, Oryza sativa
  Clone ID: PAT_MRT4530_48044C.1.pep
MTQTKEEAKGGGGSKKPGQIKVGDVVVSVNSEVKKGKNYVSEFDDDEDDLLEFDKEPRVISDKKGDDQKGGARVKVCSRCTQKGHGVADCKVDVYCDICDCSEHVNHKCPVLKLPKPVVQAVGGEGSKEAQEGADLAKEMDFSMMAENILDVAVQDVLEEVYERVEREELEENEAGVQQEKIVQLANVGEVSMTPKRASERLMGSSGRHSLEKAKSRKAWMNLDPLSDTKEQETLTVSHENSMFQKSIKSVISFVRSPTYNVYAI

SEQ ID NO: 147526 - protein, 363 aa, Oryza sativa
  Clone ID: PAT_MRT4530_48045C.1.pep
MAHHGGGTWGRAEEARWCEEEGFLHERGCEGGEQLRFQPRVGFGQRNRGRFRPLFGHKPPFGHKLREAGGRARRDGLTSRTGRYFGAPVPRGSNQQVGGNMFKRRWDEPALMKEGGSSRGIGEMTQTKEEAKGGGESKKPGQIKVGDVVFPVNSEVKKGKNCVSEFDDDDDDLLEFDEEPRVIRDKKGDDQKGGARVKVCSRAVGYAVEGLGFQHIPHQPLQRNKKTTKKALVHVVGGALSVERLVTLLHKLCPTKWKWEPVPHGKDTFVVLFPSKGELQWAINFGGADVKEGGVATGVRAEFEEWFEEEEGFLLPKVLDVVIEDRCFELKFEVEKKGVDENGEEVEFNLEDWDGDEEDGNVE

SEQ ID NO: 147527 - protein, 454 aa, Oryza sativa
  Clone ID: PAT_MRT4530_48046C.1.pep
MTQTKEEAKGGGGSKKPGQIKVGDVVVSVNSEVKKGKNYVSEFDDDEDDLLEFDKEPRVISDKKGDDQKGGARVKVCSRCTQKGHGVADCKVDVYCDICDCSEHVNHKCPVLKLPKPVVQAVGYAVEGLGFQHIPHQPLQRNKKNTKKALVRVVGGALSVERLVTLLHKLCPTKWKWEPVPHGKDAFVVLFPSKGELQWAINFGGADVKEGGVAMGVRVEFEEWFVEEEGFLLPKVLDVVIGDHYFELKFEVEKKGVDENGEEVEFNLEDWDGDEEDGNVEGEESGEDNEGREKGPKMSKVDDMVTDDNHDRGEGSKEAQEGADLAKEMDFSMMAENILDVAVQDVLEEVYERVEREELEENEAGVQQEKIVQLANVGEVSMTPKRASERLMGSSGRHSLEKAKSRKAWMNLDPLSDTKEQETLTVSHENSMFQKSIKSVISFVRSPTYNVYAI

SEQ ID NO: 147528 - protein, 281 aa, Oryza sativa
  Clone ID: PAT_MRT4530_48047C.1.pep
MASVDCVAAGTTPPPGPAGGATKRAAPVSRILCMAENMKFAEGSYVANELDMLSLASSVYTAPLFQTEFDSVYVPEYGDVGNSQDGLFPGLFISDGFVFPPSEHENLPIESDLDGSNNNNNGQESSCAGNIYEGCNEPAKEVDGRSLSVSGDLHSANETTIPNLEPPEIRAEQEKDNATIKCDLPCEGWLKRKSNCLSHRMKGVTTVCTIVAAGALMGFVIIGQRWQQDKLHLHHFQFNIGTEGVNRIVGIFSRCKDALPSSQQLKSLLPTRVLPQEPVSA

SEQ ID NO: 147529 - protein, 83 aa, Oryza sativa
  Clone ID: PAT_MRT4530_48048C.1.pep
KFCISKGVVPGCRLHSHGTGQSNPMFFKTQPCGCLALLEFNTGCCSFTANMVPILIINVWPINRISTRCRFVKPHSWPCPFSS

SEQ ID NO: 147530 - protein, 46 aa, Oryza sativa
  Clone ID: PAT_MRT4530_48049C.1.pep
IFKLLLYYLRPILLIALSFLFVMFDHSSYSKNFGIIIYFVYDLFYY

SEQ ID NO: 147531 - protein, 85 aa, Oryza sativa
  Clone ID: PAT_MRT4530_4804C.1.pep
MVTQVFILVQALEMRPPAPIKTPYPHNLDTCLLLHDWGSVTIISLSCPTMLDLLYRSWALGPPPKPNLGRYREVPGCRIPHSRSH

SEQ ID NO: 147532 - protein, 103 aa, Oryza sativa
  Clone ID: PAT_MRT4530_48050C.1.pep
RRAKTTYCWNAFFAYPGGSKRKATDGLALLPSSIKRHPPQEPQKKLFHASEELGEAVLTVKNNTRLNIKETFFFEDNERGLKFEWPQEKKGPPRGGSGGPQPL

SEQ ID NO: 147533 - protein, 461 aa, Oryza sativa
  Clone ID: PAT_MRT4530_48051C.1.pep
MPPPAAAAALLRRVGLGLGAGAGVGVRGLATLPDAAQPQHPTSKDAYFAAVHHLSTVVRRDFYLERTLNRLRLPSPFPPDLALRVIRAAAPAEPLHAARFLAWLRAKPSFAASADHFDALLLPLARARLFTHLWSLAADMRALGLPLSPSTFSAVISSYGQSRLTDQAVEVFNRLPRFGCPQTTQVYNALLDALCANGSFAGAYKLLRRMARKGVAPDRATFSTLVDAWCAAGKLREAQAFLDDMAERGFHPPVRGRDLLVDGLVRAGRLEEAKAFALRMTKEGVLPDVATFNSLAEALCSSGDVEFAVALLADASSRGLCPDISTYKVMIPAVAKAGRIDEAFRLFYAALEDGHRPFPSLYAAIIKALCKAGRFADAFAFFGDMKSKGHPPNRPVYVMLVKMCVRGGRFVEAANYLVEMSEAGFAPRAPTFNSVVDGLRHCGKHDLAQRMEQLEMSMNGN

SEQ ID NO: 147534 - protein, 189 aa, Oryza sativa
  Clone ID: PAT_MRT4530_48052C.1.pep
MRINEIGGGGMRLVSLAYAVLSLYLLLWRVPGDQPLTWVTDFSLLACTYMYFWIISLSETITKVATFTGITCGILLSFAAAQLLGPVTGMAVMVLGMLCAAGVLGHAVAEHRHRIGSEEAASALATWTLTEEQTELEEGPYAFHAGVLVAAYSLFLLAVMAWLAVDQRGGVDTVTVATMVFEVLLVRNA

SEQ ID NO: 147535 - protein, 1013 aa, Oryza sativa
  unsure (1)..(1013): unsure at all Xaa locations
  Clone ID: PAT_MRT4530_48053C.1.pep
MALDGGGEVGRRRRRRGWGGGFPSLMRRKQVDSDRVRAAEGEGQPQLAKELNIPALVAIGVGSTIGAGVYVLVGTVAREHAGPALTISFLIAGIASALSAFCYAELASRCPSAGSAYHYSYICVGEGVAWLIGWALVLEYTIGGSAVARGISPNLSSAVQELITVLNACVMIFVIVAGSYIGFQIGWVGYKVTDGYFPHGINGMLAGSATVFFAYIGFDTVASTAEEVKNPQRDLPLGIGAALSICCCLYMMVSVVIVGLVPYFAMDPDTPISSVFAKHGMQWAMYIVTSGAVLALCSTLLGSLLPQPRILXMAMARDGLLPSFFADVNKRTQVPVKSTVVTGLCAAALAFFMDVSQLAGMVSVGTLLAFTIVAVSILILRYIPPDEVPLPSSLQETFCLSQEYDEERLSNKKSSDKLCRKDGRDEASEGGRFQHRICLCWSYGSHIRSFCHMAAFPVLASSAGSTKMMAGILSANLEWRGMDESRHMAADRRLGVHFLVDHCNVIKKELLSVDPFHQYVRGDDGGGSTGRRGGAAATGGNPRRDPRRLPPRSLAASRCVCTDWRSTIDSRRLLRADLLPLSLAVIFIDFWGLRFPDFFSRPTSSTSPSTISGKLDFLPIKIDLHSIYAITGHCNGLLMLPGVVVNPATRRWARLPPLPRHFTVPQGLFYNEFIIFDPTISLHYEVFKIPYGGTTDYVDRMDPVLKESEWPPSSLVLRVFSSATGQWDERSFTREGDATGTHADAQRQPWPWIQHGHAYWRGVLYVNTCHVMRISLSDGKYQVIKHPTVYYKKFKPNFLIGKSEKGVYLASLEFDHNLSIWVLNESCGHFEWLPKHQNNLMPLLLRLNCGKQARRPWILQNVNYHLYCQKFPGEWNLYDWEYDPSHPDYQSDSDDDDSDEALDENNFKWNFDDDSVVDTQECFENYKSGSLDFLGFHPYKEMVFLVPRKDWHIIGIAQSSNIWEIYARNIWIGSILLGTRKIRAQIFRVLRQSINPWTMARLWQPHRNTFAAE

SEQ ID NO: 147536 - protein, 185 aa, Oryza sativa
  Clone ID: PAT_MRT4530_48054C.1.pep
TRLIFVNSRSRGGGEPPAGCERIVDRMIKANKIPLLDHIHSVKGHDPWAEWFERVNLPRSLLTSSQEWGGVLLQDAAAKVGQMLALCLERAHCSGKCFGGFDIRDVYYIEYYQLIDINAPMKDFTSRRYINDWLSFNKIIDDHFRYTDPTSGYLSYTLYMEDFMFRISLLEDVPSTGRSWRERAV

SEQ ID NO: 147537 - protein, 38 aa, Oryza sativa
  Clone ID: PAT_MRT4530_48055C.1.pep
MVLTFLLGGNALGTRSISTSLKQTGSDRVFANRFLQAT

SEQ ID NO: 147538 - protein, 90 aa, Oryza sativa
  unsure (1)..(90): unsure at all Xaa locations
  Clone ID: PAT_MRT4530_48056C.1.pep
GGTVWFLFKKKKKKKKKKKKNFISALGRLVYGECSAFAQLDVXGKSYRQNKLKPLVLLQKQVLTQYNEFERKKNGIAESPFLQSVAFKLK

SEQ ID NO: 147539 - protein, 1294 aa, Oryza sativa
  Clone ID: PAT_MRT4530_48057C.1.pep
MATPTGNPNPNPNPSTPFEVSMLFKPPSNAPAAAPIFPGGPAAGPPPPSAAYSYPPATPPFHRAPFLHYPQDPMAAPHMPRPVISFPMPTPNPAAIPSAAAAAAAAAGPSQNHGARLMQLLGSSAPAHLDSSASMPPPASEFTAAQPPQPIPAMPSAPPARMLSSTSSKMPRGRLLGGGDRAVHDVDSRLPGEAQPPQLEVTPITKYTSDPGLVLGRQIAVNRTYIVYGLKLGNIRVLNINTALRSLLRGHTQRVTDMAFFAEDVHRLASASVDGRIYVWKIDEGPDEDSKPQITGKIEIAIQIVGDAESYHPRICWHSHKQEILFVGIGNCVLRIDTTKVRRGRDVKIWDDRKPVPLSILKPHDGQAVYSVAFLTAPEHPDHINLVTAGPLNREVKIWASANEGGVLLPSDSETWNCTQTLELVSSLEPRVEEAFFNQVTVLPQASIILLANAKKNAIYAVHVEYGTDPASTRLDYIADFTVAMPILSLTGTHESQPGNDQVVQVYCVQTMAIQQYGLDLSLCSPPTSETTGLGRDPSISRVHETPLEVVGAESSMPTSFTDSYSVGSPSKSSTVDQQSELDPKPSAPPLTYTEGDGSVHLPSASLASNMDPSGSGSSLGNLEMDQPAFDYAMNRNVEPKILTRQDTPMPKDNFGKDDPRDGRNDVTMLPNPHLMFKVGGNTTHLVTPSEIISGALSSAESNHVPKSDGVKIQDGTSSGHQMAEVEPKHTNEHTFDQNLDLEVAQVVCENTKQAGSSEQTVKMISERSVTTDKYSVEESQTSCDRSISEHTGAADESVTKKPVEVPEKSDYSSASVEQSSSYTKKEKIMHPQASGQSSPSTSAFNSTESSHEPPSSAYPPINSFPEVTTQGMLQQLIAMHKDLQKQLGTIVVAPLAKEGKRIEASLGRTMEKSIKANLDALWVRIQEENAKREKAERERMQQMITLITNSISKDLPATLEKSLKKEISSLGPVIARAITPIIEKCSASAVADSIQKVVGDRVVNQLDKSVSAKLEATVARQIQMQFHTSVKQTLQDALRASLEAFLVPAFEQSCKTMFEQVDSAFQKGMSEHTVAIQQQVEATHTPLAQTLKDTISSASSITQNLTAELLDGHRKLLALLASGNAKAHSTNVLQPNNVPVTGPPEVEAPLDPMKELGRLISERKFDEAFTMALQRSDVSIVSWLCSQVDLRALCSMVPVPLNQGVLLALLQQLAVDIATDTPRKIQWMTDVAMAINPTDPVIAMHVKPIFEQVYNALLHLRSLPTTSPSDSTSIRSFTLKLTGAVIHSRPTSM

SEQ ID NO: 147540 - protein, 139 aa, Oryza sativa
  unsure (1)..(139): unsure at all Xaa locations
  Clone ID: PAT_MRT4530_48058C.1.pep
GSPPPPPRAAHGQGSSLRLASPRRAARALFARTRGHSPRRPSLPCGRPPRPPKEQXPPPPPPPPPPLPSGSRKAGAEQARVPARAPPRPRSSWRTRRVAPGSSAATCGAASWSPRASSSATVSFSLVLRSAPNPPPSAI

SEQ ID NO: 147541 - protein, 159 aa, Oryza sativa
  Clone ID: PAT_MRT4530_48059C.1.pep
RADFTAPLSSDDHLVCYAIPCSMELSDTSVVNKCPHQSTGFPDYAKACTECDSGLTSCERVDQATQDHDILSGSSIYSKNKDLYSYSDISVFSVTHKDFAEPLELPPCGKDDEAPPDLAAQLHCNSCKDVMMPPQVISDEVEPVDRGATIFVEHTPCGP

SEQ ID NO: 147542 - protein, 437 aa, Oryza sativa
  Clone ID: PAT_MRT4530_4805C.1.pep
MPAERRLRQAVGEGIHEERRGGRRGGGGRARAAEVAGGGGGAAVATGKQKAATAAAGRPGSRNRQALGDIGNVLNAHVVDGKIQLPEGINRPITRSFGAQLLKKAQENAVGANKIPVRKEPAPKPAKKVVPRLENAAKASTGAGVNENKKPSESEGAGSSGSGGGSAHKYSRKKHNRIVAESEFDVINGSTRVALLKPKEVVEDIDKLDSDNQMTYLRSVDRPSSSSTTSSPMAVKVYVVYYSMYGHVAKLAEEIKKGASSVEGVEVKIWQVPETLSEEVLGKMGAPPRSDAPVIAPQELAEADGVLFGFPTRFGMMAAQMKAFFDATGGLWREQSLAGKPAGVFFSTGTQGGGQETTPLTAVTQLAHHGMVFVPVGYTFGAKMFDMAAVHGGSPYGAGTFAGDGSRWPSEAELEHAFHQGKYFAGIAKKLKGASSA

SEQ ID NO: 147543 - protein, 178 aa, Oryza sativa
  unsure (1)..(178): unsure at all Xaa locations
  Clone ID: PAT_MRT4530_48060C.1.pep
HGEPPVGAGYRRGRRRRRRIGIWEQINNVAAELQKQTPNTITARRLRGAEMEAGLAREARPXEFTQKGRTYSQRLVSGGGSDLGVRRNCRWVWRSLRRTKASRRGTLVXESHLSAELEWWWSIGALAMDSQVWRSVTLSSGRSGASLIXGLCVDVVGVWVVVYFSFXSWLRPYRVVNR

SEQ ID NO: 147544 - protein, 178 aa, Oryza sativa
  unsure (1)..(178): unsure at all Xaa locations
  Clone ID: PAT_MRT4530_48061C.1.pep
LSMLCMLEFGWSSLSYRLLPPXRTGGSTQGTAGLAERSPYGSRAARRRXGEGAASLRRLPEGSHSAXRRASTAYGDSILLVRWRGGAPGWLVHAELTGGETVAGPARLWLLIGEIKGGSSFHGTRRGQRNEELPRDGAELNEKNPDCGGGAEKKVQHARQVFDEMFLREXKRQRGEDE

SEQ ID NO: 147545 - protein, 228 aa, Oryza sativa
  Clone ID: PAT_MRT4530_48063C.1.pep
MAAAAAAKIAPSMLSSDFANLAAEADRMVRLGADWLHMDIMDGHFVPNLTIGAPVIQSLRKHTKAYLDCHLMVTNPSDYVEPLAKAGASGFTFHIEVSRDNWQELIQSIKAKGMRPGVSLRPGTPVEEVFPLVEAENPVELVLVMTVEPGFGGQKFMPEMMEKVRALRKKYPSLDIEVDGGLGPSTIDVAASAGANCIVAGSSIFGAAEPGEVISALRKSVEGSQNKS

SEQ ID NO: 147546 - protein, 130 aa, Oryza sativa
  unsure (1)..(130): unsure at all Xaa locations
  Clone ID: PAT_MRT4530_48064C.1.pep
TLRSTLXPXHXXSIXXLXXGGXDXXVXEXXDLRDQFYPHGEIDTIXRMVLHRARAFVTXSXTQGAEKAAXDLANXLXXKGVRLKLMWGXXXSPKPDEHXPRRPXHXAHGXMPPXGCXIPCSQXGDXPQPP

SEQ ID NO: 147547 - protein, 122 aa, Oryza sativa
  unsure (1)..(122): unsure at all Xaa locations
  Clone ID: PAT_MRT4530_48065C.1.pep
VPVPGAPLVVPPDTPLCCWSFLVNIHFPPDYPFXPPKVSFKTKVFHPNINSXNGSISLDILKDNGRPALTISKVLLSILLLASRDPKPGRPFWSLEMAHMYKTDRPKYETTARSWTQEVSMG

SEQ ID NO: 147548 - protein, 212 aa, Oryza sativa
  Clone ID: PAT_MRT4530_48066C.1.pep
MSSPATAAAAAASCGVLRHHHPPASPRPPPTTTTTTSRLLLASRSRGLQRPLRVNHAPPRRLPPTAARAQSAAAAGYQPESEFYKVEAILRPWRVPYVSSGLLQMGIRGVTVSDVRGFGAQGGSTERHEGSEFAEDTFIDKVKMEIVVSKDQVEAVVDKIIEKARTGEIGEGKIFLIPVSDVIRIRTGERGERAERMAGGLADKLSSAMPIS

SEQ ID NO: 147549 - protein, 450 aa, Oryza sativa
  unsure (1)..(450): unsure at all Xaa locations
  Clone ID: PAT_MRT4530_48067C.1.pep
TYYAAATADKFLHHRFAFTVVDWCPRLHGWLVTPPLLDIHVFITGLSSSPSMAFYLHMVGXSHHRXWASMSSPTGSPLSLTTDVLAFSVGXITPTLLGAYVFTXGLPSSSPTGVLAFTVAWSHHRCWASKSSLXPPPTRRRLVSSTSRLACYASADGHLRLHHRLAFIAADXCLRLHDWPDTPLLMRIIVFTSGCXLLPTNYLTAMGAQLRRHCLTLSTSWLAALSNTDFIXPPMRLTDSATVNGPHHLYHRLASATADWXIQIQICIIGIHGFKLISYASEMDQSEHHCRPTFVTAVWCLAYTCPRLYGLVVISPLLGINVFTVGLPTSAADWCPXLHGWXLHHRCWASTSLLTGXPSLSPSAVSASTSCXHTTVVWHLHIHRPAACATADWCLRLYGWLVTPPLMGIYVFTXRLASAAVDWCFHLHGWLIAXRRWASLYSPQACLRHR

SEQ ID NO: 147550 - protein, 225 aa, Oryza sativa
  Clone ID: PAT_MRT4530_48068C.1.pep
MSSPATAAAAAASCGVLRHHHPPASPRPPPTTTTTTSRLLLASRSRGLQRPLRVNHAPPRRLPPTAARAQSAAAAGYQRESEFYKVEAILRPWRVPYVSSGLLQMGIRGVTVSDVRGFGAQGGSTERHEGSEFAEDTFIDKVKMEIVVSKDQVEAVVDKIIEKARTGEIGDGKIFYHFPVSHCSPLYQREPVSAGIRIRTGERGERAERMAGGLADKLSSAMPIS

SEQ ID NO: 147551 - protein, 302 aa, Oryza sativa
  Clone ID: PAT_MRT4530_48069C.1.pep
MANSGKSSPAATSTTAPPPGRPKAKAPPLTVEGYPVEGISIGGQETCVIFPTLSAAFDIGRCPQRAVSQEFLFISHAHLDHIGGLPMYVATRGLYRQRPPTIFIPACLRDPVERLFELHRSMDQSELSHNLVPLEIGQEHELRRDLKVKAFKTYHAIPSQGYVIYTVKQKLKPEYLGLPGSEIKQLKLSGVEITNTLTVPEIAFTGDTMADFILDPDNADVLKAKILVVESTFVDDSVTIEHAREYGHTHLFEILNQCDKLENKAILLIHFSARYTAEEIDIAINKLPPSFRSRVHALKEGF

SEQ ID NO: 147552 - protein, 462 aa, Oryza sativa
  unsure (1)..(462): unsure at all Xaa locations
  Clone ID: PAT_MRT4530_4806C.1.pep
MATRHQRAAAAPQPANRGAAVAAGKQKAAATAAAGRPGARNRQALGDIGNVLNAHVVDGKIQLPEGINRPITRSFGAQLLKKAQENAVAANKIVVQNPARKEPAPKPAKKVVPRPENAAKASTGAGVNENKKPSESEGAGSSSGGSALKYSRKKVVNTLTSVLTXARSKHACGITEKPKEVVEDIDKLDSDNQLAVVEYIEDIYNFYRTAQICSETDSVVLAQLERRPTDYMSSQVEVNPKMRAILADWIIDVHYKFELMPETLYLTMYVIDRYLSLQPVLRRELQLVGVAAMLIASKYEEMWAPEVQDLIHVCDNAYSRQHILAMEKNILNRLQWNITVPTPYVFLLRFIKAAGGDKELENMVFFFSEMALKEYGMASLCPSLVAASAVYAAQCTLKRSPLWTSTLKHHTGFTESQLRECAKVLVNAHAAAPESKLKTAYRKYASEQLGRVSLRPPAVCLA

SEQ ID NO: 147553 - protein, 78 aa, Oryza sativa
  Clone ID: PAT_MRT4530_48070C.1.pep
AIYTRVSSKERRAKQETRNTLRETDTQGAKQQTQKECKTDQRQKSRAQGGLLTKPAEETGDDTDQTSLTKGKQKKDDN

SEQ ID NO: 147554 - protein, 66 aa, Oryza sativa
  Clone ID: PAT_MRT4530_48071C.1.pep
MIRTHARLLMLQQRLRVKAEDGGGGAQGGGSWAVGWREWTHCYRILDFSVAMMVSLGGGGSSAQTT

SEQ ID NO: 147555 - protein, 230 aa, Oryza sativa
  Clone ID: PAT_MRT4530_48072C.1.pep
MDQADRRRRRRHQELEHAAADDDYGGASSYHLPLPSGFKIPRLPTTACALMRRKKTHRTKLSLEKLRLPSLLYRSIFIGKDLLCKVVSQLTLKEAGKTSILSSRWKDRWTYHSNLCFDHSEFPRYTADRFINYVNHVLQQHSFLAVDRFEIRFPLQKQQTKHVDSWVAFASASRAKHFVLDLSPAVHTNHQSEEHMYVFPVDLLDGQNGSPIISLRLGLVCLKLPSDFLA

SEQ ID NO: 147556 - protein, 70 aa, Oryza sativa
  Clone ID: PAT_MRT4530_48073C.1.pep
MGFGELSSGPRGTSVLDKANDSLIQHTHGLLDDAVMTCSVALDTNDKSTAWMEAGTIHDRSKDFLSPNLH

SEQ ID NO: 147557 - protein, 51 aa, Oryza sativa
  Clone ID: PAT_MRT4530_48074C.1.pep
IIKFHESKINFLRISPIERKFSASHIKIDLRQCKIIILSGKIIIKNIHNYI

SEQ ID NO: 147558 - protein, 252 aa, Oryza sativa
  unsure (1)..(252): unsure at all Xaa locations
  Clone ID: PAT_MRT4530_48075C.1.pep
MEDGEQGSLGLTCGGEEWGCGSTAASTTGGLCRRLAHSQGSLDGGGGIGIGIGGEDSDGGGGGERRRPRRXEPPLFSTVEEKGAAAVTAMALASGGGGRLGAGSAGEETGVTGSGGPGLLTGRSGGSLGGSGGGSTVEERELRRRRRTRGEEAATAHARGEADEPTRVGRGEDGRLGFVPVREIQAVRPQSDDRTGVEGPAQRDTWTARSTLRRDRTVDSSGDQSIINRKGKGFFAKIADVAPLIFRRSHDV

SEQ ID NO: 147559 - protein, 162 aa, Oryza sativa
  Clone ID: PAT_MRT4530_48076C.1.pep
IANPDNNAVLQTTVVGSAEEHVDVQTTAVGTEGYIDPQCKKGGKVRFNCPSNVYSFGIVLLEIACRGKRREETCGLYRNKGDVVEAADTRLEIGADFERREMERLIILGLWCSAFETQHRPTMQKAMDVLECNAPLPDHNFITNSALASSDHDASGASTANI

SEQ ID NO: 147560 - protein, 71 aa, Oryza sativa
  Clone ID: PAT_MRT4530_48077C.1.pep
MKVTIMHVGSAATLATFLALRHAGVDAVGTASLSRQQPKMAVGTELNERGGGERGDQDGSRARLRQRVDPS

SEQ ID NO: 147561 - protein, 53 aa, Oryza sativa
  Clone ID: PAT_MRT4530_48078C.1.pep
WSSARRKIAAALSGLRVARQKTETASSSAVDLTAAVLRTTAVASAPLLISLSG

SEQ ID NO: 147562 - protein, 100 aa, Oryza sativa
  Clone ID: PAT_MRT4530_48079C.1.pep
MERKNPLPQQESEPHVEGNKSPAPTSIDDDATNTTEDDSALRDLLYPQSLEVKGKEDIYSIFYQGQNGTAQGTADGKSQWTPPKSRTAYTKDTKQSNQYD

SEQ ID NO: 147563 - protein, 67 aa, Oryza sativa
  Clone ID: PAT_MRT4530_4807C.1.pep
DNYLHGHDGNYILGVANMKAFVNKSLVKVKSLKNRGSKIVIMKCELHAAKHISCQLFLLHESIIIMM

SEQ ID NO: 147564 - protein, 272 aa, Oryza sativa
  Clone ID: PAT_MRT4530_48080C.1.pep
MERKNPLPQQESEPHVEGNKSPAPTSIVDDATNTTEDDSALRDLLYPQSLENVLDVQGASGTTVYSVPLMLHQTGGRRRSEDLAVHRVLFRPCTSRRLPDFAATCSICPSPFRPQQMEPKRSPAPPQPNVETKKSPPRAAAGGGGGGTAAVGGESPLSSLFHQPSHGAKGKEDIYSIFYKGQNGTAQAGTADGKSQWTPPKSRTVYTKDNKQSNQYDSVDTSCFGSSVNYGGRDYYGISGHKQSTESNDYKADKKDPSTDSHGDWWQGSFYY

SEQ ID NO: 147565 - protein, 193 aa, Oryza sativa
  Clone ID: PAT_MRT4530_48081C.1.pep
MFLVDWFYGVLASLGLWQKEAKILFLGLDNAGKTTLLHMLKDERLVQHQPTQYPTSEELSIGKIKFKAFDLGGHQIARRVWKDYYAKVDAVVYLVDAADKERFAESKKELDALLADDSLATVPFLILGNKIDIPYAASEEELRYYLGLSNFTTGKGNVNLADSNVRPLEIFMCSVVRKMGYGEGFKWMSQYIK

SEQ ID NO: 147566 - protein, 277 aa, Oryza sativa
  Clone ID: PAT_MRT4530_48082C.1.pep
MFLVDWFYGVLASLGLWQKEAKILFLGLDNAGKTTLLHMLKDERLVQHQPTQYPTSEELSIGKIKFKAFDLGGHQIARRVWKDYYAKGAGKLCTCHDIDGNSIFQSSVLALSPVWVSWRSLQMRKLWLWGANILTVVLRDALNMISIPLASCCQRNKDMGKIECWQCSHGLVDAVVYLVDAADKERFAESKKELDALLADDSLATVPFLILGNKIDIPYAASEEELRYYLGLSNFTTGKGNVNLADSNVRPLEIFMCSVVRKMGYGEGFKWMSQYIK

SEQ ID NO: 147567 - protein, 126 aa, Oryza sativa
  Clone ID: PAT_MRT4530_48083C.1.pep
MVEVTEGVPCEHRLNGKAVEAMARTQGGGGGHSRGWRWQWRPPPARRWDIVASVSSTRQSSPMCGPPFPRQCDGGCSGVANGDDPQVEAYDSDRQADASWWGRRYSGFHAPMLGCWWWSIGAATAN

SEQ ID NO: 147568 - protein, 583 aa, Oryza sativa
  Clone ID: PAT_MRT4530_48084C.1.pep
MVSSSSSSPRRRALLLLFVFASSFFASAAAAVSRTNSSSAFVLAAAQTRRKDPLRGLRYYTGGWNISDKHYLALAMRSPWCSTVLPAWFLMLTPSSFAMLVAARAQSVGFSAAPVFVVAAVWFASLALAAFVACCCRCCCSGAGGGNGNGGYSYSRAIFAVSLALLLVFTAVAIIGCIVLYDGQGKFHGSTTATLRFVVNQSDGAVASLRGFSGFIEAAKAAAVEKATLPADLQGKVDDVVRRVDASADDLAARTTTNSRKIRTALETIRTILIVVAAVMLALAFLGLVFSLCGLKSLVYTLVIFGWILVTATFILSGTFLLLHNAVGDTCVAMDEWVLHPQGHTALDDILPCVDAAATSDALRRSKEVNYQIVSVLNNLLATVANANVPASSPPSPPASYRQSGTPVPLLCNPYNGDLSDRACAAGEVAAADAPRAWRGYVCRATGAAPSSEVCATTGRLTPTMYDQMVAAANASAGLTQYGPVLADLADCSYVRRAFQAVTAAHCPGLRRHSGRVYQALLAVSVAVAAAVAAWVAHSQERRRRSETRRFQVSPYRFPIEEKSLLKSPRRPYRRGDSGRMAR

SEQ ID NO: 147569 - protein, 55 aa, Oryza sativa
  unsure (1)..(55): unsure at all Xaa locations
  Clone ID: PAT_MRT4530_48085C.1.pep
MALALSTSAAAAADAAARALAARVTTTRGYXASXYCSXMRRSAXXVEXKFXAWMT

SEQ ID NO: 147570 - protein, 70 aa, Oryza sativa
  Clone ID: PAT_MRT4530_48086C.1.pep
NVAKICGSTAIYSGTCVPICLCFLFCHWIFEVPLRAAFALDYCTPVPRTIDVQLGEVHDLVVVDECYYNS

SEQ ID NO: 147571 - protein, 478 aa, Oryza sativa
  Clone ID: PAT_MRT4530_48087C.1.pep
MDYSAGSYMWPGNSGSENYNFVDGSSESYAEEGSLPPSGYFMGAGSDRSLKITENERNPTMLANGCLPYNTQAHPLSGQILPKGELPNNLLDLQQLQNSSNLRSNSIPPGVLQCNSTSGTFDAKLDTPGLAELPHALSSSIDSNGSDISAFLADVHAVSSAPTLCSAFQNVSSFMEPVNLDAFGFQGAQNVAMLNKTSLPNGNPSLFDNAAIASLHDSKEFLNGGSIPSFGTVLQALGAGGLKAAQQEQNIRNIPLPTFTSGSHLAVTDAQGPPLPSKIPPLIHDHNSEYPINHSSDVEPQANSAPGNSANAKPRTRARRGQATDPHSIAERLRREKISERMKNLQVLVPNSNKADKASMLDEIIDYVKFLQLQVKVLSMSRLGAPGAVLPLLRESQTECHSNPSLSASTISQGPPDMPDSEDSSAFEQEVVKLMETSIISAMQYLQNKGLCLMPIALASAISNQKGMAAAAAIPPEK

SEQ ID NO: 147572 - protein, 71 aa, Oryza sativa
  Clone ID: PAT_MRT4530_48088C.1.pep
SRVKIAGWERFWLGLTPGATVGDMGPGVSCLEGGGCPPMPRGPPPRGVGPEVGRWPLPSRTRGRRLPQAPR

SEQ ID NO: 147573 - protein, 77 aa, Oryza sativa
  unsure (1)..(77): unsure at all Xaa locations
  Clone ID: PAT_MRT4530_48089C.1.pep
YLLADEPHQPNSSPDEAPSLSGRRIWRTRAQGWARHHIWSTXHTEINGKWGEXGQRRGSPAKTTPPSKTADEIYRDA

SEQ ID NO: 147574 - protein, 75 aa, Oryza sativa
  Clone ID: PAT_MRT4530_4808C.1.pep
FEWSQEPMIIDTTRVHTAEYPSRRMNTTRNYPIGLPLPLVNNYDSILTAKSPTLLVIHASRHCMKASITRWPRGS

SEQ ID NO: 147575 - protein, 68 aa, Oryza sativa
  Clone ID: PAT_MRT4530_48090C.1.pep
SLFFAKKFLALSLPTKCFQACHIIRLFMKPVMKNLCSPSAKFEFTPVSLKSVPVPPSVLYQFLPFDQA

SEQ ID NO: 147576 - protein, 696 aa, Oryza sativa
  Clone ID: PAT_MRT4530_48091C.1.pep
MAPSASSTGAVLLFAIAAVLLLAVRDGHCAQLCMDSTFPRTVNGSLTFCGYNGTACCNSTDDAAVQRQFAAMNISGTPCGELVKSILCARCNPYAGELFTVTTSPRTVPRLCNSTGVASRLSGGKAAAAAATDYCTTVWDTCKAVRIPGSPFQPPRGGAAAPTLTDVWQSSGDFCTALGGAPGGGGAPCFDGESAAFDASRVAPPASGMCLERLGNGSYLNMAPHPDGSNRVFLNNQAGKVFVATVPAQGSGKPLQVDAATPFLDITDEVHFDNEFGLLGLAFHPEFAKNGRFFVSYSCDKTQSASCSGRCACNSDVGCDPSKLTADNGAQPCQFQTVIAEYTANASSGSPATATAANPAEVRRIMTMGLPFTTHHGGQILFSKADGYLYLMMGDGGSVGDPWNFAQNKKSLLGKIIRIDVNALPTGNSTAGWGNYVIPKDNPFSTDSKFAPEVFALGFKNPWRCSFDSGKPSDLYCADVGQSSYEEVDLVIKGGNYGWRVLEGTTAYLPLASPGGNTSAADIDAIPPVMGYAHSAVNNNVGSASITGGYVYRSGTDPCLAGRYLYADLYAQSAWAGLESPPGSGAYDVTPLPFACSGRSPIPCDAAAARSTLPSLGYIFSFGEDNAGDVYLLTSKGVYRVVDPAECGYACPIKSSAPGTSPPPGSSPSGGAAAAVVPAAAATMAALLLMGALLAL

SEQ ID NO: 147577 - protein, 95 aa, Oryza sativa
  Clone ID: PAT_MRT4530_48092C.1.pep
MATDQLFFVFLLPLALERVQKKNNLLHGMSGSVMFRKGLYGTLVCLRGGTVHCSRLSKLTSYTVAIRIQVKTNAYEDTTYTGTIESFRRIVIDAM

SEQ ID NO: 147578 - protein, 59 aa, Oryza sativa
  Clone ID: PAT_MRT4530_48093C.1.pep
VPVWVRGSPQVIVIIIQVSKTIMVDEQFWTVGFSSREWALTRSGQVLGTLMIIKQSPAV

SEQ ID NO: 147579 - protein, 160 aa, Oryza sativa
  unsure (1)..(160): unsure at all Xaa locations
  Clone ID: PAT_MRT4530_48094C.1.pep
MRQNRFVSSSRRKARKRYFXAPSHIRRRLMSAPLNKELRRRYNVRSLPIRKDDEVAITRGHFRGQPSGKITQVYRKKYVIHVGRITREKANGNTVHIGIHPSKVQITKIKLDRNRRQILERRAKSKXSGKGKHTEESIQQAPMETQLIRNKNSPNGIWGS

SEQ ID NO: 147580 - protein, 97 aa, Oryza sativa
  unsure (1)..(97): unsure at all Xaa locations
  Clone ID: PAT_MRT4530_48095C.1.pep
WRVLAASIPAVAASPGQEKRRSNLRATPPSSPCRSLSVLMLHCXQHNPALGDNPSGFLLGRPASFFCARTAGELLPCARPAGELLPRALPVDEILLA

SEQ ID NO: 147581 - protein, 50 aa, Oryza sativa
  Clone ID: PAT_MRT4530_48096C.1.pep
MGLLLVLIDHKGSLHFARPKDRMLMQLTTPKSVEVLKEVDAQGQKEMEVA

SEQ ID NO: 147582 - protein, 127 aa, Oryza sativa
  Clone ID: PAT_MRT4530_48098C.1.pep
RNKLPRYLFIPSHNTWVVSMEVTTHWDYSCVKTFQLPGLYKNEHQCSLKKIYPGRNHSSGYRVLLHGTMNSATPKIWAGICLFFGDHAEGTTPNISLQRVPGGTSHVLQMLQGSMGDNKTFLGGLSF

SEQ ID NO: 147583 - protein, 88 aa, Oryza sativa
  Clone ID: PAT_MRT4530_48099C.1.pep
QTNQLHSITYPKIEKKGCQLTTYKLHWARLEDNSKITPIGFREQNPTWKLINRSQVAAHYFLLEGGQQSRATKRGNVKPTENRRALRF

SEQ ID NO: 147584 - protein, 65 aa, Oryza sativa
  Clone ID: PAT_MRT4530_4809C.1.pep
PLRGRDPFSAGNFNYPPVALGACLGLIGLWWGLPPRRWFKGPVRNIAVPFKNGGGDGAHTNGTKV

SEQ ID NO: 147585 - protein, 359 aa, Oryza sativa
  unsure (1)..(359): unsure at all Xaa locations
  Clone ID: PAT_MRT4530_480C.1.pep
SLLPKIKDADTIKKFRPKLVSGGLTHLQYADDTILFVKTTDESFGSXSFLYCFEEMSGMKVNYQKSEVYVLGVGETEELRIANMLNCKVGSMPFVYLGXPMSVEKIGMREFCQITHKVEKRLQSWKSGYLTDGGREIKINSCMSSAPMHAMGFYFLPEGFHQKLDTLRSDFYWQGVGDXEKKYHLIKRDALCRPKEYGGMGFLNTRIMNICLLSKWIWKLDNGDSDMCLEVQRKKYLGDDSFFNSSEAGGSQFWKGLHKCKKWLFNLVINEVHCGQKVNFWKDVWLGETFLRIRFPELYEISYDQNTSVKDMCDLGVWRLNFRRNLDEQRKRDVRELRELLSTIHLDKGRDRLLWPFNE

SEQ ID NO: 147586 - protein, 688 aa, Oryza sativa
  Clone ID: PAT_MRT4530_48100C.1.pep
MRPRGFLLYPLPSHLLPLLPSHPLVRIPSSTSRAHLPPLPRLAPPRIAERSIPARLLKMPHHGGRKKKNKGGKGKPRKKTDDRGEANVGSGDSSPAVRVEEEAEVEAEAEVGTAVEPQRSGTLASPTDVVEAAQHGQRQQQASQSQQTPSPRSYAAAVVNKREDETVGYNFLQFLRSFTVEHREGPFYAGELKSMVYQNSKTFCVYYGHFQGQYANLGTKISNSYARVVGFLRSAIGRFITEYELDDQWREISNDPPKIHIDALPPAGSIVSLQYFLGQAHNKLVETARIYDPNGSLVADSTKLGRRVFLGFLIYIINQHKDGRSWCGEFSIDDLLVRNESTFGITKAASSHASCKAMAKDLKQLAKILEKHFRTAQGQVPGYFIKLFSELKESAGELGQYNSEKTRKFHKYLSSHLALRSAMSRRHLFMDLFRAYQLLGKTAKKDLISLLGSMFPEDKWLDQVDKHQMFIKVSEYGIVEGDADKASNSQDQKKKRSYSGDLLDLLVFIRHVTEHGADHTKVRAYEILIFSFISYMCKFNFLTSVQNFVFKDDNMEQKLKSLVEIDLIIAKYLSAAVVDLIKALVKSDLLKDTYFFFSCFLTRGMRFLILPNRSAKRFGRPISLRKRILENITKKLTTTVRCRDGEGLGPHPISSLETQSSLAMKNSSYAEETDNLPSGVGPWGVILR

SEQ ID NO: 147587 - protein, 220 aa, Oryza sativa
  unsure (1)..(220): unsure at all Xaa locations
  Clone ID: PAT_MRT4530_48101C.1.pep
MQWPRPRRRRRRCRCRRRRRRPSATAPSPSPPSPPPPAAAASSAAGCRTPTTTRRTAASSSTRSRRESTGTTRSLCRCRSPPATAPSCRRRASAGSXPVAGRLRVGREAAEAAAAAVVVTVLLRRRVAARRAAVVRRRRPAGVVVAARRRVRRRRAREAALVVASRRRRRRRRRVVPPRRDRDRPEFGXRRRKAWRRRRGSRRRRPPAGRRRGRRRTRRS

SEQ ID NO: 147588 - protein, 118 aa, Oryza sativa
  Clone ID: PAT_MRT4530_48102C.1.pep
MPLRRKIAPYGLMTDFECLRVLDLSNTDIVEVPKSIGSLIHLRYLGLDNTRIQMLPESVGALFHLQTIKLNHCSSLTQLPHGSKLLQNLRCFEIAHSNVQMPSGIRALTSLQKLPVFV

SEQ ID NO: 147589 - protein, 101 aa, Oryza sativa
  Clone ID: PAT_MRT4530_48103C.1.pep
CLTGLVFLPCGGPTSPLERYLPFLSCILLAPRVSEIVCFFSFSSLSLFFILPFVLARCLLYPLVSFLVSLPSFPPFLFSLHLKNNKTSYQIKKNPIKKKNP

SEQ ID NO: 147590 - protein, 159 aa, Oryza sativa
  unsure (1)..(159): unsure at all Xaa locations
  Clone ID: PAT_MRT4530_48104C.1.pep
HIRLNLCHCVFAHSDTITTPVCAVPTSLWSHHCRFCAWALCHFFTQPQSGPGFAPHTHQPSSVPGSSCVFLIVYPPVVYITFPWSTIHLSQHTLGHCATDHLPILTVSPTTLCVHLWVCAFCAPTMRCNPISPLPHTIXXLHPTCATHHRGTXLGAVAS

SEQ ID NO: 147591 - protein, 66 aa, Oryza sativa
  Clone ID: PAT_MRT4530_48105C.1.pep
MLAVAKELSKVRKMIGWGTCHLHGDREGSPAPLPPSGQPARPGGGAWGGGGVGNFFDKLTSTIAAP

SEQ ID NO: 147592 - protein, 82 aa, Oryza sativa
  Clone ID: PAT_MRT4530_48106C.1.pep
PCGSALSAIVTVTARLAALRLAVVVDAPVRPTSWGASWLRGRPRSAAGWSATAFSRSSMDTIDRSNDKTARTPYRPVARTRG

SEQ ID NO: 147593 - protein, 73 aa, Oryza sativa
  Clone ID: PAT_MRT4530_48107C.1.pep
MIEVVLNDRLGKKVRVKCNEDDTIGDLKKLVAAQTGTRPEKIRIQKWYNIYKDHITLRDYEIHDGMGLELYYN

SEQ ID NO: 147594 - protein, 48 aa, Oryza sativa
  Clone ID: PAT_MRT4530_48108C.1.pep
TSRLSSCNGTMLAQPIWLHRLADHPLRLHTWHWRWRHDNSLTNFDGAG

SEQ ID NO: 147595 - protein, 189 aa, Oryza sativa
  Clone ID: PAT_MRT4530_48109C.1.pep
WSKSNNLELFQKRVPEACNIRRFPCRIRSLPKNFWFPVNIACVLPYLPTRPPKRKPTRPPTRPPTRARTRGLAASNSKSRCDQELGFVRSSGGGEDDRGGAERPAGEEGAGEVQRGRHHRRPQEAGGGADRDEAREDPHPEVVQHLQGPHHPQGLRDPRRDGPRALLQLDAAPLAGMNLVMDGEQIMPI

SEQ ID NO: 147596 - protein, 38 aa, Oryza sativa
  unsure (1)..(38): unsure at all Xaa locations
  Clone ID: PAT_MRT4530_4810C.1.pep
XDIXXXRXLRNQYRXLGXRLKNSMIXCSLRGLIAATDP

SEQ ID NO: 147597 - protein, 329 aa, Oryza sativa
  unsure (1)..(329): unsure at all Xaa locations
  Clone ID: PAT_MRT4530_48110C.1.pep
ARGETALYVSAEKGHTEVVSEILKFCDLQSAGLKATNSFDAFHIAAKQGHLDVLKELLQAFPALAMTTNSVNATAARAAATQGHIDIVNLLLETDASLARIARNNGKTVLHSAARMGHVEVVTALLNKDPGIGFRTDKKGQTALHMASKGQNAEILLELLKPDLSVIHVEDNKGNRALHVATRKGNTVIVQTLISVKEIVINAVNRAGETAFAIAEKLGNEELSNILREVGGETAKEQVNPPNSAKQLKKTVSDIRHDVQSGIKQTRQTKMQFQKIKKRIQKLHIGGLNNAINSXLVVAVLIATVAFAAIFTIPGNXSGRYGKIHMIPT

SEQ ID NO: 147598 - protein, 296 aa, Oryza sativa
  Clone ID: PAT_MRT4530_48111C.1.pep
MSSQQQHAGEAPASAAAAARARLRWTGQLHERFVLAVAELGGADRATPKSVLRAMAVPGLTLYHLKSHLQKYRQAVSRGGNGGGGGSGSLNDRSSSSERQPADHDGDSAADEPRTIAYDGDSDGDAKEGLRDSSRSMVQMQREVQRKLQEQIEVKRHLQLRMEAQGRYLQSVLRRAQQVLADHSLASSPEAATAELSELASAVDIECMSSSSPPRHHRQSAATDSCVTTTSSSEAESKAAGSKRLHTSDCTVEQPVQGKRAFNFLQRHNQADQEEEQEEEYAGAEDGSSSEIDLNS

SEQ ID NO: 147599 - protein, 61 aa, Oryza sativa
  Clone ID: PAT_MRT4530_48112C.1.pep
FIQILHMYHIGVGKVSYSVYVNHLGLVLFMLKKFRWFSIDVSSNCWFQNCYQLRFSVQWCM

SEQ ID NO: 147600 - protein, 179 aa, Oryza sativa
  Clone ID: PAT_MRT4530_48113C.1.pep
MVVLHVRWAAASSSSSPPPPSSPEEEEMEFLHECAASTPVEDVAAALAGVAALQARLLSLCRSLRERGAAAAAAAGEVERAVAEAESYASKEQVRYNRFLSPRALREHIKNIEKTAVTALQESPEALCLQQKSSGDKLENVQLWWAGKELAMGKKLCDYIGVNDKTKIIIRLKHVPQSS

SEQ ID NO: 147601 - protein, 94 aa, Oryza sativa
  Clone ID: PAT_MRT4530_48114C.1.pep
MAVGHKGHGAVEAGDRGDGGHRWMGAKLEELNDRPKGSSVQTAAAASSRRWSEPLPSPHGGEPATGWWATAVEDADCRGPKAEEAGTGRRGGWN

SEQ ID NO: 147602 - protein, 421 aa, Oryza sativa
  Clone ID: PAT_MRT4530_48115C.1.pep
MGRLVTTLLVLCLIYVTTCSLSTRTAAFRAHDLRRGLEQAMRGRLLADATPAGGSAVPIHWSRHLYNVANFTIGTPPQPASAIIDVAGELVWTQCSRCSRCFKQDLPLFVPNASSTFRPEPCGTDACKSTPTSNCSGDVCTYEGTTNSRLGRHTTLGIVATETFAIGTATASLAFGCVVASDIDTMDGTSGFIGLGRTPRSLVAQMKLTKFSYCLSPRGTGKSSRLFLGSSAKLAGGESTSTAPFIKTSPDDDSHHYYLLSLDAIRAGNTTIATAQSGGILVMHTVSPFSLLVDSAYRAFKKAVTEAVGGAAAPPMATPPQPFDLCFKKAAGFSRATAPDLVFTFQGAGAALTVPPAKYLIDVGEEKDTACAAILSMARLNRTGLEGVSVLGSLQQENVHFLYDLKKETLSFEPADCSSLP

SEQ ID NO: 147603 - protein, 68 aa, Oryza sativa
  Clone ID: PAT_MRT4530_48116C.1.pep
MRGRVFGPVQNAGQQPTKSRTGYARYRVGPVGWPGGTTRYRGLAVRQRPRCMRECSTVGLRARVVPHG

SEQ ID NO: 147604 - protein, 60 aa, Oryza sativa
  Clone ID: PAT_MRT4530_48117C.1.pep
MRHSIAAQAPIPRCPAAACLHVRRDENGLESFNIPDIFSKMEVPFSKSEIHVFEGKLVVA

SEQ ID NO: 147605 - protein, 212 aa, Oryza sativa
  Clone ID: PAT_MRT4530_48118C.1.pep
MGDWDPPGRPGQTHLSLSPSLLLPTPPPVLVAAAAVREGEEGGSRRSSSSSSRRRMGFISFVGRVLFASIFLLSAYQEFSEFGTDGGPAAKALKPKFNLFTQQVSKSLGMAVPHIDIKTVIAATMFLKGFGGLLFIISSSFGAFLLLLYLAVITPVVYDFYNYEMESSQFVQLFVKFSQNLALFGALLFFLGMKNSIPRRHSKRRAGKTKTN

SEQ ID NO: 147606 - protein, 124 aa, Oryza sativa
  Clone ID: PAT_MRT4530_48119C.1.pep
VGARVFRFEKGHFGAPYLFWFSPPFGPPGFSLFSFGFFFFLDFCGFTFFPRSQLFPFFPPAFFFLPFGKILCPSGSGSEFSGWPPGPQKKKKYKKKKKKKKIKKKKKKKKKKKKKKKKKKKKKK

SEQ ID NO: 147607 - protein, 1059 aa, Oryza sativa
  Clone ID: PAT_MRT4530_4811C.1.pep
MQILSKLASGMKFTEPVKVGSMEKKVYMTSREAIQEGETIRQQSEESKNDAMQIEGSKRNINMAPGRLAYARSPNIYNLQEGEGSSSKMPHLGCRKIQHVGKNFNSPELSNTIGTIASEVVNYGGQMLYDQFTLLNLDPRQEGQLSYTNLIHQIIHSPTVTIQQQTGGQESFTSLLRTPAFDNSMILTTSRFSPELEEQQDMTYEQHISTTHWSYEEFDQIYNNKYITPFAENTTARIEELYQSKNSHFTTKEGTSNMLQQDSQINTITAIEQVEQHVGQAETTSETKATSAEDNDTINEEDINNYLANEEDSQDNTPVVIDKKHIPCIGKKFRTHEEARSFFNFYAYQVGFSVVITHHYKSTSKKRFGQITKYTYQCYRYGKNDDGQKKKKKKTQQQRNTQVIDRTDCKCMLTVRLDGDVWRILSMNLNHNHTLTPNREAKFLRSHKHMTDEEKKLIRTLKQCNIPTRNMISILSFLRGGIAALPYTGKDVSNVGTAINSETRNTDMNQVMEYLRQKEAKDPGYYYKLTLDENNKVKSMFWTDGRSTQLYEQYGEFVSFDTTYKTNRYNMPFAPIVGVTGHGNICIFACAFLGDETTETFKWVFETFLTAMGGKHPETIITDQDLAMRAAIRQVFPNSKHRNCLFHILKKCRERSGNTFSDKRRKDLYAEFNDIVHNSLTRAEFESLWLQMIAQYNLKNIKYLEIMWRTRKNFIPVYSKTDFCPFIHSTALSEGTNARFKRGVGPTHSVMTFLLEYETINDIIFDTEYGKDYESRNKKPKSFWSNYMIEEQAADLYNHGIFDKFQDELKGTLNLEVAAIQQGKAYEVYAAPNLKQQEFRPRRYVVMTDLPQENFVCICAKFSKDGILCSHVLKVMLYLKMSKIPDKYIIERWRKKERKLTVSMQLATNDENSSVLRFNVLSRRICNMASKASKSKETCEYLLGEIDNLDSNLDLIIEDAAQNQASIDESNTVENTSEDQAEKETTNEQEDIQDPDIANTKGKKSARTKGMVEKIKEQPKKHCTRCGRTSHTIENCPLMQIARSTKKIQKSTTTSKRNE

SEQ ID NO: 147608 - protein, 66 aa, Oryza sativa
  Clone ID: PAT_MRT4530_48120C.1.pep
MATVVDELGYGRTANWMVGSAEDTVLAGQREGWCSVGFTSFAEGGARVGRGIQGRSVSPCCVEHRL

SEQ ID NO: 147609 - protein, 74 aa, Oryza sativa
  Clone ID: PAT_MRT4530_48121C.1.pep
AAGQTRIVDPSGLFACFVLANHDFGFCHFVRIASISWAVKDFIVGDSGELPKKPSFSAYLTVADVILASTCHGS

SEQ ID NO: 147610 - protein, 530 aa, Oryza sativa
  Clone ID: PAT_MRT4530_48122C.1.pep
MAGEVAIDSGEKRLNELGYKQELRREMTLFKTLAISFSTMTLFTGITPLYGSSLRYTGPASLVWGWVVVSFFTWFVGFAMAEICSSFPTTGSLYFWAAHLAGPVWGPLASWCCAWLEAIGLIAGIGTQAFAGSQVLQSIILLCTGTNKGGGYLTPRWLFLLMYIGLTFIWAVLNTFALEVIAFLDLISMWWQVIGGTVIVIVLPLVAKTTQPASYVFTHFETAPEATGIRSSAYATILSLLVSQYSLYGYDAAAHLTEETKGADKNGPIAILSSIGIITVFGWAYILALTFSIQDFSYLFDPSNETAGTFVPAQILFDAFHGRYGSSAGAIALLFVIWGSFFFGGLSITTSAARVVYALSRDRGVPLSSVWRRVHPRHRVPANAVWLCAAACALLGLPILWINVVFTAITSIATIGWVGGYAVPIFARMVMREEDFSPGPFYLRRASRPVCLVAFLWICYTCTVFLLPTAYPISAGNFNYAPVALGACLGLIGLWWVLDARRWFKGPVRNIDDPLKDGGGDGVHNNGNKV

SEQ ID NO: 147611 - protein, 84 aa, Oryza sativa
  Clone ID: PAT_MRT4530_48123C.1.pep
LKLYIVTARLKLLIDECLHFNPLNQSKCRLTIEEIPLQLPNSCSTPLNASSPQPQAFLAFLGPGLHDSYKKYIMLLLVSGATFT

SEQ ID NO: 147612 - protein, 88 aa, Oryza sativa
  Clone ID: PAT_MRT4530_48124C.1.pep
LMLLQHRTFRLPLKVVEKMVFAPSILSDDPYFPFINSSFHLIPLPLFFFLSLPISFLFPFPFFSFLFLLSSLPLSFPSLSFLPPFSSF

SEQ ID NO: 147613 - protein, 125 aa, Oryza sativa
  Clone ID: PAT_MRT4530_48125C.1.pep
REGETNESDQGGARRGQHTGRRRRDERGDKEDRRRGRAKGEGGQNGRKKEEERKRPAGKPDNPERYRNERKCRDADARGARTRRTEKTGRKKGQVTQKRAPRAIKADGKRSRIDIDQGERKTIQN

SEQ ID NO: 147614 - protein, 109 aa, Oryza sativa
  unsure (1)..(109): unsure at all Xaa locations
  Clone ID: PAT_MRT4530_48126C.1.pep
GGLGVHNLEIQNKCFLSKWLLKLINEQGVWQDLLKRKYLYNQSITQVDRKXGDSHFWSGLMKVKSIFLNMGSLIVNNGEQTRLWEDKWLGNVAFKDKYPSLYAIVRRKN

SEQ ID NO: 147615 - protein, 85 aa, Oryza sativa
  Clone ID: PAT_MRT4530_48127C.1.pep
MSVAEEQEKGPLMNMKKPLAVDHTELAMDPWWDGVCCKDHPAFFDHLSMVMTCKLDLDFKPVVSKKEMESFCQAHRSTKVGIESL

SEQ ID NO: 147616 - protein, 48 aa, Oryza sativa
  Clone ID: PAT_MRT4530_48128C.1.pep
REGVVASRGSGRGSGSGRRRWDGRAAGRRCEAARGRACGGSGPGSSTR

SEQ ID NO: 147617 - protein, 64 aa, Oryza sativa
  unsure (1)..(64): unsure at all Xaa locations
  Clone ID: PAT_MRT4530_48129C.1.pep
MRLSSSLQDLPTFSRIDALERGSSTGSDLVSGRANLSGTLQRDGAVASFSKRNXPLITNNSKNA

SEQ ID NO: 147618 - protein, 537 aa, Oryza sativa
  unsure (1)..(537): unsure at all Xaa locations
  Clone ID: PAT_MRT4530_4812C.1.pep
MVVVDSIEEWMMAVLTQLMAKVDNIDVITKHLGEIDAKLVTQGERLDRVQAKMDLSMTSLGQVQQEQTQVARALKADAAAPVASAPSTPPPPQPPHLATPGASSSSSPPPPPPPPPPPPPPPPPCLVPPVREQVPYPPILPAPRDFGYYMPRRQWSPKMDYPKFDGTDVRVWLDNCETYFVFYQIAKGFKVSAAALNLLEKMDIKPRSKLGFAGMPSRKRDSLKCQDEARRTRHFAIFLLLLIFEMNFPSMQVDLMELPLRSGLESERGLSQPVQDACTFFKWYDSYQRMVEGMELDFNEEVATPVAIAAAEWGWCEEMASKKEHSAVKSFDKPKLAPGELWKAQQLKEYRXAQGLCFKCXKAIQLQEESEVLSDALLDVVMTLDMSGTEVNVSLHALAGTCPSNTIQLRALVQNQVIIILVDSGMDWLSQFSPMTCDWAAKQLQFCYKGSVISLQVNARPYRYSPAQKDEIERQVSGMLAAGLISPSCSPFASPVILVKKKDNSWRFCVDYHRLNDLTVKNKFPLPVVDELLDELA

SEQ ID NO: 147619 - protein, 163 aa, Oryza sativa
  Clone ID: PAT_MRT4530_48130C.1.pep
MAGSRRRLCAGIAEGVHGGRRLRVGEAHCEADFAGGRHGGRGVGFADNRRRSEALQTKEATVEFVASRRSGQRAAPVGRGGYEGSAGRGRASGRGGAEASVSFAQPCSEIRGQRKNGRLGGDDFRLASYVFDGMPARKERGKRKRERWGAGPLAGGVQGAWAH

SEQ ID NO: 147620 - protein, 423 aa, Oryza sativa
  Clone ID: PAT_MRT4530_48131C.1.pep
MAGIRLTPEEPELPQGTPPRPQLPPAFAGAGAVLAGSGSGGGGGLEMASDDERSVAADSWSVRSEYGSTLDDDQRYADAAEVLAAAAASANFPSDTLQGYVVSCSCGVAVRTFYFVHFLVATSLMIAFRIVIKYVERGSARDVFASFVVIGQVGIGSQMRIQIDCVLTKMIKILARLKAQCWGSKVIGMLLIQKILQIFRNMGMLEKYDVMDTMAVWTKKLCIDIINGGTPSGNESINCEVDEKQLSNYPVLDVGTGNGLLLQALAKQGFSNLTGTDYSEGAIELAKNLAARDGFTSINFLVDDILETKLDRKFKIVTDKGTLDAIGLHPDGRIKRVMYWESVSNLVEPGGIVVVTSCNHTKDELVQEVEDFSKTKSGKEHLDEGEGNVPQIFRYIDHVRTYPTIMFGGVEGSQVCTVAFQRV

SEQ ID NO: 147621 - protein, 105 aa, Oryza sativa
  unsure (1)..(105): unsure at all Xaa locations
  Clone ID: PAT_MRT4530_48132C.1.pep
PRVRETTDEESTLNRDTXPVNRTHPCHICLGIVQKMRDHYYCNTLMQLNLDMQNYTSQPFLEIHEPLLAEGCXFFIDQPRQLLNADXRLLTASQVLSTRETAIAK

SEQ ID NO: 147622 - protein, 286 aa, Oryza sativa
  Clone ID: PAT_MRT4530_48133C.1.pep
MAAGVAGARGAGRPLMRLVTMSGVPILRQLHLEERLLRRTGDNWCIINDGTAPATIVMGVSGRVSELVEIEPVLRDKVPVIRRFSGGGTVIVDQGTVFATFICSKTAIPGLQPFPRDIMSWTGQLYDKVFDGFGEFHLRENDYAFSQRKFGGNAQSITRDRWVHHTSFLWDYDMKNMDYLKIPKRAPDYRLARNHTDFLCRMKEYMPSRSVFTEGIISALGDHFTVEPTEPEAVLSDDTGFKPSTKLLSPQDLEDVIASKESLKGGSVDGDRRPCTPVTGSSARST

SEQ ID NO: 147623 - protein, 108 aa, Oryza sativa
  Clone ID: PAT_MRT4530_48134C.1.pep
AQRRPNWKVDFIHCSMVPLVRHDHEKRSHLHSCCHASTSCTLSDSFEAITSSRSCGDNSFVEGLNPVSSESTASGSVGSTVKWSPRAEMIPLVKTDRDGIYCFMRHTK

SEQ ID NO: 147624 - protein, 565 aa, Oryza sativa
  Clone ID: PAT_MRT4530_48135C.1.pep
MHIVKETELLAAKLDLLMKRLDDHDKRPQDTVKALDSHVTCEVCGNTGHSRNDCRETREEAMYMGNNNNNGYRPQGGQGWNQPRLYYQGGNNNGNFSNQPSLKDLVIAQAKTTDALNKKLAANDKILENINVKLDVPAKETGRIPGQPDSSLENVKAITTMGVIQKIHINVLLLDAMQVLTYARYLKDILNNKRPLPTTEQFDQALCDLGASVSVMPKDVFDKLNFTVLAPTLMRLQLADSLVRYPAGMAVDVPVKIRDFFIPVDFVVLDMDTGKEMSLILGRPFLSTTEANIDVGAGSIRFHINGKEEKFEFQPRVEQCSMVRIKYGPNPQNIQVVEVEPPKTDSLVKFMQNFLEKETTMPRNRYWRTLIKPTIPAKKSEQSAEKKPPSAPKPWKGSGSSSSHHDESSTHSSADVSLEDAEAPRRLLNDTDLDLVCDRERKAYYMLSNREYAHTREYSPELLKKIDMDVEFRAIWKAVGWQRFAVVGNQLGMHPDGPKFHATALESQAGQVPVRTGGVCLMISNGGTTNVLDQVFANINNMMQQQHDDVQAYFRFQGFNPYQGP

SEQ ID NO: 147625 - protein, 168 aa, Oryza sativa
  Clone ID: PAT_MRT4530_48136C.1.pep
FVVLDDSNVKKDQKFATIASKSVIPSMFDTVLRNFTPDVPAGTASRPRQEDAQEFLSFAMDRMHDELVKLNGHGFNSKEGMNGSLNDDDAWETGGKKNQSALMRRQRFGPFEVTGFFGGHLRSWVKASGNQALVTGQAFRPVHLGIFPGAGQKPGDALRLVAGSGSLE

SEQ ID NO: 147626 - protein, 134 aa, Oryza sativa
  unsure (1)..(134): unsure at all Xaa locations
  Clone ID: PAT_MRT4530_48137C.1.pep
MADLLKLGFRSFDGIHMMASFSSFSVRIALLFLVFCLIGLQAADGQAGGDICGGVPDPFACPINCVQEDLVCGANGVTYSCGCEDSACNGARVVKRGACDASNAGSDSVRGXALLLIHIVWLFLFGLSLLVGVF

SEQ ID NO: 147627 - protein, 100 aa, Oryza sativa
  unsure (1)..(100): unsure at all Xaa locations
  Clone ID: PAT_MRT4530_48138C.1.pep
RISPRIQMEDRKRRQFKPNGQTLRIQDRKTYSHKRITREQKQLHILLACLSDLLSNCHGSTTEDXFSDLPPDPGXSRIDKPTVWIPYIFPLPRSLTRCAR

SEQ ID NO: 147628 - protein, 86 aa, Oryza sativa
  unsure (1)..(86): unsure at all Xaa locations
  Clone ID: PAT_MRT4530_48139C.1.pep
MATLTVARWEWRSGGGPLQRRVDLGDLGPPNPTGGNXGAAANLAAGYRRRITETGGGGWFPGPEPMGTPRELGKLGKNQKGATAEL

SEQ ID NO: 147629 - protein, 150 aa, Oryza sativa
  Clone ID: PAT_MRT4530_4813C.1.pep
MGGGGRAPGGKLSALPPCQRQRTRKGRARQGGRCRRGRSAGGGPRPRRTPRRPSSPCAPQPASKPSQLANTNAQGVARYTIICQENGLVPIVGPEILVDGEHGIEVCTEVTERVLAACYKVLSDHVLLEGTTLSISDTTKIATVFVCDLC

SEQ ID NO: 147630 - protein, 105 aa, Oryza sativa
  Clone ID: PAT_MRT4530_48140C.1.pep
YASDHSWSDAWGPATVKIIYGSALVAIAPCSATAQFDVLGQNIKQYQVQSPVLLQQQVLSPYNEFRRQQYTIAASTFLQSAAFQLINNQVLQQLMLEAQQSHYQD

SEQ ID NO: 147631 - protein, 86 aa, Oryza sativa
  Clone ID: PAT_MRT4530_48141C.1.pep
MPLHSPLHRAPLTADFVASKPPCIGALLIPRLCRARSTTAFGSARPCRMPSLHGRCCHLLHHRRRYLLLELHPIATACCRCLRMTV

SEQ ID NO: 147632 - protein, 309 aa, Oryza sativa
  unsure (1)..(309): unsure at all Xaa locations
  Clone ID: PAT_MRT4530_48142C.1.pep
MMIWLQENKSLRRFTVSTATPSPSKMAAISSLNLHTTSPVCHPLTTAMAATLSSAPAPSKHCSIVRAQHSPPPSILSSSTKTAFHGLSLVDRRWAASVGGGSGRRRRVLQVNARTAGAAKNIEVEVDKPLGLTLGQKTGGGVVITAVDSGGNAARAGLKSGDQVLYTSXFFGDELWPAXDKLGFTKTSXSMAKPDSVYFEVGKGAQVDVKXLPKRPAPPRFGRKLTESQKARATHICLDCGYIYFLPKPFEEQPDEYGCPQCNAPKKRFAKYDAETGRAIGGALPPITVIVSLIIGIAGVGALLVYGLQ

SEQ ID NO: 147633 - protein, 298 aa, Oryza sativa
  Clone ID: PAT_MRT4530_48143C.1.pep
MNETLLCKWIYKLESGNTSPCCELLRKKYFSAGGGFFQSSTDGGSQFWKGLHEVKRWMKFGSAYKIGCGDSVQFWDDIWLGESPLKIQCPYIHSVCSDPDKTVKQMLSGGEWEINLRRSLGQDELPDWLSPTDDKERYYDLEIESIREIYNKISLQGNFTTKSLYKEIVFGGVKDILLQELWKAPTPLKTRVFMWLMLQGRIQVAKKLKKMNWSDSQRLFVLSLTCYGCASSISVLLKLLCISSWQSQRLAEICYYRYADVAILILLPLLYRSAINGSIDHHRCLPAASLDGRPFSLN

SEQ ID NO: 147634 - protein, 66 aa, Oryza sativa
  Clone ID: PAT_MRT4530_48144C.1.pep
WLLMMSVSSSQGRVMAPKVFELIRGFLLIFFFCLFRGLFSLIFLSYVTYVYMKKLIGECYDHHMYI

SEQ ID NO: 147635 - protein, 124 aa, Oryza sativa
  unsure (1)..(124): unsure at all Xaa locations
  Clone ID: PAT_MRT4530_48145C.1.pep
SGEEWAARPGAIGGGGGDLGRRRYRYLLFTAAADNDEEATGQIRWRPRAKSGRRPRRPQEKXAATLTTSGEEWAMTSATSGGGATTISSSPPPRRPPLPILHCNVVESDMVATPAADGEPGGRA

SEQ ID NO: 147636 - protein, 88 aa, Oryza sativa
  Clone ID: PAT_MRT4530_48146C.1.pep
GAPGRGASSFPSVKCVGINHQHDRIVHARHSPPQEARRARLIRALSACQIERSRRSVVCCLDFRIGEQLRVTGSNQPPGHDLRRRRLV

SEQ ID NO: 147637 - protein, 79 aa, Oryza sativa
  Clone ID: PAT_MRT4530_48147C.1.pep
MDLATTETVVAESSRCQPCGGRIWKARAATRSAKQREESLADVEGHNGDSVEKHVGGIGADLVEKARESSKEEAEAEAA

SEQ ID NO: 147638 - protein, 62 aa, Oryza sativa
  Clone ID: PAT_MRT4530_48148C.1.pep
MTVARGGNIPTVGGGMAETVDSNRVSKMRRRLLLTCRSQSHARSRIHVLQPKNFCQPYVLNE

SEQ ID NO: 147639 - protein, 113 aa, Oryza sativa
  Clone ID: PAT_MRT4530_48149C.1.pep
MVGAAGAAGSRWRRSAAERRVGAMSGGWLPAGEERGGEKGRCDGRRLVAGEGGVWRRGGPARRSTVGDGEELGIGGGSVREEPWPAVVNTTMTPPPQPRPIMPVGAHFSSSPG

SEQ ID NO: 147640 - protein, 1299 aa, Oryza sativa
  Clone ID: PAT_MRT4530_4814C.1.pep
MATENDDYVELNSDDENEQEGTSKMLQQDSQINTFTAIEQVEQHVGQAETTSETKATSAEDNDIINEEDINNYLANEEDSQDNTPVVIDKKHIPCIGKKFRTHEETRSFFNFYAYQVGFSIVITHHYKSTSKKRFGQITKYTYQCYRYGKNDDGQKKKKKKTQQQRNTQRRHTALPYTRKDVSNVGTTINSETRNTDMNQVMEYLRQKEAKDPGYYYKLTLDENNKVKSMFWTDGRSTQLYEQYGEFVSFDTTYKTNRYNMPFAPIVGVTGHGNICIFACAFLGDETTETFKWVFETFLTAMGRKHPETIITDQDLAMRAAIRQVFPNSKHRNCLFHILKKYRERSGNTFSDKRRKDLYAEFNDIVHNSLTRAEFESLWLQMIAQYNLENIKYLEIMWRTRKNFIPVYSKTDFCPFIHSTALSEGTNARFKRGVGPTHSVMTFLLEYETINDIIFDTEYGKDYESRNKKPKSFWSNYMIEEQAADLYNHGIFDKFQDELKGTLNLEVAAIQQGKAYEVYAAPNLKQQEFRSRRYVVMTDLPQENFVCICAKFSKDGVLCSHVLKVMLYLKMSKIPDKYIIERWRKKERILTVSMQLATNDENSSVLRFNVLSRRICNMASKASKSKETYEYLLGEIDNLDSNLDLIIEDAAQNQASIDESNTVENTSEDQAEKETTNEQEDIQDPDIANTKGKKISKNKRDGREDKRTAKKTLYKMWKNKSHNRKLPADANCKKYKENTEDYNNKISHWKNNMITLYSDLDKVDEENFGLRPIKDFNDTTYFKVVPPENRINTFRDKLESAIGTMLPAFIKEKICSMVVSHCSANHIVDSESCEDIAISIMLLLCEHAGSRDGGDPDENLIFDDINPRFQPNYAIDVENEIPCDAHNNGSTNKSVASKANETSFRHTPSHDKELGVNDDSVIVSKSAVRFSLSPNFEKDQGLLTPEVGYANNSNSQFEHSRSASGPTVSAVAAVRNVANKIKSRLSQLNNDDKRGALFPDLIDSCEDEAVGYAKSLSCQKEYLNPRYVTSSSSQPGISFHCLDNSPVQVIGINNNEGTSRTHCIQNVKKRRFDDVTNSPDVEYLGHSTFPDCCKVLCTQTDNLYNAKNMLKSNNLDLSSTGGKLPPHGPRRVLVPSRKFSDPYVLSVRHRFPVSDQEKRHYNAICKLSESSKWHSYDAVDIDNELLLTDLSCADLSKVKRSFLGAASARKLHLSDMLFFPIEHLEHWFLFVVDIKDRMLVLLDSLYEKGDPYFEDIECLLINNLQTFWDSYDGSSIDFTTLKKVYPCVPKQRSWYIFCV

SEQ ID NO: 147641 - protein, 490 aa, Oryza sativa
  unsure (1)..(490): unsure at all Xaa locations
  Clone ID: PAT_MRT4530_48150C.1.pep
MGRRSGGRKLPFFASNASTSSSTKRTRSARRLPSLTRPRASSSPSPASPSPPPPSASHPAPPSPPLAVSPAGAGKVGKKKAGARLWMRLDRWGVSETLHLDKGSIIRRAGLPPRDLRILGPVFSDSSSILAREKAMVINLEFIRAIVTADEILLLDPLTIDVIPFVEQLTHHLPLKNLVCGNGQPGGDDHGEKHDDSHGDQVPRLNEATGAEHELPFEFQVLELALETVCSSFDVNVSGLERRATPVLEELTKNVSTRNLDRVXRTLKSDLTRLLAHVQKVRDEIEHLLXDNEEXWAHLYLTRKAITKPSKLEALISSXAASNCIVPGRTSLSRLNNSFRRNVSITTSMHLDNDVEDLEMLLEAYFTQLDGIRNRILSVREYIDDTEDYVNIQLDNQRNELIQLQLTLTIASFGIAVNTFIAGAFAMNIQSKLYSIDDGSFFWPFVGGTSSGCFMICIVLLWGSNHPEAAVCLLCREIADESLNFMDNTE

SEQ ID NO: 147642 - protein, 445 aa, Oryza sativa
  Clone ID: PAT_MRT4530_48151C.1.pep
MSLLALPLLAFLSIFLTPTTAVSSSTLQLARSHSVTPNAGAPLSAWAASVAAQSAADTARIVSMLTSGAGPLTTRAKPKPKNRANPPVPIAPGRQILSIPNYIARAGLGTPAQTLLVAIDPSNDAAWVPCSACAGCAASSPSFSPTQSSTYRTVPCGSPQCAQVPSPSCPAGVGSSCGFNLTYAASTFQAVLGQDSLALENNVVVSYTFGCLRVVSGNSVPPQGLIGFGRGPLSFLSQTKDTYGSVFSYCLPNYRSSNFSGTLKLGPIGQPKRIKTTPLLYNPHRPSLYYVNMIGIRVGSKVVQVPQSALAFNPVTGSGTIIDAGTMFTRLAAPVYAAVRDAFRGRVRTPVAPPLGGFDTCYNVTVSVPTVTFMFAGAVAVTLPEENVMIHSSSGGVACLAMAAGPSDGVNAALNVLASMQQQNQRVLFDVANGRVGFSRELCTA

SEQ ID NO: 147643 - protein, 172 aa, Oryza sativa
  Clone ID: PAT_MRT4530_48152C.1.pep
PWKKIAKKKKNRPPPTPPPPPEGEERRRRERRCRIRPRWPPPPTDPPSDEADAVDAAIERATGRGRERGREGRPSPSSPPHPTVAAPPAPRTPPSPSPTPYPTPRRRPRRAHGRERERSTVAAAPRRRPRRAGGAAGIGGEGAAPPEGRGKEAVPVERGGGGKAASGTGEAP

SEQ ID NO: 147644 - protein, 83 aa, Oryza sativa
  Clone ID: PAT_MRT4530_48153C.1.pep
REAMDRNTLGHSNLLEELKESVKHTKGKQEDSFGETAKNDHVDHSDQGILNLPDLGKQKRTKRFGSSSWGLKRMYLRKRKLLK

SEQ ID NO: 147645 - protein, 109 aa, Oryza sativa
  Clone ID: PAT_MRT4530_48154C.1.pep
ALNHYHIGRPLWPCLYTSSPYSSLGSPSLPTGQRGRATAATATWARTAQWGRRCPATRSDTGRNYIARRRADPRGRLDSGKQPPRQLLEPGCRELAGVPMQSRHDTLSV

SEQ ID NO: 147646 - protein, 768 aa, Oryza sativa
  unsure (1)..(768): unsure at all Xaa locations
  Clone ID: PAT_MRT4530_48155C.1.pep
MAATHYAYLQIKMPGHSGPITVFGDVKVTLACAEQRADNLAAATKPQAPEPSTPRASKRRLASADELPVKEIPLGDDPSKXPRLAKVRHQAPERQAFIREEVMRLLEXREVIHPEWLANPVVVSKANGKLRMCIDYTDLNKACPKDPFPLPRIDQIVDSTAGRNVEVYVDDLVVKTRHQDTLLQDLAETFDSLRSTCMKLNPEKCVFGVPAGKLLVRHGMHGRPESINIEAGKEGVAPIQAPQTLWAVCMVGGSGASSQPAESLPHLPPILVAPGPEEPLLLYLAVTPHSVSAALVVERDEGDLRREPGYGKGPGVPLTSDGPSSPNSPMPEAPNPREGPEVPVGEREAPADGPEACRTDVARDPLGAPEHGRPELGCPNDKVLMASRKLRHYFQAHRVSVVTSYPLGQILHNREGTGRIVNWAIELAEFDLHFEPQHTIKSQVLADFNAEWTPADDSIPSHIPSLPGDGEDPNADIRTGHWVMHFDGSLNLQGAGTGVTLTSPSGDVLKALQSGRGGYQHLYVAIDKFTKWPEAYPVVKINWHYALKFIRGITSRFGVPNRIITDNGTQFTSELFSDYYDDMGIKLCFASLAHPKSNGQVERANAEILKGLKTKTYNILKKHGYSWLEEQPAVLCANRTTPSHATGETPFSLVYGPEAVLCSELSLRLPHVALYDEANQDDLHSDDLDYLEERRRRAALCAARYQQSLRRYHQRHVRARSLQVSDLVLRRIQSCLGLSKLSPIAADHLVPILVAIIAAAVITPALLI

SEQ ID NO: 147647 - protein, 96 aa, Oryza sativa
  Clone ID: PAT_MRT4530_48156C.1.pep
HASEFLLFIATTRCHCRSGASTIDTASRLFLLVGMLVNHLMRQPSTLHISGAPANAPLVTIFHPSVPPSGHASLLAATKRRPVPWGEDRGVITAAG

SEQ ID NO: 147648 - protein, 221 aa, Oryza sativa
  unsure (1)..(221): unsure at all Xaa locations
  Clone ID: PAT_MRT4530_48157C.1.pep
HAPTGSIHAAPHKRRTRKPPRRDSRTRPTSHRAPTHRRTHRHTHAPKHPAAPSTRDTHAAPPHAPATTHTGTRTPQRPPPHRGKKRPHPPAPPPAXTSRRRPHPPQKRKTSPRPPPNHTQGGDRPAARTEAVHQTRPREKILGAGENXPTPGHMQAKPPPIKQQTQWARGTGTPGTKRPGGKNNPSPHTPETPPQSGHARDPLPTSPPPPPVGPSNCPSRD

SEQ ID NO: 147649 - protein, 239 aa, Oryza sativa
  unsure (1)..(239): unsure at all Xaa locations
  Clone ID: PAT_MRT4530_48158C.1.pep
GGGDWVMVNLFPMALRGQARGWPMNLLPHRWLALVPPAGYGARPGSTDRPFKFQRLALDPPADYGARXPAQLWTGIAGSRIFRLPHSCESNRPXRRKRDWKEATERKERTKCVALGRRFKISSQPKVRAGESPSSWGEKDAWALVPTKNGEETGPTSXTRRVASTMATGGRFWSGLTPGATVGDMGPGACCASDRSVTGXMTDGTATVYPRSVXCVRRRAVCSGFPFPGVNENPEVLIY

SEQ ID NO: 147650 - protein, 103 aa, Oryza sativa
  Clone ID: PAT_MRT4530_48159C.1.pep
LPHPSPPRALGERSEEEEEEEEEEARLSPAAWRTSSPTTRSPSSRRPSASSTRTAMVKEHPLLIPVLAACCYSGYPCRCSRIFWAFFANRSNFASLSYTVRTT

SEQ ID NO: 147651 - protein, 1112 aa, Oryza sativa
  unsure (1)..(1112): unsure at all Xaa locations
  Clone ID: PAT_MRT4530_4815C.1.pep
MKSYADPVKISIRQKKESGETNKEKLQLGMKFTEPVKVGSMEKKVYMTIYLSCREAIQEGETIRQQSEESKNDAMHIEGSKRNINMAPGRLAYAGSPNIYNLQEGEGSSSKMPHLGCRKIQHVGKNFNSPELSNTIGTIASEVVNYGGQMLYDQFTLLNSDPRQEGQLSYTNLMHQIIHSPTVTIQQQTGGQESFTSLLRTPAFDNSMILTTSRFSPELEEQQDMTYEQHISTTHWSYEEFDQIYNSKYITPFAENTTARIEELYQSKNSHFTTKDNEVDMATENDDYVELNSDDENEQEDRSAMEGTSNMLQQDSQINTITAIEQVEQXVGQEETTSETKATSAEDNDTINEEDINNYLANEEDSQDNTPVVIDKKHIPCIGKKFRTHEEARSFFNFYAYQVGFSVVITHHYKSTSKKRFGQITKYTYQCYRYGKNDDGQKKKKKKTQQQRNTQVIDRTDCKCMLTVRLEGDVWRILSMNLNHNHTLTPNREAKFLRSHKHMTDEEKKLIRTLKQCNIPTRNMISILSFLRGGIAALPYTRKDVSNVGTAINSETRNTDMNQVMEYLRQKEAKDPGYYYKLTLDENNKVKSMFWTDGRSTQLYEQYGEFVSFDTTYKTNRYNMPFAPIVGVTGHGNICIFACAFLGDETTETFKWVFETFLTAMGGKHPETIITDQDLAMRAAIRQVFPNSKHRNCLFHILKKCRERSGNTFSDKRRKDLYAEFNDIVHNSLTRAEFESLWLQMIAQYNLENIKYLEIMWRTRKNFIPVYSKTDFCPFIHSTALSEGTNARFKRGVGPTHSVMTFLLEYETINDIIFDTEYGKDYESRNKKPKSFWSNDMIEEQAADLYNHGIFDKFQDELKGTLNLEVAAIQQAKAYEVYAAPNLKQQEFRPRRYVVMTDLPQENFVCICAKFSKDGILCSHVLKVMLYLKMSKIPDKYIIERWRKKERKLTVSMQLATNDENSSVLRFNVLSRRICNMTSKASKSKETYEYLLGEIDNLDSNLDLIIEDAAQNQASIDESNTVENTSEDKAEKETTNEQEDIQDPDIANTKGKKSARTKGMVEKIKEQPKKHCTRCGRTSHTIENCPLMRIARSTKKIQKTTTRSKRNE

SEQ ID NO: 147652 - protein, 176 aa, Oryza sativa
  Clone ID: PAT_MRT4530_48160C.1.pep
CIFGRIYLGRPCRYLAAAAASARYSRGISNSTAKICILFLKKKSLAPATATPRRGLGGRVQEGARLLFSSSQQQHARTHHTRSSRAMAAAMATRPSKRPAAKRRTRAAEVHNLSERRRRDRINEKLRALQELVPHCNKTDKASILDEAIEYLKSLQMQVQIMWMTTGIVPMMFPGT

SEQ ID NO: 147653 - protein, 55 aa, Oryza sativa
  Clone ID: PAT_MRT4530_48161C.1.pep
EKKGSQVGNQLFLPVFQVGKVKFENNINLFSGELPPLISPQKNTPHMRGVWGCED

SEQ ID NO: 147654 - protein, 85 aa, Oryza sativa
  Clone ID: PAT_MRT4530_48162C.1.pep
DISYDQVYIGSTRLGCLLVLLGYHATLNPRLLRRSQLYWPKDGSGVSTPPPRTALRLRRRRRRCDASHGVVMCVDDNLYRTPDAW

SEQ ID NO: 147655 - protein, 85 aa, Oryza sativa
  unsure (1)..(85): unsure at all Xaa locations
  Clone ID: PAT_MRT4530_48163C.1.pep
MQATRNKDKETAVKPINDSRSAKGLSMRGNHLEAYQFNPMTYTKSYCRNRLYHLTQSDSDLADPXIVADLDSSRFLLCFRNDLHL

SEQ ID NO: 147656 - protein, 34 aa, Oryza sativa
  Clone ID: PAT_MRT4530_48164C.1.pep
ALGEARIGAWTPAAHRCRRLAFFHRSECGRRRQN

SEQ ID NO: 147657 - protein, 98 aa, Oryza sativa
  Clone ID: PAT_MRT4530_48165C.1.pep
NKQKVDLLLFLKLYMGSIPHKQQLVEKEPWTQSLPMQISVKDVLYPSINTGINCQYEVSSLRFPQVLKHCQYKGMTRKVIPHFLSSRSQFTKHNQFLS

SEQ ID NO: 147658 - protein, 55 aa, Oryza sativa
  Clone ID: PAT_MRT4530_48166C.1.pep
KAQKTQRRTTSAKGRTQRQRGSPTSKAHQHFVRAAKQVKQPCNLRNTLGHSPSLP

SEQ ID NO: 147659 - protein, 87 aa, Oryza sativa
  Clone ID: PAT_MRT4530_48167C.1.pep
VRRRRILVRAGVLHAAAAVPGAVRHVRRRGCQVVDSRDAAGCFPALPQPLLRWSGLRLWTSLKISSFFFQEFLASCHCQMRSYACVE

SEQ ID NO: 147660 - protein, 64 aa, Oryza sativa
  Clone ID: PAT_MRT4530_48168C.1.pep
KETNTTCMIFFLSCTISSYQQRTKYSHFNLQDHITIIRLKAILCLSQQLVFVRFSFCLNTNLLL

SEQ ID NO: 147661 - protein, 280 aa, Oryza sativa
  Clone ID: PAT_MRT4530_48169C.1.pep
MVPVTAPTNVTPPIDLVSTACLKKKEVQTKSSKRKRNWLDKMHKSTEKGSKKGGKKKEKGSKEQGTIKKGGKKKEKEATVQDSAAVQNIYPNTSLPMEELSEPYMAINTFSQILTTSFSDMSTPIPAIVQTSSSLIGITAVATLQRVLSILRHATIVALPDEAMLLQQKLYRGVRGSRSGASGWRRSGCRRTGPTACGCGAQGRVPHRGQRGAHHEGGVAPSRVHNYGVTDDDCLVHLDLGFKFEALTDDVHGVLGQTSLHLSTLLISFDDDYPFTLMSY

SEQ ID NO: 147662 - protein, 108 aa, Oryza sativa
  unsure (1)..(108): unsure at all Xaa locations
  Clone ID: PAT_MRT4530_4816C.1.pep
SPNRLRLRSAEFESDEVSRLSRVRRYDMFGXKSDAKTYGILEFVRDMSRVRHGHILIKSTGTLAYPKANFGPALELRRSPRPRVFTSTISKSENFIFDSIFQSNNLSS

SEQ ID NO: 147663 - protein, 58 aa, Oryza sativa
  Clone ID: PAT_MRT4530_48170C.1.pep
KYKMSPLDEVLSFFSKLVWSISFCNSNYINTLILFITPGILYLCGQIIPHPRKSRFEG

SEQ ID NO: 147664 - protein, 113 aa, Oryza sativa
  Clone ID: PAT_MRT4530_48171C.1.pep
IDLVSTACLKKKEVQTKSSKRKRNWLDKMHKSTEKGSKKGGKKKEKGSKEQGTIKKGGKKKEKEATVQDSAAVQNIYPNTSLPMEELSEPYMAINTFSQILTGPITDDVLADF

SEQ ID NO: 147665 - protein, 924 aa, Oryza sativa
  Clone ID: PAT_MRT4530_48172C.1.pep
MGRSSSATAAGSKKRRSKTGALTLGEVKTLGEELLSSRANLNHAPTLLALLSPSAPLDLALEALISLQSFFVPLLPSIPSAAATAAAAAGDADPELVFRSWLRKRFDELVAALVELTVSPHSDDAIRDLALDALMDFVKLGKDGRFQSAIYHKFIHNLIHATDSIDPLLELLGPKYFIYTDVWYVVEIDANDSEIFNEASQRKKVGADPFNNEETDPAKSGAMLAVLAAVNDINNDSNILPGTKLDLHMHDSSCNRFLGIVQALQFMEKDTVAIIGPLSSTTAHVLSHLANELHVPLMSFSATDPTLSSLEYPFFVRTTVSDQFQMTAVADLVEYYGWKQVTTIFVDNDYGRNAISSLGDELSKRRSKILYKAPFRPGASNNEIADVLIKVAMMESRVIILHANPDSGLVVFQQALKLGMVSNGYAWIATDWLTSYLDPSVHLDIGLLSTMQGVLTLRHHTENTRRKSMLSSKWSELLKEDSGHSRFLLSTYGLYAYDTVWMLAHALDAFFNSGGNISFSPDPKLNEISGRGLNLEALSVFDGGQLLLEKIHQVDFLGATGPVKFDSGGNLIQPAYDIVSIIGSGLRTVGYWSNYSGLSVISPETLYKKPANRTRETQKLHDVIWPGEDTRSTLGRFVIIIWLFVVLIIQSSYTASLTSILTVQQLTSPITGIDSLITSDVPIGFQVGSFAENYLAQELGVAHSRLKALGSPEEYKKALDLGPSKGGVAAIVDERPYIELFLYQNPKFAVVGSEFTKSGWGFAFPRDSPLSVDLSTAILELSENGDLQRIHDKWLASDMSSMSQASELDQDPDRLDVYSFSALFLICGLACIFALAIHACNLFYQYSRHAAEEDPAALQPSASDGSRSLSRRSKLQSFLSFADRREADIRRAAKEKASGLGGSGGSMSGVSFTSSGSGSTTASC

SEQ ID NO: 147666 - protein, 330 aa, Oryza sativa
  Clone ID: PAT_MRT4530_48173C.1.pep
MAAATAAAETPPTLLEYMGQAGAADDLVVLVAHVQSACKRIAALVASPGNAELSRGKAGGGVAVAAGRDAPKPLDELSNEIILSSLRRSGKVAVMASEENHLPIWVSNDSPYVVVTDPLDGSRNIEVSIPTGTIFGIYNRLAELDHLPEEERAQLNSLQSGTHLVASGFGAGTHGFTLDHLTGEFVLTHPSIQIPPRGQIYSVNDARYFDWPEGLRKYIDTIRQGKGQHPKKYSARYVCSLVADFHRTLIYGGVAMNPRDHLRLVYEANPLSFLAEQAGGRGSDGKSRILSIQPVKLHQRLPLFLGGMEDMLELESYGDVQQKVNPGYEV

SEQ ID NO: 147667 - protein, 55 aa, Oryza sativa
  Clone ID: PAT_MRT4530_48174C.1.pep
MKVKGNMLNNKRGPYGEYPQVQAEKARKRTLSDQFEAKLAKSMASQERKISRRYY

SEQ ID NO: 147668 - protein, 45 aa, Oryza sativa
  Clone ID: PAT_MRT4530_48175C.1.pep
FGIDHPILYLRLCRVVVPHVPNGFVSNPPEVRVAPPSRPGVVYKT

SEQ ID NO: 147669 - protein, 88 aa, Oryza sativa
  Clone ID: PAT_MRT4530_48176C.1.pep
GPSPPPVIFPFLGTFFFGREAGPQGIGSLPFQGFKQSGTPPLLKWGKRAPGAFNGAQVGGLKSFPVNFEFGGSPQFFFFWIRFLGWAP

SEQ ID NO: 147670 - protein, 121 aa, Oryza sativa
  Clone ID: PAT_MRT4530_48177C.1.pep
WRICPSEPERGTLGRRESTRSRQRGRAQRRRLAGAAPVSRPAHGRRCCGRRAHGRRRCRRLGARWMRPWWALLDLDPLGHIWRPMARTAGVCAGARATPAAGGGCGERRSVTGWATCAEDT

SEQ ID NO: 147671 - protein, 126 aa, Oryza sativa
  Clone ID: PAT_MRT4530_48178C.1.pep
MAWVAGVDGGDGGGRRGWRGLRAESGSGELQALWTGGRRRGWRGRRSRSDVRSRKVVECEAELVAPPSYCIANRFTRDWAVQRALSSVDLASAAGVFARGQLAAMELLFTALWKDALRLIRKIAEL

SEQ ID NO: 147672 - protein, 73 aa, Oryza sativa
  Clone ID: PAT_MRT4530_48179C.1.pep
WISLRSSKVPQWRSWCYRVVHALCSLVAPRIYGVVIILWLASYNPFAAEFTLLVSWWLLCLLMPASPFKVQKD

SEQ ID NO: 147673 - protein, 98 aa, Oryza sativa
  Clone ID: PAT_MRT4530_4817C.1.pep
MAAAAASSAAWKRWIRPEVYPLFLATGVAVSICVGQLVRNITGNPEVRVLKEKRAAGVLENFDEGKRYSQHGFRKFIDGKRPEIMPGINSFFSDPPKY

SEQ ID NO: 147674 - protein, 172 aa, Oryza sativa
  Clone ID: PAT_MRT4530_48180C.1.pep
MAWVAGVDGGDGGRRRGWRGLRAESGSGELQALWTGGRRRGWRGRRSRSDVRSRKVVECEAELVAPPSYCIANRFTRDWAVQRALSSGLQRHVHIHLPCSVLTSTSSLNYLLAQWVGWRLRGFGISCWGVRQGTIGSDGVVVHSSMERRLSLEYVVAQSMLYWREAGIEQLQ

SEQ ID NO: 147675 - protein, 44 aa, Oryza sativa
  Clone ID: PAT_MRT4530_48181C.1.pep
LLKSFGSITTCGYIVIQLFQVSYQDPIYHVLLNTRNKYDIVPSQ

SEQ ID NO: 147676 - protein, 133 aa, Oryza sativa
  Clone ID: PAT_MRT4530_48182C.1.pep
MVIASAVGRVWTESTKGGPHSSAVQGAAGHRGPSPRRRSDGRGWPGGIASEEGNRASKAAARQAAERRAGSREGCSPSTNDEKGGARKLSCERPRRRSTRKTGSEAPTTTGGRGGASEHLQDLLKVEKGLGEE

SEQ ID NO: 147677 - protein, 76 aa, Oryza sativa
  Clone ID: PAT_MRT4530_48183C.1.pep
ADLTRLFVVDKTLLCGGIWPAHRGLYLEPYLSAGKLLGYRIRVPDCCCSYRHPCVCAKLSHLRSPVTHLRDITTHT

SEQ ID NO: 147678 - protein, 895 aa, Oryza sativa
  Clone ID: PAT_MRT4530_48184C.1.pep
MAKNVKAAVIQALRSMDLEEVPTCSRVILVWHIATSLCEIKLANDHKINLTTMSRLSSFLVDEKALTGELQKAYTVSNCLSWYCMYLLASKPKLLPETILMSKKAFQDAVQCAHEMLSDCHSWQSIYNKLMKEAQKALVQGTHGLNLSGNILQQGAILANELIKKEDQKCRWEILSDVWVHLLVHIAPSSDAAALAEDLKSGVEFVTVIWALFCHCGIEKSKLWQQQKSANFRNSTPGPSNQSSDVSTHVQDTVSSSPPAARSSEIHVEASPTSEQTEKTCFVVLLSGQAWMFITANLPPECYKTDGRLSSAAEPAGLYRGVGHQNPAPQPARRTTTTIHGGGYQKSTGVRSHQKQAVVQPTVRPSSWLPGGTYRKPVTFKTQKPPKPAIAKPVVRKHLIQNAFANQKNHEHHEQNKVKPASSSGKVKFTEFKTSDIDAAVSKPVMRLHEMKDYRQDGTWDVAQIRREYPHADLEKGKTVVSRSVISALRRRGPDGPPTASTRLHWEKPRLGWMKLNVDGSFDADRGKGGIGMILRDNSGSTVFAAYNICKLRNFGISTLLHPTKHVPSAIEEVIQGMPGEKVIQGIFRTFMDIDDCKIQIQTDVSALGIILLQLVTGHSDAKSLRDFVAQKLGDDSEFQRKSILQKREILKGIVDPELKRCQTPVEEEKPMDVAVGIVVVVVGAISAVATFILLGAVMVTLAIVTIIVVCVVTAAQQYLEQANKNKASRSSGGNKFIVFKPSEIDAAVSKRAKWLRGTATYNVYRSDFDGMDIATTVPKGTLPEWILMQEFHQALDVSALGIVLLQLVTGKLDANGLRERVIYYLGDAKGFYKKTSSQQRKILEKIVNLELKTDRTSEDVARMLFLGLRCSDPISKNHPSLATEVLPQIESMKK

SEQ ID NO: 147679 - protein, 53 aa, Oryza sativa
  Clone ID: PAT_MRT4530_48185C.1.pep
CTSKRCMASVMMRILLMNHMHYIERSVPGSQGIDLLGDDWLLRLRRMVRQKAC

SEQ ID NO: 147680 - protein, 70 aa, Oryza sativa
  unsure (1)..(70): unsure at all Xaa locations
  Clone ID: PAT_MRT4530_48186C.1.pep
VLVPHLKMADSHQKETSXIQXLIKHIIYIYIYVCXYVSXXIKRXSYPNXTHPRRKVKDSVSRVKLNCXXK

SEQ ID NO: 147681 - protein, 262 aa, Oryza sativa
  Clone ID: PAT_MRT4530_48187C.1.pep
MPPPVPPEERRKPSPAESRQWTQRFFQVLGAGEPLPAPAELPAAYSALVRGVLSSAAVSSSASPRVSCTLTVSPAAVNGYNTLHGGMVAAVAEAVGMACARAAAGDKEMFLGELSTAYLSAARLNSEVEVEAQILRKGRSVVVTTVEFRLKDTKKLCYSSRATIYIMPVASLCRLNIIEQSAKFASTGLQTRVSSTKGVESKERNWSISILQQIARPVKPRRLLDQGTVEMMIAGEFSKFRTVFIGTQADAALLHLTGTRVG

SEQ ID NO: 147682 - protein, 83 aa, Oryza sativa
  Clone ID: PAT_MRT4530_48188C.1.pep
MDYRVFGSAWHGPTIIGPLAGDLGEAAPSPPPSLSDGPASGAKFRRNESEHSTAGSDDDFCAITAACAKKGGREVTGSEATRG

SEQ ID NO: 147683 - protein, 35 aa, Oryza sativa
  Clone ID: PAT_MRT4530_48189C.1.pep
RALVALSVLMYNSLLHSSCSVMYSLIYRMSAFVHC

SEQ ID NO: 147684 - protein, 169 aa, Oryza sativa
  Clone ID: PAT_MRT4530_4818C.1.pep
LHRLRMSNYNVLLACPSADSSVLCSAATIMWPWDALVKGLDFSPKHFNQPPDGISFSWYGHYRGPLDDLFLNSESDDSMAESEDSLAESRDSKAFQPHTKSVKPPILPKSVANGVRQVLYSFPEGISLPNLRAELRKNHVFMDKGLFGFKNFSSLLQAMPDVVKFIDPL

SEQ ID NO: 147685 - protein, 402 aa, Oryza sativa
  unsure (1)..(402): unsure at all Xaa locations
  Clone ID: PAT_MRT4530_48190C.1.pep
MARRGGALAAAAVDVVGSVLVVCCLCWCAVQPALAGGVGGGGGDGGMRCKYNAMFVFGDSLADTGNICVNKSAAATLLLTFAQPPYGMTYFGHPTCRCSDGRLVVDFLAQELGLPLLPPSKRSAGGGDFRRGANMAIVGATALDFDFLKSIGLGYPIWNNGAMNVQLQWFHHLLPSICATQPQGCRAYLSKSLFLFGSLGGNDYNAMLFFGFTVDQARNYTPKIVDTIITGKLIAMGAAEIVVPGVMPVGCFPLYLTMLRSSNESDYDEHGCLRPLNDLAIHHNALLQARLAGLQARYRSAAAAAPAPVRIMYADYYTMVAQMLHTPARFGFNXGMTACCGAGGGEYNYEFEARCGMKGAAACRDPSRHVCWDGVHTTEAANRLVAGGWLRGPYCHPPILHH

SEQ ID NO: 147686 - protein, 134 aa, Oryza sativa
  Clone ID: PAT_MRT4530_48191C.1.pep
MAACPAAKLLAAGYGTQRPAEALRAGERSCGTSRWTAEASRQTAAPSFARHTRSLTYPGAGNGASCCWASLHFVRVNDGGARVSPSTAAAPRECVSPWPCIYAAAAVAYHASASAPSPIAVGRENCGFSIICAG

SEQ ID NO: 147687 - protein, 201 aa, Oryza sativa
  unsure (1)..(201): unsure at all Xaa locations
  Clone ID: PAT_MRT4530_48192C.1.pep
MFSSMKEVGRKAIDKQKHALHRLRKTPDSNCPATVTLSLSKQDDLGKSVSMKTRSEIFNSVSDATRSEKCKHRLPGNAMSWEMIQWERTHQGQRCKGIRXMLNDDKHGILVMTSQSKSAKGSTRDKSSEEKNPSATGXSSQAVQSEESLLGKFVIEDRAKEXQTRREDXPTYXLCCLLEFRGREFSSSWANNPRPPLPFFP

SEQ ID NO: 147688 - protein, 276 aa, Oryza sativa
  unsure (1)..(276): unsure at all Xaa locations
  Clone ID: PAT_MRT4530_48193C.1.pep
WAHRAQELDCWSGVFSGEAAREGKEDRTKSTSTEGEQPVEQSTGFGSLASLRRQSDGQSGGGGKPQVEQLWWQAVGRTVGRSSSGRAGRAERQRPKHAGNSRAAGAGEARERGGEEARERDEKGGGRRGGGEAGRVVGVIPXPPPSSSFEPLPPKYDEPNHRRCCDDHLWPDDDRCALLLFPDTCSLGSGWRQRPRGSPASSSLSLPTPLAFELVRGEERRAARRDGGGEERSTARLLLSARSPHPLRGRSPASQPSSKPAPEEEEGTTTDRERAG

SEQ ID NO: 147689 - protein, 59 aa, Oryza sativa
  Clone ID: PAT_MRT4530_48194C.1.pep
TNRDLRGAPTFPYQGVFFLARGGDGHSWFQERNGDPLTKPHNKRGGSIKCKDWGAQKES

SEQ ID NO: 147690 - protein, 192 aa, Oryza sativa
  Clone ID: PAT_MRT4530_48195C.1.pep
MIAQEVQRDNSKVDVKGQRCNIFQSECKIQDKICKLIIDGGSTTNAISSDLVHALSLPMRRLPKPCYIQWMNQAGTLKITHKVRVAFSIGSYVDKVDCDVVPMTVCHMLLGRPWQFDRNATHEGRSNQYSFMHLGFNHVVKPMHNSAIKAEVFPVFRKKKNKAQTSSPHLMLASSLVPHHIAPAAAAISPAR

SEQ ID NO: 147691 - protein, 106 aa, Oryza sativa
  unsure (1)..(106): unsure at all Xaa locations
  Clone ID: PAT_MRT4530_48196C.1.pep
PVRARTLNPINESRPPKXGGAARAECVPDDRSEHRGLLHPPGSGCGPARLHQRAISPAGRPPPRTPGRSGRAGRPGASSVAAAALADADLERGARPSQAAWPPVRH

SEQ ID NO: 147692 - protein, 440 aa, Oryza sativa
  Clone ID: PAT_MRT4530_48197C.1.pep
MGEGHETDKNIEVWKVKKLIKALDAARGNGTSMISLIMPPRDQVSRVTKMLGDEYGTASNIKSRVNRQSVLAAITSAQQRLKLYSRVPVNGLVLYTGTIVTDDGKEKKVTFDFEPFRPINASLYLCDNKFHTEALNELLESDDKFGFIIMDGNGTLYGTLSGNSREVLYKFSVDLPKKHGRGGQSAVRFARLRMERRHNYLRKAAELATQFFINSATNQPNIAGLILAGSADFKTELGKSEMFDPRLQAKVIKTLDVSYGGESGFNQAIEMSAEVLSDVKFVQEKKLIGKYFEEISQDTGKYVLGVQDTITALEIGAVDTLIVWENLDVRRYELKNTATGETVIKYLNSDQEADQSNFVDEATSGEFDVIDKPLLLEWFAENYQQYGCTLEFVTNKSQEGSQFCRGFGGIGGILRYPADVAAFNDDDDDMLDEADYEDFE

SEQ ID NO: 147693 - protein, 44 aa, Oryza sativa
  Clone ID: PAT_MRT4530_48198C.1.pep
TRRSSSSPTDKLPQWIKTRLACAQNYGEVHRLLHQFFKLNRQTH

SEQ ID NO: 147694 - protein, 165 aa, Oryza sativa
  Clone ID: PAT_MRT4530_48199C.1.pep
GRRVRNASGRATRASTETNEEGKGNERYGEARDTGARRRRRAGKQRAAEEGGEGDTANGAESEDTGPPRKPRQVGEATPRNQERRTARRDEKTDRHKAEQAAGRGTGGREEDGTKDEAGQTAEKRRKGENAGNRGKKGEEGNTGKRRPRRGRRKRRGRPSKGEGS

SEQ ID NO: 147695 - protein, 682 aa, Oryza sativa
  unsure (1)..(682): unsure at all Xaa locations
  Clone ID: PAT_MRT4530_4819C.1.pep
MELDSDDAGAFLRPYLFPGAATWQLAQETLAPSSSQGGEVRRTLTVGSTDGDGFPERDELRKDIEQLCMQQQAGPGYVSVATRMLSQRTAALEQDIENLQKKLGGCLRENQNLQEELAEAYRIKSQLAELHGAELSKNKELEKQXGELITAYVTFALCYKVHIFSVEIDSXEKAKEREEAILQKFAKFEERTREYQSSIDDQKRSNDALQMELMRLKEQTQSSLKVIQKFYDVRCRDPECSVNITLEEKCSVLLDDSADNWSFSSDGGTSTSKYIASLEEEKDSLRAKIAKLQNNLRMGLEIEQHLQRNARVLEKRQALYDEFMRNGLSTLQKLHIQQRDDIMKILEEESSQLSTVVNEIQDKLSKIRINPEINENPVGEMQCCDSSCKDVHVTTDVSPGISPKGDIPSDCATFGESDVLVQALHEKMEALMLFSQEQERYLLEKQRNQIVIEELQKNLSQVKEEKVKILVELAKLKEEYLMLKGNSTPKDGHGAVDNMKIIPAHDRQGMFKTIMNRTSLRHWIKKENTNIGHECSDENVHTVRKHHSEDLARVKAENAALLESVATMEHLTSSVHRLHIVLMKAFEDVKSAHSLESTYEALNSLITEANLMKTALGVALPVSWLGDSSDAITSDALYDPSESPKSSKSEKQDPLSSAGMEMVELLILAADILKDSFILNNK

SEQ ID NO: 147696 - protein, 202 aa, Oryza sativa
  unsure (1)..(202): unsure at all Xaa locations
  Clone ID: PAT_MRT4530_481C.1.pep
ECLLQYAHGSGKVPVGVEEAPDGLEFREVVVPGKGNEASDEASRWRHPRMLNRTLRARVSWXGGGGRGGRGRRKRRSSLVLEGWPWEAAAQRWAVDRAGGGGGATGWRRVVGRRWWQGXSKHLVRRQRAMVADSAAGSHRRWGRQQGGGTSXHRRLEEKETGEGERGXGRGLAGAVDSFRPTDEASGGTMGWWRRGIARGTG

SEQ ID NO: 147697 - protein, 105 aa, Oryza sativa
  Clone ID: PAT_MRT4530_48200C.1.pep
GREKGGGPKAKKSGGEKGLPPKAVKKGGRRSKFRGGKKKKKPGKGREGKVGNIKKGGPPGNLNLDTYKKVGLVFFFFFFLFLFFFFFFFILFFFFFFFFFFFFFF

SEQ ID NO: 147698 - protein, 59 aa, Oryza sativa
  Clone ID: PAT_MRT4530_48201C.1.pep
LHPRLAPHMRVYLSLGLVGPPFLFMLEHVLGTSVALCMVVSQSALRLVTESTQGMPYPM

SEQ ID NO: 147699 - protein, 825 aa, Oryza sativa
  Clone ID: PAT_MRT4530_48202C.1.pep
MSTSTSPSATSSAEYVEHLSNLIAVPSLSHKNHYFLGPVGNLDPTKFIIGETNTIPFRLANPDLGHWKNTFKSWPSLEKTSPEKSWTIWYKRMSASKKVHWDEIGIGQGYVAAYMGKGPVTPREHVAFLLMWLEKFLFCGSSCGPTTNWQFVAEALESKKQFPLGKILLGYLYQVLNKASAKIAVGLVVGTGGPWWLLQTWLNLMVMKFVNRPSVTEAEFPRLEPIIEDDGEERTHRRCMSYGEYASTPADVGAKLSAELLKDWFCSFYEGFQKDAKIWFPYEDSALLELPSDFRFEDINHERYQKSREVFSAAISPCILPIGIHQGRNIQVCYEFYHPMSSARQFDMGQLPIGLFFADKIQCRGEISSTLMMDRLLNLQGPPLGSIENIELATFRSGAFDRWWGEWKMHLFHQSASMYMTDLFSNTTESSPPHKSNSGKYIEYAPSLIPNEGGPSPPVIGYHAPKTSSLLQGLIREPTDAGKKRKTRASTIDPSAPAPKKKAKSKKTKPTDDLPALDPSIEQALDEEEIGEDVDQAAARKKKTAVKKKSAATTLKLAPPPPPPPSSPVQQSSSDQIPSAAGSHHVKEEVQPAASAIPVLADLFSFDIKDYFDETEDDTTSKALAPLSNDVRKTLEDISHSLEASSLDSLVVDCGSIRTRLHEVQALIPEELADILTPAAYLEQHQFKLEKSKLRLTERWERRDIEATIQANRQLVHEEKAKLDQLSEGLIKSNIDRLEARKIELLAQLQECNAELDLEHNKLPDLPQAVEEQKARLKSAIKNVADMTKSLKVISGTDAQDAQAIEEVEQIRQRAISAIQRHLSQ

SEQ ID NO: 147700 - protein, 83 aa, Oryza sativa
  unsure (1)..(83): unsure at all Xaa locations
  Clone ID: PAT_MRT4530_48203C.1.pep
GSSPPFNYSLNPPDFVTQLLYRYFRNGFVTYMNIWLARGSELFLKNHHRMFRSTQTEWYRFWMWKKIPFICFRAMNXKKGHCC

SEQ ID NO: 147701 - protein, 149 aa, Oryza sativa
  unsure (1)..(149): unsure at all Xaa locations
  Clone ID: PAT_MRT4530_48204C.1.pep
LFYSAEVYLNGHREVLPKGMFRRHTLDITDVLRPDGKNLLAVLVHPPVHPGAIPPQGGQGGDHEIGKDVATQYVEGWDWMCPIRDRNTGIWDEVSISVTGPVRIMDPHLVSTFYDEFKRSYLXHCTLQLENRSLWVSDCKLKIQVLTEL

SEQ ID NO: 147702 - protein, 322 aa, Oryza sativa
  Clone ID: PAT_MRT4530_48205C.1.pep
MAAAAAAAAAAAAEVGKRVLDTGWLAARSTEVALTGEQLTTTDPPPADPEPTAPWMHAAVPGTVLGTLLKNKLIPDPFYGLNNESIIDIAKSGRGHYTFWFFTTFQCAPAGHQHVSLNFRGINYSAEVYLNGHKEVLPKGMFRRHTLDITDVLRPDGKNLLAVLVHPPVHPGAIPPQGGQGGDHEIGKDVATQYVEGWDWMCPISQGTILEAYMTVGICLNQICSYYAGDRNTGIWDEVSISVTGPVRIMDPHLVSTFYDDFKRSYLHCTLQLENRSSWLSDCKLKIQVSTELEGNICLVEHLQSYEISVPPNSVLEYTIPP

SEQ ID NO: 147703 - protein, 79 aa, Oryza sativa
  Clone ID: PAT_MRT4530_48206C.1.pep
GRPALRPPRHRRPVLPPPPPSSFFPVGRRPRQAPPPPPPSVLPRKPPATPSVVAASRPRQPPRPTAVAPARAGPLLRRR

SEQ ID NO: 147704 - protein, 249 aa, Oryza sativa
  unsure (1)..(249): unsure at all Xaa locations
  Clone ID: PAT_MRT4530_48207C.1.pep
MVMVGCLIAILARSCWHLAVAAVKLPALLCCDAMLSTVAFLTFPLRLLAAVDRERKAKLALLDRLVGEMQRQMERLVWENRELEEKLGMALKESRAMEEILDEMEEEHDDAFARITLLETQMRRGKAVARRRSLVSVGMAAAVGAVVWAXDPPCLPLLAGLLATVGVSMCSVARFFLLREEAAAALRGGSGRPASSSSDAVVLLSLNWFLLGVLTSPMLPGAAHAVFPRAARLVAPAVAWFTATAPLSS

SEQ ID NO: 147705 - protein, 110 aa, Oryza sativa
  Clone ID: PAT_MRT4530_48208C.1.pep
GAVFFSLALRGVGPLRPSSPALGGRIPPSVVVLFPPFPPHCRMNQYVGLAYALDERCCEASSGCCGGAMLVVVGGVVISTLLCGPGGERPFASCCCPLWPLPVAGVAPRG

SEQ ID NO: 147706 - protein, 330 aa, Oryza sativa
  Clone ID: PAT_MRT4530_48209C.1.pep
MVMVGCLIAILARSCWHLAVAAVKLPALLCCDAMLSTVAFLTFPLRLLAAVDRERKAKLALLDRLVGEMQRQMERLVWENRELEEKLGMALKESRAMEEILDEMEEEHDDAFARITLLETQLKALKLENMRLIEHRGKSMWDKKPPATAVHGGESLPASTSRPSNTRKRKDREDEAEEAAAAQEEEGGGGVATEEDSEMSVQMRRGKAVARRRSLVSVGMAAAVGAVVWAADAPCLPLLAGLLATVGVSMCSVARFFLLREEAAAALRGGSGRPASSSSDAVVLLSLNWFLLGVLTSPMLPGAAHAVFPRAARLVAPAVAWFTATAPLSS

SEQ ID NO: 147707 - protein, 62 aa, Oryza sativa
  Clone ID: PAT_MRT4530_4820C.1.pep
MVISLNAVHPLFSMLICETCSYVKPPNCIINGPVISYTSNMYDTFKEQAIKMSAKNFMAGGH

SEQ ID NO: 147708 - protein, 132 aa, Oryza sativa
  Clone ID: PAT_MRT4530_48210C.1.pep
MYDSSATASLNNSAELGGQDELDNGEGRGRGRGDGPGKAWQQDGDWLCPNTSCGNVNFAFRGVCNLCGAARPAGVSGSSAGGGGRGRGRGSDDARGGSRAAAAAAVGGPPGLFGPNDWPCPMYEHPQKLAVS

SEQ ID NO: 147709 - protein, 34 aa, Oryza sativa
  Clone ID: PAT_MRT4530_48211C.1.pep
AAGVKDMLDRYFKGEDFPAQNYIVKAGQLASQYQ

SEQ ID NO: 147710 - protein, 186 aa, Oryza sativa
  Clone ID: PAT_MRT4530_48212C.1.pep
MRAAWRLGSGATTVQWCGCMASWPRRDHGATVRLGVPSARACGRTRRRRGCAAGRVAGAGARPARVWACADCDLHQSAYAGDSESAVVDFIGNGKNGTSVERGFQFCNSFKEIQRDQRVLYLLLHVSKAGSLFNFIVQQFALKYLSDCIIARHVCKVNIENISNNVLGVIYNGIIYVVSFVLQTKR

SEQ ID NO: 147711 - protein, 640 aa, Oryza sativa
  Clone ID: PAT_MRT4530_48213C.1.pep
MARRGGAAASSSMANLLGVALVLAATAQTSARGGGGGGRHDYRMALSKSILYFEAQRSGVLPGNQRIAWRANSGLADGKANGVDLVGGYYDAGDNVKFGFPMAFTVTMMAWSVLEYGKQMAAAGELGHAMDAVRWGADYFVKAHPAPNVLYGEVGDGDSDHVCWQRPEDMTTSRQAYRLDPQHPGSDLAGETATALAAASLVFRSSNPGYANQLLQHSKQLFDFADKYRGKYDDSMPVVKKFYGSFSGYGDELLWASAWLYQATDNRRYLDYLANNGDALGGTGWATNEFGWDVKYPGVQVLAAKFLLQGKAGPHAAVLRRYQRNADVFACSCLGKGGGGGNVGRTPGGLMYHQGWNNLQFVTGASFLLAVYADHLAAAGRGQAVVRCQAGPAARASELVALAKSQVDYILGSNPRGISYMVGYGARYPRRAHHRGASIVSIRANPSFVSCKDGYASWFGRAGSNPNLLDGAVVGGPDGRDGFADERNNYQQTEVATYNNAPLMGVLARLAGGGRGGLAEAAIKRPDNQTLLPPLAAAASPVEITQLNATASWKKDGRTYRRYAATVSNRSPAGGKTVEELHIGIGKPHGPVWGLEKAARYGYVLPSSLAAGESAAFAYVVRGRAAPPPADVWVIGYKLV

SEQ ID NO: 147712 - protein, 45 aa, Oryza sativa
  Clone ID: PAT_MRT4530_48214C.1.pep
HASGPTFGAMMMSCQKAAHLALKALGRPNAIDSTIKNAAAAAAHP

SEQ ID NO: 147713 - protein, 58 aa, Oryza sativa
  Clone ID: PAT_MRT4530_48215C.1.pep
TGTKPYTFYSLNVNCPTNCDTERPPATGGGRFQQMLNPQQKNFVRGPNSGTRLCPQIG

SEQ ID NO: 147714 - protein, 42 aa, Oryza sativa
  Clone ID: PAT_MRT4530_48216C.1.pep
DYQRFFMFIWLINWYPINLFLLLSLPCVARWGMGVFLAVFGV

SEQ ID NO: 147715 - protein, 135 aa, Oryza sativa
  Clone ID: PAT_MRT4530_48217C.1.pep
MNSDGHSPEFIIHVIKDLAPPPPPPPARAAAPPRILPAAAAFQPRLRPSSEANKTIRTVLFIFKVICFALIALASSTTIYSTVHPNPGQSIADQRLDVQVMCGFILAVGVLWLLVSYFSLIIHDEEQGLDPLFVD

SEQ ID NO: 147716 - protein, 686 aa, Oryza sativa
  Clone ID: PAT_MRT4530_48218C.1.pep
MEKSSIALLFQKHEAKKNACDLPIPHVDEGSSIPAVNDAPIDEDIVVDEGVCEETEEDTVVDDAPPPDVVVDEVSIETKEESLPIYDVDDLEHDPGLRVPISSFDANDQDAARRGYILKGPCHLWAFNFPSRKIYGKDRRFSVIWFHKYPWIEYSVDKDATFCFVCYLFGKESGKFVTGGWHNWNVGAKALDKHVGGTSSDHNFAQEKYNLFVKKGCLRYLLRQGLAFRGHDETEESNNRGNFLELLKWLAGNNENANKVVLNNAPGNCILTSPRIQKQVIRCCSMETTSCILKELGDEHYAILADESSDISHKEQLVVCLRYVDKLGGVCERFLAVVHVADVRAQKLKKALNLGEIASGSGLNQEMALARPGDTRWGSHYKTILHIIDMYDTIREVLITIGKDPTQREDWPIIHAMVLAFESFEFVFNAHLMLVILGYTNEFSNSLQKRDQDIVNAMSLVGLAKKKMQQMRFNGWEGFLGKVTSFCIKYSIDIPAMDAKYVPHGRSHRFYPDQTIDDHYRREVYIGVIDRIHQELENRFDEVSMALLLCMSAFNPTDSFASFDAQKILRLASFYPKDIEGSDLMKLELQLDTYISDMSEDDRFKGLNNIGELSIKLVETKKHDLYDLVYLLLKLVLILPVVTASVKRVFSAMNLVKTKVRNSMSDKLLNNCLVTLIERDMYMRKT

SEQ ID NO: 147717 - protein, 74 aa, Oryza sativa
  Clone ID: PAT_MRT4530_48219C.1.pep
FSDFPLLSSPRAASTTPPPHRGFRLRLPPMPQRGRTEGQEWRCGTSHPDSPCYAPTDPRRAQGASRPTWHSRTG

SEQ ID NO: 147718 - protein, 143 aa, Oryza sativa
  unsure (1)..(143): unsure at all Xaa locations
  Clone ID: PAT_MRT4530_4821C.1.pep
MWPALQHLTHLQMLPINTLRTEKGGEPDLIRRTERNRSIFFELVEEALPLMSSGARGKAQLDEARSEVIIAGGEKPKVIARHDERGDGTLAGKEMKXRFVAKGTVGQEDHGTLDAELETMGNIAHDTPHVDCGEDNSGLVPSW

SEQ ID NO: 147719 - protein, 235 aa, Oryza sativa
  unsure (1)..(235): unsure at all Xaa locations
  Clone ID: PAT_MRT4530_48220C.1.pep
MRQKQPGDVPMSAAASEADLAQLSIAITAGEDLGPLVRRVFTCRCPEPLLASLWAAARDRETEIEELCRAHFHDFICAIDNLRSLLADADALKGSLSGSHAVLLSFAALLLASLESFLVARGFAGNLSSALASSRRRVRLLVLANRANAHLQGGNHNLYLALRAVPLTATSPXPLPTLRHMVLSLVPRVPVLDAIRGESAREPLLPLSFCGRAGWRKRWGDGTDMWDGNGDGVGE

SEQ ID NO: 147720 - protein, 74 aa, Oryza sativa
  unsure (1)..(74): unsure at all Xaa locations
  Clone ID: PAT_MRT4530_48221C.1.pep
RCLSGNFVSIIFILLIVRSFXWXAGGGGGAREQGAXKDAPPQAGIGCPTGFCGGRLPGGGEGGEAESIGSPRCV

SEQ ID NO: 147721 - protein, 110 aa, Oryza sativa
  Clone ID: PAT_MRT4530_48222C.1.pep
WQKITVPQILLKWESPPQTVLFVTKPNSNSVHALCAEMVRWLKEHNNINIFVEPRVSKELVTEDSYFNFIQTWDNDEEMKTLHTKVDLIVTLGGDGTVLWVCGPNYMTIY

SEQ ID NO: 147722 - protein, 166 aa, Oryza sativa
  Clone ID: PAT_MRT4530_48223C.1.pep
MAAAAEEKNKKMIKVISSDGEAFEMTEAAASMSRILLHMIEDGCTGDGGAGITLPNVAGSALAKVIEYCTKHAIAAAEGSSSSRKAKEELKKFDVEFMEVGIDMLYDLIMAANFMGVEGLLSLAAQRTAELIKGKSPEQIREMFGIKNDHTPEEEEQIRKEYEWAF

SEQ ID NO: 147723 - protein, 107 aa, Oryza sativa
  Clone ID: PAT_MRT4530_48224C.1.pep
MPRNRYWKAPVKSSTPAKKLEQSAARKPSSAPKPKKVWNEKPKTLAASPPEMSRNSRTKLEGVVSDGGEGADEDGDATANTTAAFPSDGDGWNDGGARLERRRRQRS

SEQ ID NO: 147724 - protein, 97 aa, Oryza sativa
  Clone ID: PAT_MRT4530_48225C.1.pep
MPPWPVVVTGVAHCRRGGGVAEESRRWVVEPSGAKCPIGLLALGLSKVALSCKGVGLGLLDRPTKRDGPPYNTVVLAFSTENPAKAQGEVGPEESHL

SEQ ID NO: 147725 - protein, 76 aa, Oryza sativa
  unsure (1)..(76): unsure at all Xaa locations
  Clone ID: PAT_MRT4530_48226C.1.pep
GLSEPKVNQWVDPRLXGVFPPKVVSKMAPVIALWVQYKADFRPTMSIVVKVLNPFLNSRLNNRPPSFLKGGGRSGF

SEQ ID NO: 147726 - protein, 93 aa, Oryza sativa
  unsure (1)..(93): unsure at all Xaa locations
  Clone ID: PAT_MRT4530_48227C.1.pep
GPKPPPPMATPPASGPAPATRPPQPXSPTSATAPTPRPPXPRPXPPPPPRPQPQPRPRPAVHRGRRGEEAAGLAHPDQARGLPPQGVARPRGR

SEQ ID NO: 147727 - protein, 841 aa, Oryza sativa
  Clone ID: PAT_MRT4530_48228C.1.pep
MSVPVARRLLMISTTRATPPASSSPLLPRPRTIYTFPSRAFPPIASAPLPSSSRRCQRRSRCAASSSEMTVTSSVKVAGGELSVHGRTVLSGVPEAVRASSAAAAGPVDGVFLGGDFAEPASRHVVSLGAMRGVRFMACFRFKLWWMAQRMGEKGGDVPHETQFLLVESKAGVDGGGGDASYLVFLPLVEGAFRASLQGGGAGGDELQLCVESGDAGTRAASFDRALFVGAADSDPFAAIAGAVAAAKSCLKTFRIRAEKKLPGIVDYFGWCTWDAFYQDVTQEGVEAGLRSLTAGGAPPKFVIIDDGWQSVGTDHQNPDDTGADAKDKQPLLARLTGIKENSKFQDGDDPAAGIKTVVRAAKEKYGLKYVYVWHAITGYWGGVRPGVAGMEGYHSNMQFPNVSPGVVENEPGMKTDVLTTQGLGLVHPRAVYRFYDELHAYLAAAGVDGVKVDVQCILETLGAGHGGRVSLTRQFHQALDASIAKNFPENGIIACMSHHTDALYCAKQTAVVRASDDFYPRDPVSHTIHIASVAYNSVFLGEFMLPDWDMFHSLHPAGDYHGSARAISGGPVYVSDAPGKHNFELLKKMVLPDGSVLRAWLPGRPTKDCLFTDPARDGVSLLKIWNMNKFTGVLGVYNCQGAAWSSVEKKNIFHKTGAEALSCGVKGSDVHLIADAATDSEWNGDCAVYRHASADLVVLPNGAALPISLKVLEHDILTVSPIKDLAPGFRFAPIGLVDMFNSGAAVEGLTYHRLDGVKSLSNGSASTLPELQSLSSQAIGLVCMEVRGCGKFGAYSSVRPRKCMLGSAQVEFTYDSSSGLVILDLETMPKERVHKIVVEL

SEQ ID NO: 147728 - protein, 45 aa, Oryza sativa
  unsure (1)..(45): unsure at all Xaa locations
  Clone ID: PAT_MRT4530_48229C.1.pep
PCFCFASLWCFDHLILAVRLLRCTXHESXLCYXLPIILGXIXKVA

SEQ ID NO: 147729 - protein, 595 aa, Oryza sativa
  Clone ID: PAT_MRT4530_4822C.1.pep
MDLDKSTSTTASMKKLQDDGLDSDTVGRRVGQVMISAPSEASDIPIPLCERGPAERTAAINALPLTDVIGPLVDHQAAASLKEGVAKEASDVAAAAAATTSGSNIPKKGSKFSSVLGTHRKAPNPALYEREENLRRTARAKATQGGTDAASSASPAATSTDVVVATKDREAAPSNPIISLMPTRGPSTDDLTWGELQVEMEHILQAGARGVGREIEEARVVASSANQRADQLARDLAEARENLLKMRELVVGNERQRQGLEHRMSELENNLSRIRGSLRISHTGLHQLAGECGVTTTIPANPDEFSLTSSLAELATAMEEITSKHAARIGEETSNRIYTGACHVLACVRLAHPDLDLKKALDQGAADDARKGVVEEVDDLGESVLPLFEEDIDIEDVQQRGQPNMPVVVPALALEPFVPREEADFENTMADRVCRIQYWRTKLEMAKLENTMIEVKKDQAVETLRGREVWFNSYLKSCCTAMARVCKELRVPRRDLEESAAGYISWLNGACAQLEGIGKRIDEALKQECRRSSQYTRGHVLACIRDHRPQQHLEFLHEGFSRSRRTPTEIDGLEQSMAPLTEKVFRSVDWRWPSW

SEQ ID NO: 147730 - protein, 116 aa, Oryza sativa
  Clone ID: PAT_MRT4530_48230C.1.pep
GQTALATVEGKKTGFPEVQSGPSTPGLSVDFCKARHGDLSYGGAPTPRPPLGFSPSQGQSEPQGPHVENPCPGVWRYYLPTSGLFPQATPVRPCLARHPWSISHPAPVSQCPRLFR

SEQ ID NO: 147731 - protein, 93 aa, Oryza sativa
  Clone ID: PAT_MRT4530_48231C.1.pep
STMFKYVLIIKYIALFFVFKFFFDNLLNHNYSNLVRCTKFQLNLSTVNDVTAFRITSLDVRFVHSRCIGSVRRHHFTAVKFNLSLQLYLKTIV

SEQ ID NO: 147732 - protein, 82 aa, Oryza sativa
  unsure (1)..(82): unsure at all Xaa locations
  Clone ID: PAT_MRT4530_48232C.1.pep
DDTGASNLDCKFSHKMNICEVVLVPRPLANCSEIXTQRDRPRVLLTRNAGICHYMWLAIPLGDFKGIPGAHILRSTLAVPPD

SEQ ID NO: 147733 - protein, 117 aa, Oryza sativa
  Clone ID: PAT_MRT4530_48233C.1.pep
GKKKPQQSIIGQQPKWDQQGGREAPKQNIKYPQGGYNPPSKFIGVGDPPPPPGGSAGQKFGRGKKKGTPPQLVRFGPGTKNLFFLGRPSHKRPPRTPRQETTGGTIFQQGGFKWEGQ

SEQ ID NO: 147734 - protein, 459 aa, Oryza sativa
  Clone ID: PAT_MRT4530_48234C.1.pep
MKTMTSEMKPPSSSSSSSLSSRGLPIDVIVEIAERSDPITLLRCAAACRQLRRAISGEGLRRELRLRNAAGFVPVLLRGFYYQPLHGAHGFLQEPVRFFAAGAGAGDHHGQLPAGDDAVESLALGFEPVEARGGFVVARTGRSSGEVCNPMTGYVLPIPLPRKDLVTSYLLLTADDGVGLGPSSDDDSELHRFRLLAVQLCQPTNQGRRLRLKMQALTPVTGRWGPTTKIPVHGVGGDIHQHPGAELLGRHPVVVNGAAYFLVVSHSFDRQRPHPPSHYFILRVDVSDHGGGDGRNGTTKAATIIPAPEGLKPPSCSRCTSSEAAAAVVTSKQLLLTPSRDRRSVALLVCRTTRVEIHTLDMLAAPSAWARATEVVDTAAVRRRPCDLSESEVELHWSGEASGAVVLRLGGTVCQLDRATMAIRTIDEEFPEFRYRSRHMLLPYEMGLSSWVPSISTSA

SEQ ID NO: 147735 - protein, 192 aa, Oryza sativa
  Clone ID: PAT_MRT4530_48235C.1.pep
MASTLAWSSAASSSAPSSRLPPRRSPSLVVVAQGKVKKYRQVILTDDIAEVGKKGDTLKVRAGFYRNFLLPKGKATLLTPEVLKEMQVEQERIDAEKKRVKEEAQQLARVFETIGAFKVPRKGGKGKQIFGRQVFIDVTAQDLVDIIKSQLNRDVDKRLVTVPEIREIGEYIAEIKLHPEVTAQVRLTVYAK

SEQ ID NO: 147736 - protein, 150 aa, Oryza sativa
  Clone ID: PAT_MRT4530_48236C.1.pep
MGSDTEAEKKKTPVALAPIAKPLAGKKLCKRTLKLVRRASEAKCLKRGVKEVVKSIRRGQKGLCIIAGNISPIDVITHVPILCEEANIPYVYVPSKEDLATAGTTKRPTCCVLVLTKPAKGELEEDVKEKLKTDYDQVMSEVAEVTSSMF

SEQ ID NO: 147737 - protein, 258 aa, Oryza sativa
  Clone ID: PAT_MRT4530_48237C.1.pep
MDVAGGGEEVEEVEAVDGGEQQPPMEIGWPTDVRHVAHVTFDRFHGFQGLPVELQPEVAGNAPSASKTVFGVSTESMQCSYDARGNSVPSILLLMQRRLYEQGGLKAEGIFRIAADDAQEQAVREQLNSGVLPEGGVDVHCLAGLIKAWFRELPGGMLDSLPAAEVTRCQSADDCARLCARLPAAKAALLDWAVQLMADVAREERSNKMGSRNVAMVFAPNMTHAMDPFTALKHAVHVMNFLTMLIDRALNDVQTCNN

SEQ ID NO: 147738 - protein, 117 aa, Oryza sativa
  unsure (1)..(117): unsure at all Xaa locations
  Clone ID: PAT_MRT4530_48238C.1.pep
GLRWTGCTATAHGNERPRSTLSKTDGXDRSVHDRLTANGSDDVSDDGSDDVSTGGDLGSSDAHARRRTTARRRERKAPTGRARRRELTGDQNNGGRATDGTGGDSGYAEAALDATAG

SEQ ID NO: 147739 - protein, 90 aa, Oryza sativa
  unsure (1)..(90): unsure at all Xaa locations
  Clone ID: PAT_MRT4530_48239C.1.pep
GSYKPNSPAVRSRSRGEXKARSRSXNCXXXXXVRKXXAEKDPNKPKRPPSAFFVFXEQFXKXFKEXXPNVKXVLVICKACGDKWKSMTYA

SEQ ID NO: 147740 - protein, 234 aa, Oryza sativa
  unsure (1)..(234): unsure at all Xaa locations
  Clone ID: PAT_MRT4530_4823C.1.pep
MAETDPIKVSYVSPPPLVCGVSTTDRKRIVPNQVSYAQAHFAVLQHMAEVTPYFEEHLAKVRQDNIGRSDIWINREHGARFNEWIKDRVAQSTDGPSEILQRLARGPSWDVDTWQGXIWALKYLKFKVPLFRCSWVXKVDKEGFTLVDLAKVGYADEPFVLAKQVEQIFYIKDLANKKMHVVRDGKRRIVGVDNVVDEEEYDQNLHVRPQIDLDDDPEDEVAYVRSDHSEGISL

SEQ ID NO: 147741 - protein, 59 aa, Oryza sativa
  Clone ID: PAT_MRT4530_48240C.1.pep
FLVWGCCSVDGATWFMGHGSWCPPGFPVCIARAGLCLASKFSPLSVKPFRRPLVMFISF

SEQ ID NO: 147742 - protein, 36 aa, Oryza sativa
  Clone ID: PAT_MRT4530_48241C.1.pep
GVGPGVGQGVRPGVGYLRAITKLNVQMIKKWGSFLP

SEQ ID NO: 147743 - protein, 66 aa, Oryza sativa
  Clone ID: PAT_MRT4530_48242C.1.pep
RVWGCFGFPPWRVLPAFRNRHFGSLDYFILGIGEIFPSPYSSSPSPVMGRITYGLSLPVPGFTTAL

SEQ ID NO: 147744 - protein, 68 aa, Oryza sativa
  Clone ID: PAT_MRT4530_48243C.1.pep
QIFFPGGRPLRAKRAPYVVRAAAGPARRPPPPAGRPTVGAAALCSDGAHRFRRSWPVHVQSDRQQWPH

SEQ ID NO: 147745 - protein, 57 aa, Oryza sativa
  Clone ID: PAT_MRT4530_48244C.1.pep
EHVAGVCVVGGCYVFLLISFVTDEIVWSVKKVSTRPHLIQRKFIGILKDFIPIEFLF

SEQ ID NO: 147746 - protein, 75 aa, Oryza sativa
  Clone ID: PAT_MRT4530_48245C.1.pep
HQLGGIFIKSDTPISHLYYRIISFHKSIYNFLILTLTYHILPFYNNHYYFFVLFYKSNLLSQYLHSLSSSSSSST

SEQ ID NO: 147747 - protein, 57 aa, Oryza sativa
  Clone ID: PAT_MRT4530_48246C.1.pep
MEVVDGRAGVDQPPAPVVTMAIVGIELGPIAMDLPPPPPLPMDATVTAATNHLLQIA

SEQ ID NO: 147748 - protein, 145 aa, Oryza sativa
  Clone ID: PAT_MRT4530_48247C.1.pep
MRRFSAMALAFAVVVMSSCVADGVRTIPAGVQGSAGGLHNGGTAPSAAAANGSTTTAYDDRGTGGQTATFQVQQGAQPEEETTTEMGNAAEAATGSRLPDCTHACGPCSPCRRVMVSLRCAEAAESCPVAYRCMCRGRFFRVPTL

SEQ ID NO: 147749 - protein, 175 aa, Oryza sativa
  Clone ID: PAT_MRT4530_48248C.1.pep
ENGVGVRVSGTASIPITKPLLDCRGKKRALLPHTMAMGTGEPTGKAKGRRWWRNWTVTGRGEAAATRGRRQPLTDGMEMVETKPPSRRPRPSTAKPKKTQEHTGQGRRRCHRRRWMDRRRKRVNCVQIEKLGDESTDGEKNGGPLESSRGSLGRHAQGQRCLQPQSNGVDSMQGL

SEQ ID NO: 147750 - protein, 165 aa, Oryza sativa
  Clone ID: PAT_MRT4530_48249C.1.pep
MAEENKSGSGDLMASGKVVAEATMSVFQQKSVEGVDKKEVAGAAADLLHSASTYGKLDDKPVGQYIDKAEGYLKDFSSGSGGAAPPPPAAGDAAAPKPAAEEPPKEPAPAEKEEGKPPSSSEGFGLDDVMKGAESLMEKKGGGEESAGSGGAAGGLFKMAQGFMK

SEQ ID NO: 147751 - protein, 401 aa, Oryza sativa
  Clone ID: PAT_MRT4530_4824C.1.pep
MARPAPLLLLLAAVCLVAAASAGGADAAERKATTVGVYELRKGDFSIRVTNWGAVIMSVVLPDSRGKLDDVVLGYDTIAEYVNSSTYFGALVGRVANRIAKARFVLDGKAYHLYPNDGKNTLHGILEKFPEVQEIHGAWFISTNSGHRGFSNVTWTVKEHVGGGDAPYITLYYHSFDGEQGFPGALDVYVTYQLSGPYVLSVHMNATAAGKATPVNLAQHSYWNLGGTGSGDIRGNTVQLFASRYTPVDAELIPTGQVAPVTGTPYDLRAPTPVGARVHLVTGGLSKTGATIYGFDTNYAVDGGDDVDAHAHALRRVAVVRDGKSGRSLELWANQPGVQFYTGNFLTADVKGKGGKAYGQYGALCLETQGFPDAVNHPNFPSVIVRPGQVYKHEMVYKFSF

SEQ ID NO: 147752 - protein, 88 aa, Oryza sativa
  Clone ID: PAT_MRT4530_48250C.1.pep
MAEREVRTEAAVAMVAPPAHLLTPLLHLLVAGATCNGGAGENGQLGGALFGDPMEVMQLIPMKTVSKLFPESFKVLHEDCHDGDKALG

SEQ ID NO: 147753 - protein, 40 aa, Oryza sativa
  Clone ID: PAT_MRT4530_48251C.1.pep
GAVNDGPGQLRLPRRSLTQGPLHIRFHPWSRHESIEEEPS

SEQ ID NO: 147754 - protein, 88 aa, Oryza sativa
  Clone ID: PAT_MRT4530_48252C.1.pep
MMSGVGGGRSGGRDAEGEWEVRPGGMLVQRRDGDTGPAVRLRVSHGASFRDVAVPAHSTFGELKGVLTQATGVEPERQRLFFRGKEKS

SEQ ID NO: 147755 - protein, 225 aa, Oryza sativa
  Clone ID: PAT_MRT4530_48253C.1.pep
MARSGSAAAVEAQDTVGGCDDEVACDGGGASNRWRPPPTRIRWRDGGGGRPPHGSGGGAATPLRGSCGIWPWWEDVVITHDPVTVTGAGGGSGHGDGDKDDGDGDDDGKAVTATRRSTSPLTLAAAACVALAGPALVALAAAAAAAFVALAGRTLVTLAAAALVALATAAACVVLAGPALVAYVALTGRALSRSTPPPPLALCSRCLTRSANVSSLPGRMMPKKW

SEQ ID NO: 147756 - protein, 109 aa, Oryza sativa
  Clone ID: PAT_MRT4530_48254C.1.pep
WGRPMWILAASTAVSFCPHLPLPRSRVVHLRRASCGAKPEMMPDADDTRAWLPSLIVRAGNARRLVLHYRRACSLLRHIRGWRIHPLVHYMTPCLRRRRRGVLAVACGS

SEQ ID NO: 147757 - protein, 78 aa, Oryza sativa
  Clone ID: PAT_MRT4530_48255C.1.pep
KSQPPGWSGLEPTKPIRPKLGLPWFKGQKILNQNLPRGNSFGFSAAPPYFSLFRTDLAKLETSGWEWHHPFNKLGGLF

SEQ ID NO: 147758 - protein, 106 aa, Oryza sativa
  Clone ID: PAT_MRT4530_48256C.1.pep
MEGQAADGGTWGLLYRTALATVFLEGHIFLFISVIGLRSKFAKFIPKLIRISSSTGIGLFLAFIGLQSSEGVGLVGFSSSTLITLGACPASQRASVAPVVTFPIVN

SEQ ID NO: 147759 - protein, 89 aa, Oryza sativa
  unsure (1)..(89): unsure at all Xaa locations
  Clone ID: PAT_MRT4530_48257C.1.pep
SMAGFSLNDPGTADKYLTVMALLVQIFSTMKYIGASSKPSAFFIQHGLGPAQDISXQIHGGLFRDSHTARPNSNHVGHHCVGVMSYCLY

SEQ ID NO: 147760 - protein, 185 aa, Oryza sativa
  Clone ID: PAT_MRT4530_48258C.1.pep
ATEAYRTTKYQSATHEILTDAQIAEMQAKGQGEKFEITGLSDNKSHQGRRELIAQAISDSSSKAQPQEQPQEQGLGADGRWHFQNPRVKPGQDIAGAIKEWIWNDAKNLPGEVAQAVSEMPGNLAKNAVNGAWNAAVGVSEVVNRNFATNTIPEGAAMDYISGIVKNPEKYDPYYREISPIACID

SEQ ID NO: 147761 - protein, 69 aa, Oryza sativa
  Clone ID: PAT_MRT4530_48259C.1.pep
KPQTDSCLCLCLPPWPPPASIQEYSHRMVYDEMDPMDQIYDNLTSGALWYFSISHFGTPKWPSRDRAHS

SEQ ID NO: 147762 - protein, 95 aa, Oryza sativa
  Clone ID: PAT_MRT4530_4825C.1.pep
MRVARAIGWADVADALREHLQVSCISIGLLLVAAACPHMAALNFAKRLQATAIAIALPLVGDWKYAWCLHLQGKMKPPLVQRNFMGILEEMTRFL

SEQ ID NO: 147763 - protein, 135 aa, Oryza sativa
  Clone ID: PAT_MRT4530_48260C.1.pep
IWYRHTDGGQNFPLFPLKKSPFLARREPRVSFRQIGDETSKNNYYGRILTKHCTRPKFSLPTAKGHRFSYTKLPCPISLWPLGSLLALFLLPVFCLRSLSRERPGGALPFELLGHLYDTGHALGGRRFGVRPGVK

SEQ ID NO: 147764 - protein, 54 aa, Oryza sativa
  Clone ID: PAT_MRT4530_48261C.1.pep
FSLARPSHIPTCFLSRRPGGASRIQAARQSLVVDISSRPACIMTRAAIPLPARA

SEQ ID NO: 147765 - protein, 143 aa, Oryza sativa
  unsure (1)..(143): unsure at all Xaa locations
  Clone ID: PAT_MRT4530_48262C.1.pep
GGGLVGIGGGGGFPPKFLGGGFLSLGNFLKRGIGNWVFPGRGKKLPPGGRGGKFGFFIFGGKFKGGEKFPPIPFKKPKGGKGNFGGFFFGKKKXKKXKKKKKEKKKKKKKKKKKKKKKKKKKKKKTRGGARYPIRPIVSRITI

SEQ ID NO: 147766 - protein, 198 aa, Oryza sativa
  unsure (1)..(198): unsure at all Xaa locations
  Clone ID: PAT_MRT4530_48263C.1.pep
NTFLNMGCXIVNNGEQTIFWKDKWIDNVASKDKYPFLYAIVRRKNSSIANVMRSVPLNVSFRRTLVGXNLANWHSLCVSIVHIQLNQLSDYFRWNYHQNGXFIVWAMYLALINNSYIERNKIIWKLRMPLKIKIFMWYLLKGVVLTKYNLATRNWNGSLRYCFYMTSFVECHYFFSAKEAQSTLGASAAFFKSITRSR

SEQ ID NO: 147767 - protein, 245 aa, Oryza sativa
  Clone ID: PAT_MRT4530_48264C.1.pep
MKAAASPLRAALLLFLSSSPSPRLALPMNPSSSSSSRGAASYHSKAAAFASPQPRGGGGGRGGRRGGGRGRGGDGSDRIDALGRLLTRILRHMASELNLEMRTDGYVRVRDLLKLNLQTFAKIPLKSHTVDEIKEAVRRDNKQRFGLLEEDGELLIRANQGHTVTTVTSESLLKPILSADEVSGMRQSVNILIYLDVSMALQDGMKLYISDNKVILTEGFDGVVPVKYFEKIETWPGRAPIPFEK

SEQ ID NO: 147768 - protein, 362 aa, Oryza sativa
  Clone ID: PAT_MRT4530_48265C.1.pep
MSRSGAMDLASGLGGKITKDEVKSAVDEYEKYHGYYGGKEEARKSNYTDMVNKYYDLATSFYEYGWGESFHFAHRWNGESLRESIKRHEHFLALQLGVKPGMKVLDVGCGIGGPLREIAKFSLASVTGLNNNEYQITRGKELNRVAGVSGTCDFVKADFMKMPFSDNTFDAVYAIEATCHAPDPVGCYKEIYRVLKPGQCFAVYEWCITDHYEPNNATHKRIKDEIELGNGLPDIRSTQQCLQAAKDAGFEVIWDKDLAEDSPVPWYLPLDPSRFSLSSFRLTTVGRAITRTMVKALEYVGLAPQGSERVSNFLEKAAEGLVEGGKDKARSLKETLWRSKKHLMKLRSLKSSYAYEEMLKCV

SEQ ID NO: 147769 - protein, 345 aa, Oryza sativa
  unsure (1)..(345): unsure at all Xaa locations
  Clone ID: PAT_MRT4530_48266C.1.pep
MSRSGAMDLASGLGGKITKDEVKSAVDEYEKYHGYYGGKEEARKSNYTDMVNKYYDLATSFYEYGWGESFHFAHRWNGESLRESIKRHEHFLALQLGVKPGMKVLDVGCGIGGPLREIAKFSLASVTGLNNNEYQITRGKELNRVAGVSGTCDFVKADFMKMPFSDNTFDAVYAIEATCHAPDPVGCYKEIYRVLKPGQCFAVYEWCITDHYEPNNATHKRIKDEIELGNGLPDIRSTQQCLQAAKDAGFEVIWDKDLAEDSPVPWYLPLDPSRFSLSSFRLTTVGRAITRTMVKALEYXVGLAPQGSERVSNFLEKAAEGLVEGGKKEIFTPMYFFLVRKPISE

SEQ ID NO: 147770 - protein, 291 aa, Oryza sativa
  Clone ID: PAT_MRT4530_48267C.1.pep
TVQLDITAFLKTVKKNKHKFYPAFIHILARLMNAHPEFRMAMKDGELVIWDSVHPCYTVFHEQTETFSSLWSEYHDDFRQFLHIYSQDVACYGENLAYFPKGFIENMFFVSANPWVSFTSFDLNVANMDNFFAPVFTMGKYYTQGDKVLMPLAIQKFDDKLSNMRIGRRPGRPQGVRVGRFINAAGTTGFPTGKRAEDKLRGKPGYEHLSDPLHILIEAEFPASIIDARLRHAQEVIEELLKPVDESQDFYKRQQLRELAMLNSTLREDSPHPGSVSPFSNGGMKRAKTGQ

SEQ ID NO: 147771 - protein, 212 aa, Oryza sativa
  Clone ID: PAT_MRT4530_48268C.1.pep
MAVAGGAARDDAPSRGGRRRRRAAWACSSGGDATPEEGERGSGGAAAAAAIGVGSESASFPSLLASGHPPPLTAQADANLVLADPNLHPDAAAIIGAQVELECGAIALRSGIFDSRVNTQCQGPDTSVKDAFLTAATTALHPNPDAKVNLLTLCKAMMGSEALPMMQGGKQLFSDNIHRLVMLLSPGSSPRAHEDPPLPPLSLTGWSLGELS

SEQ ID NO: 147772 - protein, 457 aa, Oryza sativa
  Clone ID: PAT_MRT4530_48269C.1.pep
MSYRNGDIRMKSSHLHGINPTSTPPSRPHTNTSPAIDGVGGGDVIDTKTTQQHHHHHRRWMAARYGQRRGAMDGGGGSVLAVVGGGGGGEAGGDGGVVHAVVEALRLHHPCAQLPRLLLRQHAEPLPAAATLLRRRHRIRPRLLPRRRLRVDVVGLPRPPQQRRPPLPAASASASATAPVAAEPRRAGGRRGRRDARPRRRRRRPHRESRPRCNRHWICFSSNNKSNQEYPPKLLRFDSIRFGFLPPNFEVDRRGCGLEELARRRHRPSTTRTDISVPGAHAGREPVQRTRATGLPLLSSPPARRESNLPCPLARSRSSLAVAANGIVHFCSRAPGRWLTDRSARTGRFHVRDRFRPRRAVHMYACLARPCRRRRGTCGIIRSAKGGSIDGLEGEAQGAMSLSRIDKITATNSRAAAWQVATQREATLSSKLGADLERPSHTRTEADRCTAHDLGPV

SEQ ID NO: 147773 - protein, 266 aa, Oryza sativa
  Clone ID: PAT_MRT4530_4826C.1.pep
MGILKSYVRNRAKPEGSIIEGYTTEEVIQFCIDYMAETDPIRVLASRHEGRLAAAPSVPRSCSPCFTQHVYLSMNPPVERDAHSTRPLFCQAYSAIAPASYRTHSSLRASDQCNDGPQDLASKGEEHLAKVRQDNIGRSNIWINREHGARFNKWFKDHVARSTDGPSEILQRLAWGPSWDVNTWQGWVNICTGVKVDMEGFTLVDLDNVGYADEPFVLAKQVEHIFYIKDPANKKMHVVRDGKRRIVGVDNVVDEEEYNKNLHVRP

SEQ ID NO: 147774 - protein, 139 aa, Oryza sativa
  unsure (1)..(139): unsure at all Xaa locations
  Clone ID: PAT_MRT4530_48270C.1.pep
TTWAVSGGGCPLARREGKLADSEPTPIAAAAAAPPDPRSPSSGVASPPLLHAQAARRRRRPPREGASXAPRRRRRPLSHRRPCPADFPPCPVLLPPPSSRRPSLPPYRRLPEMPGERRKKKKPPPSQRSLRAARRPSAE

SEQ ID NO: 147775 - protein, 78 aa, Oryza sativa
  Clone ID: PAT_MRT4530_48271C.1.pep
MATPEVLLLRILDMGLLLGDDSGCGEETGLAITHTQSMDWPDLAEVIIITSSIAIDYTMEDRMAVAMEKAFLSPDQAP

SEQ ID NO: 147776 - protein, 162 aa, Oryza sativa
  Clone ID: PAT_MRT4530_48272C.1.pep
QHFSSILCRKYARDCSINASTSTTTSYAATTESSLLSSTVTAAPSSSISTTSTAASSSLSATVTVAPSSSISATAMAASNSLSVTATAAPLGSILGTATTIAIASSRTARTMRTSLSVTSTAAPWNSISATAIASSRTVTTASTSLPATSTATSWSLLSINP

SEQ ID NO: 147777 - protein, 81 aa, Oryza sativa
  Clone ID: PAT_MRT4530_48273C.1.pep
GTCRGARRPGRRRLPAKGFYTRNAFLTADGGYPSFGRTGSVDASKREIDVFFAHVNHETIKFYYIEKLDGPRKNFLTVTRT

SEQ ID NO: 147778 - protein, 69 aa, Oryza sativa
  Clone ID: PAT_MRT4530_48274C.1.pep
DGWAPSPALSIVQAIVQQLQLQQFSGVSFGQTQAQAPTLLPFPLPPICGISPNYYRAPRSIPPPPPPGI

SEQ ID NO: 147779 - protein, 110 aa, Oryza sativa
  unsure (1)..(110): unsure at all Xaa locations
  Clone ID: PAT_MRT4530_48275C.1.pep
LVPQSFSVAVRAVRAVFAWVSFRPXASAVVGQCAGRASILRALSVAVVAGVYRLSREGSWQVSFSRGDQVAVFAPRRGPHRYAGWRFVGWFSLCVGVVLYWVMCREVAFE

SEQ ID NO: 147780 - protein, 62 aa, Oryza sativa
  Clone ID: PAT_MRT4530_48276C.1.pep
MELIKSAITGDLTSRLISFLVNKFSDHTCSEEKMVVTAMYSGYRVLDTIKYMKNKEDTGDLH

SEQ ID NO: 147781 - protein, 82 aa, Oryza sativa
  Clone ID: PAT_MRT4530_48277C.1.pep
WQIVIIIPYWKSTVPEIKRDRWPPGWDFMIPIFLLSPPGGHNLPWASLCEPLYTCLWPLLRKHRRQFNFPWNKTGVLLFCTN

SEQ ID NO: 147782 - protein, 99 aa, Oryza sativa
  Clone ID: PAT_MRT4530_48278C.1.pep
MVAAKEDDDNQWRWSARWRTTRMRTSGRMVAVPGVVRQSFVVTYMYQDSGKASSTPIARPLVMTTKARLTMVSQWSVIQGRRPFVLSTSHHGPKRVVEG

SEQ ID NO: 147783 - protein, 166 aa, Oryza sativa
  Clone ID: PAT_MRT4530_48279C.1.pep
WARLAKPCTHSPPWLTSARGGAAPTSGAHRSAARGERGEGRWYTGPLGSGSRGGARLASGPHGSGSTSRCTGQARHQAGRAAMARRRRGHATASDGERRRGRRAAARAAARAAGGGASGDDRKRRRGREEGGGARGKKKKERKGRETSPEGRQWPAEKNEGGGEDR

SEQ ID NO: 147784 - protein, 70 aa, Oryza sativa
  Clone ID: PAT_MRT4530_4827C.1.pep
CTRGRTRGWELRLGPPVRRPDTFPASSRTRLAESSPPRSSTCPATPRRSQPPSAPSSTSPGATLPPWAAL

SEQ ID NO: 147785 - protein, 37 aa, Oryza sativa
  Clone ID: PAT_MRT4530_48280C.1.pep
GLDGPGCRPEPAPPGCTQSEGEARLALIRPRIVRGTP

SEQ ID NO: 147786 - protein, 92 aa, Oryza sativa
  Clone ID: PAT_MRT4530_48281C.1.pep
MLPGLALSSRYEALLDALGELWNEIKSSSSFNNSMTREKCLAKSLLDKEMKKNGRTPMRTFKWYQGLNGGSRQGSARLSDDDKLEGEGGGSF

SEQ ID NO: 147787 - protein, 42 aa, Oryza sativa
  Clone ID: PAT_MRT4530_48282C.1.pep
IDKAGTPACAGMLYSGRPTRSFFRGGYSGLHRGDGATACSIT

SEQ ID NO: 147788 - protein, 87 aa, Oryza sativa
  Clone ID: PAT_MRT4530_48283C.1.pep
SIINSLAISMLGCFSLASSARENSITISMLRICVFDRRSSYVLHWRYSYSLLKLSIGVFGRSCVWLKIFNNIVSKWLSSHVRHKNSF

SEQ ID NO: 147789 - protein, 50 aa, Oryza sativa
  Clone ID: PAT_MRT4530_48284C.1.pep
GGEKKGNRGAKTGWAYRIQEVFYSNRGIHRTVLKRAKLGPYGKEAPKGEN

SEQ ID NO: 147790 - protein, 49 aa, Oryza sativa
  Clone ID: PAT_MRT4530_48285C.1.pep
HINLYLHRINVVEHRRKDDRILQFSMDRNGIRWPFRTLHPDRRTPTQRT

SEQ ID NO: 147791 - protein, 41 aa, Oryza sativa
  Clone ID: PAT_MRT4530_48286C.1.pep
FKGRRRIVGDRAGTIRRCALHHTKLTLILPYQNDPSQPGST

SEQ ID NO: 147792 - protein, 62 aa, Oryza sativa
  Clone ID: PAT_MRT4530_48287C.1.pep
RINDRPHDKKRTTEMKSGSTERKLERASRSCASVHFSTTAVFIFLFFMFDYLHLLFLLHYFF

SEQ ID NO: 147793 - protein, 147 aa, Oryza sativa
  Clone ID: PAT_MRT4530_48288C.1.pep
TVAHLPLLTVLPPLPSLCPFPPPLPSPPSLPLPDPTRGGRVAAARRGWEAALPLSHPNGSGLDTSKVAARTRGDDGSPGRSKGGGAGTRWWWRGGGSLRHSAARSTFVAAAAPLPPDPIGGCSVGGGGPPSQIWSERAAAGQLPPSF

SEQ ID NO: 147794 - protein, 48 aa, Oryza sativa
  Clone ID: PAT_MRT4530_48289C.1.pep
CSVKVIAHHRGRVGLYWAGSFYTHEIHNLLLVASIRGDHNAVVIGRQW

SEQ ID NO: 147795 - protein, 561 aa, Oryza sativa
  Clone ID: PAT_MRT4530_4828C.1.pep
MDLGGAIACHTAIPALPRPRGHLVWGHAKLHLSYMGHRRWLPLRHAFKRKKKIFNGKKELGSAPENLSGDQVHNMEMNICSELQPVTDEKTGRVYLPPACHTLSKDEKIAMLSCLVDIKVPSGYCARISKYVKLEDLKLVAMESHDCHVIITQILPVAIRGILPPQVRRTIQQLCAFFNAIGQKIIDPEDLDGLQADIVNTLCHLEMYFPLAFFDIMVHLTVHLVKQTKICRPTLIREMWPFERYMGILKSYVRNRAKPEGSNIEGYTTEEAIEFCIDYMAETNPIGVPASRHEGRFAGVGTTVRKRIVPDQAYYAQAHFAVLQHMAEVTPYFKEHLAKVRWDNIGQSDIWINREHGARFNEWFKDRVARSTDGLSEILQRLARGPSWDVDTWQGYDINGYTFYTVTQDEKSTVQNSGVRIDAYQHQVGSSTYYGRIEQIWKLNYLNFKVPLFRCSWVNIRTGVKVDKEGFTLVDQAKVGYVDEPFVLAKQVEHIFYIKDPANKKMHVVRDGKRRIVGVDNVVDKEEYNKNLHVRPQIDLDDDPEDEVAYVRSDHSEGISL

SEQ ID NO: 147796 - protein, 141 aa, Oryza sativa
  Clone ID: PAT_MRT4530_48290C.1.pep
MALPLYFMSVLELPTWAINEIEKKCRDGGSVQYRSPILFSIVKLSGIMVAAALRDNSWIEDVRGGLTSCPLGKIIWKSRTPARCKFFTFLSACPFSQQVWVQVQARLSLSCSPPSSDFASWWLAAQQSVAKIDCKTFDTGG

SEQ ID NO: 147797 - protein, 183 aa, Oryza sativa
  Clone ID: PAT_MRT4530_48291C.1.pep
MNLAPSLPLYFMSVLELPAWAINEIEKKCRDGGSVQYRFPILFSFVKLSDITVAAALCDNSWIADIRGGLSVQAMGEYLALWDVIAGISLDPGSTDSMIWKAAPNGDFSVQSAYSILSAGRTSCPLGKIIWKSRAPVRCKFFMFLAARLSLSCSPPSSDFAGWWLAARQTVAKIDRKTFDAGG

SEQ ID NO: 147798 - protein, 1150 aa, Oryza sativa
  Clone ID: PAT_MRT4530_48292C.1.pep
MGDKKNGNVNRRLINKFRQTIDVLELREVYLFGRRYTWSSEQEQPTLTKIDKVLINGEWEEFFQDAHLQALSSSASDHCPLLLTCDNMMHRPRKFKFESFWTKLDGFEEVVRQAWAAAPSGSNSVSSLHLKLKSTAASLRSWGARRISELRQQLAVAHEIILQLDKAQDDRLLSAEERSLRATLKGRCLALASLERIRLRQRARLLFLKHSGTTAQFFRLKINARRRKKAIPTLCHDGVYATTEEDKLQAAYNYFLNILGTPCPPSASVNFGLIGLAAHDLSELEGDIIKDEVKKAIMASPSDKAPGPDGFSATFFKVCWGIIKGDLVAALNLAWRANSQHLHLVNTASIILLPKKEDPNQLTDFRPISLIHSFAKILTKILALRLAPRMDELIGPAQSAFIRRRRIQENFLYVQGVVKKLHRSKTPAMLLKIDIAKAFDTVSWEFLLELLRHLGFGARWRDCVSALLFTSSTTVTINDDAIIFFHPSRRDALTIHFILKLMGDATGLVSNLAKSSLTPIHCTVVQIEEVTEVLTCPIKQLPIVYLGLPLSVSKPTKVQIQPMMDRLAKNLAGWKPKLLSPDARLALIKHVLMALPLYFMSVLELPAWAINEIEKKCRGFLWKGDEDAAGSCSLVAWEKLCLFVEQGGLGIRNLRLMGIALRTRWIWLRRAEPEHPWTRVAPLADRKSLHCFAAGSKVLLGNGASTSFWCDNWLPDGGSVQYRFPILFSFVKLSDITVAAALCDNSWIADIRGGLSVQAMGEYLALWDVIAGISLDPGSTDSMIWKAAPNGDFSVRSAYSILSAGRTSCPLGKIIWKSRAPARCKFFMFLAVRNTCLTADNLQRRGWKLAPICHLCSKDGESYQHIFQACTFSQQVWVQVQARLSLSCSPPSSDFAGWWLAARQTVAKIDRKTFDAGVILVTWLIWKERNARVFEGNNLVGHAAIEANGNYKILQRVRCCGAEKKIKEAYNWVQDNRYKFRTEVYGPVFLEVNIQDKAHASYLEGHVPNYIWKMQEVGIYSRLDQVFEAPPAVKDVLISRANFDHSLTGADLDVVRKRIMLVSIYKKKVTESSKIKFVDQVAKFDQRFQVVLKFKDLLIRAVVLKRSCTQENMASIELDTSNLPARAVIGNQEEFTDIVGFDSRLWFDIL

SEQ ID NO: 147799 - protein, 212 aa, Oryza sativa
  Clone ID: PAT_MRT4530_48293C.1.pep
MSPTAGISLDSRSTDSMIWKAAPNGDFSVRSAYSILSAGRTSCPLGKIIWKSHAPARCKFFMFLAVRNAYLTADNLQRRGWKLAPICHLCSKDGESCQHIFQACTFSQQVWVQVQARLTLYCSPPSSDFAGWWLAARQTVAKIDRKTFDAGVILVTWLIWKERNARVFEGTASSVTQLCATMCDEWETWKSAGLVTSLNVAAVPALERLQIL

SEQ ID NO: 147800 - protein, 181 aa, Oryza sativa
  unsure (1)..(181): unsure at all Xaa locations
  Clone ID: PAT_MRT4530_48294C.1.pep
MDKKVTHKEQTMAREEGGITPSLLVFLTIKDKSASAQNTAVALHLRVTPKGYRIXGRITRTGFRAVTTCRLPLTNPWDTQQTXRSFSEPGAKCTDSSGTPPDFLLGSYTRRGRSRMSAKLPSTPLELPLTLYLIPMYKRYNRAYCNSAQSCVSXSEKETSLYRLQMTVTGMGIVQNTLQPP

SEQ ID NO: 147801 - protein, 669 aa, Oryza sativa
  Clone ID: PAT_MRT4530_48295C.1.pep
MSAAAAIASPIPAAIAVVQQQRRGRSRGGGSGAAAVRCSAVAPTSAIAPILADLRLRCAAPLPVLRRVADAMASGMRAGLADDGAGELKMIPSHVYSLPTGNETGLFYALDLGGTNFRVLRVQLGGKDKRIIDTEFEQVSIPREIMHGITEDLFDFIASGLSRFVATEGDKFHLPQGRKRELGFTFSFPVNQTSIDSGILIKWTKGFAVSGTAGKDVVACLNAAMERQGLDMRVSALVNDTVGTLAGARYWDDDVMVAVILGTGTNACYIQRTEAIPKLQHLKLETGNTIINTEWGAFSDGLPLTEFDREMDDESINPGEQIFEKTISGMYLGEIVRRVLVKMAEVSDLFGHSFPKKLAEPFVLRTPHLCAMQQDTSDNLGEVESILSDVIGVSQASLLARRVTVEVSDCIIRRGGRLAGAGIVGILEKMENDSRGHIFGRRTVVAMDGGLYEKYPQYRRYMKEAVAELLGPERSNRIAIEHTKDGSGIGAALLAAANSKYAAAQISTSRSSQQTVGQQATNWQNPRTAASRRGSIEPGPAPKPAARRGKPRRSAGRTLHPQSKGIADRKEREELASCWRARFPNNLAERAGCSADRNDRVGRSHREVSTSWVKRNPGDHVLERKVFPQCLDRQAAPNIFNPGVVAEGGSHRDATQLDDGEKNWGSVLH

SEQ ID NO: 147802 - protein, 126 aa, Oryza sativa
  Clone ID: PAT_MRT4530_48296C.1.pep
MLSEAAPHGTVLHPSPTTPPLAQSTQQIADVVGKGGENEHNVGANLAVESNMIPMTLLQLAGHLPCVIPNPMATSVMLGTRGYYKGPSPSFNGKENILYRQLILILSSDVRSHARLTIAWTLPITP

SEQ ID NO: 147803 - protein, 308 aa, Oryza sativa
  Clone ID: PAT_MRT4530_48297C.1.pep
MEAGVGLALQSRAAGFGGSDRRRSALYGGEGRARIGSLRVAEPAVAKAAVWARGSKPVAPLRAKKSSGGHETLHNSVDEALLLKRKSEEVLFYLNGRCIYLVGMMGSGKSTVGKIMSEVLGYSFFDSDKLVEQAVGMPSVAQIFKVHSEAFFRDNESSVLRDLSSMKRLVVATGGGAVIRPVNWKYMKKGLSVWLDVPLDALARRIAKVGTASRPLLDQPSGDPYTMAFSKLSMLAEQRGDAYANADVRVSLEEIASKQGHDDVSKLTPTDIAIESFHKIENFVIEHTVDNPVGDSQADSRAQRIQTL

SEQ ID NO: 147804 - protein, 53 aa, Oryza sativa
  unsure (1)..(53): unsure at all Xaa locations
  Clone ID: PAT_MRT4530_48298C.1.pep
GLRRMTYMRXQGQGAYCKLCFXPGTQAHKXWEFGKPSKVNXLQIPXSGLGDRX

SEQ ID NO: 147805 - protein, 285 aa, Oryza sativa
  unsure (1)..(285): unsure at all Xaa locations
  Clone ID: PAT_MRT4530_48299C.1.pep
GRARRGPSGRGVREERGGWVRVDRIHRAGSRDGPTSQRLGARGKGSCGAGCXGFADAAHGAARGWTKRWRAHVQPKGSPWTARTEERAVGAADXVLDLVAADVAPTWRLRGSHAGRREEEEGGRPRRTADGGXLHREHNPTIREGGSTPERRYRRKXEFISRVGLGGATPRKAGDEQLLPSLGGDGGEPTASSCGGWGGASLLLEGYSHYCPELRRGEGARRENGXMHYRAETGAVSSGRRRGSELSGLGPGKGKEXSAWSPASAPRAHAGFTSTRDGGGRRGRR

SEQ ID NO: 147806 - protein, 2068 aa, Oryza sativa
  unsure (1)..(2068): unsure at all Xaa locations
  Clone ID: PAT_MRT4530_4829C.1.pep
ESIDGRSPTRTRLGRYYIVRGPISPSPTWRSTVPRYKRDPXGRTKGIESHRQHIHHSLRNPRSNVPQYPLYPVYRYPPSTVARLVGGLGAQGSTTMPSSLVDDSVNPGINQGVLASTMLVWTQVGEIVFPVYTTVSISTGPSTTGSKNDVVTTPDGSMSKDPPAKVENGTSTTSEPEKDPNAAKFGPSDENHEPTMTASEATRSWCPIHXTRKHTLQACWVFLDVQAEIRACKERGIQHTSPTHDVYCPIHKTKNHDFSSCKVLLSAMRTPPPKVQQSQISSRDTDKERGATAISDRFVGVIDINPHEPSVLHLLEDQASSSTSTPRDVYAIDGTSTSRGGNTEAENQVETPAQHIRTINAILRETPYDPVLNADLDHWTERQRESVANLCNAFEEAAARLQPEQSPTGGANGEQPAQXNATSSSPPLRGASDLRDHLNGCRETRRGQDNENRSRRRVSSRHHQDRDNRHNRRKYDNREQRVPGDTGRGHRRNEDNDRDQRRNNNGGWRQGSQEPERTPELSDSSSSSSSSSSSSSTDRHPRRTYDRRQPTAPGGECRAFSRALRDVRWPERFRSGAIEKYDGSTDPEEFLQVYSTVLYAAGADNNTLANYLPVALKGFARSWLVHLPPYSISSWADLWQQFIANFQGTYKRHAIEDDLHTLTQNPGESLRDYVQRFNKCKNTIPEITDASVIRAFKTGVRDRYTTRELATRRITTARKLFEIVDRCAYADDALRRKNDKPKIGGEKKPAKDAPESSKKKSHRSRKRKAQTEVLTAEYADPPKHPDPQGNDTKKIWCPLHKSDKHSLETCFVFKKALAKXLALEKGKRVCVVEKATEAATQDSDSAYPDSDLHVSHIFXVPRRRYPIVVEPTIWNIKVARVLVDSGSSINLLFASALDAMGISRSDLTPTDQPFHGISPQSSSKPLGKITLPVTFGQANNFRTKQITFDVAEFDTAYNVIIGRTALAKFMAASHYAYQVLKMPGPKLAVQCGKRSLDMVEHTPNPPTTVEPPKIVSKTNKTPKPDGAINIVPLSSANPDKTELTLITFLRDNADVFAWQPSDMPGVPREVIEHKLMVRPDAKPVKQKLRRLALDQKQAIREELDKLLKAGFIREILHPEWLANSVMVRKANGKWRTMCVDITDLNMACPKDHFPLPRIDQLVDSTAGCELLSFLDAYPGYHQISMAKDDEEKTSFITPFGVFCYVKMLFGLITAGNTFQRTVQGALNDQLGNNVEAYIDDIVIKTKTNNSLIDDLRETFDNLRRYCIMLNPDKCTFRVPSGKLLGFLVSGRGIEANPKKIKAIENMKSPTRLKEVQKLTGCMAALSKFFARMGEQGQPFFALLKKXDKFVWIQEAKDVFIALKXYLSNPPVLVGPQPNEELFLYIAATPYSVSTVIVVERDKVQRAVYYVSEALHDAKTRYPQIQKLLYAVIMTSRKLCHYFQAHRVTVVSSFPLGEVVRNKDVVGRIAKWVVELSQFDVHFVSRTAIKSQVLADFVADWTMPDNRADSQADNDTWTMVFDSTLNSQGAGTGFILTSPSGDQFKHAIHLNFRATNNTAEYEGLLVEIRAAAALGVKLLIMKGDSEXVANQVHKDYKCSSPELSKYLAKVRKLEKRFDGIEVRHVYRKDNIEPDDLARRASRREPLEPNTFLDVLTKPSVKEVNDEDSTVIPDISSGATEAERTVADIETTNDXWTPLVKFLSSDELPEDDAEAKKITRQAKIYCMIGNDLYKKAPIGVLLKRISSNDGIHEGIYGSHAAGQTLVRKAFRQGFFWRTALKDACDMQTHKATSASAPDYPSYLAVLMLGARHTRTIPTRTGRLQVPIXVAIDKFTKWIEATPMGEIKADNAIKFIKGIFCRYGLPHRIITDNGSXFISADFQDYCIGLGVKICFASVSHPQSNGXVERANDIVLQGIKTLLWVVRTTPTTSNKETPFFLVYGSEAMLPTELQHXSTRVQKYSDEXRRNNEAXDVNLLEEHRERVAVRPVSYHXALHRYQEKPIRARTLSIGDYVLRRVQSQAGCNKLSPKWEGPYTITQVLRPGAFKIADGEGRELANSWNIDQLRKFYV

SEQ ID NO: 147807 - protein, 182 aa, Oryza sativa
  unsure (1)..(182): unsure at all Xaa locations
  Clone ID: PAT_MRT4530_482C.1.pep
MNKYNFSRIYPLCLGLLKIQTSFQXAYLLLISHLCICSPADQETPRERESEEEAVPTGTGRARRVAETWQRQAEPPSPPSRIAHPHSSLQWRSNREREREPSNLPSLKNSSPAMRKXESFHRRQAALDINSFPFHTLLTMPKISPFDFILSHAVNQRERRCVIXALGRALRDAVVTSSPMPL

SEQ ID NO: 147808 - protein, 45 aa, Oryza sativa
  Clone ID: PAT_MRT4530_48300C.1.pep
MGTATASTGQGSRADKRRCHRQRATGRGGKLQLVARSYHRQLVEE

SEQ ID NO: 147809 - protein, 343 aa, Oryza sativa
  Clone ID: PAT_MRT4530_48301C.1.pep
MAPPISKLLSQGRPIAPVWSHLLYARMNFPQESVLICEYGTVPHRHNPRIASFHNPFYFQTHRRHMSGFQGFSNPFPKFSTNNGVCGIFGIRAQRARIPSRIGWSYTEEGRRRAATTEFGWRQRRAYGEQRRRSGRRQLATGRLLALLPRAKERRGSEEGEREMHYRAETDVVTSGRRRGSELSGLGPGKGKETAPGVPHQLLARTPASPARAVEEGGEDGGSKAAKARWWRGNEREGDGAARFNRWQCRFREKEPTLAVKESELAVIDACSQDGDRTHVERLGHALQSSRQAAGPSGSVAQALTEAATGRAKGIESWDFEFKGGRFGHSTKFTDGVPGGDSE

SEQ ID NO: 147810 - protein, 34 aa, Oryza sativa
  Clone ID: PAT_MRT4530_48302C.1.pep
MAASAFLQKRMKGGILLLAVLGGILAFLSAFCEK

SEQ ID NO: 147811 - protein, 253 aa, Oryza sativa
  unsure (1)..(253): unsure at all Xaa locations
  Clone ID: PAT_MRT4530_48303C.1.pep
MGRPARRGGPRGRGESEGERGLVGRVHLPGSRVGPACRWRGSPWERRMRVVLGFRVSAVHVRAPDGPGMRRAHTQPVGAPWTARARXWREEAADRLGSVKVEVALTWRLRGSHAGRREEEEGEGEMDGGRRHFHLDTMQRRGRRGAHWNDKXTRESEPTAXRIRRRVAGDGXSRRRQPVASKGGNDDETTRVPFKGMGASPGLKGFVSRIGCGGEAPWRSGDERRPPGAGADGGKAMASGGGAWGGAYKPAEG

SEQ ID NO: 147812 - protein, 467 aa, Oryza sativa
  Clone ID: PAT_MRT4530_48304C.1.pep
MEGCILDFFGRQGRGPRVEGGSAKPFGPARARERRPIRARGRGRERSGGPGAPRGVLGGAHMSAARLTVGRAHAGAVLGFGGCGVRAVRRVDRMAAGPHAAGWRTVDRAHGRGGRKEAAPARLGQSRGGADVAPTWQPRGPAGGGRRGGRDGRRTTAEFTGARRDDSREREYTGTMGRTIGSEPPDRIRRREAGVDESRRRTPAARKGGGLHRSNGGSIKRGGSISGIQGIRFRRRMGRRSTEGSRRREAASGGGRQWRRGHAGQRRGSEFPVVGPGKGKKKGGRSPLRLRAHAGFPAHARAEEGEDGGSKAAMALQRRQLAVVLGASGQVAAEAVTGVTPIGEKAKRGGRKELGSLPILDELREERAHGRERRCLRVLDTRALRRRGGGSGRVGAGGCAAQAGMVPVGEKAKGEGGKGGSAHVIQGERRRERGLCLRELDARGLEWPGTRAGPCSCSAAGQRGREA

SEQ ID NO: 147813 - protein, 324 aa, Oryza sativa
  Clone ID: PAT_MRT4530_48305C.1.pep
MDATAELDDRLLAVILLRLPSAAALARAATVCRRWRRVASSPTFLRLFRRLHRHAPPLLGFFVCNNGFAVSRKVGGELVGEVVDPAFLPTFHPVPREFEGAISRCGHFSLASLPDVDRWALADTRDGLLLLCSTFNDRMSIPRNFVVANPVSGRSVLVRDARFYQLDAESAYLGAALRIDDDNDGGAGGVLCFEIIVVTYFMPGPRLCVFSSRSGAWTVHPYSDAGTAIMPMLGAFSDDMHTNGSVYWLINDDDDDDDDNPYLLALDARTKQFSNIKLPRAMWTRYRGNMCVMRSDDGELRVVAFAAAALDFWHLDKSRSSRGR

SEQ ID NO: 147814 - protein, 408 aa, Oryza sativa
  unsure (1)..(408): unsure at all Xaa locations
  Clone ID: PAT_MRT4530_48306C.1.pep
AGARAREMRGRGRRHGREVRARSGGATWTDAGGRGPPRGTHMAVVGFTVGRAHAGAGARVSGARGSGAARRVDXMAAGPRAAARLAVDRAHGREDGGRGRLXAWPGQGRGGAEMAPTWQPRGPAGGGRRGGRDGRRTAAEFTGARRDDSREREYTXTMGRTRGSEPPDRIRRREAGDDESRRRLPAAISRVGLGGATPRKASDERLLPSLGSDGGEPTTSSGGGRGGASLLLEGGRRRGSELSGLGPGKGKETAPGVPRQLLARTPASPARAMEEGGEDGGSKAARARWWRGNEREGDGVAQFTRWQCRFREEEPTLAVKESELAVIDACSQGGDRTRVERLGHALQSSRQAAGPSGSVAQALTVAATGRSVTRTKERVYDAKVNPWTELGFGHSTKFTDGVPGGNSE

SEQ ID NO: 147815 - protein, 543 aa, Oryza sativa
  Clone ID: PAT_MRT4530_48307C.1.pep
MGACVSSSKKRRSQKLCCIYRRYRGKVLSNAPIVRASDAGSRAAPGEVVHVEAKSDGSNVTFHLTQLQWHHSELDSENGNVVCQEEAWFDSLSILGSDSDEDFSSVNGDLPAMSNSAGTQLMHCEDASSIADAIQKFERIFDGSCVAQAIGQYLKRDANKMDRPNQADIQESEKPKIPSPESCDVSDVKVDETKTRNEGIKILTKLRRGEDACNTLKSSKEGDKAHESIFKSLTPVCTPRHANKVQPLAVASPRGQKKKSGVVRLSFKRKSFDGEQTTEICSSRRYLIHPRAGLLVPQGITCRDKKKLPAPGSSPYTPIGVDMFMSPRKIHHIAQHIELPSAGPSEKIPSLLIVNIQMPTYPTAMFLGDSDGEGISLVLYFKLNENYEKEISPLFLDSIKRLVNDEIEKVKGFPLDSTVPYRERLKILAGLVNPDDMNLSSAERKLVQAYNEKPVLSRPQHNFYVGPNYFEIDLDVHRFSFISRKGLEAFRERLKHGVIDLGLTIQAQKQEELPENVLCCVRLNRVDFVDHGQIPTLLPCDDD

SEQ ID NO: 147816 - protein, 130 aa, Oryza sativa
  unsure (1)..(130): unsure at all Xaa locations
  Clone ID: PAT_MRT4530_48308C.1.pep
MGGKNVWFFFWGMGLLSPPQIWGGSPPSGGPRCTPRLGSPRGSRWALFFKKTHAHFSAFPPGVFAFPFRFXLPPPIFLPFFCFGFGGGGGPSFNRFFFWGPHLYSFFFPRSPASPPFFLCFSLFLGRGVP

SEQ ID NO: 147817 - protein, 382 aa, Oryza sativa
  unsure (1)..(382): unsure at all Xaa locations
  Clone ID: PAT_MRT4530_48309C.1.pep
MEGCDLDFLGRLECGPIDKHGAAEPMGWARARGGGPWPGKARPKRAGRAGGERGMGPGGPNPPCGVPGGARLSVARLTVGAAHEGSSRVPGERGSRACTGWTRDAAGPRAAGWCTVDRVHGRXQGRRRLTGSARSKPRWRRRGAYVAATQAGGRRKKGRPRWTADGGRVHRSKRDGFGLRGAHRSDEGVEKERANGSDSPEGVRRRWNSTAAAGGERKGKSPRGDEDSIKGGGSISGAQGFRSCNRIGWGGAVEVRRREAASGSGRRRRQGHAEQRRRSGRRVRAFEGLTELSCKLERARENEEGERREALPSRAXDGRXAVRGELSGLGPGKGKXEGAWREEPAVAPLVQAVAGGDADGGRAKGKRRGRKGALLLAVSGKS

SEQ ID NO: 147818 - protein, 641 aa, Oryza sativa
  Clone ID: PAT_MRT4530_4830C.1.pep
MVVWEDLEVRHCIDLMHVEKNVCDSLLGLLLNMPGKTKDRLNARLDLQEMNIRSELQPVTDEKTGRAYLPPACHTLSKDEKIAMLSCLADIKVPSGYCARISKYVKLEDLKLVGMKSHDCHVVITQILPVAISGILPPQVRHTIQRLCAFFNAIGQKIIDPEDLDGLQADIVSSLCHLEMYFPLAFFDIMVHLTVHLVKHTKICGPTFMREMWPFERYMGILKSYVRNRAKPEGSIIEGYTTEEAIEFCIDYMAETDPIEVPTSRHEERLAGVGTTDRKRIVPDQASYAQAHFAVLQHMAEVTPYFEEHLAKVRQDNIGPSDILINREHGARFNEWFKDRVARSTDGPSEILQRLARGPSWDVDTWQGYDINGYTFYTVTQDEKSTVQNSGVRIDAYQDQVGSSTYYGRIEQIWELHYLNFKVPLFRCSWVNIRTGVMVDKEGFTLVDLAKVGYADEPFVLAKQVEQIFYIKDPAKKKMHVVRDGKRRIVGVDNVVDEEEYNKNLHVRPQIDLDDDPEDEVAYIRPHQPRPSHILLSRSMPSGRRPRASRHVDLLHAAASLYRLPTAAVVQDRRPRGRGHSRSGLPNGHHLPPRRPRARRRPRPPSPSPAPPSTPSPSPVPPKTAVPEPTSTSSPSPPPCK

SEQ ID NO: 147819 - protein, 565 aa, Oryza sativa
  Clone ID: PAT_MRT4530_48310C.1.pep
MGACVSSSKKRRSQKLCCIYRRYRGKVLSNAPIVRASDAGSRAAPGEVVHVEAKSDGSNVTFHLTQLQWHHSELDSENGNVVCQEEAWFDSLSILGSDSDEDFSSVNGDLPAMSNSAGTQLMHCEDASSIADAIQKFERIFDGSCVAQAIGQYLKRDANKMDRPNQADIQESEKPKIPSPESCDVSDVKVDETKTRNEGIKILTKLRRGEDACNTLKSSKEGDKAHESIFKSLTPVCTPRHANKVQPLAVASPRGQKKKSGVVRLSFKRKSFDGEQTTEICSSRRYLIHPRAGLLVPQGSEKISESCWSVLEPSTFKLRGETFFKDKKKLPAPGSSPYTPIGVDMFMSPRKIHHIAQHIELPSAGPSEKIPSLLIVNIQMPTYPTAMFLGDSDGEGISLVLYFKLNENYEKEISPLFLDSIKRLVNDEIEKVKGFPLDSTVPYRERLKILAGLVNPDDMNLSSAERKLVQAYNEKPVLSRPQHNFYVGPNYFEIDLDVHRFSFISRKGLEAFRERLKHGVIDLGLTIQAQKQEELPENVLCCVRLNRVDFVDHGQIPTLLPCDDD

SEQ ID NO: 147820 - protein, 381 aa, Oryza sativa
  unsure (1)..(381): unsure at all Xaa locations
  Clone ID: PAT_MRT4530_48311C.1.pep
MAIMEEQVAWLLDLSLILYKDDRLGQIRSSTVHISSCDLLMLKGNFIILNQESVLICEYGTVPHRHNPRIASFHNSFYFQTHRHHMSGFEGFTNPFPKFSTNNGGYDLDFLGRLGCGPRGEARLGRTNGPAGPERRPKEARGEWGRERAGGLSPPCGVPSGARLSVARLTVGAAHEGGTRVSGERGSRACTGWTRDAAGPRAAGWRTVDRAREGGGGRRRLXARFGQSRGGADVAPTWQPRGPAGGGRRGGRDGRRTAAXFTGTPCDGEGNGEHIGTTRRTRESEPTAQICRRVAGDGESRWRQPAASKGGNXRRDDEGSIQRDGSISGAQGFRFWVRMGWGGAVEVRRREAASGSGRRRRQGHGERWRGLERRLRTTGRL

SEQ ID NO: 147821 - protein, 78 aa, Oryza sativa
  Clone ID: PAT_MRT4530_48312C.1.pep
AVAVATAWQKSTDPACYDKLTPVSSPPKCDDSVDPDAAWYVPMRSCLTSPSSTSSRYKKLALDATPKWPQRLAVAPER

SEQ ID NO: 147822 - protein, 526 aa, Oryza sativa
  Clone ID: PAT_MRT4530_48313C.1.pep
MASFPLFPALLLLLCSSSLALDSVSEPTLSWTCGDDQVAILDTSDGGRNLSVNGELVQDRVLGCQKLRSYYVSRCLRCGQQSEAWRGAWKHYCREGSESSNAQNIPRKLLRQPSMNDAKIEDDPCKNMGIHGHNQDDNDSLEGQDHLLAVPGVILLCCGLMIPCFHAEKKEVSRHNTTSIQRNAVESIASLDVSTSSEKVPPTPHRIPPSPSRFAQSPQIARVGSVNLTVQQILRATQNFSPSFKLGEGGFGTVYRAVLPDGQVVAVKRAKKDQFAGPRDEFSNEVELLAKIDHRNLVRLLGFTDKGHERIIITEYVPNGTLREHLDGQYGRTLDFNQRLEIAIDVAHALTYLHLYAEKTIIHRDVKSSNILLTESYRAKVSDFGFARSGPSDTEKTHISTKVKGTAGYLDPEYLRTYQLTPKSDVFSFGILLVEILSARRPVELKRAAEERITIRWTFKKFNEGNRREILDPLLEDPVDDEVLERLLNLAFQCAAPTREDRPTMKEVGEQLWEIRKEYGKSVRRV

SEQ ID NO: 147823 - protein, 99 aa, Oryza sativa
  unsure (1)..(99): unsure at all Xaa locations
  Clone ID: PAT_MRT4530_48314C.1.pep
GGQRTTTSGERRRRRAGGLHRADPLVAGLPRSPLTAAPSIPCRRALSAANNGAQRRDGGSRGDGGGRGGRRQGGGQSSXGSDGGGGARGGDGDGGGSPQ

SEQ ID NO: 147824 - protein, 58 aa, Oryza sativa
  Clone ID: PAT_MRT4530_48315C.1.pep
HGLLDASAGLEFASVLLIIVLEFSNSARQLLGYARQGARQPHHISLPAPVAPLRRRRT

SEQ ID NO: 147825 - protein, 61 aa, Oryza sativa
  Clone ID: PAT_MRT4530_48316C.1.pep
ISISKRTFVTYMQSNMFSASSSICCSYKSVCSQYIIMCLYERNTKYVSMYICTHFDRHAYA

SEQ ID NO: 147826 - protein, 101 aa, Oryza sativa
  Clone ID: PAT_MRT4530_48317C.1.pep
MASSSKLSALFLTAILLCLICTRSQAARPEPGSSGHKSQGVVASSIAHQKSVGSSGIGVEMHQGEPDQAVECKGGEAEEECLMRRTLVAHTDYIYTQGNHN

SEQ ID NO: 147827 - protein, 85 aa, Oryza sativa
  unsure (1)..(85): unsure at all Xaa locations
  Clone ID: PAT_MRT4530_48318C.1.pep
PSFVLLEISGVGGYGYLLEPLWWVGMVTAVLVTPLGALSIIVRXNKRVGVLGCVLCIVGSTVIILHAPQERTPSSVDEIWHLAIQ

SEQ ID NO: 147828 - protein, 122 aa, Oryza sativa
  Clone ID: PAT_MRT4530_48319C.1.pep
DAWADAWEISAAISPDQNKQAFKEVVIIRHPRIGEYAFGFITSSVSLQSYTGQEELYCVYVPTNHLYIGDIFMVNSKDVIRPNLSVREGIEIVVSGGMSMPQILSTLDPQTILGDRTGASRS

SEQ ID NO: 147829 - protein, 210 aa, Oryza sativa
  unsure (1)..(210): unsure at all Xaa locations
  Clone ID: PAT_MRT4530_4831C.1.pep
GEQAEGRGRADRVHGSGAHAAASRSTVDRVHSGSHRPAPXVPRVSRTRRRGRLTAGPHAAAARCARRRPRRRGRREAARPRPYGRQRRPWAQRSGGRERGXKGETRRRFTAHPRSTATXEKAAGAEEGGSTARVDGDGGAPAVDERNGGVDEVGEDAAKPKEAAPRWEVVWGDDGGRPELGGDGGERERRRELDSGERRKRTEEVRGGFK

SEQ ID NO: 147830 - protein, 104 aa, Oryza sativa
  Clone ID: PAT_MRT4530_48320C.1.pep
GRAAPGVPRPSIPGDATTRAVWDSYKPDISGGQTKLNLARCVYSNTHQRQAATHGGCWLLSHELSLRGDGGSQDHTHMLRPIMLFIFYIEAKAKAVTDWLKLND

SEQ ID NO: 147831 - protein, 278 aa, Oryza sativa
  Clone ID: PAT_MRT4530_48321C.1.pep
MGDEKSPLSQMGSRDRDRELLIPVSGGGSAPGDGDGDGDRAASSSASAALSSSSREIRGLLAFHKVVRSWASKKFMTGCVILFPIAITFYITWWFIHFVDGFFSPIYAQLGINMFGLGFITSVTFIFVVGVFMSSWVGASVLSLGEWIIKRMPLVPDAWADAWEISAAISPDQNKQAFKEVVIIRHPRIGEYAFGFITSSVSLQSYTGQEELYCVYVPTNHLYIGDIFMVNSKDVIRPNLSVREGIEIVVSGGMSMPQILSTLDPQTILGDRTGASRS

SEQ ID NO: 147832 - protein, 33 aa, Oryza sativa
  Clone ID: PAT_MRT4530_48322C.1.pep
VYLILDEFILAGELQETSKRAIIERMGELEKLE

SEQ ID NO: 147833 - protein, 102 aa, Oryza sativa
  Clone ID: PAT_MRT4530_48323C.1.pep
MAFGEEEEETERVKTSKIRDAWWGGKRRMRGLLYSGRGREVSDRQLLSPCQILRSSRSCGPGSSGKILRKSHGTFGSLNKKKKGCSFAGDQWSASFSLERHA

SEQ ID NO: 147834 - protein, 72 aa, Oryza sativa
  Clone ID: PAT_MRT4530_48324C.1.pep
CQVSDSTGWHLPSPWSGINIGINGLRRIRRILVRAAVQIEDMQLRIVIDTFSATGYVTCMLKSIPCTDNGVT

SEQ ID NO: 147835 - protein, 30 aa, Oryza sativa
  Clone ID: PAT_MRT4530_48325C.1.pep
IHSVLLFVTAHKDRLMVNTYWHFFFLLVFN

SEQ ID NO: 147836 - protein, 416 aa, Oryza sativa
  Clone ID: PAT_MRT4530_48326C.1.pep
MAAEEDWASLEQGLLHDIFLRLDDDANAARFRAVCSQWRAAAAGAGVVFVPRPWLAVYAPEQRRHAWLRPSRRRRRGRRRFKRVDDGEVSLRPERGGSPAPAAVSLVSVSRGWVAMKHGESHLVRAVSGDEVPLPPCGSRYELSEVPLPPCGSRYELRYELSKVILPDDPLAAAASGEWTAFAFMSHHQQILWPHTRRVAFCHAGDDEWTFLDKAIQAQRYRGLEFFRGGAYVLLSNLTVAVGDVVSRMLIATSVGLSGAYRWRHDELLEATCLVRCGDDLLFVQVSRQVVPRRSCFPLLAGGRHRRRRLRFTSRVYKLEFAADGSGVPVGFTKVESIGEYALFVSRRSHAFALPASGAASPASSRIASTTWSDYAARSSSAHRGRLAVSSPCHWTIFLSPGHSGFHRIGFALAGQ

SEQ ID NO: 147837 - protein, 534 aa, Oryza sativa
  Clone ID: PAT_MRT4530_48327C.1.pep
MSGSKRSEEWTRGRAEGLKVQVRSKLLKAKSSSSAADMVMLVDTLERLGIDSHFRREIAAMLRRVHREEQGCPAGAADDDDLHITSLRFRLLRQHGFGVTAAVFDKFRDSRGSFRASLSSDTRGLLSLYNAAHMAMPGEEGLDDAIAFARHHLIRSVEGKLRSPMAEQVSRALDIPLPRAPRRLETVRYIAEYEHEPAFDGVALELAKLDFELVRSLHLRELKALTLWWKDLYNSVKLSYARDRIVENYFWTCGIYHEEEYSRARIMFTKVFGLMSLMDDTYDAHATLEECHKLNKAIQRWDKSAVSILPEYLHAFYIKLLNNFEELEDCLEPTEKYRMSYAKTGYKQLSEYYLREAQWSSDKYMPSFAEHLDVSVMSSGFPELAPVVLLGVRDGDGAATAEAFGWAAAVPALARASGELARFLNDVASYRTGRSGRDMASTVECYMAERGVGGEEAVAAVAAMAERAWRTINRECVEMGGRADHLLPAARLVVNLTRMLEVIYLGGRDGYTFGADIKDLVTNFFLANPSQLFD

SEQ ID NO: 147838 - protein, 227 aa, Oryza sativa
  Clone ID: PAT_MRT4530_48328C.1.pep
MHGIRGVVSLEAGRGTKDKEKMADLQKEVDMYHDFLFVDAEEDTKPPQKMLAFFKAAYDMFDADFYVKADDAIYLRPDRLAALLAKDRLHQRTYIGCMKKGPVVNDPNMKWYESSWELLGNEYFSHASGLLYALSSEVVGSLAATNNDSLRMFDYEDVTIGSWMLAMNVKHEDNRAMCDSACTPTSIAVWDSKKCSNSCNTTEIVKALHNTTLCSKSPTLPPEVEDE

SEQ ID NO: 147839 - protein, 90 aa, Oryza sativa
  Clone ID: PAT_MRT4530_48329C.1.pep
MEATARLRVVAILLMSSLLLSPPFLLADGSSGGGSRGREMKHDDGHLVIAPRKLTWPRRVLNSGDQPNHDPIHNSPISPGRSKNEVRPGN

SEQ ID NO: 147840 - protein, 516 aa, Oryza sativa
  Clone ID: PAT_MRT4530_4832C.1.pep
MWPFERYMGILKSYVWNRAKPERSIIEGYTTEEAIEFCIDYMAETDPIRVPVSRHEGRLAGVSTTARKRIVPNQASYAQAHFAVLQHMAEVTPYFEEHLAKVRRDNIGRSDIWINREHGARFNEWFKDRVARSTDGPSEILQRLARGLAWDVDTWQGWVNIRTGVKVDKEGFTLVDLAKVGYADEPFVLAKQVEQIFYIKDPANKKMHIIRNGKRRIVGVDNVVDEEEYNKWLAFVQTIRKAYHSSPSPAAIHLVLATVALLQAVASTPPGSRSGCSLPPPPTPAAVDLLHAVTSRPPPPPSTPPGSRSGCCLPPLPRRRRLILDAAATSSLQDPASPSPAPPKTGVPEPPSTSSPSPPPSEYPKLVAVSMGIRVPLRNDLGPSMFLEAGADGISTSTSISHWNLLPLPLSYGSDIDRKFEWDTDVEVEFPATPAMLSMDARVPSTRRTQVGDTGISNHQRMWVDAMFCLKSTCFLYNSSHRTCRSKANQCRRPLLGLLRARILGPRIRFLSKSTP

SEQ ID NO: 147841 - protein, 167 aa, Oryza sativa
  Clone ID: PAT_MRT4530_48330C.1.pep
MDVDQETMEETILTGDDLMREPPSPAIPKEIASHVLQGVEPCDGILRNLFLCLQINDIEPFCQDEIVFYRQCAAKRDKEIREKMVDSEYKLRISMPLEEGKERTTQLQLEVTLLERRMILASGLEGMEGFRQRWSLHGQLEDTRKRMEALVRGMEKGESQNSQAQGS

SEQ ID NO: 147842 - protein, 192 aa, Oryza sativa
  Clone ID: PAT_MRT4530_48331C.1.pep
MRFRFRNKAAAAGDGSRPASSPPNAGKFAAPVAGGGGAADVAGESPDQDSTRNGSKDESFFEARPWLDSDSEDDFHSVRGDFTPSRGTTPDHQRQSPFAGRISVDRSEPSLIEKKQRLLELLQEKQQYDDDSVADVGSEIENGAVHAEEYLKSSRKGAKANRASKSRGGCFPSSFWKIKFRSCRKKRKEQND

SEQ ID NO: 147843 - protein, 274 aa, Oryza sativa
  unsure (1)..(274): unsure at all Xaa locations
  Clone ID: PAT_MRT4530_48332C.1.pep
MGEGRPLHRRRRRHRHSLRLPREGPFVATILFSASKIGMAPDFPWSSAGRSLPLVVSSGASAGGVXSVRDLHGGRSGGSRSREDMEXRSRAGCGGDADGDDLLPSSAGGRGSEVATGVDGCESRGSIFIPYGPSLDMCFTTLIRRSPPLPPSSSPSQAGIVRTSMAVMMATGSLRLHLSRGSVAKNLTTQSLPEPRLTRWRPQLNHSLGGRKSSHTPHALCGAAARSAAQSDDDPSAREKPNHRLQPGTSSALPANGSSQSPSLLQACRSVSNE

SEQ ID NO: 147844 - protein, 76 aa, Oryza sativa
  unsure (1)..(76): unsure at all Xaa locations
  Clone ID: PAT_MRT4530_48333C.1.pep
PRXXPGLARPPRRLPPYASPTSTGTGGGAVSRLCSRDDEATVNKTMGASHLCLWTSPEKSGLRFFLFPNGHDARQA

SEQ ID NO: 147845 - protein, 414 aa, Oryza sativa
  Clone ID: PAT_MRT4530_48334C.1.pep
MDMEHELRGGGVGAAAHGHGSICFSGGPVLVDGRRIQQLLLHCAAALESNDVTLAQQAMWVLNNIASSQGDPSQRLTSWLLRALVARACRLCAAAPAGAAVEFLERGRAPPWGRAMSVTELADYVDLTPWHRFGFTASNAAILRAVAGASAVHWPTLIDVLSKRPGGAPAIRITVPSVRPAVPPLLAVSSSELGARLAIFAKSKGVQLEFNVVESATTTSPKKTSTTLCQELASVLSDPPSLGLRDGEAVVVNCQSWLRHVAPDTRDLFLDTVRALNPCLLTVTDEDADLGSPSLASRMAGCFDFHWILLDALDMSAPKDSPRRLEQEAAVGRKIESVIGEEDGAERSEPGARLAERMSRKGFAGVVFDEEAAAEVRRLLSEHATGWGVKREDDMLVLTWKGHAAVFTGAWTPN

SEQ ID NO: 147846 - protein, 195 aa, Oryza sativa
  unsure (1)..(195): unsure at all Xaa locations
  Clone ID: PAT_MRT4530_48335C.1.pep
TPSGHAKRPQIALLHSLANTAPVSTAIQLADVATCSCANAAASFPIKHRLAQCPTHXRPARLTAIAHLAQTXSIPRXSTPPDHNSRHKFXGGLHIGSVTPTPPQSGGLACMPSVWLAFIPWPFLPLSWSRLAKQILSSVSVQSWSIAIGTXTXHASHQPSSLVSPNGPHVGYVRVTSIHXSXSPLTVIGGFRMQP

SEQ ID NO: 147847 - protein, 108 aa, Oryza sativa
  unsure (1)..(108): unsure at all Xaa locations
  Clone ID: PAT_MRT4530_48336C.1.pep
THLDHIQQITEEIIQNTKKEGQEGEGKRSIRGLQPTPSCHPPPPXLPPFRPPPPHPPPFQPSPLHPIPFCPXPPHPPPFCPLPPHPFRPPPPHPPSFCPSPPNPPGRV

SEQ ID NO: 147848 - protein, 162 aa, Oryza sativa
  Clone ID: PAT_MRT4530_48337C.1.pep
MESDGGGEPGSTSSSLSTVAHPFARALVLADDKGDRCGGRYVYVQELRGRLDPCDGGAHPLSHRRSRGRGSHLHLHLNYLRLHLRYARHRSSHPPLTTPLAHRCSSRRRPTQCLPTRSLLLSRGTGYGGGGASQGSGARPGSPSLLGSPATSHPSAAGGLPH

SEQ ID NO: 147849 - protein, 233 aa, Oryza sativa
  Clone ID: PAT_MRT4530_48338C.1.pep
MAMGKNGLLGWLCVVVPGRRRRRRGARLVLWGGERRAAAAGRMAGEVMMEHAGRLVVCRADGFCLGRAAPVLAIEDRLDACATYLVLPVDRLPQGRDVVTAASLAALTYDRAAGAPLLAGGAKSPFEYVKDDGGRTVIKVTEEFIVKAVTGRRPPAGGGGEGEDAHGAAALCSTPELRKHYEQLVGAARGRPWSPRLETIKERNGRRRVVDVVVSPTGRLSPVRLLGLDKGIK

SEQ ID NO: 147850 - protein, 289 aa, Oryza sativa
  Clone ID: PAT_MRT4530_48339C.1.pep
MGRAPCCDKASVKRGPWSPEEDEQLRSYVQSHGIGGNWIALPQKAGLNRCGKSCRLRWLNYLRPDIKHGGYTEQEDHIICSLYNSIGSRWSIIASKLPGRTDNDVKNYWNTKLKKKAMGAVQPRAAASAPSQCTSSAMAPALSPASSSVTSSSGDACFAAAATTTTTMYPPPTTPPQQQFIRFDAPPAAAAAASPTDLAPVPPPATVTADGDGGWASDALSLDDVFLGELTAGEPLFPYAELFSGFAGAAPDSKATLELSACYFPNMAEMWAASDHAYAKPQGLCNTLT

SEQ ID NO: 147851 - protein, 55 aa, Oryza sativa
  Clone ID: PAT_MRT4530_4833C.1.pep
RRRRRLNRGRREDGEGERVRVLCRHYPRLAVARAILVSFFSISPCICLNSAGSQT

SEQ ID NO: 147852 - protein, 399 aa, Oryza sativa
  Clone ID: PAT_MRT4530_48340C.1.pep
MEVVEVREYREDRDRAAVEEVERECEVGSSGGGEAKMCLFTDLLGDPLCRIRNSPAYLMLVAETANGGGGGNGREIIGLIRGCVKTVVSGGSVQAGKDPIYSKVAYILGLRVSPRYRRKGVGKKLVGRMEEWFRQSGAEYSYMATEQDNEASVRLFTGRCGYSKFRTPSVLVHPVFGHALQPSRNAAIRKLEPREAELLYRWHFAAVEFFPADIDAVLSKELSLGTFLAVPAGTRWESVEAFMDAPPASWAVMSVWNCMDAFRLEVRGAPRLMRAAAVATRLVDRAAPWLKIPSIPNLFAPFGLYFLYGVGGAGPASPRLVRALCRHAHNMARKGGCGVVATEVSACEPVRAGVPHWARLGAEDLWCIKRLADGYNHGPLGDWTKAPPGRSIFVDPREF

SEQ ID NO: 147853 - protein, 318 aa, Oryza sativa
  Clone ID: PAT_MRT4530_48341C.1.pep
MGRAPCCDKASVKRGPWSPEEDELLRSYVRSHGTGGNWIALPQKAGLNRCGKSCRLRWLNYLRPDIKHGGYTDQEDRIICSLYNSIGSRWSIIASKLPGRTDNDVKNYWNTKLKKKAMAMHHHHQPPPPQQQHYHHHHHHRVAGGGARVTLVSPPPAPQSQCASMQPSPASASSSGGDACSFGAAAMYSPSPSTQQAPQAATLAVAGYTSVATAAAAAAVAAQRSPLDELICQVPPPPTTTAADCWASGVTLDDVFLPELVGAGEFPNGDLFGGFGPLLQDRSSMELSACYFPNAAAAEMWPAATDIVKPAGLCHSLT

SEQ ID NO: 147854 - protein, 86 aa, Oryza sativa
  Clone ID: PAT_MRT4530_48342C.1.pep
SEDANETTILRTAEYLCELPRHHRDWCCTLALDSCARTRTTYSSWCRSIRHKLVASGGFAEGALGIGYGFGSDRIQRRGRKPRRRR

SEQ ID NO: 147855 - protein, 538 aa, Oryza sativa
  unsure (1)..(538): unsure at all Xaa locations
  Clone ID: PAT_MRT4530_48343C.1.pep
MATCAADLAPLLGPVAANATDYLCNRFADTTSAVDATYLLFSAYLVFAMQLGFAMLCAGSVRAKNTMNIMLTNVLDAAAGALFYYLFGFAFAFGTPSNGFIGKQFFGLKHMPQTGFDYDFFLFQWAFAIAAAGITSGSIAERTQFVAYLIYSAFLTGFVYPVVSHWIWSADGWASASRTSGPLLFGSGVIDFAGSGVVHMVGGVAGLWGALIEGPRIGRFDHAGRSVALKGHSASLVVLGTFLLWFGWYGFNPGSFTTILKTYGPAGGINGQWSGVGRTAVTTTLAGSVAALTTLFGKRLQTGHWNVVDVCNGLLGGFAAITAGCSVVDPWAAIICGFVSAWVLIGLNALAARLKFDDPLEAAQLHGGCGAWGILFTALFARQKYVEEIYGAGRPYGLFMGGGGKLLAAHVIQILVIFGWVSCTMGPLFYGLKKLGLLRISAEDETSGMDLTRHGGFAYVYHDEDEHDKSGVGGFMLRSAQTRVEPAAXGCLQQQQPSVTNPEATTSQRRKKSRVSXSPGSRSSRHVYYQHNKFDPHI

SEQ ID NO: 147856 - protein, 70 aa, Oryza sativa
  Clone ID: PAT_MRT4530_48344C.1.pep
SNFCIKIFFLKKILFSSLENVLRENRSLCLLSDNRRQCGRLIRGHHRRLLAAWRVHHSTCLWPQGDAGGS

SEQ ID NO: 147857 - protein, 1317 aa, Oryza sativa
  Clone ID: PAT_MRT4530_48345C.1.pep
MALPLSLFQGDMDATMTTLGPEDDTGAQGLILPSRDRVMYRPPPGKSALGLDLLAHRKREAEGGNAFKPPPQKVVAAATSIDEDEKPGPAESDEKSLSSGHRGSVSRRYRGANSDERTSFKEPTITDEDGRGPSPSHRDGSYRQDTHKSRSSQGSHSRSTPRRYDDYEDRGSRDKHGERERSASIGYSSSGRRGHHDDRESHNRRDERERSTSVDYMNKRSRHEHSSRSSRTPARSDWDSGRWEWEDTPRREYRDDRSNSHRQHPSPSPMLAAASPDARLVSPWLGGNTPRYAASPWDNVSPSPAPIRASGSSKGSSYPRSGGRSHQLTFSSTSASNDRESDRSPSDADGNYEISEEMMQEMDYNADRAWYDCEEHNTMFDGDNSMYLEDDSSYKKREAQLPKRLTRKDGSLMTLAQSKKLSQMTADNAQWEDRQLLRSGAVRGTEVQTEFDDEDERKVILLVHDTKPPFLDGRVVFTKQAEPVMPLKDPTSDMAIVARKGSALVREIREKQSMNKSRQRFWELAGSKLGNILGVEKTAEQVDADTATVGDQGEIDFKEEAKFSQHMKVKAEAVSDFAKSKSLSQQRQYLPIFTVRDDLLQCKLFKNKSVEYFEYGFDDCSTPMQLSSRRKVVRENQVVVVVGETGSGKTTQLTQYLHEDGYTTTGIVGCTQPRRVAAMSVAKRVSEEMETELGHKVGYAIRFEDMTSPNTIIKYMTDGVLLRETLKDADLDKYRVIVMDEAHERSLNTDVLFGILKKVVARRRDFKLIVTSATLNADKFSKFFGGVPVFHIPGRTFPVNIMFSKTPCEDYVEAAVKQAMTIHITSGPGDILIFMTGQEEIEATCYALAERLEQLISSSTKTVPKLSILPIYSQLPADLQAKIFQKAEEGTRKCIVATNIAETSLTVDGIFYVIDTGYGKMKVYNPRMGMDALQVFPVSRAAADQRAGRAGRTGPGTCYRLFTESAYQNEMLPNPVPEIQRTNLGNVVLLLKSLKVENLLDFDFMDPPPQENILNSMYQLWVLGALNNVGALTVIGWKMVEFPLDPTLAKMLLMGEQLECLDEVLTIVSMLSVPSVFFRPKDRAEESDAAREKFFVPESDHLTLLNVYLQWKSNQYRGDWCNDHFLHVKGLRKAREVRSQLLDILKTLKIPLTSCHMEWDVVRKAICSAYFHNAARLKGVGEYVNCRNGMPCHLHPSSALYGLGYTPDYVVYHELVLTTKEYMQCVTAVDPQWLAELGPMFFSVKETDTSLLDHKKRQKEDKTAMEEEMEKLRQEQAEAARLEKEREREKRAKQQQQVSMPGLKKGSTYLRPKRMGL

SEQ ID NO: 147858 - protein, 92 aa, Oryza sativa
  Clone ID: PAT_MRT4530_48346C.1.pep
RVFQKIYSYLLSRNMAALQIAPLIRRAEGTWIGYTHSQLTLTKYHSNNGSRHPFCNYMSHAVSTLSLLTVYSSQGTKIWKHAVNANHSWSLA

SEQ ID NO: 147859 - protein, 65 aa, Oryza sativa
  Clone ID: PAT_MRT4530_48347C.1.pep
RYNEGLLREQSTAVAKKALPAFIFNRGELRRNELQTKSRANANRGSNKQQAREKDSPHQGCKTTT

SEQ ID NO: 147860 - protein, 84 aa, Oryza sativa
  unsure (1)..(84): unsure at all Xaa locations
  Clone ID: PAT_MRT4530_48348C.1.pep
QDLRLAKDETRSKGSRLTITSVLKNSGSRMTQLTPLPSSLHRWGPPPRDLAALGPGAPSAAYPLLPSLAAASSDGGGGQRXSXP

SEQ ID NO: 147861 - protein, 67 aa, Oryza sativa
  unsure (1)..(67): unsure at all Xaa locations
  Clone ID: PAT_MRT4530_48349C.1.pep
PTTPPCTDYYLAYFKVYSHIVVHYEMFKDHLRTNSYRNAIMHYQDLISCKVCFXVCCGTGVLFLFCA

SEQ ID NO: 147862 - protein, 106 aa, Oryza sativa
  unsure (1)..(106): unsure at all Xaa locations
  Clone ID: PAT_MRT4530_4834C.1.pep
MLLASLLRPPPPPSAPRSRSPPPSLARPVPLLLPPPPLARPAVPLLLPPPPPPPPAWSXPRPDRRPPALAPAPPPRRPLPAAAAARRWLWRPPRQTSPSPSSMPAP

SEQ ID NO: 147863 - protein, 133 aa, Oryza sativa
  Clone ID: PAT_MRT4530_48350C.1.pep
FLQGPAPPQQLARPTVVLSHPRWRTGGGRAVLVLPPRRGALLQARSLGPSFAQQEARFCQKVRKGPFFGPSIFVSFLRKGVFFGSPLDVVPFGKKKSLFFPFFFPAFCLGFPLKKLFAFPLSSQLLEIESILF

SEQ ID NO: 147864 - protein, 405 aa, Oryza sativa
  Clone ID: PAT_MRT4530_48351C.1.pep
MWRARRWPWPWRSQRRAARMLSSGEPAAGRRRVAALWGNGDYGRLGMGALESRWSPTACPFFLTGRPGDDDDDPPASLACGGAHTLFLTESGRVFAAGLNDFGQLGIGSSVTHSLVLSFLYIMPPCEIFIYIEPIEVSGFDEKVVEVSAGNHHSCAVTGAGKVVSTPRKVDCLADARVKMVALGSEHSIATTEEGEVLSWGAAGAGRLGHGHKTSILGFSITTSEYTPRLIKNLDGVKIKRIAAGMLHSACIDEKGTLFIFGQKTEKVGFGRSGDELRPTVVEELYQCLSKLRMFAYIKFLTSGTDMVRSPEVLKSSLFKFPVSKVSCGWKHTAVISGGDIYTWGWGGANGTFFEEGHSSGGQLGHGNDVDYFEPMMVEFGKNARAVHVSCGFNHTGAIFEYSEN

SEQ ID NO: 147865 - protein, 110 aa, Oryza sativa
  unsure (1)..(110): unsure at all Xaa locations
  Clone ID: PAT_MRT4530_48352C.1.pep
QKTRGLGDLLNSSTGPKLAFGCASVPVDLILXSTRNRXRETAVKSINDSQSARTLSMCGNHLEAYMLYTKSYCRNRLYHLTQSDSDLVDXVVADLDSSRFLLCSRNNPYF

SEQ ID NO: 147866 - protein, 61 aa, Oryza sativa
  Clone ID: PAT_MRT4530_48353C.1.pep
FSSLELFILFEVWYEIKIFVLVTYLLDMVCLIGAAVPPARLPPLSVSCDEFCQNRGSIGPP

SEQ ID NO: 147867 - protein, 132 aa, Oryza sativa
  Clone ID: PAT_MRT4530_48354C.1.pep
KGCKCPPGFKGDGIKSCEDIDECKDKLFCQCKDCSCENTWGSYECSCGGSNMLYMREHDTCISKVASSSVGWGFLWVIFFGLALAGIGAYAVYKYRLRSYMDSEIRAIMAQYMPLENQETPNQHRPVEHADI

SEQ ID NO: 147868 - protein, 209 aa, Oryza sativa
  unsure (1)..(209): unsure at all Xaa locations
  Clone ID: PAT_MRT4530_48355C.1.pep
LGETPLKFLKFLKPLKLGVGGWFFPPPQPXKNPKTPSFSPLPGQNPPQXGFPFPLPQQXPQQLGLFFQNPLALIXPWAQLVSXKTPKFXNSFKIGXPLEKXVPXXKXRGXKXPRXFPSXPPPLGQTLNFGFXFXGXLGKXXVFPTXLGWPXPGPXQKNLLNXKGFLWPPNPFKTKKIQLLTGELLIPLFWGKKNKFPFGPLAKKQFPFK

SEQ ID NO: 147869 - protein, 218 aa, Oryza sativa
  unsure (1)..(218): unsure at all Xaa locations
  Clone ID: PAT_MRT4530_48356C.1.pep
MVSYDHLYPIMLYMVVWGAFLLCYVLWCYDISTSIGSGQGVNGSILVVLLXLWSLFVLVVYICXVLSLSVYILVLAYVVVYVFCCGLIXISVFLXILIYSYIVALVLCCMICCVFILAFVAWLCYIICLVLSIVSFVXCFXFLYFVLSVYVFVFCPMFSVCFCSIFIVLLXLFXSFTILLFVYGVCCFFVCLLVRLYVDLLVCIICFYLLFVLIVGIX

SEQ ID NO: 147870 - protein, 422 aa, Oryza sativa
  unsure (1)..(422): unsure at all Xaa locations
  Clone ID: PAT_MRT4530_48357C.1.pep
GLTHAGQLEGYLVDVTLGVPLRTNTCRLASRARLSVLLAAGAGEHPMVHPVDELGGPPIDVTLSVPLPPVVVVVVVXCAGEHPSVYLLMNSEAFRSMSRSAYHYGLTHAGQLEGYLVDVTLGVPLRTNTCRLASRARLSVLLAAGAGEHPVVHPVDELGGPPIDVTLSVPLPPVVVVVVVVRRRASFGVPVDELGGLPVDVTLGVPLRTNTCRPASRGRLSVLLTAGVGEHPAVHPVDELRGPPVDVTLGVPLPSVVVVVIVVARPHFRRRPPPFLLLVAVVPLLLPLRHRRQLAVAGYPSCSPLASPRSSWRHRSRLTVPSSSFSLFLLLVVVVLPVVGGRSTSTATSPLSLLLNKGLWKQTPNFPLPHHLCCSLFAAAASSFLTPLLLPLLLNQRFLEANTDFPLPITGTFHKHIRCRCS

SEQ ID NO: 147871 - protein, 83 aa, Oryza sativa
  Clone ID: PAT_MRT4530_48358C.1.pep
MWPSCFAFRTGFSSTALGYLAHFHVFSPWNPGSVITCQALLGVRVVGSAPDQPGRVGPAGGCDGRVQDGDVLGGGGEGGPRQE

SEQ ID NO: 147872 - protein, 93 aa, Oryza sativa
  unsure (1)..(93): unsure at all Xaa locations
  Clone ID: PAT_MRT4530_48359C.1.pep
QDPLVISAEVVGFEVRRIIVDGGSSTDVIFAEAYARMGMPTXFDVVDIPYNYNAIFSRATLNKFEAISRHNYLKLKMPGPHDRAKHTPKRAPH

SEQ ID NO: 147873 - protein, 299 aa, Oryza sativa
  unsure (1)..(299): unsure at all Xaa locations
  Clone ID: PAT_MRT4530_4835C.1.pep
LALLAFPNAGFNFHEERIFRSCSVRGRGRLTAGPTWQPRGRARGRPRRRGRRERRARAPMVTAGDQRRGGAAPKREEGRGKRTERSSAHPGTAKAVETAAGAEEDGGAARDDDGDGAPTVGGRSGAADGVGGNTAKRTEVSPSKEEVRSGGGGGTELGGDGGENGARREHESDGEGERRAAETEERSSGNVXIAPGEGKSGRRGRKXGAEISAAIDGAGEVXGAIPDESEGEREGKTGGKREGIAGNDSPLIMARGDGGMRRNPRRRRRXARASGGSGGRKAMTGGPHPSARAAGGPAS

SEQ ID NO: 147874 - protein, 72 aa, Oryza sativa
  Clone ID: PAT_MRT4530_48360C.1.pep
MDISQAPEGQLPSYGQHQNSLEETATYHRCQASPHPFSEQLRLHQQKQPKSVSPTTGKKRTQEGEGLAEHKA

SEQ ID NO: 147875 - protein, 985 aa, Oryza sativa
  unsure (1)..(985): unsure at all Xaa locations
  Clone ID: PAT_MRT4530_48361C.1.pep
MCDVNEGVNMVQLLSLIYTYTSLYTNAGTSEVSKEQKISKISKGSTSAPESAKRKITTVEGVNMVQLLSLIYTYTSLYTNARTSEVSKEQKISKISKGSTSAPESAKRKITTVAGQDKALIESYNKEIVDKHNTSNESDLVQKEMDKYQKQNSNHYGYPLYDELALWQQDNMSYTGVNDQIWLSCIGFDLQQEGQVSIITGTPKAFQPSEFEYSMQSAVNTTRGDNRSADIIMQGDQNGDSDDSENEQNPVDPWSLDILSMAANDKEQTTMESLNNGPEQNIEKGTNEIAESDENEELTEEDINNFLDQEQHEALQGXNTRDQSKYIPQVGMQFKTTXHKQTINGEVTRVTFKCNRFGKENSKKKKQQTEETVVSKRNTNQVILTYSLRGGMTTLPYTKKDISNVRTSINRETSSNDMMQALEFFRRQQEKDPNFFYEIDLDENRKVRNLFWTDGRSRDWYEKYGDCVSFDTTFMTNRYNLPFSPFVGISGHGNTIIFGCAFLHDETTETFVWLFNTFLKAMSGKHPCTIITDQDGAMKSAIAQVFKQTTHRNCFFHIIKKAWNSSGNLFKKEENLYDEYDDIINNSVTEEEFEYLWKDMIERYGLQHIHFLTHMWSIRKRFIPVYFKTNFCPFIQSTALSEGTNSRFKQDVGPQYSITSFLIKYAIVMDTIPNLEQQDDHESRTKRPTRLWSHYYIELQAVKLYNAKIFKKFQVQLKKTTRLQLNEIDKFKTYEVFIALNQTIEVYRRRKYLVMIDLEKEDFSCICAMFQKDGLLCSHILKVMLHNNLSSIPDKYIIQRWRKKEETSKLKSGNHIIPVSDCSTLRFNILSRRSAEFASKGAKTTKSYEFMMQQFDMIDKAWKNRSPEETRQQQSSTENQNNANSASEVDHVEVENTTVNELQILDPEIAKSKGRPQQRYKTIREQIEEKHVNHYSHCGRTDHTFPSCPLKHIEFNLAKKKKENKKPSGTGKDSRQHVEEIKNSK

SEQ ID NO: 147876 - protein, 104 aa, Oryza sativa
  unsure (1)..(104): unsure at all Xaa locations
  Clone ID: PAT_MRT4530_48362C.1.pep
GGGGGRRRAATRPPPPLPLDLAEGRAPPCCRPTPPAAXRWPRLPPTPPAADASPPAAATSPPAGSGGGEGAVAAATSTDEQRREEEREESKRREGERDKREETM

SEQ ID NO: 147877 - protein, 138 aa, Oryza sativa
  Clone ID: PAT_MRT4530_48363C.1.pep
MFSGEWTPPCGSCCTKKYASLVQIPWRVFCKKGCDADGDTWDECISKCTEICYKDPVLEDHQWSAYIDRSPGQDSYSLECFNACVSGCGYRFDIPAEKVEQIKPNRPSKPPPPPPPAVERATNSEPAVKGEDVPCTSA

SEQ ID NO: 147878 - protein, 67 aa, Oryza sativa
  Clone ID: PAT_MRT4530_48364C.1.pep
SFFFFFFFFFFFFFFFFFNWKITIPNIKGKLKEPPNYKRTPTQHTKGPTIGGKEPIPNLVREQNNPI

SEQ ID NO: 147879 - protein, 106 aa, Oryza sativa
  Clone ID: PAT_MRT4530_48365C.1.pep
MCCACAWSWTKPSQANARQSAAQQEEEEEQSLLELVGIAARARARARDGRSYPASNPPLAPSLAYPQQYSRAQQSTHTRDAMDGDNTTVVVTDTATLDTVDFLTHV

SEQ ID NO: 147880 - protein, 46 aa, Oryza sativa
  Clone ID: PAT_MRT4530_48366C.1.pep
AVPAGQQEPRGGRRQVNSARHSSRRRRRARVDFEFQVKWEQADAWV

SEQ ID NO: 147881 - protein, 269 aa, Oryza sativa
  Clone ID: PAT_MRT4530_48367C.1.pep
MATPTTAAAARSPSSSTARTPTATSHCNISNSKPLQMQHQQEQQAGDACLPHLKMMAMPPHLAFSQDQQHATVAAFDQRTLQSNVVAASLWPPPPSQHPCLLQRFAAAPAEVAGLPFILAGGGGAAATAPAATTNGGEQRLQLWDFKEGEQRMTSFATTPNVPNTITVATVLPADANNMWNDTQANTASSSLAVAPLPPPFPFPRLESDAATKADGVAFASVSLQDSGMAVSSLPPLTNQDSQLLFLLVLPIYWEQQQQQLQCRYILQH

SEQ ID NO: 147882 - protein, 122 aa, Oryza sativa
  Clone ID: PAT_MRT4530_48368C.1.pep
MEGSHWIWLRGGAAHRRSMGVTACRLPSCCNTSLLPPLLLQYVVVASLPPPRRPPPPCLPSCRIWRRRGRPTFLPYLPGRCRRRRPFSRLIWRRENAFGRARFFRRAPLTPSTLLLQPPRAR

SEQ ID NO: 147883 - protein, 471 aa, Oryza sativa
  Clone ID: PAT_MRT4530_48369C.1.pep
MGETAEGVEAGEKYVSIPQLAGVGTLLSNGGKEIPLSSIEGKRICLFFSAHWCRPCRNFTPKLLQIYRKLRNTCKNMEIIFISLDRDEISFLDYFKGMPWLALPFDTGLRQKLCVQFDIEHIPALIPLSTTLSHGFRVEEDAVKLVEEYGVDAYPFGAKRRSELEGMDDARRQGGNLLQLLGCKEREYVISADGIKTPISDLNGKTIGLYFGAHWCPPCRAFTKQLREAYDELKALRPGNFQVIFISMDRNEEEFQASLSAMPWFAIPYSDTTVQELSRIFTIKGIPTLLILGPDGKVFKTDGRRIISKYGAMAFPFTESRAYELEEVLKKERDSLPHRVRDHRHEHELELDMAKAYLSTQLFHQTPSVQPCRLNLKTLREEYHLIFTNSNRKTSRPQSSYTRQQRDLNNLYSDPKHLPQLHKHFDQSNVATAENSLRFLNGEPENSDISSIHVAFADLAGKIRGEDDKRD

SEQ ID NO: 147884 - protein, 2032 aa, Oryza sativa
  unsure (1)..(2032): unsure at all Xaa locations
  Clone ID: PAT_MRT4530_4836C.1.pep
MSPSPTWRPVDLRYKRDPXGGPXGIESYRQHIHHSLRNSRTGVPQYPLYPIYGYPPSTVACQVGGLGAQGSTTMTSSFVDNNVNTNLNQGVPTSTMLVRTQVGEIVFPVYTTVPISAGPSMAGNENAVATTQGDSMLKDPPAEAEIRTSTTSEPEKDPSAAKPCLSDKNHEPTRMNSEVTRSWCPIHKTRKHTLQACWVFLNVHAKIRACKERGIQRTSPTRDVYCPIHKTKNHDLSSCKVFLSAMKTPPPKVQQSRVPLRDEDKEQGATLISDRFVGVIDIDPHEPSVLHLLEDYGSSSTSTPCEVLAIDETGTSAHANAEAENQVTTPAQHPYDPVLNDDLARWTERLRESVTNLSNAFEEAAAAVHPEQPPTGDANGENPEQWESPHRATPPPRGTSDLRDHLNGRREAXRTRDNENRSRHHVSXRRHDNGVNRHNRHNHDDCERRVLGDTGQGRRHNDDDDGDRRRDNNGRRRQDPREPGQRPRNHTLEPSDPSSSSSSSSSSSSDRHPRRTYDCRQPTAPSAGCRAFGRSLRDVRWPERFRPGAIEKYDGSTDPEEFLQVYSTVLYAAGADDNALANYLPTTLKGSARSWLMHLPPXDFFQGTYKRHAIEDDLHALTQNPDESXRDYVRLLNECRNTIPEITDASVIRAFKSGVRDRYTTQELATRRITTTRRLFEIVDRCAHADDALRRKNNKPKTGGEKKPVKDAPESSKKKNRKSGKRKAQADVLATEYADPPKCPDSQGSDTKKTWCLIHKSDKHSLEDCLVFKKSLAKHMTLEKGKRVRVVEKDAEAVTQESDSAYPDSDLHVSHIFXVPRRRYPIVVELTIQNIKVAXVLINGGSSINLLFASTLDAMGIPRSELTPTDQPFHGITPQSSSKPLGKITLPVTFGQANNFRTEQITFDVAEFDTAYNAIIGRTALAKFMAASHYAYQVLKMPGPKGTISIQGNAKLAVQCDKRSLDMVEHTPSPPDTAEPPKKVSRTNKTPKPDGAIKIVPLSSANPDKTELALITFLRDNADVFTWQPSDMPGVPREVIEHKLMVRPDAKLVKQKLRRFAPDRKQAIREELDKLLKAGFIGEVLHPEWLTNPVMVRKANGKWRMCVDFTDLNKACPKDHFPLPRIDQLVDSTAGCELLSFLDAYSGYHQISMAKEDEEKKTFITPFGLITAGNTFQRTVQGALSDQLENNVEAYVDDIVVKTKTSDSLIDDLRETFDNLRRYHLMLNPEKCTFGVPSGKLLGFLVSGRGREANPEKMKAIENMKSPTRLXEVQKLTGCMAALSRFVTRIGERGQPFFALLKKQDKFVWTQEAKEAFIALKRYLSNPPVLVAPQPNEELFLYIAATPYSVSTIIVVEREKVQRPVYYVSEALHDAKTRYLHIQKLLYAVIMTSRKLRHYFQAHKVIVVSSFPLGEVVRNKDVVDRIAKWVVELSQFDVCFVPRTTIKSQVLADFVADXTMPDNRSDNQIDNETWTMTFNGALNSQGAGARFILTSPLGDQFKHAIHLNFRATNNTAEYEGLLTGIRAAAALGVRRLIVKGDSELVANQVHKDYKCSSPELSKYLAEVRKLEKRFDGIEVRHVYRKDNIEPNDLARHASRREPLEPGTFLDVLTRPSVKDAGGEDSPVSLNNSSGATEAERAVADIETTDDWRTPLIKFIGSEELPEDDAEAEKISRKAKVYYMIGNDLYKKAPNGVLLKCVLSDDGRHLLLDIHKGICGSHAAGRTLVGKAFRXGFFWPTALKDACDMXTHKATSASTPDYPSHLAVLVLGAKYTRAIPTRTGRLQVPIXVAIDKFTKWIEATPTGEIKADNAIKFIKGIFCRFGLPHRIITDNGSQFISADFQDYCIRLGVKICFASVSHPQSNGQVERANGIVLQGIKTLLWAVRTTPTTSNKETPFFLMYGSEAMLATELQHQSTRVQKYSDEDQEEQQNDDVNLLEEHRERVAVRAASYQQALRCYHEKRIRARTFSIGDYVLRRVQSQAGXNKLSPKWEGPYTITQVLRPGAFKITDGDGRELANSWNIDQLRKFYV

SEQ ID NO: 147885 - protein, 86 aa, Oryza sativa
  Clone ID: PAT_MRT4530_48370C.1.pep
MGRSRTSGDEQEGNGGGGQIRVLCIGVHLHDSQSTASGGQPTVGGRLGGEGGQARNGAASGLGRDAGYRMERGEVDGRQGHFIQYE

SEQ ID NO: 147886 - protein, 139 aa, Oryza sativa
  Clone ID: PAT_MRT4530_48371C.1.pep
WSGDCSIWDHLSILVSISRLLTWFMSRVGSSIVIVLNICQNPPAMFLNSLFHFRSHFIIGICCLSLPNTQKNKNMINNMPEDDESNSSRITRTTVTKNLSLLMLDATETDGMNQVAYPLLMQIVCESVTALLVEELQCH

SEQ ID NO: 147887 - protein, 893 aa, Oryza sativa
  Clone ID: PAT_MRT4530_48372C.1.pep
MSTSTNPTAASSAEYAEHLSNLVAVPSLFHDQQYFLGPIGNLDPTEFIIAETNRTPFRSANPNTSHWKNTFKSWPSLEKSWPVWYKRISASKQAHWDEIGISQALALTIANSAKDEPLMAAATYFWSNTLNAFLFNQGPMTPTLLDIIMLTGLDVTSSANPMNLNTKNTFEFKTKSIGGWSGYITAYMGKGPVTPREHVAFLLMWLEKFLFCGSSCGPTTNWQFLAEALVTKKQFPLGKILLGYLYQILNNASAKIIIGSVVGTEAEFPSLEPIVEDDGEEHTHRRCMSYGEYASTPADAGAKLSAELLKDWFFSFYDGFQKDARVWFFYADSMDFELPADFRFEDINHEKFQQSREIFTTAISPCILPVGIHQGRNIQVSYEFYHPMSSARQLGMGQLPIGLYFANKIQCRGDISSTLMMDQLLNIPGPPLGSIENIKLARFRSRTFDRWWGEWKLHLFHQSASMYMTDLFPDAIPHTTESSPPHQSNSGKVIKYAPGLIPNGGGPSPSAIGYNAPKTSALPRGLIREPADAGKKRRTRSSAADTSAPAPKNKAKTKKAKPADDLPALDPSIEQALDEEEIEEDIDQAAAEISDTERTPLASPKQSPPSPSASAQLAKRKKIAVRNRSATSTLKPAPTAESGGHTPSTAGSHHVEEEEQLAAPTIPVLADLFSFDIKDYLDETEEDTTSKAIALLSDDMKKTLEDISHRLGASLDNLVTNCGSIRARFADIQAFLSDELADALTPAVYLEQHQFKLEKARQRLSDRRERKDIEATIQTNRQRVHEEKAKLDQLSEGPIKSNVDRLEAHKIELLAQLQECNAKLDLEHKKLTDLMQAVEEQKARLKSAIKNIAEMTKSLKVIPGTDAQDAQAIEEIDQIRQRAISAIQRYLSQ

SEQ ID NO: 147888 - protein, 743 aa, Oryza sativa
  Clone ID: PAT_MRT4530_48373C.1.pep
MSTSTNPTAASSAEYAEHVSNLVAVPSLLHDQQYFLGPIGNLDPAEFIIAETNRTPFRSANPNTSHWKNTFKSWPSLEKSWPVWYKRISASKQAYWDEIGISQALALTIANSAKDEPLMAAATYFWSNTLNAFLFNQGPMTPTLLDIIMLTGLDVTSSANPMNLNTKNTFEFKTKSIGGWSGYITAYMGKGPVTPREHILNNASAKIIIGSVVGAGGPWWLLQSWLNLVVMKVVNRPSVTEAEFPRLEPIVEDDGEERTHRRCMSYGEYASTPADAGAKLSAELLKDWFFSFYDGFQKDARVWFFYADSMDFELPADFRFEDINHEKFQQSREIFTTAISPCILPVGIHQGRNIQVLEWDNCQSARQLGMGQLPIGLYFANKIQCRGDISSTLMMDRLLNIPGPPLGSIENIKLARFRSRAFDRWWGEWKLHLFHQSASMYMTDLFPDAIPQTTESSPPRQSNSGKVIKYAPGLIQNGGGPSPSTIGFNAPKSLALLQGLIREPADASKKRRTRSSAADTSAPAPKKKTKTKKAKPADDLPALDPSIEQALDEEEIEEDIDQATAEISDTERTPSASPKQAPPSPSASAQLAKVLADLFSFDIKDYLDETEEDTTSKATVLLSDDVKKTLEDISHRLGASLDNLVTNCGSIRARFADIQAFLPDELTDALTPAVYLEQHQFKLEKARQRLADRRERKDIEATIQTNRQCVHEEKAKLDHLSEGPIKSNIDWLEARKIELLAQL

SEQ ID NO: 147889 - protein, 956 aa, Oryza sativa
  Clone ID: PAT_MRT4530_48374C.1.pep
MAPPPESETLRLHASFLCSLAIALLRAGRLSAASHLLSSLPSPPAPLLLRRLIPALATSGLAAAAIRFRPADPASLNALLYSHCRLRLLRPAIALLRSSRPTTVAYNILLAALSDHAHAPAVLAEMCKRGVPFDGVTVNTLLAGLCRNGQVDAAAALADRGGGIHALDVIGWNTLIAGYCRVGDTPAALSVADRMTAQGLPMDVVGYNTLVAGFCRAGQVDAARGVLDMMKEAGVDPNVATYTPFIVYYCRTKGVEEAFDLYEGMVRNGVLLDVVTLSALVAGLCRDGRFSEAYALFREMDKVGAAPNHVTYCTLIDSLAKAGRGKELLSLLGEMVSRGVVMDLVTYTALMDWLGKQGKTDEVKDTLRFALSDNLSPNGVTYTVLIDALCKAHNVDEAEQVLLEMEEKSISPNVVTFSSVINGFVKRGLLDKATEYKRMMKERGINPNVVTYGTLIDGFFKFQGQDAALEVYHDMLCEGVKVNKFIVDSLVNGLRQNGKIEEAMALFKDASGSGLSLDHVNYTTLIDGLFKAGDMPTAFKFGQELMDRNMLPDAVVYNVFINCLCMLGKFKEAKSFLTEMRNMGLKPDQSTYNTMIVSHCRKGETAKALKLLHEMKMSSIKPNLITYNTLVAGLFGTGAVEKAKYLLNEMVSAGFSPSSLTHRRVLQACSQSRRLDVILDIHEWMMNAGLHADITVYNTLLQVLCYHGMTRKATVVLEEMLGSGIAPDTITFNALILGHCKSSHLDNAFATYAQMLHQNISPNIATFNTLLGGLESVGRIGEAGTVLIEMEKSGLEPNNLTYDILATGHGKQSNKVEAMRLYCEMVGKGFVPKVSTYNALISDFTKAGMMTQAKELFKDMQKRGMILQESRNPRIHILRKYTASVHLDIGDLCILVLPGLDHRIISGTGGVLITAELFRLLHKTFTKPRKKEMKPMRKCQLCPDYIDPTQIIVKTR

SEQ ID NO: 147890 - protein, 845 aa, Oryza sativa
  Clone ID: PAT_MRT4530_48375C.1.pep
MSTSTNPTAASSTEYAEHLSNLVAVPSLLHDQQYFLGPIDNLDPTEFIIAETNRTPFRSANPTTSHWKNTFKSWPSLEKSWFVWYKRISGSKQAHWDEIRISQALALTIANSAKDEPLMSAATYFWSNTLNAFLFNQGPMTPTLLDIIMLTGLDVTSSANPMNLNTKNTFEFKTKSIGGWSGYITAYMGKGPVTPREHVAFLLMWLEKFLFCRSSYGPTTNWQFLAEALVTKKQFPLGKILLGYLYQILNNASAKIIVGSVVGTGGPWWLLQSWLNLVVMKVVNRPSVTEAEFPRLEPIMEDDGEKRTHRRCMSYGEYASTPADAGAKLSAELLKDWFFSFYDGFQKDARIWFFYADSMDFELPADFRFEDINHEKFQQSREIFTTAISPCILPVGIHQGRNIQVSYEFYHPMSSARQLGMGQLPIGLYFTDKIQCRGNISSTLMMDRLLNIPGPPLGSIENIKLARLRSRAFDRWWGEWKLHLFHQSASMYMTDLFPDAIPQTTESSPPRQSNSGKVIKYALGLISNGGGPSLSTISFNAPKTSALLQGLIREPADADKKRRTRSSATDTSAPAPKKKAKTKKAKPADDLPALDPSIEQALDEEEIGEDIDQAAAEISDTERTPSASPKQAPPFPSAPAQLARAESGSRTLSAVGSHHVEEEEQLAAPTIPVLADLFSFDIKDYLDETEEDTTSKATALLSDDHQFKLEKARQMLADRRERKDIEATIQTNRQLVHEEKAKLDQLSEGPIKSNIDRLEARKIELLAQLQECNAELDLEHKKLADLPQAVEEQKARLKSAIKNVAEMSKSLKVIPGTDAQDAQAIEEIDQIRQKAISAIQRYLSQ

SEQ ID NO: 147891 - protein, 167 aa, Oryza sativa
  unsure (1)..(167): unsure at all Xaa locations
  Clone ID: PAT_MRT4530_48376C.1.pep
AARNFGTRRLGVPSPTTYTVGGXXTQARPGGEAAELNQFQRGTAYKGRTRPANRRPSSRSSFYLPPXTYPVIPRRPAKTTGYAPYVPKRRRRLPLRARRREAAAQGTLLEFLLPAERSMDERRLLRAAAGKGQGGRVRLKAAQTADTARTRHNRTVSSLDINLTHDD

SEQ ID NO: 147892 - protein, 742 aa, Oryza sativa
  Clone ID: PAT_MRT4530_48377C.1.pep
MAAATYFWSNTLNAFLFNQGPMTPTLLDIIMLTGLDVTSSANPMNLNTKNTFEFRTKSIGGWSGYITAYMGKGPVTPREHVAFLLMWLEKFLFCGSSCGPTTNWQFLAEALVMKKQFPLGKILLGYLYQILNNASAKIIVGSVVGTGGPWWLLQSWLNLVVMKVVNRPSVTEAEFPRLEPIVEDDGEKRTNHRCMSYGEYASTPANAGAKLSAELLKDWFFSFYDGFQKDARIWFFYADSMDFELPADFRFEDINHEKFQQSREIFTTAISPCILPIGIHQGRNIQLSYEFYHPMSSARQLGMGKLLIGLYFTDKIQCRGNISSTLMMDRLLNIPGPPLGSIENIKLARLRSRAFDRWWGEWKLHLFHQSASMYMTDLFPDAIPQTTESSPPRQSNSGKVIKYAPGLISNGGGPSLSTIGFNAPKTSALLQRLIREPADADKKRRTRSSATDTSALAPKKKAKTKKAKPADDLPALDPSIEQALDEEEIGEDIDQAAAEINDTERTTSASPKQAPPFPSAPAQLARRKKIAVRKKSVTLAPKPAPPVESGGRTPSAAGSHHVEEEEQLAAPTIPVLADLFSFDIKDYLDETEEDTTSKATVLPSDDVKKTLEDISHRLGASLDNLVTNCGSIRARFADIQAFLPDELADALTLAVYLEQHQFKLEKARQRLADRRERNDIEATIQTNRQLVHEEKTKLDQLFEGPIKSNIDRLEARKIELLAQLQECNAELDLEHKKLADLP

SEQ ID NO: 147893 - protein, 562 aa, Oryza sativa
  Clone ID: PAT_MRT4530_48378C.1.pep
MAIAIGMGFSACGRFLNGHHDAPTRCRIPVWFRHEEGSRPEPDSVPAAAPQWNREEAPHGQGRTLIPRWLPIPLPGHRRRAILAAPLSQPYRLLPCAAATASVVPRESIPPTGDSAYFPDATAPTSRRPNCGRGGNCGLMAARRRRILGVTVAAVADLVDSDATNSHINHSLEGSCLKDAASAASTSLTDKSTAVKNGTIEIISTSPPTPARPHPPTRARTVAPQIRPPCPDSPPVSSPPPQIPPSVDRPFITQPSHPCSLPPLTLISSAPPPPVLRIPDPSPASTQLPPPPRRRHHHLHPPRRPHNLRPRRPHAAPHRPVLRRRAAVAGTAPAHIAASPQLLRPTAPRGCSQSSPPLAPRRRGVGGDGGIDRPAATAGVRKLPSADSEWLLDKAWDILKNSSFLCSRDRVKIISGMDEAYYGWIALNHHLNMLGTSSSKMTYGSLDLGGSSLQVTFETDNSIQDETSMSLRIGSISHQLSAYSLSGYGLNDAFDKSVAHLVKKLGGAAGSPVQVKHPCLQTGYKEDYICSYCHPLKLDGSPSVGGKTTGKEKQGMADELIG

SEQ ID NO: 147894 - protein, 706 aa, Oryza sativa
  Clone ID: PAT_MRT4530_48379C.1.pep
MSTSTNPTAASSAEYAEHLSNLVAVPSLLHDQQYFLGPIGNLDPTEFIIAETNRIPFRSTNPKTSHWKNTFKSWPSLEKSWPVWYKRISASKQAHWDEIGISQALALTVAYSAKDEPLMAAATYFWSNTLNAFLFNQGPMTPTLLDIIMLTGLDVTSSANPMNLNTKNTFEFKTKSIGGWSGYITAYMGKGPVTPREHVAFLLMWLEKFLFCGSSCGPTTNWQFLAEALVTKKQFPLGKILLGYLYQILNNASAKIIIGSVVGTGGPWWLLQSSLNLVVMKVVNRPSVTEAEFPRLEPIVEDDGEERTHRRCMSYGEYASTPTDAGAKLSAELLKDWFFSFYDGFQKDARVWFFYADSMDFELPADFSIENIKLARFRSRAFDRWWGAWKLHLFHQSASMYMTDLFPDAIPQTTESSPPHQSNSGKVIKYAPGLIPNGGGPSPSAIGYNAPKTSALPRGLIREPADAGKKRRTRSSAADTSAPTPKNKAKTKKAKPANDLPALDPSIEQALDEEEIEEDIDQAAAEISDTERTPSASPKQAPPSPSASAQFAKAESGGRTPSAAGSHHVEEEEQLATPTIPVLADLFSFDIKDYLDETEEDTTSRAIALLLDDVKKTLKDISHRLGASLDNPVTNCGSIRARFADIQASLSDELVDALTPAVYLEQHQFKLEKARQRLADHWERRDIEATIQTNRQRVHEEKAKLD

SEQ ID NO: 147895 - protein, 235 aa, Oryza sativa
  unsure (1)..(235): unsure at all Xaa locations
  Clone ID: PAT_MRT4530_4837C.1.pep
TCGSTVVLCNRGPKTGPYMAEVGPRWTGCTRLTPAGAVGPTRQPHPRARAADGRAPHGSRGARPKAATPAQPTGGGAPAPRWSPPATTGAAERRPREGREGGNESAVHSSPRVDGDDGNGDRSGGRRRRGSGRRGRRRSGGRRAKRRGGRGRQGCGETKGGGAEAGEGPGRRRRRTGARRXRRRERATARARFRRRERAASGGNGGGRHGECLYRVGSERGRPMRGERERKIRPP

SEQ ID NO: 147896 - protein, 924 aa, Oryza sativa
  unsure (1)..(924): unsure at all Xaa locations
  Clone ID: PAT_MRT4530_48380C.1.pep
MSTSTNPTTAPSAEYAEHLSNLVAVPSLLHDQQYFLSPIGNLDTTEFIIAETNRTPFRSANPNTSHWKNTFKSWPSLEKSWPAWYTRISASKQAHWDEIGISQALALTIANSAKDEPPMAAATYFWSNTLNAFLFNQGPMTPTLLDIIMLTSLDVTSSANPMNLNTKSTFEFKTKSIGGWSGYITAYMGKGPVTPREHVAFLLMWLEKFLFCGSSCGPTTNWQFIAEALATKKQFPLGKILLGYLYQILNNALAKIIIGSVVGAGGPWWLLQSWLNLVVMKVVNRPSVTEAEFPRLEPIVEDDGEERTHRRCMSYGEYASTPADAGAKLSAELLKDWFFSFYDGFQKDARVWFFYADSMDFELPADFRFEDINHEKFQQSREIFTTAINPCILPVGIHQGRNIQVSYEFYHPMSSARQLGIGQLPIGLYFADKIQCRGDISSTLMMDRLLNIPGPPLGSIENIKLARFRSRAFDRWCGEWKLHLFHQSASMYMIDLFPDAIPQTTESSPPRQSNSDKVIKYAPGLIPNGGGPSPSTIGLNAPKSSALLQGLIREPADVSKKRRTRSSAADTSAPVPKKKTKTKKAKSADDLPALDPSIEQALDEEEIEEDIDQAAAEISDTERTPSASPKKTPPTPCTPVHFSRVKETAVRKKSAATTLKPVPPQPPPPSPPVQQLSSNQTPSAVGSHHVEEEEQPAAPAIPVLADLFSFDIKDYLDEETXTDTTSKALASLSDDVKRTLEDISHRLEESSLDSLVVDCGSIRARLHEIQALILDELADILTPAVYLEQHQFKLENAKLRLAEHRERRDIESTIQANRQLVHEEKAKLDQLSEGPIKSNIDRLEAQKIELIAQLEECNAELALEQKKLADLPQVVEEQKARLKSAIKNVADLTKSXKVISGTDAQDAQAIEEVEQIRQRAISAI

SEQ ID NO: 147897 - protein, 888 aa, Oryza sativa
  Clone ID: PAT_MRT4530_48381C.1.pep
MSTSTNPTAASSAEYAEHLSNLVAVPSLLHDQQYFLGPIGNLDPTEFIIAETNRIPFRSANPNTSHWKNTFKSWPSLEKSWPVWYKRISASKQALALTVANSAKDEPLMATATYFWSNTLNAFLFNQGPMTPTLLDIIMLTGLDVTSSANPMNLNTKNTFEFKTKSIGGWSGYITAYMGKGPVTPREHVAFLLMWLEKFLFCGSSCGPTTNWQFLAEALVTKKQFPLGKILLGYLYQILNNASAKIIIGSVVGTGGPWWLLQSWLNLVVMKVVNRPSVTEAEFPRLEPIVEDDGEERTHRRCMSYGEYVSTPADAGTKLSAELLKDWFFSFYDGFQKDARVWFFYADSMDFELPADFRFEDINHEKFQQSREIFTTAISPCILPVGIHQGRNIQVSYEFYHPMSSARQLEMGQLPIGLYFADKIQCRSDISSTLMMDRLLNIPGPPLGSIENIKLARFRSRAFDRWWGEWKLHVFHQSTSMYMTDLFPDTIPQTTESSPPRRSNSGKDIEYAPSLIPNGGGPSPSAIGYNAPKTSALLQGLIREPADAGKKRRTRSSAADTSAPAPKKKAKTKKAKPADDLPALDPSIEQALDEEEIEEDIDQAAAEISDTEKTPSASPKQAPPFPSAPAQLARVESGGRTPSAAGSHHVEEEEQLAAPTIPVLADLFSFDIKDYLDETEEDTTSKATALLSDDVKKTLEDISHRLGASLDNLVTNCGSIRARFADIQASLPDELVDALTPAVYLEQHQFKLEKARQRLADLREHKDIEATIQTNRQLVHEEKAKLDQLSEGLIKSNIDRLEARKIELLAQLQECNAELDLEHRKLADLLQAVEEQKARLKSAIKNVAEMTKSLKVIPGTDAQDAQAIEEINQIRQRAISAIQRYLSQ

SEQ ID NO: 147898 - protein, 98 aa, Oryza sativa
  Clone ID: PAT_MRT4530_48382C.1.pep
MVVTRHRRSVTGYNSGRKETRTRWPEEEREVASVIGAIAVDDLEHHPPWVGGSLRPESLAAGIAKGSRVSMSGDGGGERLCTRTRLCSGLHGILPDFS

SEQ ID NO: 147899 - protein, 149 aa, Oryza sativa
  Clone ID: PAT_MRT4530_48383C.1.pep
MSIELILWLFSFASIMVLIGLTAYQLICLSDLEFDYINPYDSSSRINSVVLIEYALQGALCASFLLTLHWFPFLVMAPVAYYHGKLYMDRKHLVDVTEIFRQLNWEKKYRMIKLAFYFSLFIITIYRLVMTAVTLFIDEDANLVDTRTI

SEQ ID NO: 147900 - protein, 117 aa, Oryza sativa
  Clone ID: PAT_MRT4530_48384C.1.pep
AHWKITAGCSLDDLWYAALYNQLSVLIPCFWFCFSFCFRFLSFRLFTQGFSSSTGASASALTDPVICANDSLAPEVTSPKKSFTLSTTVLSSSFFGSWDNQNILLLVTCYLCSRHAY

SEQ ID NO: 147901 - protein, 131 aa, Oryza sativa
  Clone ID: PAT_MRT4530_48385C.1.pep
VTARAASALSTRATVVSDNGGISEGSNSFLATTVAGASMASTRAGSATARLKRADPLPTTAATTAGRTTTMTVAAARATSAALTKAGCTTAGLEQADPLLTTAGTTVAAVGGATMAMAGGATMMAGSGFWI

SEQ ID NO: 147902 - protein, 758 aa, Oryza sativa
  Clone ID: PAT_MRT4530_48386C.1.pep
MTPSMMAQERGEPLLQSGNGAAGGGAKGWPPPALARTVLKVLMWAVFLTWAAAIFFYPTKPAQAAFEGWMAATKQSLFGITGSIFLAFSAPILIVAALAYVYISAFPSDHIHVEKNKLKTLCFRLWTFPVLVDGPFGVVSAVEFIGIVLFIVYVVYSMTYYAVESVSLISKFGQISLTYSELLLYIIGLRFGSIGLFCMAFLFLPVSRGSVLLRLIDIPFEHATRYHVWLGHLTMALFTLHGLCYVIAWSLEGNLLGELAAWKEIGVANLPGVISLAAGLLMWVTSLHPVRKTYFELFFYTHQLYIIFVVFLAFHVGDFIFSFSAGPIFLFMLDRFLRFWQCRAKVDIISASCRPCGTVELVFSKPASLRYNALSFIFVQVRELSFLEWHPFSVSSSPMDGRYHMSILIKVLGSWTEKLRGIITDAQEQGRNGSESETGRITACVEGPYGHESPYHLMYENLILVAGGIGISPFLAILSDIIHRIEEGKPCMPKNVLVLWSVKKSNELSLLSAVDAQFISSSVSDKLHLDIQAFVTQESQPPLEEGIVGDDQKATGMFVKNGTTMSGLVGTGNNFWAGMYFAASTLGFVLAYALAQAYYVRRLNVFAWWHLGLVFVLCMAAGVALPGGLVVLLWHLSEKRKAEDDRWDAAAAAVPRAQDGEEEAEQTTNGADAADGGVSLAAVKTTRYGCRPQFEAEFAAFAEKAGGGAADVGVLVCGPPGLQASVARECRSHNLGRRGGRRRRAGAVFHFNSHSFDL

SEQ ID NO: 147903 - protein, 85 aa, Oryza sativa
  Clone ID: PAT_MRT4530_48387C.1.pep
DRKTCNSFLCSSSLYRLTCWLLASPPLQVLLPNRGSPCFHFSVDQFWLLQHVSFFHLVVESSIATIHRKYSAKFFVKAVVGVSNS

SEQ ID NO: 147904 - protein, 77 aa, Oryza sativa
  Clone ID: PAT_MRT4530_48388C.1.pep
CSNSSYMGPIYLKMFSNLNRTCRPVSIHVNITLTLKGLSYYNEFLNHDNAINSIGKLYHQNGASWFSQPHIVSDAWS

SEQ ID NO: 147905 - protein, 66 aa, Oryza sativa
  Clone ID: PAT_MRT4530_48389C.1.pep
SFWRLEVHHSSDHDLKNISNGDRIHSLRPEMGNPSEIVLNRSKFISTTPVINLLLVLYVFTVCISH

SEQ ID NO: 147906 - protein, 596 aa, Oryza sativa
  Clone ID: PAT_MRT4530_4838C.1.pep
MRRLLTPPWPAAAAAAPASAAAASAVTVEAVLALLERAISAGDVRRLGAAVHALLVKTALTHHTLLSNRLVALYALLPTPAASLAAFDDLPHKNAHSYNSLLAALARGRGTLPDALRLLDGMPPASRNVVSYNTVISSLARHGRESEALRVFAQLARDRGLGQQQVAIDRFTVVSAASACAGLRDARHLRELHGAVVVSGMEVTVIMANAMVDAYSKAGRVEDARGVFDQMTIRDSVSWTSMIAGYCRASMLDDAVQVFDMMPAQDAIAWTALISGHEQNGEEEIALELFERMTGEGVVPTPFALVSCLGACAKVGLVARGKEVHGFILRRSIGSDPFNVFIHNALIDMYSKCGDMVAAMAVFDRMLERDIISWNSMVTGFSHNGQGKQSLAVFERMLKDEVQPTYVTFLAVLTACSHAGLVSDGRRILESMQDHGVEPRAEHYAAFIDALGRNRQLEEASEFIKGLSSKIGLGTTGSWGALLGACHVHGNIEIAEEVAEALFQLEPENSGRYVMLSNIYSAAGQWDDARQVRALMKGKGLRKDQAYSWIEVQRAKHMFVADDTSHHEANEIYEMLDKLFHHMFIIGGNVEELIVG

SEQ ID NO: 147907 - protein, 66 aa, Oryza sativa
  Clone ID: PAT_MRT4530_48390C.1.pep
IPGLQESARGRERTSLEFFFFFFFFFFHANYNTHFSDGITENRKEYTTTVILFFIRTYVSGGQAED

SEQ ID NO: 147908 - protein, 109 aa, Oryza sativa
  unsure (1)..(109): unsure at all Xaa locations
  Clone ID: PAT_MRT4530_48391C.1.pep
AELLSIKEAKXXSHPQSPARSHCISSSFCHSLFCFFSFGTNSGSGILESVRRKNKMYNPPSAQEMTYKDHVQRRHEEKGCLYACLFTLCCCFCCYETCECCLETLCCCC

SEQ ID NO: 147909 - protein, 58 aa, Oryza sativa
  unsure (1)..(58): unsure at all Xaa locations
  Clone ID: PAT_MRT4530_48392C.1.pep
RHCTVSTCILKSEPAGPCRKSXKVGRAGLYVAVCILYSVYTTYHDEVVQKKKKKKKKK

SEQ ID NO: 147910 - protein, 373 aa, Oryza sativa
  Clone ID: PAT_MRT4530_48393C.1.pep
MRVPIPVLDAQPFRVSVSYRRIAAQGAGLFCCCGLWTLVLDRETKGNYCRRVGEVADRNVNTGWHAAPGAAAETAKKRDQESLSHLTCTHEKWVRSTSTTGLTGLASVADDRVSSPPPPRRTRPKGDTDGDNNLAAAPPHPNPLRLAAARVARRQSRTAARTAAGRSPHEEAQRRDTGGPLGGGKTAANAAAPGTTETDPHPLAADLASPSAVELAATATGGGKGRRHGSTRKATAGVAAACPGVGGRGPVPKRLDPASLAQIWPGCCRSSGNGCGVEAGDMAGVAVAVADSDSDWAAPVVVAAIDDSGRSCVEVTAAAAVEAMAAAAGEAAPVVVADGNDDSGRICGKGGYRSLRWQMRRQGRRRADDRRRE

SEQ ID NO: 147911 - protein, 641 aa, Oryza sativa
  Clone ID: PAT_MRT4530_48395C.1.pep
MARQWPQPSQLRQGGESHLNLAGPSSGQSSRQSYLRHCADSEAAMGMSSCVNLSRVAAAAAGRRPGFAGELGGRRGHGRSVLPVVAALPVRRKGSGCGVACCVSSSSSSSVHGKNSAAAAEGHAGGIGIAEFLGGKNFLITGGTGFLAKVLIEKILRTNPDVGKIYVLIKAKDGDAALKRLHNEEIHGKDYHSFAARKLVPVVGDVREANVGIAPELAGVIADEVDIIVNSAANTTFDERYDVAMDINTVGPFRIMSFAQRFRRLKLFLQVSTAYVNGQRQGVVLEKPFRLGDTIAKELGSPDSSQHKNTMLDIEAEIKLAFDHRRHGDDSASFSEEMKELGLERAKLHGWQDTYVFTKAMGEMVINSMRGDIPVVTIRPSVIESTWRDPFPGWMEGNRMMDPVVLYYGKGQLSGFLADPEGVLDVVPADMVVNATLASMAKHGRGGAAAAAAAAEGMHVYHVASSTVNPLAFGDLSRFLFQHFTGSPYSDAAGRPIHVPPMRLFDTMEQFASYVETDALLRAGRLAGAGAGAGDERVSQRLRELCAKSVEQTIYLGSIYQPYTFYGGRFDNGNTEALIGEMSEEEKARFHFDVRSIEWTDYITNVHIPGLRKHVMKGRGVGGGSGASSSSNASLLAGASV

SEQ ID NO: 147912 - protein, 142 aa, Oryza sativa
  Clone ID: PAT_MRT4530_48396C.1.pep
MVTQVWPPLSVIWARVYKDWREEAAPSVHVALLPGGRAQGWAAAIPSKPEGSSRHVYMVRWVPHSVHLTAFKAVAAGVPRRAERQTGRREVPRLIIMTRGFQPLIPAGVGPPALVKERIPFPGVTGAQKSPSGPPLEEFILR

SEQ ID NO: 147913 - protein, 148 aa, Oryza sativa
  Clone ID: PAT_MRT4530_48397C.1.pep
RYPTLAMIYVLIKAKDGDAALKRLHNEVVDTELFSRLQEIHGKDYHSFGERKLVPVVSDDREANVGMDHELAGVIADEVDIMVNSAANTTFDERYDVAMDINNRRPFRIMSFAQRFRRLKLFLQVSTAYVNGQRQGVVLEKPFRWGTP

SEQ ID NO: 147914 - protein, 37 aa, Oryza sativa
  Clone ID: PAT_MRT4530_48398C.1.pep
CRSGNTTPKASSTARTKPTPRRNLHLTHTRTLGLGKN

SEQ ID NO: 147915 - protein, 1117 aa, Oryza sativa
  Clone ID: PAT_MRT4530_48399C.1.pep
MEDVLMHILPVDSEQRIAENWNRLSAFGEIDLFKRSVLQVFARVNNLGNEISPVQAWCQPELRGEKTSNNDGQTVITPVELIKKPVEKQVITEGRLQLAGDGYQLLSSNGIDKTAEQLYVDQLGRQTNSMDQSLQHTDGQNQSHDNMESNEVSSDDRNSDGDSDRSLGNESDKGLGAHYSPSLMELDNARPPELGMKFATLEDAQRFYETHALKTGFVAKRGTNYRRKKFTIECHKTGTSKLTPNPQRKRKKNIIERTQCQAKVVVKLNKGQWEYAAVRNEHNHPLCPSYSLRFSKRKRRRNPPSQKQLDVQRNSDQLTQADNLEERLSQPLISADSNEVNNKRMPRHAEISISTVEKEPVDKLQRAGDYQEQSSNGIDKNTERPIVDKLGDQTSSIDHSLQHTEEHNRSHDNVESSEAPSEDTSSESNSDSSSGDESDKELGKYFYPSFDELKNSRPPEPGMKFPSLQAAQRFYYAHALLTGFVGKRGTNYKRKKFHLECNKSGKMKLTKSSENPMKKRRSNLVEKTQCKARVIVKLDKGEWEFTAVRHEHNHPLCPSPLLARFIVDHKQMSTGEKSFLRVLQQNRVPPKKIMKIFRKLRVCFGDIPFENKDEHNIAQTEHRKANSDVESALKHFTELQIQNPEFLYVMQKDEDNTVTSIFWTDARLRIEYDIFGDLIMFDAAYSTDMYNMPFVPIIGINSHATPFLLGCALLKDEKVETFEWMLRTFLQVMGGKMPRAVITNQDTSMEKAFAELMPHVRLRFCKRHVMSKAQEKLGDFMTARGNINTDLHNLVGNSLVETEFEEGWVELIERYNASENQHLQLMWQTRKSWAPVYFREDLYPFIDSVGSNEGINSLFKGNMLPKDTIDKFIGQFKEIQENIAKVHEEDRFQSGADLKYISMQPIEQHAAHIYTREIFLKVQEELLHSTAFNVQEIQIGTVYRLEKVFNYENPEFDRNYFEVLAEPGINAFKCQCAKFTRDGIPCCHIFRLFTQFGINEIPEQYIMPRWTKKFREEQLKQNKEKLFDKHGIKDSENTLRYAMLMSKAAEICPKICHDEAKCSIFMQELDKIQEKLITESRENAQNDNPCREQGALQQEHRGSSSNTEQEQQHTGGL

SEQ ID NO: 147916 - protein, 273 aa, Oryza sativa
  unsure (1)..(273): unsure at all Xaa locations
  Clone ID: PAT_MRT4530_4839C.1.pep
MAGKGKPKRPVPGSPPSCPTRRETPTKTKKAAGPGSVHQDGGVPAXSAGQNEGVDEVDEDPAKPKGGQRRSGRRSQGDDGGGPELGGDGEKRERRRELDSDGERERRVAETEEGGTGNVXIVLGVREGGRMRGNRPRKIRPPLMCRRSSRGSFQTNPREREREKWGERGRESRGVISPSLLRAGTAGCGGIRGGGGARARARRRVRREVGDDGWAPPVSEGGGRARPSAARARGGGXMGRGGEEREGEGWAEPAQEGKGGKKTFRVFLFIKPL

SEQ ID NO: 147917 - protein, 410 aa, Oryza sativa
  Clone ID: PAT_MRT4530_483C.1.pep
MASLPPPPPPPRPLLLTVLPQELVVEILIRLDDLADLARAASACRALRRLITSRAFLRRVHALHPRPLLGLLHLEHHGSRCRFLPAEPPHPSAATAAAVARAFDSDSDSDSSFSFLPGRSGDWRLRDVRHGLAVLSTRHAVTDDGCFSFPDVVVCNPLRRRYAWIPPISDDLAAPIRSLGVGVEDFDYLVAPAGREGLSFRVICRPQLPMGCDVTVFVFSSSAVIWRAATLHACAATAQLVSPQYAHGYAYWRLIRSATRLLLLDTRDMDFFFVDFEQRSVPWQAIGEAGEVGRLAMFNIAHANHTVELLSGAIRGSADEHWRHDKTIPLLPGYKWRILKLAEGYLLLQGRILGDGTSQFTPGDQLQYFTLDINTFKLERLCASTPQGISYHPQFELYRCFPPPLSFSSI

SEQ ID NO: 147918 - protein, 117 aa, Oryza sativa
  Clone ID: PAT_MRT4530_48400C.1.pep
MGRSIQGGATLGQQGNLPNLPCSGGLESLPWSYVAMECGRDTHAGGRNTCYQHDHRREVRNKCGEAPKVIVCAHAILPVVVLGARVQGGHRRVIFDQSGVRRTQEAKGNARRTSDLR

SEQ ID NO: 147919 - protein, 104 aa, Oryza sativa
  unsure (1)..(104): unsure at all Xaa locations
  Clone ID: PAT_MRT4530_48401C.1.pep
SSFSPETTGVGXSAGFLSAFLLGLRXSXXRSIXKXXYXIXGDVDSSSCHPCMDFTTQMIPGVSQLSSSTQTLASGFLAVISINLVXRLLYMHGDEGDSPPRATT

SEQ ID NO: 147920 - protein, 103 aa, Oryza sativa
  unsure (1)..(103): unsure at all Xaa locations
  Clone ID: PAT_MRT4530_48402C.1.pep
LXHPLRTFSLLTKLTAKRQNPPGERDTNTTQPAPPRPGXIDHDRSHPSRSPTTTSTNPPRHHYIIPSYPCRFSANPYKYGAFAPASYSXMAGSRRAXSGLPPT

SEQ ID NO: 147921 - protein, 41 aa, Oryza sativa
  Clone ID: PAT_MRT4530_48403C.1.pep
TKRNSSWGLAPIKTELLFLHRPYMNLYKKILQAYSTFGMCG

SEQ ID NO: 147922 - protein, 114 aa, Oryza sativa
  Clone ID: PAT_MRT4530_48404C.1.pep
FHEAKIIYNLYLKGLINLALHRLCCRCGNHLNALINLNFMICLSICARGENGTETFWIPDLFSKTESVSRNFFGIFRKWKRIRKYFLGNRIGNDKGSFRRNSESRLVTPTGTKD

SEQ ID NO: 147923 - protein, 111 aa, Oryza sativa
  Clone ID: PAT_MRT4530_48405C.1.pep
AQWKKALRRRRNLRDVARVDVEEVVDRTGSTFSSSCVLLVVLPRKSAPQTSNASTGIHTYRDGTPRADVLAPARGSYTLGCNPKTPFRSTCQQRHLAERIDPPCIHKDHIG

SEQ ID NO: 147924 - protein, 333 aa, Oryza sativa
  unsure (1)..(333): unsure at all Xaa locations
  Clone ID: PAT_MRT4530_48406C.1.pep
CRPNKSPRCIGPGRCRRHGWGWLPLRPRTPPRPRHRHPRFSPIRWRRGRRGCGDGDDRRRGGGGGRSCGRAAGEGRRGXRSGRHPQGAAATHKXXGGEELRECGGARWRAAGGGWSDGRSGGRCTRRTGLPEDRATPRGATSRQSRQAAGRHVAGEEDGADGKRDGESEDDAAVVVHGRRSRASALNGVADGSVTATGDAVGRRASRPVRAAACVVVTELDRPSPFSRQGTRKRGGRRCRGRGDDGSGQRQHPHRRSWRLXWQRVRGTAARALLLPPPPMPIARAQLASCFPAVRRPHRPRFAAGRLSLLKSQSQPLPPSSPVSSSPDLLPTR

SEQ ID NO: 147925 - protein, 48 aa, Oryza sativa
  Clone ID: PAT_MRT4530_48407C.1.pep
TNYFYIILYFNSFIFFFFFKQTRSPNFLQVIQNLTQITHIFSLRVNWP

SEQ ID NO: 147926 - protein, 72 aa, Oryza sativa
  Clone ID: PAT_MRT4530_48408C.1.pep
SNTPYHRLFRGEESTNKKKLTSQQCCSPNSDLCHVLYPTGLTPTDSSRARCTSGRISGLILPWTPGRQVIEA

SEQ ID NO: 147927 - protein, 98 aa, Oryza sativa
  Clone ID: PAT_MRT4530_48409C.1.pep
MNNPKDEKLAKLYLSSTVHAPTLELVSSGHVLLVEQVLHPHGTPELIVDGCVLCNDDNQAPCSAAVLGWRGQLRSATVVSATAPSHRYLARNPVVSAP

SEQ ID NO: 147928 - protein, 89 aa, Oryza sativa
  Clone ID: PAT_MRT4530_4840C.1.pep
TSKAPPQSRSCSEQQEVKELCLRSSSVPSTITYSVEIVSCQAKKHKRATTSVQKWPVLLIGGDFVYSLSTGESMARRRAPKSAMTNELS

SEQ ID NO: 147929 - protein, 72 aa, Oryza sativa
  unsure (1)..(72): unsure at all Xaa locations
  Clone ID: PAT_MRT4530_48410C.1.pep
MKIIFVFALLAIVACNASARFDPXSPSYRQSQLQSHLLLQQQVXXPCSEFPREQYSLVAXPFWQPVTFQLIN

SEQ ID NO: 147930 - protein, 398 aa, Oryza sativa
  Clone ID: PAT_MRT4530_48411C.1.pep
MAPLYFALGLGYGSVRWWRLFTADQCDAVNRLVACFAVPFFAFDFAARIDPFALSYRVLAADALSKLAVALALAACAAAASTRCCGSGGGKRGGGGGFSWCITGFSLATLNNTLVVGVPLLDAMYGKWARDLIVQISVVQTIVYFPLLLLAFEVRRATTAAAAPPPPPTGTDDDDVEDGAAAAATAAAARRSLWPLVRAVWLKVARNPNVYAGVLGVAWACVTNRWHVETPSIIEGSVLIMSKTGVGLSMFSMGLFMALQDKIIVCGAGLTVLGMALRFVAGPAATAVGAFALGLRGDLLRLAIIQAYTHLHEIHSPSSFFLLSPEICLNSNGCMHDTSPHDETARDEQAALPQSITTFVFAKEYGLHAEILSTAVIFGTLASLPVLIVYYIVLGFIR

SEQ ID NO: 147931 - protein, 176 aa, Oryza sativa
  unsure (1)..(176): unsure at all Xaa locations
  Clone ID: PAT_MRT4530_48412C.1.pep
SLLKEAIHVVSCAFEERTRWGKEIGWMYGGGVVTGFRMHARGWSSAYCSPARLAFRSYTRANPTDVLTRASRXAVVAMGILLSRRHSPAWAGXGRWGLLQRLGYVTRVAYPLASLLLTVYCVLPAVCLLTGKSTFPGDVNYYDGVLLILLLFSVATSVVLELRWSCVPLRAWWSDE

SEQ ID NO: 147932 - protein, 158 aa, Oryza sativa
  Clone ID: PAT_MRT4530_48413C.1.pep
MDDRKHPIATGTPPLLYILLPQLAALFPWAAWTAGDGEIGSVGARDGGSSSKTPTHVLLQLVAFLPWPDTDELLSLSVKLLLMQTEVVRSGDDDELGGAERERKQASSALATTQLVMVASLATSAALHEVGSADVCVAWNPRCGWSGPNVKHAHYKWH

SEQ ID NO: 147933 - protein, 1006 aa, Oryza sativa
  unsure (1)..(1006): unsure at all Xaa locations
  Clone ID: PAT_MRT4530_48414C.1.pep
EARATAPRSPAPPRHEFHGRGVVVVVVYGPSPPPIDAPRAAAGGRASSRAPLGLPHAAAPEAEAAKESVAVAVRFRPLSPREVRRGEKIAWYADGETVARSEQSNLAYAYDRVFGPTTTTRHIYDAVAQYVVNGAMKGINGTIFAYGVTSSGKTHTMHGDQISPGVIPLAVKDIFNIIQETPNREFLLRVSYLEIYNEVVNDLLNPAGQNLRIREDLQGTIVEGIKEEAVLSPVHALSLIAAGEVFSELRHVGSTNFNLLSSRSHTIFTLTIESSPRGQSNEAEAVTLSQLNLIDLAGSESSRVETAGVHQKEGSYINKSLLTLGKVISKLTDEKATHIPFRDSKLTRLLKSSLSGQGRVSLICTVTPASSNSEETHNTLKFAHRAKHIEIQATQNKIMDARSLIKKYQNEIRQLKEELEQLRRSIRTGTPIEDTMQKKHHLLETKEDCNVKLQSRLEQGEEAKAALLERIEHLTELILVSAKASRTTKSSHCPRRRHSFGEEELAYLPYERQDIILDNESNMLFVPIEGFGEKFKSSPKEETENQKGHLNWLNLRKCDVSTNLTSSDGENPSSTKSLPALSTPLGIGFFNVTSEQRMSDYMLAENVPANLLCVGHREFPSDSLPVQETSRKTSDHVDILREQFNILSGEVALHQSVLKRLSEEAGKNAMNEQIEMEMKVVNDEVKLNKQKIASLERRISNSMSNSRGMHDNLDVVQPYIEIPEQLNEKAFQLEVNKLLXFMRLFFGSELHAPGWXLKHCVLLLMERYIILSFIMKCVSIXILPPFFNRXVPLTFNILFDHLSYSKIKCKYAKKKKSSLKFLVGXLLVLPRMVLLCYTFSLQAEIDELKQRVSELTEAKSQLDSCNHKLLEESTYAKGLASVTSVELKALSVKVTKLMKQNERLSSELASGRNQRRGSHGPRGARRESHTKRYEPARRGDMNALEAMLKEKDQRQAELHTKIEESKQKEAFLEKELANMWTVLANLKKTRGIDQEDFDSKYNGSWA

SEQ ID NO: 147934 - protein, 662 aa, Oryza sativa
  Clone ID: PAT_MRT4530_48415C.1.pep
MDRPRSSKRGYHYDQDSPPPRSKPRFDRRGGPNPNNSYHRRGPPGGGGGDRRGGFQLPPDAAPPPPPPPPPSSAAAGGGGPGMTTSFRILCPQSKVYGFPPSFIAKVRDDTNAVVTIHLPYPGDAVRVIETSDGARREADGRPPSFSPAQEALLMVHRRILETEPDDGDEDGEYGPRAKDARDRGKVTTRLIVPRLHVGCLLGKGGKIIEQMRAETKTHIRILPRDQHTPRCVSLSEEVVQVVGEGNCVKKAVAIISDRLKESLHRDRGPFRGRMNSPEHRFPQEDEYYGGAQQMPAYEEPYGRPDQIRNNTSMELPGYEFDSNGGKINDHTEILFDDIIFRILCPSDKVNSLVGTRDGLLEMLQEDVGVDIRLTDSLDGSDERIIIITSREGPDHELFPAQEALLHLQTHIVDLGPDKDNIITTRLLVPSSEIACFEGRDGSLSDIQRQTSANVQILPRQALPSCALESDELIQIVGEIRAARDALVQITAKLRSYFYREIPGPNQLGNITVHGSISPAKGSPRGPYQGSDIPMPSYQQAQHVPASWKDSGGGANMSFEQGSNINDDMRQSAAKRFAVPLVTRSTLEVVIPKSAVASLTMRAGSKLAQISEMSGATVTLADERPDAIEKVVRISGTPEQADKAQSLLQGFILSIQDDIPSG

SEQ ID NO: 147935 - protein, 451 aa, Oryza sativa
  Clone ID: PAT_MRT4530_48416C.1.pep
MAAKPSAAEVAVTVTPVTLSVAACSGRHVESTETALGAEVHLCINKIMIHRYPAILQNLKMDYYRYFVPSVVAIGPYHHGARHLQEAEKIKWSAVCDFCKNTGHSADEVYWKILPIASGARSCYEGDAVVGVRKAEFAAMMIRDGCFLLQFMAHMCDVAVDPLLQTWFGSKQPSILRDMFMLENQIPWVVLEALMTFMPVPVPVDNFISNAGASFNVRLDDNINPFDLNEISCKPHLLGLLRYYQSGLSKLGESSWVLKRPEGVTTALRQSSSAIELAEIGIDVVATEASWFADMKISKGLLFGKLSMPPLVMDDLNACWLLNMVALESYLAFTGKNDVQTVSSYISLLAMLMNRKEEVHELRLKGILHGKFSDKCTLSFLKNLAGLISLPPQHVCLLAHLEAYQRKRWMWIPIHKFLYNNYRIIVTVFSVIGVLVGIFKTLVSIEQQMQL

SEQ ID NO: 147936 - protein, 140 aa, Oryza sativa
  Clone ID: PAT_MRT4530_48417C.1.pep
MAVEARTSIGREEEPTRVCLPSPTRPPPRPLNHVAGKPPNRCRFLRQIRRQGHSTTKVGQERRAAGWGDDEERWPWEETGLPGAPPLRSVSVKLADHATRSSLAACLSPTTLGLVSTLVERGGEGERGAAGEIAEAGLPV

SEQ ID NO: 147937 - protein, 153 aa, Oryza sativa
  Clone ID: PAT_MRT4530_48418C.1.pep
MNLLLYSKGFSHALGPIKSCRLTQADTGRIPVIHHLMDVDSGVLVHRECHPGKARAHCGSLRWGRAVAQVGGSIGCWGRAMALGRAMTQVGGGIGRWGLSDGPITVGEERRTAYGASGERPWRASDLASGDGEWVGGGEVVRRGETNTAHARA

SEQ ID NO: 147938 - protein, 124 aa, Oryza sativa
  unsure (1)..(124): unsure at all Xaa locations
  Clone ID: PAT_MRT4530_48419C.1.pep
NVKKHQNMIFGHIAVXIGCVRGKKSLRDSRGELMSIDANIGLYXTRGCDVFNRNEKVQKSPKLDFCTYWSVLGVFVAKNHFKIRAANFCQLTPILAHIGAMFFTXNQKVQKAPKHDFWTYWSVL

SEQ ID NO: 147939 - protein, 1681 aa, Oryza sativa
  Clone ID: PAT_MRT4530_4841C.1.pep
MSYYVDPCTNVPQYPLYPVYGYHPSIVARQVGTLGTQGSTTMSSSFVDNNVNTSLSQVLPASTMLVWTQVGEIVFPVYTTTLISTGPPMTGNENAVATNQGDSMSKNPPVETKNGTSTTSKLEKDSDTVKPCLSDMNREPTKMTSEATRSWCPIHKTKKHTLQDCWVFLNVCAEIRACKERGIQRTSPTRDVYCPIHKTKNHDLSSCKVFLGAMKAPSPKSYAPIRDNGKEQGATPTSDRFVGVIDIDPHKPSVLHLLEDYGSSITSAPREVLAIDDVGTSAHANAEAANQSTTPAQHIRAVQAILRETPYDPVLNDDLECWTERLRESVTNLSNAFEEAATAAHQEQPPTGDANASSSSSDRHPRKTHDRRQPTAPNAGCRAFGRSLRDVRWPERFRPGAIEKYDGSTDPEEFLQVYSTVLYAAGADDNALANYLPTALKGSARSWLMHIPPYSISSWADLWQQFVANFQGTYKRHAIEDDLHALTQNSGESLREYVRRFNECRNTIPEITDASVIRAFKSGARTTCRRPGGVKKPATDASESSKKKNRKNGKRKAQAEVLAAEYANPPKRPDPQGSDTKKSWCPIHKTDRHSLEDCLVFKKSLEKHMAFEKGKRVRVVEKNEETAPNESDSAYPDSDLHVSHIFGSSTTYSSKREYKKVEREVCSTWQGAAPKMKWSEQKIEFSEEDHPKTAVIPGRYPIMVEPTIRNIKVARVLIDGGSSINLLFASTLDATGIPQSELTPTDQPFHGITPQSSSRPLGKITLPVTFGQANNFRTEQITFDVVEFDTACNAIIGRTALVKFMAAFHYVYQVLKMPGPKGTITIRGNAKLAVQCDKRSLDMVEQTPSPSATTEPPKKPSDMPGVPRKVIEHKLMVRPDAKLVKQRLRRFAPDRKQAIREELDKLLKAGFIREVLHPKWLANPVMVRKANGKWRMCVDFTDLNKACPKDHFPLPRIDQLVDSTAGCELLSFLNAYSGYHQISMAKEDEEKTAFITPFGVFCYVKMPFGLITAGNTFQRTIQGALSDQLGNNVKAYVDDIVVKTKTGDSLIDDLWETFDNLRRYRLMLNPEKCTFGVPSGKLLGFLVSGRGIEANPEKIKAIENMKSPTRLKEVQKLTGCMAALSRKLRHYFQAHSVTVVSSCPLGEVVRNKDVVGRIAKWVVELSQFDVHFVPQTAIKSQVLADFVADWTMPDNKSDNQGDNETWTMAFDGALNSQGAGAGFILTSPFGDQFKHAIHLNFRATNNTAEYEGLLAGIRAATALGAKRLIVKGDSELVANQVHKDYKCSNPELSKYLAEVRKLEKRFDGIEVRHIYRKDNVEPDDLARRASRREPLEPGTFLDILTKPSVEKVSDEDSPNTPDIGSEVTEAEHAVADIETTDDWRIPLIKFISSEELPEDDTEAEKITRKAKIYCMIGNDLYKKAPNGVLLKCVSTDDGRHLLLDIHEGICGSHAAGRTLVGKAFRQGFFWPTALKDACDMVQRCEACQFHSKHTKIPAQALQTIPLTWQFSCWGLDILGPFPRGQGGYKFLFVAIDKFTKWIEAVPTGEIKADNAIKFIKGIFCRYGLPHRIITDNGSQFISADFQDYCIALGVKICFASVSHPQSNGQVESANDIVLQGMKTRVYDRLMSHDKKWVEELPSVLWAVRTTPTTSNKETPFFLVYGSEAMLPGELRHQSTRV

SEQ ID NO: 147940 - protein, 142 aa, Oryza sativa
  Clone ID: PAT_MRT4530_48420C.1.pep
ADVEFRCFVGGLAWATDDRSLETAFSKYGDVVESKIINDRETGRSRGFGFVTFGSEKAMRDAIEGMNGQDLDGRNITVNEAQSRGSGGGGRGGGGYGGRREGGGGGGGYNRGYEGGGGGGARRDGGYGGGGDSYSRGGGGQW

SEQ ID NO: 147941 - protein, 112 aa, Oryza sativa
  unsure (1)..(112): unsure at all Xaa locations
  Clone ID: PAT_MRT4530_48421C.1.pep
RCVVVLPIRAALVQRPTPPQTPPPAPLFHGARRGHGRRRPRCSSSAPDAAVDAATHARRGRGPSPAXRRRSGRRRSRRSSTTPLHPXCSLSLVQLSPKLTSXLELTNEPSRA

SEQ ID NO: 147942 - protein, 38 aa, Oryza sativa
  Clone ID: PAT_MRT4530_48422C.1.pep
MERTRWLCENFSESRWGRGQEGRPRNGDTSRFNAGGSG

SEQ ID NO: 147943 - protein, 106 aa, Oryza sativa
  unsure (1)..(106): unsure at all Xaa locations
  Clone ID: PAT_MRT4530_48423C.1.pep
MSFSLIMFVWTTLWILSSLRKWILSLELFLQIKPQAQMALMSTARRGAGGAGGVGTAEGCGCTPRGRGSPAAAPARGGFTCHSVDLLXRQRILPLSIRAANLRQNT

SEQ ID NO: 147944 - protein, 438 aa, Oryza sativa
  Clone ID: PAT_MRT4530_48424C.1.pep
MDPWSEIEGKRAHDPIFQNYFSQNCRQSVDGFCKKRSADAAVARAERCIRVLGPIIVGAGPSGLAVAACLKEKGVDSLVLERSNCIASLWQLKTYDRLSLHLPRQFCELPLMPFPAYYPIYPSKQQFVAYLESYAARFGICPTYNRTVVCAEYDEQLQLWRVRTRATGIMGEEVEYVSRWLVVATGENAEVVLPEIDGLDDFKGTVMHTSSYKSGGAFAGKRVLVVGSGNSGMEVCLDLCNHNANPHIVVHILPREMLGQSTFGLSMWLLKWLPVHVVDRILLLIAQTMLGDTAQLGLKRPTIGPLELKSLSGKTPVLDVGTFAKIKSGDIKVRPAIKQISGRQVEFMDTRLEEFDVIVLATGYKSNVPFWLKDRELFSEKDGLPRKAFPNGWKGENGLYSVGFTRRGLMGTSVDARRIAHDIEQQWKARGKHPGVLL

SEQ ID NO: 147945 - protein, 68 aa, Oryza sativa
  Clone ID: PAT_MRT4530_48425C.1.pep
MVSPSGPNSNRIIVVSWSVKLTEMTSSRLSKEEPHIRALLLVKIVARLTFENADYQTADWTSGMSFWK

SEQ ID NO: 147946 - protein, 102 aa, Oryza sativa
  Clone ID: PAT_MRT4530_48426C.1.pep
GTRGLSLLNTHASKLAPKPWFPTPSWSSRHRAERSLLIMLSSRAERRTDALASPGGAGPVASEGEACPGRSAGSGCASRWQVGSTPEPGPGRDPASRLVGSL

SEQ ID NO: 147947 - protein, 136 aa, Oryza sativa
  Clone ID: PAT_MRT4530_48427C.1.pep
IRREEGLRSCAASPSSPPPPNASVDPAVAAPSAPSRLPPAAVAASAAAAGGSGGGGRIQRRRLPPPPPLFSLRRRWRRLRRPRIDSVATAEGSSGDGRGRIGPSAAAAGGAVAAQRRPPTARSGGRKGSGAAPPRH

SEQ ID NO: 147948 - protein, 40 aa, Oryza sativa
  Clone ID: PAT_MRT4530_48428C.1.pep
LVAPPINLSFPAPGRQGFVVLMSTWGWLYGPTSPYDMLVL

SEQ ID NO: 147949 - protein, 385 aa, Oryza sativa
  Clone ID: PAT_MRT4530_48429C.1.pep
MSNFFLGLFSQKGYRVSAQDVKSELHIDNKSSRLTSHSSLTRELESLSSATMASGGGGGGEGETVLVTGASGFIGSCLVRRLLARGYSVHAAVLNPDDKAETDHLHALAAAGGGEGRRLRVFPGDLLDGAALLAAARGCSGVFHLASPCIVDRVLDPQAQLMVPAVEGTLNVLRAAKDAGGVRRVVVTSSISAIVPSPGWPAGEVRDERCWTDLDYCEKNGVWYPASKTLAEKAAWKFAEENGLDVVVVNPGTVMGLVIPPTINASMAMLVRLLEGCTEEYADFYMGPVHVEDVALAHILLYENPSASGRHLCVQSIAHWSDFASKVAELYPEYKVPKLPKETQPGLVRAEAASKKLIALGLQFSPMEKIIRDSVESLKSRGFIS

SEQ ID NO: 147950 - protein, 215 aa, Oryza sativa
  unsure (1)..(215): unsure at all Xaa locations
  Clone ID: PAT_MRT4530_4842C.1.pep
MPRTTSWLRCRRWWRCRRSVHGRGGTGGRTTPARWMERFAPMCGSFRAKPRGGRGGGLRHRAKGGDGSAGXAWARRKGLPEETSTRRKERPARATAFRRNSGDAVAWPGKRTVLWCRERWWRRQPAHRGRGRGGRRRNSGGNTTVAGGDALPEVSAGNRGQAGEEEAAAMLEEAMARPAGVLTRRQGRLKMAGGTGERGGRRRGVVRPRENAGGG

SEQ ID NO: 147951 - protein, 78 aa, Oryza sativa
  Clone ID: PAT_MRT4530_48430C.1.pep
QKGGDQGPLAFWQIFFGRNTGGQANMCVRGLLGFKNEKKEGDRGRLAHFGRGEQETGARPKPGEMLTGGEEKKGKLKT

SEQ ID NO: 147952 - protein, 60 aa, Oryza sativa
  Clone ID: PAT_MRT4530_48431C.1.pep
SLRLDYGDFVVLLPGDLYQSHGRIRHVVCPSVVDRSIVSPSLTSGSASVLLLWPFKAWKI

SEQ ID NO: 147953 - protein, 73 aa, Oryza sativa
  unsure (1)..(73): unsure at all Xaa locations
  Clone ID: PAT_MRT4530_48432C.1.pep
IIFPRDKINTISLEYSRVKCYNSISVRLRMNSVTIIYXKYFCAIAGNYISSNVVKKYQRPPECLKRFPWEQTP

SEQ ID NO: 147954 - protein, 582 aa, Oryza sativa
  Clone ID: PAT_MRT4530_48433C.1.pep
MMREGVAGDHFTFPFALKALAQAHHRSPPPCAAATATATTTLGCLHAQMVKSGHGANVYAASALVHAYVSRADAASARAVFDAARHRNVVTWTAMIAGHAAAGEAREAVALFREAVARGQEVNGITVAQVMGACAQSRDLESGRWVHATLRRWGVEPILLDVALATAVLHMYASCGGLDAAFEVFDKMPRRNEVSWNAMAEVCSRHGRQDKVLEVFPGMHSVGMKPDKVTWLSILRACTSKGAAGLGQGVHAYMEKTIGHRHVAVCTSLMDMYSKIGNARSALQIFQCLKRKDLMAWTSMIIGLAKHGHGKDAVQLFNQMQHGGVVPDHVAFVGVLTACSHAGMVDEARKYFDSMWNHYGIRPTIKHYGCMIDLFSRAGRLAEAEGMMQMMPIQPSVTMWGSMMNGCKVHGRADIAERVGRQVAELNPQFGAIYVIMSNIYAEIVLPSVQLLTLYVAWKERGTVEPANELYSGNGEQYRNTRYRSTKRELIEYKKGASNKVADALSRRGNAGRPSELNLVGEPHHCRLIPAIATDDGHSPFSTVGAEDHCADGINRLPCIVTGFHRWEQAAADKSPAGGLAT

SEQ ID NO: 147955 - protein, 256 aa, Oryza sativa
  Clone ID: PAT_MRT4530_48434C.1.pep
MASQGYPAYPGSELLLLIIISDQTLVPSDRRRTCERKCRGGGTRACGSVLLPSGMLSLCEAEKCSAHFSFFSVADANPFVTSKAYGPRRVADSAEAGLSPTTKRAAHENFAAPRPHRSPSPAAGVRRQRRRGGEVRGREMSVRIKAVVDRFVKELQEALDADIQDRVMKEREMQSYIQEREREVAEREAAWKAELSRREAEIARQEARLKMEKENLEKEKSVLMGTASNQDNQDGALEITVSGEKYRCLRFSKAKK

SEQ ID NO: 147956 - protein, 228 aa, Oryza sativa
  unsure (1)..(228): unsure at all Xaa locations
  Clone ID: PAT_MRT4530_48435C.1.pep
MARWCDGAGRWEAALGGGRLRGEAAGKQREVARGGRRRTRWDAVVDDLDDDPDDDLDDGAPDDDLNDGAPDDDDGGLGSGAEVRRWRRLGTGAAEAGGAAWGGGREAAGKGGRRREAWGGGRRTRWEAALDDLDDDPDDDLDDNDGGPDDPDDDDLDNGDLDDDDGDGDDDDGAPGDDDDGGLGTGHWGRRVGXNAWGPRLERRFWLAKVGQRGEKFGQLDGLASQLA

SEQ ID NO: 147957 - protein, 167 aa, Oryza sativa
  Clone ID: PAT_MRT4530_48436C.1.pep
GYDLHIGSKVIEKGGGGLGFDFADDQAESQYNRIRSLVNEELKNYFRPEFLNRLDEIIVFRQLNKEEVKEISEILLRDVFARLVEKEISLQVTDKFKERIVEEGFNPAYGARPLRRAIMRLLEDVLAEEILSGRLKEGSQALVDIGEDNQVVVIPGETRELIAPGVE

SEQ ID NO: 147958 - protein, 615 aa, Oryza sativa
  unsure (1)..(615): unsure at all Xaa locations
  Clone ID: PAT_MRT4530_48437C.1.pep
MKWERSTLFVQNKKNDHILVTASHHDMLTSVLGSKEEALASIGILSRVTHSNVHKRQTHMVADNLAGIWPESRSFSDHGYGPIPSRWKGVCQLGQAWGPTNCSRKIIGARYYAAGIEKADFKKNYMSARDMIGHGTHTACQGTVSQVDGVSVHGHQLMISRASHQLRVAMLHLLQTHSLLLQRGCHRSLLDMVDNGPLEAVESPWDVHSVSGRLLIXYKGCNPLPLQLLYRISVVVSSLLRXDIKPPXSLKVNRIMCYSAACRLMFGCLELSLCFTINGSIVLCIEITYGPILNFVNTVFENVFSGGASGLIFGLYTTDMLLRTEDCQGIPCVLVDIDIGSQVATYIGSQSMPVAKIEPAHSITGKEVLAPKVAIFSSRGPSTRYPTVLKPDIAAPGVNILAAKEDGYAFNSGTSMAAPHVAGVIALLKALHPDWSHAALKSAIVTSAEALPRKVADPFDYGGGNINPNGAADPGLIYNIDPMDYNKFFACKIKKHEICNITTLPAYHLNLPSISIPELRHPIKVRRAVTNVGEVDAVYQSAIQSPLGVKIDVEPPTLVFNATKKVNTFKVSMRPLWKVQGEYTFGSLTWYNEHHTVRIPIAVRITIRDFYADVA

SEQ ID NO: 147959 - protein, 407 aa, Oryza sativa
  Clone ID: PAT_MRT4530_48438C.1.pep
FVIVLFSILFLSFSVLVLFLTFLLKQTFSRHGAQSGGYGQQNYRPQGHGAASQWGPRSQPQPGYGYPPRGPPPQNMPYSQPYGGYPQQPPPRGGMGWDQRQGPPPHASHHGGGYDYYKQGSQPYEGQPPNYPPGPGNYNSYGPSQGPNYGQPQYPQSAPPQNYGPGYGDPRYNAPAPNQQYYGQPPAGPQQGYPPQQDPYARPYGGPGQWAPRGAPAGDGTYQAPPPTSYGPPSQQPPAYGQTYGPTTGPDGYSQQSYPQQGAQAPATYGQSAPAGPGYAQQGAQQGGYAQYPQSQPAYGDQAAQNNANYGYQGAPADPNYGNAYPQAGYGSTPASGQAGYAAAPAAGQPGYGQPGYTQPPTNPPAYDQSAQPPAQSGYAAPPANPQPAVAKGVSPQPAGYGGQWTA

SEQ ID NO: 147960 - protein, 361 aa, Oryza sativa
  Clone ID: PAT_MRT4530_48439C.1.pep
MEWGIMERGEGIYREEGKERERRRGVMRRRRGARGGEEMGARRRDGRRDGRAGLEAARRRARSDGTGDATAGRGSRRRRHARRGSGMATATAQRRRRAARSDDGTRRRRCAVAWGARRRDGRQRRGARGDGTVARRRDGDGDGAAAAVTARGSDGSDGDGGAGLGAAGRAQQRWRLALLEESLKKVDTSDPFAICGIIDQYSQQPSLKEKSALNRLEIINKCFSKRTVEEIIASLEQEAPNVADEWVASAIQSLRKASPTSLKISLRSIREGRTQTVGECLRREYRMVCHVMRGDFSRDFFEGCRAILLDKDRNPKWMPPRLEEVHDEVVEKYFSKVDDPEWEDLDLPPRRSHGRRLVPKL

SEQ ID NO: 147961 - protein, 139 aa, Oryza sativa
  unsure (1)..(139): unsure at all Xaa locations
  Clone ID: PAT_MRT4530_4843C.1.pep
MCQLRQVADKRTPLDTMRAAHVETTWLPSGYTNTXPHAHMNDYRHWYTGTGVDNRTTGTGXHRKDEDRAARXRDPYHHATRRGXDDDERARRRRXGTTEANGEGTTSAVILGRRRDAAGATLDDAEPRTKTTTGLQRLA

SEQ ID NO: 147962 - protein, 332 aa, Oryza sativa
  Clone ID: PAT_MRT4530_48440C.1.pep
MSQCPTHVALRLLALLFLLPAAWSATFTMTNNCGYTVWPGLLSGAGTAPLSTTGFALAHGASATVDAPASWSGRMWARTLCAEDATGKFTCATGDCGSGGIQCNGGGAAPPATLMEFTLDGSGGMDFFDVSLVDGYNLPMIIVPQGGGAAAPAGSGGGSGGKCMATGCLVDLNGACPADLRVMAASTGTGAAAPGGGPVACRSACEAFGSPQYCCSGAYGNPNTCRPSTYSQFFKNACPRAYSYAYDDSTSTFTCTAGTNYAITFCPSTTSGKYSGGENPQAAGVPSTNDTMVVLGAEQLSTASSAAAHAAPQLTLPLLPLVVVAALVAAMI

SEQ ID NO: 147963 - protein, 312 aa, Oryza sativa
  Clone ID: PAT_MRT4530_48441C.1.pep
MGRRRIAGLGDGVRESNDTSSVEERRPLLLDGAVARAQVERCEPLVSKGGVWRRASAGGRRQRRRSAREGRRGAVAWGGPATGGIKVLGTTSFARSSSASLLKPRWCVPRSRADPSSVRPAMPASSATSVLTTRHLPRTSSASSLSSWAACLRSSSPPPPPLPLASFLPDGGWASAEWELLDCCDRLLLLLRNHDAAMKLAVADPAHRPPLRRRHSPVPVPPPTTRARAATPGGGGGGWIWGNRLASASAPSRASELHPPPPLDACALERAPPTSTAGRPLAWLLSRSDEEESQQRLSNKEGRRRRYSNPTT

SEQ ID NO: 147964 - protein, 94 aa, Oryza sativa
  Clone ID: PAT_MRT4530_48442C.1.pep
RKLEFEQLLEDHLWERAGELEVTVERADHLLHQRGPELLGRDLPAHLLEVQPLQQMHQLDHLHGSHILGDVQRDSLARGFDGNGPRQGDTGPPR

SEQ ID NO: 147965 - protein, 95 aa, Oryza sativa
  Clone ID: PAT_MRT4530_48443C.1.pep
SWSACVNSANVTSRCYIGNSIGMFINAMCKWPSKRETELDIESTASNFSNRRQVFVEYSVFFWLSFLMLLICGWSHMMNVHLQPSDLARSHLLLV

SEQ ID NO: 147966 - protein, 163 aa, Oryza sativa
  Clone ID: PAT_MRT4530_48444C.1.pep
GLNQFSHLRCHLRPSHRPHRCRCGSATCVSPIAIVGEDPLPSSSSPDLRKGPLFITPSALLVLRELVHEQANDLNEDDMDTTEAGIGDENEAFMDDENENYMDFEYIRHQLLAQGQKHVIRTQYVNLKKSRKREHQRIQKSKSRENELRTCYTSARALAEVVF

SEQ ID NO: 147967 - protein, 48 aa, Oryza sativa
  Clone ID: PAT_MRT4530_48445C.1.pep
ILEYERLSYRPYMRKSQREELCIQRMCNNCITNSMRIPVPAYSSCFNP

SEQ ID NO: 147968 - protein, 78 aa, Oryza sativa
  Clone ID: PAT_MRT4530_48446C.1.pep
NHEIDVKLYYFNFQTSSLRTPSPNLPCLLGEGYFYHFLILNYRVKKARNYGPPKKALPIRLKIGPGGPFSSQKTTFNP

SEQ ID NO: 147969 - protein, 718 aa, Oryza sativa
  Clone ID: PAT_MRT4530_48447C.1.pep
MASSAKEEAKPKPRLIVRLGVFLASHHILFSAVCCTAGIIALLFLPSLAKNTYLSENALIPGSANTLFSTEDVQEANRFAKGIEAAIGESRGGTTEIPKFIAQQTKNLGAEVYYHEFLPDSKCFHPLKFFTSMTNNMAAKPNGTYTNFGINTVGIIRAPRGDGKEAIVLVTPYNSQKVTPNELLSLALGFSVFSLLSRAAWLSKDIVWLSADSQFGEYSAVSSWLNQYHNPMFLSHPVNLDTKIYGANQILYKPDGTAEKAELMAFKRAGTMAAALIFKVGETRKYGDRDSVTMYAEASNGQMPNLDLLNVVHYLAVHRQGFRVNVETFNSLLSSSWLRVIAEVFQNLGSLLRKINPDWKLDVTVPDYVEGTANLASSMYNQALGVPTGSHGAFRDYQVDAVSLEFAPAFHLKNENAKSSFLLRGGRLTEGVVRSVNNLLEKFHQSFFLYFLTAPSKFISVGVYMIPFALLLAPLPIVAAALAGGSKTKGKLEDECKTKGNADDLQMEGGSWKWLKSARVLLIIQFWAVLVSLLPYYISQIPGAMPIQYAVIWAVLSITILIILYAMFGSPSRAGVEWKLLKATMITSITIGMGLMSIINFATAQLGALILIPMCLFSRPLRAQLEMNFLPRTVLLASNILLTVLGFPPAAFLIMKGLSKGSWTVDIVGDFWLWMEFLWEWSSATYLYVFLVHLPCWLLCIHVLLHPCYQPESKMKQE

SEQ ID NO: 147970 - protein, 106 aa, Oryza sativa
  Clone ID: PAT_MRT4530_48448C.1.pep
MAFRATPQPSPPSPKAVRVVVKGRVQGVFFRDWTVETARALGLTGWVRNRRDGTVEALLSGDPARVDEMVSRHLPVGPRAAAVTAVLPSPADPVDPAEGFTRKPTA

SEQ ID NO: 147971 - protein, 97 aa, Oryza sativa
  Clone ID: PAT_MRT4530_48449C.1.pep
MQLNPKVRTRRNKTKAKRTLSMRGNHLEAPQLNPMSYTKSYCWNRLYHLTKSDSNLADPIVADPDFSRFLLCFRDNLHLRPRFNLIFISDTDITKFD

SEQ ID NO: 147972 - protein, 299 aa, Oryza sativa
  Clone ID: PAT_MRT4530_4844C.1.pep
MVSGRSANGELDACFRSLMLSIGSGRGQAEGGGAMPTLSGWKDLPIELLLRIMSIVGDDRMLVVASGVCTGWRDALGWGLTNLSLSRCQQNMNNLMISLAHKFTKFEVLTLRQNIPQLEDSAVEAVSNYCHDLRELDLSRSFRLSDRSLYALARGCPQLTKLNISGCSNFSDTALTYLTFHCKNFKCLNLCGCGKAATDRALQAIARNCGQLQSLNLGWCEDVTDKGVTSLASGCPDLRALDLCGCVLITDESVIALATGCPHLRSLGLYYWQNITDRAMYSLAYRRVKSKPRRWDSVR

SEQ ID NO: 147973 - protein, 108 aa, Oryza sativa
  Clone ID: PAT_MRT4530_48450C.1.pep
MQLNPKVRTRRNKTKAKRWRCAEIVLNVTLSMRDNHLEAPQPNPMSYTKSYCWNRLHHLTKSDSNSADPIVADPGFSRFLLCFRDNLHLRSRFNLIFISDTDITKFGR

SEQ ID NO: 147974 - protein, 105 aa, Oryza sativa
  Clone ID: PAT_MRT4530_48451C.1.pep
MQLNPKARTRRNKTKAKRWRYAEIVLNVTLSMHGNYLEAPQPNPMSYTKSYWLHHLTKSDSNSADPIVADPDFSRFLLCFRDNLHLRSRFNLIFISDTDITKFGR

SEQ ID NO: 147975 - protein, 133 aa, Oryza sativa
  Clone ID: PAT_MRT4530_48452C.1.pep
MPVDLILQSTRNRNKEIAVKSINDSRSAKTLSMHGNHLEAPQPNPMSYTKSYCWNRLHHLTKSDSNSADPIVVDPDFSRFLLCFRDNLHLRPRFNLIFISDTDITKFGRLVASRAGEASTGAGCPYNRRAVSP

SEQ ID NO: 147976 - protein, 51 aa, Oryza sativa
  Clone ID: PAT_MRT4530_48453C.1.pep
VLYIRHVCCACSFMYYYLAQVKAVAILNPGHYKTPNRSMWQVHRGCSQITR

SEQ ID NO: 147977 - protein, 140 aa, Oryza sativa
  Clone ID: PAT_MRT4530_48454C.1.pep
MPALQPPPASSPGRERERGDAAASSAGPRGVTEITYLLRSHELKISELESKEQIYCNSLVQLEERIASLEYYKEKLLTRLSWTEEANSTLRSDNSKLKNLAYSLKERVDELEKDNFMLGLKMNEFAQEMERFQMQKIASA

SEQ ID NO: 147978 - protein, 41 aa, Oryza sativa
  Clone ID: PAT_MRT4530_48455C.1.pep
WLAWLASSIIFLEREEATLHACMTDQSLTINMHYHQLIHLN

SEQ ID NO: 147979 - protein, 136 aa, Oryza sativa
  Clone ID: PAT_MRT4530_48456C.1.pep
RHQRWPARIGDLAGARVVGRDFGEHLRVEDDETNPTVLTKASNDEGRRPTTSLCGGGGSVDGGDGSPATGDSGERAAEVPHLRAHLTAARGSGGDGGIDGAARLGVGRRRRRLARRGGGATEHERTREMGQTKEED

SEQ ID NO: 147980 - protein, 331 aa, Oryza sativa
  unsure (1)..(331): unsure at all Xaa locations
  Clone ID: PAT_MRT4530_48457C.1.pep
MPPEHWQQGVKHLVLFHIEEIHDYTAVAVDLRNPKSCRPVTRTLPSWHLGVLDGERPXRASLNISLTICRRRXPIPSATAARKAWRTMTLLSNRRLATKEAEQSGTPLIVMVNDSMARNTATGATTAAIIVAAKTGAEAVTGDTTTITQTMISTMAGSATTTTTTIAITGDVMSHAGEVASAAWTLTSGANARAHRAPVTVATQGGATGGVIRLAAAVAAASAEGALRQMLVTAGVAVALDKLAAPVALDKPAANAAVPSPMVTAMASLATISSTTRKLLPIASTEKTLLSLNAECAAAPTLQDALATNGSSPAKDTETAPAPDIAEFDSI

SEQ ID NO: 147981 - protein, 65 aa, Oryza sativa
  Clone ID: PAT_MRT4530_48458C.1.pep
MTTIKGLVYLKRHRSLDSASHRDKLPLVDRLQPMSRLEARTRRKVKQNCGDAPKVVLIGLSPILQ

SEQ ID NO: 147982 - protein, 199 aa, Oryza sativa
  unsure (1)..(199): unsure at all Xaa locations
  Clone ID: PAT_MRT4530_48459C.1.pep
CHDSIRWNLTANGQYSAKSAYRLQFLGAAKSTFYQSIWKAWVPPNCKFFSWMVTQNRVWTTNRLEKRGWQNQKICPLCYNVDESALHLLAKCRLTKRIWAEIQRWTGTDLQMDNWESCHSVEQWWTLVTESPNTPRKPLRTLVILISWEIWCERNTRIFRNNASTPSSILAKIKEEGRAWXVKARASILQEFRILGDIT

SEQ ID NO: 147983 - protein, 1637 aa, Oryza sativa
  unsure (1)..(1637): unsure at all Xaa locations
  Clone ID: PAT_MRT4530_4845C.1.pep
IIESQNPHSLRSRSHPCTSVPQYPLYLVYGYHPSTVARQVGGLGTQGSTTMPSSFVDNNVNTSSSQAFSTSTMLVWTQVGEIVFPVYTTMPISTGPPMTENENAVATNQDGSMSKNPPVETENGLPTTSKLGKDSDAAKSCPTDINHGPTKMTSEAIRSWCPIHKTKKHTLQDCWVFINVRAEIRACKERGIQCISPTRDVYCPIHKTKNHDLSSCKVLLGAMKTPSPKSYVPARDNGKEQGATPASDRFVGVIDLDPHEPSVLHPLEDYGSSTTSAPREVLVIDDVGTAFGRSLRDVRWPERFRPGAIEKYDGSTDPEEFLQVYSIVLYAAGADDNALANYLPTALKGSARSWLMHLPPYSISSWADLWQQFIANFQGTYKRHAINDDLHTLTQNSGESLREYVWRFNECRNTIPEIIDASVIRAFKSGGRDRYTTQELATRRITTTRRLFEIVERCAHVDDALRRKNDKPKTGGEKKPAADASESNKKKNRKNGKRKAQAEVLAAEYVNPPKRPDPQGSDTKKSXCPIHKTDRHSLEDCLVFKKSLEKHMAFKKGKRVRVIEKNEETSSHESDSAYPDSDLHVSHIFGGSTTTXRFTLDAMAIPQSALTPTDQPFHGITPQSSSRPLGKITLPMTFGQANNFRTEQITFDVAEFDTAYNAIIGRTALAKFMAASHYAYQVLKMPGPKGTITIXGERKAGRVQCDRRSLDMVEQTPTPPATSEPPEKTELALITFIRDNADVFAWQPSDMPGVPREVIEHKLMVXPDAKLVKQRLRRFAPDRKQAIREELDKLLKAGFIKEVLHPAWLANPVMVRKANGKWRMCVDFTDLNKACPKDHFPLPRIDQLVDSTAGCELLSFLDAYSGYHQISMAKEDEEKTAFITPFGVFCYVKMPFGLITAGNTFQRTVQGALSNQLGNNVEAYVDDIVVKTKTSDSLIDDLRETFDNLRRYRLMLNSEKCTFGVPSGKLLGFLVSGRGIEANPEKIKAIENMKSPTRLKEKQDKFVWTREAEEAFIALKRYLSNPPVLVAPQPNEELFLYIAATPYSVSTVIVVEREKVHRPVYYVSEALHDAKTRYPQIQKLLYAVIMTSRKLRHYFQAHRVTVVSSFPXSEVVRNKDVVGRIAKWVVELSQFDIHFVSRTAIKSQVLADFVADWTMPDNKSDNQGDNETWTIAFDGALNSQGAGAGFILTSPSGDQFKHAIHLNFRATNNTAEYEGLLAGIRAAAALGAKRLIVKGDSELVANQVHKDYKCSNPELSKYLAEVRKLEKRFDGIEPSVKEVNGESGPSTPNISSEVTEAERDVADIETTDDWRTPLIKFISSEELPEDDTEAEKITRKAKIYCMVGNDLYKKAPNGILLKCVSTDDSRQLLFDIHEGICGSHAAGRTLVGKAFRQGFFWPTALKDACDMXKHTKLPAQALQTIPLTWPFSCWGLDILGPFPRGQGGYRFLFVAIDKFTKWIEALPTGEIKADNAIKFIRGIYCRYGLPHHIITDNGSQFISADFQDYCIGLGVKICFASVSHPQSNGQVERVNGIVLQGIKTLLLAVRTTPTTSNKETPFFLVYGSEAMLSGELRHQSTRVQKHSDEEQRDIDVNLLEEHRERVAVRAASYQQALRCYHEKRIRARILSIGDYVL

SEQ ID NO: 147984 - protein, 1361 aa, Oryza sativa
  Clone ID: PAT_MRT4530_48460C.1.pep
MVHLSTSITISETPPEHWQKGVKHLVLFHIKEIHDYTAAAVDLRNTKSCRPATRTLPPWHLGVLDGERLCRASLKISLTIRRRRGPTPSATATRKAWRTMTLLSNGRPATKEAEQSGMPLIVMVNDAMARNAATGAATAAMIVAAKTGAEAVTGDTTTITRTMISAVAGDATTTTTTIATTGDATSHVGEVASAAWTLTSGANARAHRAPMTVATWGGATDGFIWLAAVIRKTAVAAASVEGALRQMLVAAGVAVALDKLAAPVALDKPAANAAAPSPPVIALASLAMISSTTRELLPITSAEKTLPSLNAECAAAPTLQDTLAANDLSPVKDTETAPTPDIADFDSVQVLIDIAGDTQVLIPPDDALEVVPIPVAADMLGEGRRRSPRLARQPVAGLLMSLRAQLNLCRRLGTVPAEGVLTDKALADFKAMFNSPLPQDAIDALTQLFGFDKEDAKTVDPALANYLGLSDIGCQEEIAAADMFGQKSATKTYGILEFVRDSGRVRFASTSSCFRVELHRFRSSTRDLTTNSLSLFLVDYMIKSTGTLIHLKASFGPALELSRSPRPRVFCQQSAKQTFLRELRDTKPSDNSKWLVLGDFNIIYKASDKNNANINRRQMRIFKETLNACELKEVALQNRRYTWSNEQDNPTLVKLDRFFCNASWNTAFERHLLHALSTSLSDHCPLMLTGQGEAPRSRTFRFENFWIHLPGFHEVVQEAWIAPQPHHEPHHRLFHKLGCMAKRLRSWSKKLISQGKLHLHMALEIILQFDIAQESRQLTQAELTLRRNLKDRVLGLAVVERARRTQATRITNLKEGDANTKFFHLRMNARKRKNFIQRLRVGNMWKVKHDEKAAVIKEHFQTFMAHPAPRSKDLDWDALQLPTFDSSVISGPITEEEVHVALKQSPSDKAPGPDGFTGAFYKACWETIKDDIMAVIHSFDRLRSNNFSILNSANVVLIPKKEGAECVGDYRLISLIHGVGKLISKVLALRLQPHMGILISHAQSAFIKKICTHDNFMYVRNLTRKFHQTRTPNLLLKLDITKAFDSVRWDYLIDLLQRKGFTSRWTNWVSNILASSTTRVLLNGCPGSPIKHGRGLWQGDPLSPLLVILAIDPLHHLLEKATELGHMSPLRGRAPRFRTFLYADDVAIFVNPSVQDMTNLTGILSDFGQVTGLRTNLNKSQIAPIRCDSIDLSSIIGIFPTGLTNFPMKYLGLPLVVGRLKKSMDGRQAGKRGWQNQKICPLCYNVDESALHLLAKCKLTKRIWAEMQRWTGTDLQMDNWENYQSVEQWWTLVTESPNTPRKPLRTLVILISWEIWCKRNARIFRNNASTPSSAKIKEEGRAWVKAGASILQEFEILGDIT

SEQ ID NO: 147985 - protein, 62 aa, Oryza sativa
  Clone ID: PAT_MRT4530_48461C.1.pep
VVAPLVSISLATMQTGTLPTWVLEEKFFSLRSRNVYFIVGYFSGPDYFGTNNLRTYSKGLHI

SEQ ID NO: 147986 - protein, 54 aa, Oryza sativa
  Clone ID: PAT_MRT4530_48462C.1.pep
FFFFDAKCSGIYISLIKSIKCSQIHPKKKPGLARKFPGDGEPWGGKNQDWAGIS

SEQ ID NO: 147987 - protein, 64 aa, Oryza sativa
  Clone ID: PAT_MRT4530_48463C.1.pep
RTGLPGPDPPVLFLADNKRGRGIFRTTGTASRGRSPPLLYLLSSGVAEAVSQVVPASGRLLDPG

SEQ ID NO: 147988 - protein, 65 aa, Oryza sativa
  Clone ID: PAT_MRT4530_48464C.1.pep
SGQPEIPLQPDGDAAFFVAPCVGTHYGEWSLVSGYSWLSSCGAWCQPSYATSQDSRMVNIVQVEK

SEQ ID NO: 147989 - protein, 63 aa, Oryza sativa
  Clone ID: PAT_MRT4530_48465C.1.pep
MAQPQPPQTALPPPHPVVLQPPLLPRAASLPLARRDHRARLCRLFESPETEAAAGAPPTPDRA

SEQ ID NO: 147990 - protein, 118 aa, Oryza sativa
  Clone ID: PAT_MRT4530_48466C.1.pep
QRMVPPLHMHARGFKTDQEVSSLQMGGDSAIITFPTQERTFVKKNVGPPQGSTFQKKIKTSLRELLLYKVNQLGLLLCLQFFHNQKVWIKPRGPVSVSLKGILYQSNWFVMNKFFDSL

SEQ ID NO: 147991 - protein, 47 aa, Oryza sativa
  Clone ID: PAT_MRT4530_48467C.1.pep
VQQAVISCFNGFTLDIFKAEQCKDGPGLLPEEIKAVLMQSAGFHTMI

SEQ ID NO: 147992 - protein, 56 aa, Oryza sativa
  Clone ID: PAT_MRT4530_48468C.1.pep
SLSHFGTCSKDYEPPLHPSTPKPYCRMVRGVLALPGNGISTTMNEVPPHESFLIHQ

SEQ ID NO: 147993 - protein, 128 aa, Oryza sativa
  Clone ID: PAT_MRT4530_48469C.1.pep
SFAPQAPAAKAQVVGWPPIRSYRKNTMATNQLKSSKEDAEAKQGQGFLYVKVSMDGAPYLRKVDLKTYKNYKDLSTALEKMFIGFTTGEMSRVTLLAFLFVIAFPFDVDALTITSSRMPVTRNQYMLD

SEQ ID NO: 147994 - protein, 143 aa, Oryza sativa
  unsure (1)..(143): unsure at all Xaa locations
  Clone ID: PAT_MRT4530_4846C.1.pep
GKKIKNRRLTFNPPTILCFQAPRLTGSRGGPAVAAGDATAAAGGELHLSXSRAAAHVSDPXRAWLSDGVGGTDGFMDLIPRQHVTPPPHGXTRAAAPRGGARRRRLLSRRWPPPLNLPVTQLERGGERYGERXEMEREEEDEG

SEQ ID NO: 147995 - protein, 440 aa, Oryza sativa
  Clone ID: PAT_MRT4530_48470C.1.pep
MGEAALRWGEVMGEVAALRQLVGELYRWYLLDFEHGSIKDDHCRARTGYNSELLKIMEANQSPPRKRSRRDKNREKAPNSNSTEEMQQEIWSEFPGDLFETVVARLPVAAIFRFRTVCRNWYSMLGSESFSQQYSEVPQRLPWFYTITHENASNNVAMYDPSLKKWHHPSVPLAPAKIVIPVASAGGLVCLLDLSHRNFYICNPLTQSLKEIPRRSVQAWSRVAVGMVMNGGTSNEGYKVMWLGNDGNYEVYDSMKNMWSCPGTFPPSIKLPLALNFRSQPVAVGSMLYFMCAEPEGVLSYDVSTGIWRQFVIPLPLHLTDHTLAEFQGRVMLVGLLCKNAATCVCIWELQKMTLLWKEVDRMPNIWCLEFYGKHMKMTCLGNSGLLMLSLKAKRMNRLVTYNLLNKEWQKVPDCMLPCSRKKQWIACGTAFGPCPSALA

SEQ ID NO: 147996 - protein, 298 aa, Oryza sativa
  unsure (1)..(298): unsure at all Xaa locations
  Clone ID: PAT_MRT4530_48471C.1.pep
PPGAHTHTHSLLLSRCGSLDTTHTHTHSPTLSPVHVLLLPMSPPLELDYIGLSPPVPAAADAAADNDLKGTEXLRLGLPGSHSPDRSPPAATLDLLPAAKGAKRGFSDEARPLPASAAAAAAAGKGKKAAAGEEDEDAEEEDKKVAAAPQAPAAKAQVVGWPPIRSYRKNTMATNQLKSSKEDAEAKQGQGFLYVKVSMDGAPYLRKVDLKTYKNYKDLSTALEKMFIGFTTGKDGLSESRKDGEYVLTYEDKDGDWMLVGDVPWEMFANSCRRLRIMKGSDAIGLAPRAVDKSKNRN

SEQ ID NO: 147997 - protein, 56 aa, Oryza sativa
  Clone ID: PAT_MRT4530_48472C.1.pep
MALVFSPISQGRRIESSFLMQIFVKTLTGKTITLEVESSNTIDNVKAKIQDKEGIP

SEQ ID NO: 147998 - protein, 162 aa, Oryza sativa
  Clone ID: PAT_MRT4530_48473C.1.pep
ERVAGRPLLASMSRRLIRRENNSRPRRHLHGLYATCRQHSQGRETARAMHTAASCRTCSTSPIFGEGGMPYFHRLRTGTLARRKRLRLCRIAPDESRPRRPRRRPNTRLSVRLAQDARRGDAAPREAHAAAGQADLQRRRHEDEGRRGHRPTYRLGTWPLTV

SEQ ID NO: 147999 - protein, 189 aa, Oryza sativa
  Clone ID: PAT_MRT4530_48474C.1.pep
MLLQDSHSKENDVKEDGSSQNGISHTALNQNMSMAPTQTGVVIGGVAPTTNLNIGMDYWGAAGSSPVPAMHGKASSGSVRGEQWDERELKKQKRKQSNRESARRSRLRKQAECEELSVRADNLRAENSSLRAELERIKKEYEALLSHNASLKEKLEGNSDSIPYMNEQNDTNGTHQKQQDSDAQPNDAP

SEQ ID NO: 148000 - protein, 58 aa, Oryza sativa
  Clone ID: PAT_MRT4530_48475C.1.pep
NCDKLWQKIHSMTSGPANRKCGITHLWHEPNASLSWSNLVATSLAKVGTQPNMHCPYS

SEQ ID NO: 148001 - protein, 854 aa, Oryza sativa
  Clone ID: PAT_MRT4530_48476C.1.pep
MEAMQALMKRMQLSEAEKKGIRICEAESGSMGSGDPKAIGKVLAEKVVNAEASGKRHALEDGPWMFGKDLVIVVDYDESKVLEEMVFAFVPIWIRASKMPLCMMNKAIGRAIGGEVGEFMRMESEKDGTAVGQFLRIKEKADAQGKYMENNAMQPMHVDGGAAQGEVPSGVKGPGGVYGEAQSDLRFKTWDTLRSLAMNPAQPWLMAGDFNEILVAAEKQGGRPKCQAQMDKFRDTLADCGLIDIGFEGDMFTWRNNSHTEEGYIREHLDRAVANQEWRVKFPSFRVVNGDPRHSDHRPVIITTCGGRKGVMQRGSSSFRFEAAWLAEEKCREVVSENWEMASTLAEGCDECGEGGSFRGNICKEKVVKEGVLKYKLEKLEEQHPERLLSKVKKKVTEEMNECLMAEFIVEEIKTSIDSIGDLKAPGPDGMPAVFYKNFWDVVGGKVTSEVLDILNGGQMPLGWNETTIVLIPKVKQPEQIKDLRPISLRNVLTDQGVMKINTDGAFDPFTRTGGWGFAIRDHSGKVVKSGAGKVQILMNAFHAEALACAAGIRAASECGMQRVTAETDSTMLKSALEKNTFASSALGGIICEIKNFVNFAFLSFNPRRCLLRSSRAHVVPPLCAQTSRPRRRPSPVPPAPTRARESRRSRPPFSEALPPLIPSRSGRRPSGEDSLPLPFLPFPRPPPPLAVPPLRSSAAASLRRSSPSAAARAAAARHGQSVGFVPSQAVPSRRPRRPIGLGPIRTVGPVDRRWTTRVVPLDPFIGTGGEGGRDGVGSAGVSGCPAAGFTAAQEGTAHCLLRVGSTQSCSLFPHTRAEDLSSWSCLVEVGFVAAVKVCLWSGVVPLLKSSFPV

SEQ ID NO: 148002 - protein, 69 aa, Oryza sativa
  unsure (1)..(69): unsure at all Xaa locations
  Clone ID: PAT_MRT4530_48477C.1.pep
YGESLIGAIALLLHLRDKXQWRDDEVLNNAFCGVSPWFMPLXPFKHLLHHRDIPDRSFKVPWKASRVPP

SEQ ID NO: 148003 - protein, 207 aa, Oryza sativa
  Clone ID: PAT_MRT4530_48478C.1.pep
CRLGSNQADPSTSRTSFIKNTSTSHSSRTSLIKSTSTSYSSRRHQERTHQEPSPPPPPSPDEERCRGKPPSPDVEEEGRDSSLAATPPVARRHRIPSGQIWQRGRRRQSCRAAAASPPAGWSGRDGGAATSLPARSGIGEGAAAKPKPSDHLHRPSRWMERRGGRCRRLPSHCCGLPFCRRSASTKPPPLCGGERWSERERELREVT

SEQ ID NO: 148004 - protein, 194 aa, Oryza sativa
  unsure (1)..(194): unsure at all Xaa locations
  Clone ID: PAT_MRT4530_48479C.1.pep
MAVKDRFTGNPGRLTILTTSGSTGGEGGRDGVGSARVSGCPAAGFTATHEGTSHCLLRGGGETLAWCGWLAVGYAKGLVTISPFAVSCSGGWLGMLXRGVAFDSEWLIFTNYYNCFXTTFNYCFXMLVLCKRTFSLLWLYPASYLLFWYDLLSTVGSTQSYSLFPHTRAEDLPSGSCLVEVGFVAADKLGNSSS

SEQ ID NO: 148005 - protein, 287 aa, Oryza sativa
  unsure (1)..(287): unsure at all Xaa locations
  Clone ID: PAT_MRT4530_4847C.1.pep
MYTICSRSCRSIDDDDSTIQVQVELSSSRGGVPAKRKKKELSLRTPPPPLLRPRRLSPRPLGRPRRRPAPPGRRRISGSGGGSLGGATGRHLRRRRVPHRPGRRRGHAGGAPPRPLLRRLRQPERPLARLPRRRGRHPERLQAPPPVPQHLPRPHRPQPAAGESGRGGGHRGDRVVRRGRRRRGGXAAAAALRRGVAAPVGDARGSHMRLKPIGETRVERVAGERRGACVAAAEHLPYIEHWDTMSFEVLRWRRTGRWDGAVHRAAEEARRHPQRRRGARHCHPGRS

SEQ ID NO: 148006 - protein, 193 aa, Oryza sativa
  unsure (1)..(193): unsure at all Xaa locations
  Clone ID: PAT_MRT4530_48480C.1.pep
MAVKDRFTGNPGRLTVLTTSGSTGGEGGRDEVGLAGVSGCPAAGFTAAQEGTAHCLLRGGGETLAWCGWLGEGYAEGLVTISPFAVSCSGGLLGLLQRGVALDSDGLILITYYNCFTIFNYCFXMPTLLQXTFSLLWLYPASYLLFRYDSLSTVGSTQSCSLFPHTRAEVLPSWSCLIKVGFVAAVKLRNSGS

SEQ ID NO: 148007 - protein, 89 aa, Oryza sativa
  Clone ID: PAT_MRT4530_48481C.1.pep
RQPNTPIEYGNLYYKLVNLTSRIISGELYFILIIRIFTLIPKRSSNTWIGLLSSNRFLGTLIDPLSSLYPLLPRPEEIGGWCSPPGPGF

SEQ ID NO: 148008 - protein, 193 aa, Oryza sativa
  unsure (1)..(193): unsure at all Xaa locations
  Clone ID: PAT_MRT4530_48482C.1.pep
MAVKHRFTGNPGRLTVLTTSGSTGGEGGRDGVGSAGVSGCPAAGFIAAQEGTAHCXLRGGGETLAWCGWLGEGYVEGLITISPFAVSCSGGWLGLLQRGVALDSNWLILLNYYYCFTAFNYCFEMPALCTRTFSLLWLYPASYLLFRYDLLSTVGSTQSCFLFPHTRAEDLPSGSCPVGVGFVAAVKLRNSGS

SEQ ID NO: 148009 - protein, 60 aa, Oryza sativa
  Clone ID: PAT_MRT4530_48483C.1.pep
MASVPAGKTKRRLDLGFFVKGIGGASGPRPEHRAAAVVGAVELPRRNPRRSLLLASTSEL

SEQ ID NO: 148010 - protein, 90 aa, Oryza sativa
  Clone ID: PAT_MRT4530_48484C.1.pep
MVYWFGDGAAATAKKIAPKLTREGERKEWRRRPELGKKKRISHRGPPRVDYFGILDLKVLMKLVAKWLSLLRTVEAGRQAKVKLRRPERY

SEQ ID NO: 148011 - protein, 353 aa, Oryza sativa
  unsure (1)..(353): unsure at all Xaa locations
  Clone ID: PAT_MRT4530_48485C.1.pep
MAIKDRFTGNPRRLIVLTTSGSTGGEGGHDGVGSAGVSSCPAAGFTAAQEGTAHCPLXGAGETLAWCGWLGEGYAEGLVTISPFAVSCSGGWLGLLQRGVALDSDWLMLINYYNCFTVFNFCFXMPALCKXTPSLLWLYPASYLLFRYDLLSTVGSTQSCSLFPHTRTENLPSGSCLVKVGFIAAVKLKNSGSXIYGRDTSALYGRXPPPARMATVSNLSSRAWSATPPPHAHRSSHLQLLPVHAHPPVGWRPRAAPFSSAAVRASTPLLSSPAATRARAPLLSRQPPSTHARYSSPLQPPPVHAHRSSPPAGSTSALPTPGGWWRLRYPIPLPLLSLPPHSAGKPETADAPS

SEQ ID NO: 148012 - protein, 613 aa, Oryza sativa
  Clone ID: PAT_MRT4530_48486C.1.pep
MADESERGGMVIDDVGGGGLNLAIVAGKRKREITWEEKAALTVLDIPAERDCSLIDSEKDYSSMAGCQAGEHASIFGIDKNGDDSDEPCAKDDANQSDMAALKEEEENWELDSEPELTWDEKVVQVLNMVRHREITEYNPKQFCSIPTRFCAYNIAFFDLDKEWIRLVDVEEEEEAPAIVVVVALDVDGGDDGHDGGGLNLVSCAPSASTPVYMAQGDRGPPANGLGAPRSGHGSRIHKASLKPMPATCSLNTLGECDTVSEYLERIKSQFTGSSKTYATQLIKQLVTERYHGGGVRDHILRMSNMASKLKPMDLAKLARGPPIKSLAFPDYWWEMDSVNVIAIKVAESDVGYPIRVFGTVLARDEYDFRCVYLFRRDRNNPQIITSPEDTLTLTGPNRALGATDKMYFEFNLKIRDDGDVDKDFCKVKIKGVVSTFFTGKVTAWTTGDDQNKIILYDSEVEGSNRVVGADGSVDLTRCFVAVNLDDELVLNVCVSEGAGSIFELVLGHNDEECVREQGPYELQGERRAPPATSDATTPLPRAVTKRRRRPSRQGAPPPPPPEVDTPTASTAEHHPHHQHPPASLPLSGTIPPPRRGERRARRHCRHWMSSPQ

SEQ ID NO: 148013 - protein, 154 aa, Oryza sativa
  unsure (1)..(154): unsure at all Xaa locations
  Clone ID: PAT_MRT4530_48487C.1.pep
MAIKDRFTGNPGRLTVLTTSGSTGGEGGRDGVGSAGVSGCPATGFTAAQEGTTHYPLXGGGETLAWCGWLGEGYVEGLVTISPFVVSCSGGWLGLLQRGVALDSDWLILINYYNCFTAFNYCFXMPALLQMNPSLLWLYPASYLLFQYDWMSTV

SEQ ID NO: 148014 - protein, 66 aa, Oryza sativa
  Clone ID: PAT_MRT4530_48488C.1.pep
CDTVSEYLERIKSQFTGSSKTYATQLIKQLVTERYHGGGVRDHILRMSNMASKLKPMDLGITDDFL

SEQ ID NO: 148015 - protein, 194 aa, Oryza sativa
  unsure (1)..(194): unsure at all Xaa locations
  Clone ID: PAT_MRT4530_48489C.1.pep
MAIKDRFTGNPRRLTVLTTSGSTDGEGRRDGVGSAGVSGCPAAGFIAAQEGTAHCLFRGGGETLAWCGWLWEGYAEGLVTISPFAVSCSGGWLGPLQHXVALDSDWLILTNYYNCFTSFNYCFXMYALLQMNPXSLLWLYPTSYLLFRYDLLSTVSSTXSCSLFPHTRVEVLLSWRCLEEVGFVAAVKLRNSGS

SEQ ID NO: 148016 - protein, 178 aa, Oryza sativa
  unsure (1)..(178): unsure at all Xaa locations
  Clone ID: PAT_MRT4530_4848C.1.pep
MVGRAGGSRHIPRTEAWSERRSNGRKTASASFSRKWIWQIRNITKYSGLGGHVLTTKFGNLSIGGKDXSKRNPXMKXFWKQSKNRLESKSATTRSAESESERVSRYSRFWQYDKCGQKSAARSYGILEFVRDKSRVRQGHILIKSTGMLTNXKARFWTCTGVKQISQASCLYHYDTRL

SEQ ID NO: 148017 - protein, 471 aa, Oryza sativa
  Clone ID: PAT_MRT4530_48490C.1.pep
MADESERSGMVIDDVGGGLNLPIIVAGKRKRELTWEEKALTVLDIVGSQQHPACQPAERDCSLIDSEKDYSSMAGCQAGEHASIFGIDKNGDDSDEPCAKDDAKQSDVAPLKEEENWELDSEPELTWDEKVVEVLNIVRRREITEYNPKQFCSIPTRFCAYNIAFFDLDKESKLARGPPIKSLAFPDYWWEMDSVNVIAIKVAESDVGYPIRVFGTVLARDEYDFRCVYLFRRDRNNPQIITSPEDTLTLTGPNRALGAIDKMYFEFNLKIRDGDVDKDFCKGVREHNAICYTKQPMTLSLESCLSRIDFVYSPVQLAVEASVAVKIKGVVSKFFTGKVTAWTTGDDQNKIILYDSEVEGRNRVLGADGSVDLTRCFVAVNLDDELVLNVCVSEGAGSIFELVLGHNDEECVLEQGPYELQCGQTGQSISSFDRNQDSLYFPLKSKMKTPHFRACKQPEYNNAHDIYVGKK

SEQ ID NO: 148018 - protein, 235 aa, Oryza sativa
  Clone ID: PAT_MRT4530_48491C.1.pep
MAGAGDELKLLGMWTSPFALRVKLALSFKGLSYEYAEEDLSNKSELLLSSNPVHKKVPVLIHNGKPICESQVIVQYIDEAFPGAGVPLLPSDPYERAVARFWAAYIDDKLLKSWLQASMGKTEEEKAEALKETFTAVANLEAAFEECSKGKPFFGGDAVGYLDVTLGALVSWVHAGEALYGMRLFDATRSPLLDAWVDRFAALDAAMAVLPDAGTLAEYAKKRQAERAAAAAANN

SEQ ID NO: 148019 - protein, 198 aa, Oryza sativa
  unsure (1)..(198): unsure at all Xaa locations
  Clone ID: PAT_MRT4530_48492C.1.pep
IAVKDRFTGNPGRLTVLTTSGSTGGKGGRNGVGSAEVFSCPAAGFTAAQEGTAHCLLRGGGETLAWCGWLGEGYVEGLVTISPFAVSCSGGWLGLLQRGVALDSDWLILINYYSCFTAFNYCFEMTALCKRTPSFLWLYPASYLLFRYDLLSTVGSTQSCSLFXPHTRAEDLSSWSCLVEVGFVAAVKDCLWSGVACC

SEQ ID NO: 148020 - protein, 440 aa, Oryza sativa
  Clone ID: PAT_MRT4530_48493C.1.pep
MADESERGGMVIDDVGGGGLNLAIVAGKRKREITWEEKAALTVLDIPAERDCSLIDSEKDYSSMAGCQAGEHASIFGIDKNGDDSDEPCAKDDAKQSDVAPLKEEENWELDSEPELTWDEKVVEVLNIVRRREITEYNPKQFCSIPTRFCAYNIAFFDLDKESKLARGPPIKSLAFPDYWWEMDSVNVIAIKVAESDVGYPIRVFGTVLARDEYDFRCVYLFRRDRNNPQIITSPEDTLTLTGPNRALGAIDKMYFEFNLKIRDGDVDKDFCKGVREHNAICYTKQPMTLSLESCLSRIDFVYSPVQLAVEASVAVKIKGVVSKFFTGKVTAWTTGDDQNKIILYDSEVEGRNRVLGADGSVDLTRCFVAVNLDDELVLNVCVSEGAGSIFELVLGHNDEECVLEQGPYELQVNVVWTAALKHRQRRKLFERIGDFRVLR

SEQ ID NO: 148021 - protein, 94 aa, Oryza sativa
  Clone ID: PAT_MRT4530_48494C.1.pep
IDAHNLVNSEPTRYTIYITHTRDQRAAAAPADELSFSLVQRTETQNFAGHQSLNPFKEVVEESPPRDLERSVDHLTELYRPCADWAVLGTAGRL

SEQ ID NO: 148022 - protein, 188 aa, Oryza sativa
  unsure (1)..(188): unsure at all Xaa locations
  Clone ID: PAT_MRT4530_48495C.1.pep
MAVKDWFTGNPRRLTVLTTSGSTGGEGGRDGVGSAGVSGCPAAGFTAAXRGTAHCLLXGGGETFAWCGWLGESYAEGLDTISPFAVSCSGGWLGLLQRGIALDSDWLILLNYYNCFTAFNCCFXMLALCKXTHSLLWLYPASYILIRYDLLSTVGSTQSCFLFPHTRAEDLPSGSCSVEVGFVDAVKD

SEQ ID NO: 148023 - protein, 106 aa, Oryza sativa
  Clone ID: PAT_MRT4530_48496C.1.pep
QVMCQNGSMDPYHAFASTTLVPFILHVCHHKVVCHDQNKYEDSQEIGKETQVLIVKHHDPIPCSARPMEIAALFSRDSSWRRKETGDFLSITPQKREEKWDILPAG

SEQ ID NO: 148024 - protein, 243 aa, Oryza sativa
  Clone ID: PAT_MRT4530_48497C.1.pep
MAAGGGGGDELKLLGLWASPYVLRAKFALSFKGLSYENVEEDLHNKSELLLSSNPVHKKVPVLIHNGKPICESQIIVEYVDEAFPDAGESLLPSDPYDRAVARFWAAYINDKFMPAWQKASLGLTEEEKAEAVKQMLAAIENLETAFKELSKGKPFFGGDTAGYLDVTLGAVVGWARAGEVLFGRKLFDATRSPLLAAWMERFVALDAVKAVLPDNAELIEYGKMRMAHYAKLAAALAAANKK

SEQ ID NO: 148025 - protein, 206 aa, Oryza sativa
  Clone ID: PAT_MRT4530_48498C.1.pep
MSSPQTMAMIFLLVQNMYDRHLSEEFRSEIQTLSKVEHLNLVKFLGYLEHEDERLILVEYVNNGSLREHLDGLRGEPLEFSQRLNIAIDIVHAVSYLHGYTDHPIIHRDIKSSNILLTDQLRAKVADFGFARLAPDNTEATHVSTMVKGTAGYVDPEYMRTNQLTDRSDVYSFGVLLVELLTGRRPIERGRGRHQRLTTQWVKTTS

SEQ ID NO: 148026 - protein, 497 aa, Oryza sativa
  Clone ID: PAT_MRT4530_48499C.1.pep
RLIWWLKLQKEREMMQKKEKKERKKEKRRQKKAAQLGEKYETDDHHSKHGHKKRKHSGCEIVGEETRKVCNVTMEHLEKSSLSEEHEAPSYSQALRCTPESSLDSTKRLRTEVSSSPSQTRNGVNIRVKFTPTNQRRDPEATTGMSMKPRVTEQSPVKETGMDLSMANRKREFQPHVNTVSVVKQVVSQQKNMSIRNGNCLDESRKVSQQHDAKSMQRVNMVQRVRTKSTPIAAMQRVDPPSSEKAVMQRANPAPTKVMQGVEAAPVKSMQRANPTSTKVMQEVEATPVKAMQIAGHITLSKVFNRESTQVQLRKETGGPLLGGQLNTGRPTLLNKPKVCADPPILLSKPEMLCVEPPGLLNKPKAHVEPPVVKQQQQIVPEAQEEPCSVGSVLAAASPVTEAQQSSSDRKSRKAEKKGRKLADLFVNWKPSPTQMEDTDVGDQDWLFSCRATPKNNCRTFDGSARCQPTEQLFSLQPRAVHLPDLLMYQLPFVVPF

SEQ ID NO: 148027 - protein, 69 aa, Oryza sativa
  Clone ID: PAT_MRT4530_4849C.1.pep
NIPGGDFYNSATFPNLFFYQFPEEKIFPKFPLGFSNSPGGPKGFKLFIYSILFHLFPFTFFRKKIQPCF

SEQ ID NO: 148028 - protein, 108 aa, Oryza sativa
  Clone ID: PAT_MRT4530_484C.1.pep
MTTNAWSMTCIAHELTILKNFVDGDDALQLELEALENDFQDYGVCVDVVNVVFDVEELPNSDEDQHANGNEPSQPRDLTNIQKRAIYAMLLEKSTNGKLEIDTTSIVA

SEQ ID NO: 148029 - protein, 59 aa, Oryza sativa
  Clone ID: PAT_MRT4530_48500C.1.pep
GVDIKFNEGMNQTSSTQYPAFSRVLIPYNLCTHDLDTPSVNFLHFLCTLLPVYIKRQCD

SEQ ID NO: 148030 - protein, 75 aa, Oryza sativa
  Clone ID: PAT_MRT4530_48501C.1.pep
PGAPGGRETGPGKKKEGGLKTPPRGNPGPGGGTFSPWGGRGKTGGTPRGRGGGGKNPPPAGGGKKDPGRAPKKTP

SEQ ID NO: 148031 - protein, 848 aa, Oryza sativa
  Clone ID: PAT_MRT4530_48502C.1.pep
MRASPMAGASHHLVVFLAALLALLPGSSQLQYSQTWTLFKIQQMLNHPPVLSHWRRTTDFCGGGGTAAPSAAVVCYGDTVTQLHIAGVRGAPPLPMNFSIGALVMALSRLPDLKVLTLSGLGLWGPLPDKIGRLAALEIVNMSGNYLYGGVPGGLSQLTGLQTLILDDNLLAGELPAWIGELPQLAVLSLRNNSLGGAVPASVGRMESLRSLVLASNNLTGNLPDMSGLTNLQVIDVGDNWLGPAFPALGRKVVTVVLSRNRFTGGLPGEITSFYLLERLDVSWNRFVGPFMPALLSLPAIRYLNVAGNRFTGVLSDKVACGDNLQFVDLSSNLLTGSEPACLRPDKKPATVVLVNANCLEATGGDASQHPSPFCQNQALAVGITHGGKVRKKLTHHAGFLAGIAMAALAAASAIAVVAVVAVRRKNKKGVMVRPPAMLGEDNSSSTSGYPSKMFADARYISQTVKLGALGIPPYRTFSLVELEAATDNFENSLLLGQDSFGEMYRGRLGNGTLVAIRSLKVKRNQSSLSFSRHIETISRLRHRNLVSALGHCFEYDLDDSTVTQLYLVFEYVQNGNLRSRISQGTEGRKLTWAQRISAAIGIANGIQFLHAGMMPGLFGNNLKINNILLDQNHVAKISSYNIPILGEAMKSEKCYDVCQSKKGGPGGKHHTESPLLNDKTDIFDFGVILLEIVSGKPITSLYEVEIMKELMLWAVADEDLVRRRSFADQEVSKGCSDESLRTIMQICLRCLAKEAVQRPSIEDVLWNLQFAAQVQDDWEGDNRSSDGSMVSSSSRITKSSRFQNEQTRSGREKECEDSSARGSVWLQAATEDGNFETGRRQAEDERY

SEQ ID NO: 148032 - protein, 100 aa, Oryza sativa
  Clone ID: PAT_MRT4530_48503C.1.pep
MGSAWRGSSLAHACEGKERRWWETDGGICTGVGLRRKGAAAPSLCDGGDSSPAVVAAACSGAARTVGREEAAAAAAGARKEGGSSGGQRAEGRGGATGMH

SEQ ID NO: 148033 - protein, 89 aa, Oryza sativa
  unsure (1)..(89): unsure at all Xaa locations
  Clone ID: PAT_MRT4530_48504C.1.pep
RFPSISQPSKVSPSSPSPIWNFTAAAXAASPPSSLGNCRRQQRFSSPLVPPAIASQRDARFVTFFLSTSIANLLEQANCXDXSRGTASI

SEQ ID NO: 148034 - protein, 85 aa, Oryza sativa
  Clone ID: PAT_MRT4530_48505C.1.pep
LFWYSHTLCSGGALVSREADRIETERSAPNHPEGESSLFYLQVPDRSATKWTGASYLHCRGSYITLTRSWGPGGALRCLAACVTP

SEQ ID NO: 148035 - protein, 77 aa, Oryza sativa
  Clone ID: PAT_MRT4530_48506C.1.pep
METAGFENLEGNTIYSVTTKEYVAARCSRINTHGGAVKSEESNRDNLLPRQISLIGESQRNAVRRPLDTDQSKINVF

SEQ ID NO: 148036 - protein, 353 aa, Oryza sativa
  Clone ID: PAT_MRT4530_48507C.1.pep
MASCSKWLAGLMLLAAALACSLPAASRAQLQVGFYNTSCPTAEALVRQAVVAAVANNSGLAAGLIRLHFHDCFVRGCDASVLIFSPNGTAERDAAPNNPSLRGFEVIDAAKAAVEAACPRTVSCADILAFAARDSVNLTGNSFYQVPAGRRDGNVSIDTDAFTLPGPNLTATQLVDGFKLRNLTAEEMVILSGSHTIGRSHCASFLFKNRERLANGTISPAYQALLEALCPPTTGRFTPITTEIDVSTPATLDNNYYKLLPLNLGLHFSDDQLIRNATLLPFVDAFAANETLWKEKFVAAMIKMGNIDVLTGARGEIRLNCSAVNPSSSSSSSSAGRMIETVFPGAGGEVAAS

SEQ ID NO: 148037 - protein, 752 aa, Oryza sativa
  Clone ID: PAT_MRT4530_48508C.1.pep
MEKDHQPVISLRPGGGGGGPRPGRLFSPAFAAAASGSGDLLRSHVGGASKIGDPNFEVRERVRYTRDQLLELREIVDIPEAILRINQEIDIELHGEDQIWGRPESDVQVQTQTQAQPHNRYGETDNRDWRARTVQPPAANEEKSWDNIREAKAAHASSGRQQEQVNRQDQLNHQFASKAQVGPTPALIKAEVPWSARRGNLSEKDRVLKTVKGILNKLTPEKFDLLKGQLMESGITTADILKDVISLIFEKAVFEPTFCPMYAQLCSDLNEKLPSFPSEEPGGKEITFKRVLLNNCQEAFEGAESLRAEIAKLTGPDQEMERRDKERIVKLRTLGNIRLIGELLKQKMVPEKIVHHIVQELLGSGPDKKACPEEENVEAICQFFNTIGKQLDENPKSRRINDTYFIQMKELTTNLQLAPRLRFMVRDVVDLRSNNWVPRREEIKAKTISEIHDEAMKTLGLRPGATGLTRNGRNAPGGPLSPGGFPMNRPGTGGMMPGMPGTPGMPGSRKMPGMPGLDNDNWEVPRSKSMPRGDSLRNQGPLLNKPSSINKPSSINSRLLPHGSGALIGKSALLGSGGPPSRPSSLMASHTLTPVEDYLGIHLLGEAQQCIEELQCPEYYSEIVKEAINLALDKGPNFIDPLVRLLEHLHAKKIFKTEDLKTGCLLYAALLEDIGIDLPLAPALFGEVVARLSLSCGLSFEVVEEILKAVEDTYFRKGIFDAVMKTMGGNSSGQAILSSHAVVIDACNKLLK

SEQ ID NO: 148038 - protein, 133 aa, Oryza sativa
  unsure (1)..(133): unsure at all Xaa locations
  Clone ID: PAT_MRT4530_48509C.1.pep
LVPXXAEXRLGVRQAQPELHRXRXPXPXGAFAHVSGDNXRAXHSLXXGXARQXTGXGRXXRQXAQAPQVCVFRVXRPIPHAXGDTXPGXGXRHVSGXFSCQXXAXXPRXILXLAXAXAHXGVXFPSSXQPTYQ

SEQ ID NO: 148039 - protein, 111 aa, Oryza sativa
  Clone ID: PAT_MRT4530_4850C.1.pep
GPLAKWPAPAGFFALGPLTAPTEGGKGFPAKKTSLRHRPSLPRLPRQLAALEVGGRVNFCHTSSSLTPFFPTPSGPLSIPIPAKAKRREVEERQQGSGRTTHASAIKAGLQ

SEQ ID NO: 148040 - protein, 126 aa, Oryza sativa
  Clone ID: PAT_MRT4530_48510C.1.pep
GCSELQQLPHLFGNLTNLEDLNLSGCFRLERLPLPDSITGLVNLQYLKLSHVISELPESLSKLERLHTLDLTGYRLPLSSGVPPTLADIIRKMPNLNIMLRDRYGVEMSCSSISTGGNGRGLPLNL

SEQ ID NO: 148041 - protein, 143 aa, Oryza sativa
  Clone ID: PAT_MRT4530_48511C.1.pep
MATSWNVVSNSTSVMCSGTYPTNSFAISSSNPFTPPPAATTAMETSTPKAGEYEKAAEEGLGAMAPDPPPAVDAVAAEEKSRGAVPADLATYLRGAPPTHVGMTSKAGSEVVAAAQGRGEGGVETPLLLANILDWSKILGMEY

SEQ ID NO: 148042 - protein, 79 aa, Oryza sativa
  Clone ID: PAT_MRT4530_48512C.1.pep
TTVTILKWELYGVSRSPRKATTFSKGSTLCLWLGALKRLWGKEYGKKEFINPNGGGPEAILHPSDPAQFTHPVLLASEQ

SEQ ID NO: 148043 - protein, 62 aa, Oryza sativa
  Clone ID: PAT_MRT4530_48513C.1.pep
MTPPSLSGVDCPRYWIKAVAHRRASSTATAARWLAARSSRPAPISSAHQVNQVQRMYWRRGG

SEQ ID NO: 148044 - protein, 112 aa, Oryza sativa
  Clone ID: PAT_MRT4530_48514C.1.pep
QWACNFVWDPGPSRPLDPLGIGLICTGKISNPRRGVSIAKAQHNVSYGKEKQCLVGIRGKGQNSQVYNGGQQRRPPAEDGMGWASPWFGRTIGLGRTSRGADGCRVWMDGWD

SEQ ID NO: 148045 - protein, 194 aa, Oryza sativa
  Clone ID: PAT_MRT4530_48515C.1.pep
RGSIRTTLGPRGMDKLIVDNRGKATISNDGATILKLLEIVHPAARTLVDIAKSQDAEVGDGTTSVVLLTSEILKNAKSFIEDGMHPTILIRAIRKATALATKKIKEIAVTVKANDANEQRALLEKCARTTLSSKLIARQREFFAKMVVDTVLMLDELLPLNMIGIKKVTGGSLEESRLVAGVAFKKTFSYAGFE

SEQ ID NO: 148046 - protein, 157 aa, Oryza sativa
  unsure (1)..(157): unsure at all Xaa locations
  Clone ID: PAT_MRT4530_48516C.1.pep
MGWMDGVLTRSGGSCRRNGRRRHRRRRRSGRRRRSSASRRGRARRCAAAAPGRPTASSSPLSASTSTRCPPPPRRPRPPPRRSRPRPPSPPPHPAQGSPAVHIGAASSPPPPPCSPALASSPSPPPXRRTSSPVSPRRXSPPVGRRRRPGHSTRASC

SEQ ID NO: 148047 - protein, 92 aa, Oryza sativa
  Clone ID: PAT_MRT4530_48517C.1.pep
IAFFSDNPVGYVPQDNKNLSSISRVVGPGAQLRSVPSTANQQNPAERFIQVVFVDNHDFWFMGFVNYDGAVKNPQEAVCGGKVSLSPHMYFF

SEQ ID NO: 148048 - protein, 464 aa, Oryza sativa
  Clone ID: PAT_MRT4530_48518C.1.pep
YQKLKPAAGQHPHPPPPPSSTRPHRRLLSALRPPVAPPTRPSPLRGGANLNHPTPRGAKASGGCRSPMDSGGTASPAGVAGDGAGGRGSVFRGDDAPKLLAALKEMKEGLDLVTGKVKALTRKVKKNQLPTADGIGYLEAKHHLLLSYCQDIVYYLLRKAKGLSVEGHPVVRSLVEIRLFLEKIRPIDKKMEYQIQKLTNAADSGAAQEKVLNAEAKSKDQPKDDEDLLKYRPNPDMMDSKIDPAGQDNDGIYRPPKFIAATMDDEDKRHKQASRKDKTLARMATESSYFKEIIDDAADRPEELKETAGDESREFTRYMRQRELQEKQEEELFTRAPLTKRDKQTEKWMRKELHGLRGLTDGFDLGINMFVDGDKDNDEVDYCSEEVRSVTPTGGFLGRGGVQQQHVVKETFQEIDRSGSGRHHHNHNHGNDYLMVRETKVEEDFNTCTGEFRERKQSFLLKSD

SEQ ID NO: 148049 - protein, 166 aa, Oryza sativa
  Clone ID: PAT_MRT4530_48519C.1.pep
ATSSCGTGYCLLLLGTWPKPVRYLQEANFPDYCMQAIAKSGFLEPTPIHSQSWPMALKGRDMIGIAQTGSGKTLSYLLPGLVHVGAQPRLEQSDGPIVLILAPTRELAVQIQQESGKFGSYSRTRSTCIYGGAPKGPQIRDLKRGVEIVIATPGRLIDMLEGGHTN

SEQ ID NO: 148050 - protein, 108 aa, Oryza sativa
  unsure (1)..(108): unsure at all Xaa locations
  Clone ID: PAT_MRT4530_4851C.1.pep
MASLASASASTSLVFSTSSSKPRLGSSVGFSSSARFRRTAAAAASRGTGRRAXGLLVVHAARGKFERTKTTVNIGTIRQVCYAKTTPTARLMMRRAPVSVRDPIKSRL

SEQ ID NO: 148051 - protein, 96 aa, Oryza sativa
  Clone ID: PAT_MRT4530_48520C.1.pep
MAHYQEVDYCSEEVRSVTPTGGFLGRGGVQQHVVKETFQEIDRSGSGRHHHDHNHNHNHNHGNDYLTVRETKVEEDFNTCTGEFRERKQSFLLKSD

SEQ ID NO: 148052 - protein, 83 aa, Oryza sativa
  Clone ID: PAT_MRT4530_48521C.1.pep
RGNEGSGIQSREHNGKDRFPLLVWDGCSGPLADGQELGVKTSRAEARESLVQGKLGLAWLATNTKGWIDLSATLRKGKCHIYI

SEQ ID NO: 148053 - protein, 91 aa, Oryza sativa
  Clone ID: PAT_MRT4530_48522C.1.pep
MAHYQEVDYCSEEVRSVTPTGGFLGRGGVQQQHVVKETFQEIDRSGSGRHHHNHNHGNDYLMVRETKVEEDFNTCTGEFRERKQSFLLKSD

SEQ ID NO: 148054 - protein, 660 aa, Oryza sativa
  Clone ID: PAT_MRT4530_48523C.1.pep
MATMKLGSKPEIFVLEGLTWRCMTELESDVVVEVGEMSFYLHKQFPLLSRSGVLQRMISEYQAPQEDGGGGGGMCTLQLDDIPGGAKAFELAARFCYDVKIELNAHNVVCLRCAAEYLRMTDDYAEGNLITQAESFLADVLANWKDSIKALETCEGVLPTAEDLHIVSRCITALASKACASDAAACSTGHAAASASAVAVAAKNASYDALWNGIGSGGTPRGGGGAAGAAAGCSGMDWWYEDVSFLSLPMFKRLIQAMEGKGMRPESIAGAIMFYAGRFLPGLKRNTSFSNASFGGDCGAGSRSITPRAANVSAPSEGDQRYFLEEIVALLPAKKGVASTRFLLGMLRTAMLLHASPLCRENLERRIGAQLEDACLDDLLVPNLGYTVETLYDIDCVQRILDYFMSSTDGLGTGYTSPAVVEEGSQLGALHAGSPSSLSPITMVAKLMDGYLAEVAPDTNLKLPKFQALAAVVPDYARPVDDGIYRAMDIYLKSHPWLSESEREQLCRLMNCQKLSLEACTHAAQNERLPLRVVVQVLFFEQLRLRTSIAGWFFVSGNAAAGGDGAPQPHPGGSAIVPKGAAAAGQSDADAEADEGKGKELPAEAITDVKARVSELEKECMSMKQEIRRLGKPRRSWSLLTRKCRFGTKVQQAQPTMSSK

SEQ ID NO: 148055 - protein, 40 aa, Oryza sativa
  Clone ID: PAT_MRT4530_48524C.1.pep
LGAPLAKIYLPRRHLMSSTWEDISTQVDGHLAPVPILQAD

SEQ ID NO: 148056 - protein, 65 aa, Oryza sativa
  Clone ID: PAT_MRT4530_48525C.1.pep
FSLCWNWLQIFIGFIWIVMDTGMLLDNFQHCELRLTDQSPSYPHPTVIDAQFSFSAPSTCISCRT

SEQ ID NO: 148057 - protein, 103 aa, Oryza sativa
  Clone ID: PAT_MRT4530_48526C.1.pep
PTAPPPQAARPHHCRLAPVSSCHHWSPGALSVPALCTRGLLPPPTEPASPPSSSCPQPSAAVTSSSLPAGSGVGGPGSSPLPCKLFPPPPASPPTLTFLLLAT

SEQ ID NO: 148058 - protein, 185 aa, Oryza sativa
  Clone ID: PAT_MRT4530_48527C.1.pep
MSTAFLPEVDMWTHKTVDLVRAYNKEVKWREEGYIPGTIDEHLQVSARSGMDDIVSKDCFDWVCSVPKIVQSLCIILRLSDDLKSYERERLTLHVASTIDSCMKEHNIDIEMAYEKIHLLIEESWKDFNGEWLDSGNTQPIQLMERIFNLTRTMEFFYKKDDAYTNGHTIKDNIYSLFVEPVMMS

SEQ ID NO: 148059 - protein, 460 aa, Oryza sativa
  Clone ID: PAT_MRT4530_48528C.1.pep
MASVAVPEWLNKGDNAWQMLSATLVALQGFPGLALFYAGAVTRKCALTSAFMALYAMAATMPCWALWAHNMAFGHRLLPFVGRPAPALAQHYMLTQALLPFTLHLHSNGEVETAAVAPLYPSASMVFFQWASAGVTVGLVAGAVLGRMSVKAWMAFVPLWTTLSYTVGAYSIWGGGFLFHWGVMDYSGGYVVHLAAGVSGYTAAYWVGPRRKEEDEEEMATASGGNLVVMVAGAGILWMGWTGFNGGDPFSANTDSSVAVLNTHICATTSIVAWVCCDVAVRGRPSVVGAVQGMITGLVCITPAAGLVQGWAALLMGVASGTLPCYTMNAAMSFKVDDTLGILHTHAVSGVLGGVLTGVFAHPTLCDMFLPVTGSRGLVYGVRAGGVQVLKQVAAALFVAAWNVAATSIILVVVRAFVPLRMTEDELLAGDIAVHGEQAYYFSSGTNCSLSHETIEVGNS

SEQ ID NO: 148060 - protein, 99 aa, Oryza sativa
  Clone ID: PAT_MRT4530_48529C.1.pep
MTARCSSATEATAAWRYSVAAAGSLPSSAKDYSSLMCVEVAIAIKNLILHKAIQDVIWRTNIIDIIGDGNVSSHCHDKWRPLHRLEERTDLEVLIMKQK

SEQ ID NO: 148061 - protein, 565 aa, Oryza sativa
  unsure (1)..(565): unsure at all Xaa locations
  Clone ID: PAT_MRT4530_4852C.1.pep
DELNSAFVCLIPKKENVTSAEQYRPISLIHSFAKIVSKLLANRLAPRLNELVSLNQSAFIKRRAIHENFIYIQNLVKRFHRNKVPTLLLKLDISKAFGSISWQFLLETLQAFGFGSRWREWVCSLFHTSTSQILLNGKPGKAEEANLLSSLPSGPLHCRVSMYADDVALFVKPTQQDINNLKKILELFGNVAGLITNVHKSKXLPIACAAIDINHVTGHFPGQVASFPTNYLGIPLHLRKLRKLDYIPLIDKIASKIPGWKGKYCTAPGRETLIKSVLSSVPIHFLTALPAPKWVLKRIDKIRRAFQWKGEEPENVKLGASLVSWHIVCRPKELGGRGILDLEKFTSALRLRWLWLRWQDQSRPWEAMESPCNEKDICLSQACTQISIGNGKKISFWKDNWLQGPCPKDIAPTLFGLAKRKNRKLDIELPNNNWLYSFRQITTIEAIHELVNLGSLLNQIELHENQEDEITWTRGNTGRFSVQSAYRAQFIXSISDPVFLVNCNAKALPTQKFLGWTLHQRTLTAENLLVRHWSCDWICSLCRQAFEDTDHLFCHCTFIKQTWQR

SEQ ID NO: 148062 - protein, 62 aa, Oryza sativa
  Clone ID: PAT_MRT4530_48530C.1.pep
PSLLTQRWPGALNVQSYVNRTFGIGWAIDSIRCEVRAMSMSASVGLALDVTMSTQSDSATRS

SEQ ID NO: 148063 - protein, 72 aa, Oryza sativa
  Clone ID: PAT_MRT4530_48531C.1.pep
PNFNPFTFSQSFGVPQNCFFPKVKGSKPNVHLPPKNPPKKKKKNPTQLLNPPHLEWAQLKPVFFYLLTKVFW

SEQ ID NO: 148064 - protein, 100 aa, Oryza sativa
  Clone ID: PAT_MRT4530_48532C.1.pep
RRAPRPPRGASRASAPRPGARSRSARGGAPRRRRRPRRVPRSPSCRRRRGRSAAPHPPPPPPPPRHPPAPAPPSRGAGTRAARPSAAAPSPSTPPSPPRP

SEQ ID NO: 148065 - protein, 504 aa, Oryza sativa
  Clone ID: PAT_MRT4530_48533C.1.pep
MARGKNHPDGEEEEAPAAAGEEEAPVEMDEEGEMEEEEEEEQGEGEGEERDEGEEEEEWEDAEEVEGGEESEQAAAEEEDSPLVVVEAEAAAPVVDGSPPKLAEGYYEIEDIRRRRLRKGKLQYLVKWGSQWEGGAWDLAAPELSGRIRTEDWKDQEEITYCLPKQVRVDVDHVVKVPRLRMAVDTHIAIFGTIHLYEFSYEDQEQDCVQKKQQYGRRGWPESANTWEPLENLSACSDIIDAFEMRLQSPRPGRKRKRKITTTPVAGSNPSHGKRGRPRLDAKSHTRAPAPEPKQLPCRTSCRRATNCSSKTVAGLDASGSVVRNQLAQNIVQEGSSSVISRTPCQELPLSIRLTDQQNEHHLVNGSSNSENLVKVPPSQGGQVTGAKKRKSGNVRRFEQNKPTQGQGECGALVVAEDVGSTEGETGDKKKTEGCPNRVHITKIIKPVRFAAAVNNDVQQVSITFKALRSDGQEVMVDDKELKANNPLLLISYYEQCLRYNPTS

SEQ ID NO: 148066 - protein, 138 aa, Oryza sativa
  Clone ID: PAT_MRT4530_48534C.1.pep
CGQSRPRRPSARSTGSRRTWSRCPATAPSPTRRRRRRTRRAVCARCAWPAEYAAGDEVRVLPSCGHEFHRECVDRWLLTRAPTCPVCRAPVVARVEGPDDDAKEDYCGDGESVERHGGGGGDIGFLSVAGESRVLPAI

SEQ ID NO: 148067 - protein, 85 aa, Oryza sativa
  Clone ID: PAT_MRT4530_48535C.1.pep
LALPVVVVVATEVGPGGAGREALAGWLAACAERTLAVDGVHEDELVVLGPQRLATLDSGQMHARRTSTADGMCEEELADGDQIHY

SEQ ID NO: 148068 - protein, 83 aa, Oryza sativa
  unsure (1)..(83): unsure at all Xaa locations
  Clone ID: PAT_MRT4530_48536C.1.pep
CEAYNILRKSSSLILNLFNLMRRSNXADITNEENAGLKLQEKFRLDLEDEEAIHFFHRSYHESVSALFPQMVETIHRWAQYWR

SEQ ID NO: 148069 - protein, 413 aa, Oryza sativa
  unsure (1)..(413): unsure at all Xaa locations
  Clone ID: PAT_MRT4530_48537C.1.pep
MGPTVMKLTREIHICPSPKWRTKDDGEEDDEDYVLRKKVEMGPQRSRWHPKKAAQLDEVPTTTSNSKKKAKSKELTKKRKGKRSVNRIDDGLYVVTHISPNGEPLAPSTARAKFSFQCSAIGKAPFKKYGKITLNQWDKFVKFKTSPEEMAKSKRLSDLAKRKKXHHRLGSGGXEEMKKAGVPVPMEEWNIQSNHWVKERTPKITSEGKVLFEDPELQGVADKIEDLSSKEKKGEFIPQREKDVLSQALGNREHGGRVRGVSSKLSWKEGFKQDASSYKRRDAYKESLRDEGGKKFEKQMMGFCIRHFLLPKTEEETQQPEPNYPFDDLEETTPCRLHVPSGRAGRRLEATTEIAIPGRTYHDRFIDSGYAKVQSQGVNKGFKSYDLDIPTPDGITVLGDAVGLIIFYGTKRI

SEQ ID NO: 148070 - protein, 66 aa, Oryza sativa
  Clone ID: PAT_MRT4530_48538C.1.pep
MNAGTYERAKRVARYSYHSVSSSPLLLSRKRRTLSGVSPRHEVIYFALGFGYGALGSVINYGNNNC

SEQ ID NO: 148071 - protein, 296 aa, Oryza sativa
  Clone ID: PAT_MRT4530_48539C.1.pep
MGPTVMKLTREIHIGPSPKWRTKDDGEEDDEDYVLRKKVEMGPQRSRWHPKKAAQLDEVPTTTSNSKKKAKSKELTKKRKGKRSVNRIDDGLYVVTHISPNGEPLAPSTARAKFSFQCSAIKGKAPFKKYGKITLNQWDKFVKFKTSPEEMAKSKRLSDLAKRKKWHHRLGSGGYARKIALWNKEDEEMKKAGVPVPMEEWNIQSKHWVKERTPKITSEGKVLFEDPELQGVADKIEDLSSKEKKGEFIPQREKDVLSQALGNREHGGRVRGVSFKLSWKRGFKQDAFSYKRRDAY

SEQ ID NO: 148072 - protein, 294 aa, Oryza sativa
  Clone ID: PAT_MRT4530_4853C.1.pep
MPPCAAGKRSSIYRGVTRHRWTGRYEAHLWDKSTWNQNQNKKGKQGAYDDEEAAARAYDLAALKYWGAGTQINFPAYVHYVFAYLGKDITLDGKFAGTFGLERKIDLTNYIRWWLPKKTRQSDTSKMEEVTDEIRAIESSMQRTEPYKFPSHGLHSNSKPSSVVLSACDILTQSDAFKSFSEKSTKLSEECTFSKEMDEGKTVTPVPATGHDTTAVNMNVNGLLVQRAPYTLASVTAQMKNTWNPADPSADPLFWTNFILPASQPVTMATIATTTFAKNEVGDNILHVYGFPSS

SEQ ID NO: 148073 - protein, 61 aa, Oryza sativa
  Clone ID: PAT_MRT4530_48540C.1.pep
VRAGRGFSLDEIQGAGLSAKFAQTIGIAVDYRRHNKSVESLQQNVQRLKEYKSKLILFPIR

SEQ ID NO: 148074 - protein, 99 aa, Oryza sativa
  Clone ID: PAT_MRT4530_48541C.1.pep
KNKKKSPAIVGGGNNPPSALAVKNGNGRPPPGLPGDPCPVKGFKKPCQVLGSPWAPRGAYRLLAPKPPPVVVDLAQKAKCGGVCPSYNLVAPVFPKFWL

SEQ ID NO: 148075 - protein, 97 aa, Oryza sativa
  Clone ID: PAT_MRT4530_48542C.1.pep
MIHTRKRGAGMPRGKNHPDSQEEEAPAAAGAEESPRETDKEGEIKESAQHCKRQNWKVARHGRKVPGNGQQIAPQRKLLNKTAANTRWTEMPHNAAT

SEQ ID NO: 148076 - protein, 100 aa, Oryza sativa
  unsure (1)..(100): unsure at all Xaa locations
  Clone ID: PAT_MRT4530_48543C.1.pep
RCCSGSALTPXNRPSPMACVGKPTTLXASXPRRPRXPPGAXPRAGQQVTYXARDWCGFGTNARXPPRRVKPVXLXRQVTSVXSXSFCLLLPSRPCSWTXC

SEQ ID NO: 148077 - protein, 61 aa, Oryza sativa
  Clone ID: PAT_MRT4530_48544C.1.pep
DWVPGFSAVAVMPAPARGAGMIRSCIIASVCRLTMLVTSMTRNVVRIAPHCRLNDRVGCYP

SEQ ID NO: 148078 - protein, 334 aa, Oryza sativa
  Clone ID: PAT_MRT4530_48545C.1.pep
MSFCERDMNKESMYQERDDMAGIRFATPPLPQQQQQQQLVECFSDEVDSRGSGGEMKDAVGSGSGQLVVVGGGDGASIEVAKKRRGRPPGSKNKPKPPVVITREAEPAAAMRPHVIEIPGGRDVAEALARFSSRRNLGICVLAGTGAVANVSLRHPSPGVPGSAPAAIVFHGRYEILSLSATFLPPAMSSVAPQAAVAAAGLSISLAGPHGQIVGGAVAGPLYAATTVVVVAAAFTNPTFHRLPADDDASVSVSVSLSGSGDADEHRGHQHKPEPQEPRQLRRPPPHLSAAAAVSAAQPVEPCGAPMYACHPQPQEVMWPPPARTPHPPPPPPY

SEQ ID NO: 148079 - protein, 150 aa, Oryza sativa
  Clone ID: PAT_MRT4530_48546C.1.pep
MATRMAAAVAAMVAAVAISLAAGGAAQSSPSTPSCASKLVPCAQYMNGTDTPPAACCDPLKEAVKNELKCLCDLYASPEIFKAFNINISDALRLSTRCGISQTTSMCPGNSPTNSPPASPSGGKNAGHRTMSVGLPGLMSLFLALWSVLA

SEQ ID NO: 148080 - protein, 163 aa, Oryza sativa
  Clone ID: PAT_MRT4530_48547C.1.pep
FLLSPTAALPHPPHSILTRALNASSPARWWIWDLVSNCVLLTPVVGLVVAAAVDPSSSPSLLLDRAADWGDLAPPSLDPATVTAISIAGSSAALPAPWSLSPQGLVVIFLAVTVASSSESSVESWRVAQRMAEARDHLEWPVLLDPVTSFSSLSLHSFRGVSV

SEQ ID NO: 148081 - protein, 393 aa, Oryza sativa
  Clone ID: PAT_MRT4530_48548C.1.pep
MVLFFKVLFGPAAVFLSALVVLSCFKSVPYLSRMSSSELPSYMSYFESPISKCDIFQGEWVPDESSPQYTNLTCSYIQEHQNCMMYGRPDLEFLKWRWKPAGCDLPRFDPDKFLRLVGNKTLAFVGDSLARNHMQSLLCLLSKVATPKDVSVTGKTDPDKILYYEGYNFTIHIFWSPFLVRTEESAESPGVFKLYLDEPDCKWFARVARFDYVIFSGANWFTRPSLFYENGRLVGGSYVALNITSDLTLRHSHRMAFRTALRAINDIRFRGKAIVRTLSPMSHFEGGAWDKGGDCRRTRPYRGNETAMGGMDLEFYTSQVEEFREAQREAAANGVDMVLMDPTAAMLLRPDGHPSRYGHWPDEKRVLYNDCIHWCLPGPVDAWNDMLLHMLSD

SEQ ID NO: 148082 - protein, 545 aa, Oryza sativa
  Clone ID: PAT_MRT4530_48549C.1.pep
MSSEVTSVPPTPTPPPVSTPPSQIQSPAAPASSRASPLRGMGTPNIASPVRKAVASVSGYLGEVGQMTRLADPREAWLPITESRSGNAYYAAFHSLSSGIGFQALVLPVAFSLLGWTWAIICLTVAFAWQLYTLWLLVKLHEPVAGGTRYSRYMYLATTVFGEKWGKILALLPVMYLSAGTCTALIIVGGGSMKLLFNIACGEVCLARPLTTVEWYLVFVCVAALLSQLPNLNSIAGVSLVGATAAVAYCTMIWVVSVAKGRVAGVSYDPVRTTDEEDGAIGILNGLGIIAFAFRGHNLVLEIQVKSLSHSFRLHSATDNDGKDKVTDECMFAINSQATMPSTLKHPSHVPMWKGVKAAYVIIALCLYPVAVGGFWAYGDQIPPNGILSALYKFHSQDVSRVVLGTATLLVIVNCLTTYQIYAMPVFDNMETGYVHKKNRPCPWWMRAGFRALFGAINLLIAVALPFLSELAGLLGGISLPVTLAYPCFMWVAIMRPAKGTAMWYTNWGLGSLGMGLSFVLIVGNLWGLVEKGLHVKFFKPADFQ

SEQ ID NO: 148083 - protein, 856 aa, Oryza sativa
  unsure (1)..(856): unsure at all Xaa locations
  Clone ID: PAT_MRT4530_4854C.1.pep
MRGAATPASMPSCPPSSPRGFPSAASPASFGATATLAGFFRFGIRGVGAGGGRRGQPAPLGPEDAAATGPATSPCAQPSHRRAKAEILTISAFSRVTGQVVDCLCYVQDVSEYFIDVIVDDGREWRLTGIYGESRWEHKGKTWEALRYLHGMMDRPWMELGDFNEILFHHEKEGGRPREQRLLQAFSDSLADCALSDMGYSGDIFTWQRGRIRERLDRGVSNAQWNALFPTARLENGGMLNSDHSPLIVETVVRADSDANTRRGPKCFEARWLKEETELDESVLDSVKVKVTPEMNRSLLAPFTAEEVKKALFDIGDLKAPGPDGLHAIFFKRFWSMLGDDLIKEVLTAVNTATIPEGWNDTTIIMIPKVSNPDMVAQFRPISLCNVVYKVISKMLSRRMKSILPEVISDQCFCSRWVSLIMSCVTSVRYTARFNSMETETFTPTRGIRQGDPLSPYLFLFVAEGLSSMIQQVEENGALEGIRVCRDAPMVSHLSFADDSLILMHADKKNADCLRNLLDRYCRTQEYKAGYEVGVGADRSDCFRHLIDRIVQRVSGWKEKLLSMGGKEVLIKSIAQAVPTYAMMVFKIPKKICKGMTDAISHYWWGDDDEKRRIHWQAWWKLCVPKGKGGMGFRDFHSFNLALLAKQVWRLLCELNSLCARILRAKYYPDGKLLQAKMRSGSSFTWQSVLAGLDCFKKGFIWRVGDGTQINIWDDNWIPSSPNMKVLTPRGNILVINPVDGRWDEALIRSLFWSVDANRILQIPIAPQREDLIAWHLNRNGLFSVKSAYHCQWSHSFRSFIQQPGATAPXAASVWRQLWRLSIPSKIKIFGWRVLHGCIPCFVTLANKHIMCKTEA

SEQ ID NO: 148084 - protein, 478 aa, Oryza sativa
  unsure (1)..(478): unsure at all Xaa locations
  Clone ID: PAT_MRT4530_48550C.1.pep
SEMDSIIFNETXDITYRPCGCKPMGCKXSIQEKKLKLNGTIEKYNTWVVVKGYTQKEXEHFFDTNSLTTRLTSIRLLLSLVASHDLLIYXMDVKXAFLNGELEEEIYMEQLDGFVVKCQEGKVCKLFKSLHSLKQAPKXEMRNLTYVGFIVNEADICVFYPYGRGEGVFLCLYVDDILIFGANLNVIEKVKRFLSQNCEMKDLGIANVIXEHQIRRNDDGGITPIQSHYVENILSRFGYNDCKSHPTPYDPNVLFXIIGLLMYLVSATRPDISFAVSKLNRFGSNPRDDHWQALERVIHYLEGTMSYGIHYIGYPRYYXGYSDSNWISDTNEIKATSGYVFTLGGGAVXMKVLLXTMLMGSTMETKHTTLDTTIVKADWLQELLMDLPVVEKXIPAIMIKCDNXTIFVKVNNSKDKMKSSRHVKKKXRRLKYVRKMXNLQSNSFDYIQIARNLTNPFTRGLSXNVIENVSREIGLRSN

SEQ ID NO: 148085 - protein, 108 aa, Oryza sativa
  Clone ID: PAT_MRT4530_48551C.1.pep
KFGSRWLMPVQVCWVPSWRVGRLMRSSSLAQVSKTILPVATIEELKKGGFQFVNQICYFCSSYDQFSHGSPPIGFLYVMRLNSVPLLNMGSFYNWFNLNIEVFFHHPV

SEQ ID NO: 148086 - protein, 336 aa, Oryza sativa
  Clone ID: PAT_MRT4530_48552C.1.pep
MAGGGGGGGWWWVERYGPCVGMVMVQWFYAAVDMALKAAYGMGMRPIVFVAYRQGIAAATLLLASLAARGWDLRRHMAVGAPAFALLFAASLARLEKVDLRSSRSLAKIAGTVVCLAGAMAMAFFKGPKLLGAVLVAATTDDDWVKGGIYLIGNAFCVSIWYILQVPVCRSYLDPLSLATWMCFLATLQCAVMAFFLESNYLQIWKLASIWELPCILYGGVFASGANFFLQSWCISVKGPLYSAIFTPLSAVITTILSTIFLHEELHIGSILGAIAIIIGLYVVLWGKADDAKSEGLTILSNDSKRITEPECTGVKVECGTNLSVPLLSGNANANT

SEQ ID NO: 148087 - protein, 160 aa, Oryza sativa
  unsure (1)..(160): unsure at all Xaa locations
  Clone ID: PAT_MRT4530_48553C.1.pep
PELPVFXRQELPGNRTEMKFKFRNKRLSQSSQDGAQVALLGKPLESQHKNFTNLPRSLSEERKSFTNLPGTSTICNGFSRATPNRLGDXISKSNKHRDDSPRDIPKLGSRLSGEGKKHLGEASNSSRFEKPELPDLEDRKFRTCIFGQMEYLQKRTPRET

SEQ ID NO: 148088 - protein, 126 aa, Oryza sativa
  Clone ID: PAT_MRT4530_48554C.1.pep
NVGKNHKENQSKNILNSDPQKVSQRPKKKKNHQPGEWLHACMHATHGRPGLRHVSRSYGGQPLFGAVGPARRARPPAAAGTASSASPRWTPPAPPPRRGHPRPSNSFPEAVGFDPEIRPVTCRGYQ

SEQ ID NO: 148089 - protein, 445 aa, Oryza sativa
  unsure (1)..(445): unsure at all Xaa locations
  Clone ID: PAT_MRT4530_48555C.1.pep
SGLKINFNKSEVFCLGAATQKQDLYSQIFTCNSGGFPMRYLGFPIDQKRLLNKDWKXLKKKVGCWQGNLQSIGGRVTLINACLSSTPLYMLSFFRVPIGVREKMDFLRRRFLWQEDQGIRKYHLVNWNTICSPREIGGLGILDLEAMNIALLGKWIWNLETSDGMWQQLIRQKYLFKNILAATKLRPGASHFWQGIMDVKNSFFKFCTKKPGDGKNTLFWEDNWLGGKPLAEQFPFLYRITHKPHITLAKVKEIGWTEMTFRRNLVGDRLADWNRIKASCNQLTLNDKKDVVVWNLTKNGLFSVKSFYRALKLQETSSMTGGIHKKIWKIKIPLKVRIFMWLMLKESILTKDNLIKRGWKKGNNLCQFCEQKETIQHLFFECPEKRRKLQWGAQLLKQIASEVFKSQFGWCLARFRQLHNSTPDPIPGVKFRSWSCTKQARNLVL

SEQ ID NO: 148090 - protein, 230 aa, Oryza sativa
  unsure (1)..(230): unsure at all Xaa locations
  Clone ID: PAT_MRT4530_48556C.1.pep
MMHMTSQQSTLHNNGQYTSQERDKNQISYHGAIYLLVHTFTIXRRGLGGLITLRPWAMKHXSGXESSSSSPELPVFXGQELPGNKTXMKFKFRNRRLSQSSQDGAHVALLGKPLESQHKNFINLPRSLSEERRSFTNLPGTSTICNGFSRTTPNRLGDXISKSNKHRDDSPRDIPKLGSRLSGEGKKHLGEASNSSRFEKPELPDLEDRKFRTCXFWTDGVFAKMTPRET

SEQ ID NO: 148091 - protein, 399 aa, Oryza sativa
  Clone ID: PAT_MRT4530_48557C.1.pep
MALSISTPPTSSSLLPASLQVGRWSSSAAMSARPVAFSLRRPVLAARVAAGGNAPSSSVDEVVTELDAVASFSEIVPDTVVFDDFEKFAPTAATVSSSLLLGIAGLPDTKFKSAIDTALADGECNTMEKPEDRMSCFLTKALANVGAEMAHLVPGRVSTEIDARLAYDTQGIIQRVHELLKLYSDHDVLSERLLFKIPATWQGIEASRLLESEGIQTHLTFVYSFAQAAAAAQAGASVVQIFVGRVRDWARTHSGDPEIDEALKKGEDAGLALAKKVYAYIHKNGYKTKLMAAAIRNKQDVFSLLGIDYIIAPLKILQSLEESVTDTDVKYGYVPRLTPALGKTYNFTEEELVKWDQLSLAAAMGPAAEELLASGLEGYVNQARRVEELFGKIWPPPNV

SEQ ID NO: 148092 - protein, 229 aa, Oryza sativa
  Clone ID: PAT_MRT4530_48558C.1.pep
EARRGVERESYERKDITTRSLFLMGEIGINDYNHHFFQNRSFTAEIKPLVPLVILKIENATKVLIDLGAKTILVPGIPPMGCIPRFLNLLPSKNHNDYDKLGCLKWLNDFSQYHNRALKQMLQRIHHDPTVTLIYADYYGAMLKIVRSPQNNGFTKESVLRACCGVGGAYNADSLVCNGNATTSNLCTEPSRYISWDGLHLTEAAYHYIARGVLHGPYTEPAIPTRCTA

SEQ ID NO: 148093 - protein, 177 aa, Oryza sativa
  Clone ID: PAT_MRT4530_48559C.1.pep
CIPEDAMLKDPRRLYAPGRIYHIVERKMFRCGRYPPVVKTAVPVDGRFEHIVLSCNATMDHAIIWIEREAQKALDLMLEKEKTMEVPSEQRMERNESLQREHVEEHKAALRRAVTLSVPDARSPSAYGTFGEQPERSESFPPVSAMARQRMSWNDLIERVFDRDESGHIVLRSSPSP

SEQ ID NO: 148094 - protein, 92 aa, Oryza sativa
  unsure (1)..(92): unsure at all Xaa locations
  Clone ID: PAT_MRT4530_4855C.1.pep
MAEPLPPPVGALGARTGRRRRRRLATSRCRPPFCAAAVVLPSTRTIRHQRQLAPSSTSPRRRRXVLLIFLLRNRLTPPPLAAATTTFSYRPV

SEQ ID NO: 148095 - protein, 261 aa, Oryza sativa
  Clone ID: PAT_MRT4530_48560C.1.pep
MGDCWFDASGETNSQGVMGGVYKARLYRPFQSVYVADVGGNGNEPTKLREEALSLSVALISIVGHREDEGCQHHGAARLNRNATAHSDALERTPPHPHHRFWRPWTVAGQTTAPSSSPRPPFRYPSIAPSGDAKNGEIVLFLVGNLEQSRLKHYPCKFLLPCKRRRYPCKFLLPCKRYLCKFSSRNSKCKSRKNISILRVYYHPGTATATKLSRMNRIIFGQKPVNQRLLNRCYGCHLRSGCFVSGGGGVLEEQQSKGTRR

SEQ ID NO: 148096 - protein, 209 aa, Oryza sativa
  Clone ID: PAT_MRT4530_48561C.1.pep
MLCQYSSGTVVLHTIPAYLGESSSLLCHSFQQIQTMKPIPQSWRSNKTSRFCINFFGPALVLLLLTFISPVGSCTERERRSLLRFLAGLSQDGGLAASWQNSPDCCTWEGIICGEDGAVTELLLASRGLQGCISSSLSELTSLSRLNLSHELLSSELPSELIFSSIVVLDVSFNRLDGELQELNSSSPDRPLQVLNISSNLLREPRAEF

SEQ ID NO: 148097 - protein, 131 aa, Oryza sativa
  unsure (1)..(131): unsure at all Xaa locations
  Clone ID: PAT_MRT4530_48562C.1.pep
KLTVLVFIHGVGFLIESAYSSTFHKVRHAPSSATAGVVVVTVDYRLAQELPLPTACSYSWAGQLWPVSAQDGWLAXQGDVYVLFIAGDSAGGNIVHDMLLRTASNDGSRIKGASLLQPWFVGSTVQKKKPP

SEQ ID NO: 148098 - protein, 210 aa, Oryza sativa
  unsure (1)..(210): unsure at all Xaa locations
  Clone ID: PAT_MRT4530_48563C.1.pep
GSSGCDGAGEAGXRARRGRRRRGRRRGRMRRKAPSAVCCCFPFNVVELVVLAAVRVPATLCRYAVRGGRRRCVRSAKRKAAKARKVASSAQYIVMWQLAPSMWIVDYFADYSIVPIILLFWCSSSGCRLSPFLMAPSFLARPSGRLVVLRPGSCLRRRRRLAAAPAIGLVAGDNLTVPLRCACPSLPQFAVVVAAALDARHDMACTRGEK

SEQ ID NO: 148099 - protein, 194 aa, Oryza sativa
  Clone ID: PAT_MRT4530_48564C.1.pep
MELMASLINILALISEACRSAEKLPAALITGGVVEAAAAIFVAFFKPPGGVFQHHGKAPFYLYYGIIGGVAIFGFAEAWAGFWVSGDLNGRRAVGKTILWVSILPLVLVAALGGAAGGWGGGPAASGGACDLGVGPSERPGRRLRRRRRRLRRERRPVAPAREEAVFGVVPALPSTACFARRCPALTHSRRRRR

SEQ ID NO: 148100 - protein, 124 aa, Oryza sativa
  unsure (1)..(124): unsure at all Xaa locations
  Clone ID: PAT_MRT4530_48565C.1.pep
PTHDKNNRRSSKDRFFARFTDLAYPSEIVYATIXADIXMTDGYSYELALYGLEVLLTIYADTYCTDLLVARRELTLSASNHYDEGSAEATGEDYYAAPADERMTLRALLHGSLTMTTTVNRVFG

SEQ ID NO: 148101 - protein, 80 aa, Oryza sativa
  Clone ID: PAT_MRT4530_48566C.1.pep
GTVWFTILVINLEVQRISIDQALGNSPLISSIILQPSVITAESRQINKHVLNRLVLLLTVPPDPVKNAPCSVPCSLFIDK

SEQ ID NO: 148102 - protein, 394 aa, Oryza sativa
  unsure (1)..(394): unsure at all Xaa locations
  Clone ID: PAT_MRT4530_48567C.1.pep
MKRKASPSSFSGDPPPAASPTTVDSFCDDVIAEFLVRLPSVPSLARAACAVKRWRRVASSPAFLRRFHALHPGQAQPLLGHYYYTECSSRPVFQPAQPTFSDPELSAVVRHGDFFLTPVTLPPRPPPTEELRHQRELTVFDPXFLIPGRVGDQAASSSSFRVVTMQRCSTTVIYASGGDQRLDMERLAVYDSSTGAWSARPWTNTSDIDMPLPLKVKRYSAMHAPGRICWKRLRGGSPNSLVSLDAETMGFPEVVPPPGVLLGPSYAVGDTDDGSMCLVNMEERGTMRLVMLSKKKWHLRVWLLGKSGCGGRAWVLDQEQETSLTTSTEDAADMLWDYDRACRVVAVNAGVVLISSLLSKELDSKGISLMPARNLAIVEVSVTTDGKTEKKTNQ

SEQ ID NO: 148103 - protein, 74 aa, Oryza sativa
  unsure (1)..(74): unsure at all Xaa locations
  Clone ID: PAT_MRT4530_48568C.1.pep
AFGPRGRLIEKKKKKKKKKKKPQHKKKYIXLSRAWVFIYQLPFSFLXRPTSLDIQTLNPITMAPASPSSSHAWV

SEQ ID NO: 148104 - protein, 146 aa, Oryza sativa
  unsure (1)..(146): unsure at all Xaa locations
  Clone ID: PAT_MRT4530_48569C.1.pep
PALDAMRAITPAIYTVGPLAFLTEQIPPVGPLDDISPSLWREDDACLRWLDGRNPRSVVYVNYGSVTVMSGHELEEFAWGLAGSGHDFLWIVRPDVVTRTAAATAAEAALPREFTEATKGRGLVASWCDQEAVLXRHPAVGVVPDS

SEQ ID NO: 148105 - protein, 120 aa, Oryza sativa
  unsure (1)..(120): unsure at all Xaa locations
  Clone ID: PAT_MRT4530_4856C.1.pep
AQPSRAKPAHGRAAPSSCAADVSRRIEPPSPTNQRTELAPCSTSPRRRRXVLLIFLLRNRLTPPPLAASSSSLSLFLSHVRPLVPLADLPHRSFARQTLAPPTPPRRGDSIFFLSPLPPP

SEQ ID NO: 148106 - protein, 206 aa, Oryza sativa
  Clone ID: PAT_MRT4530_48570C.1.pep
MAPAVASSPSLVLSAAAATASNKRPADSDASPPHQGDRTGQQEKKQQQLECPRCRSTNTKFCYYNNYSTSQPRHFCRACRRYWTHGGTLRDVPVGGASRRGGGGKRRRVSADADPSSASPPPPTTSTTDAYADLPAGFPFLSDGAFLPQFGLAGVAPAAFSWASAVPDLYNCGIAPWDDGTAVTGAAWDNFADIAGLDLSWPPPGN

SEQ ID NO: 148107 - protein, 59 aa, Oryza sativa
  Clone ID: PAT_MRT4530_48571C.1.pep
TCMIHVSLVAHYMMAMGLMAHLMNSNWERSTTFVLGKDCFNHLTSARPYGSARVADDAI

SEQ ID NO: 148108 - protein, 510 aa, Oryza sativa
  Clone ID: PAT_MRT4530_48572C.1.pep
MANGQLDEIASLAPCRTEAVRKGSSTDLDLAGGGGGGGGGGGGGGGGRGMAPVSTGPRFRRRKSNAPRATSRKPDSGVPVAADADAAKEGDAPGSGSTTRVTRSRAARCRPGSQEPLPPPSERSRSRRTTLATDTAVRERKRIRANLIEEEKPLTKMEEVGGEEISSAPSSPLCEPYLPDDQEIDFDTIDLYKKKSKEFHKKRDGNPLARCSGFLIDWNETTKVGVVITSADIICSASSLDRWSGDDEYSYSAKVFVHLLDDTTVEGRLIYAQTHYNLALFEIIVESPVQIPNFTFNLNYAQQIFVLGRDENLCLSISHGKVQYCNPFLCGRHHYMYVDTATPKCALGGLVIDFEGSTRCIPRPQLGVKLSAIKFLDLPHIEMILRKIHICDGLIVEEVSSGSTIEKLGVRVGDIIQHLNGEWVSDTIQLEEMLLRLSEDHFDKGNGLNSTLDIKVGLFHIRNGARNTINLTTVVSENGEVVKRGSFAVSVPTREEISAMYALQEATTGM

SEQ ID NO: 148109 - protein, 48 aa, Oryza sativa
  Clone ID: PAT_MRT4530_48573C.1.pep
HAAYLLDPLFGRLIFFLTQKITRISQDLPNSLHFNPSSTPLNLQVNPA

SEQ ID NO: 148110 - protein, 44 aa, Oryza sativa
  unsure (1)..(44): unsure at all Xaa locations
  Clone ID: PAT_MRT4530_48574C.1.pep
QKFAKSVTDNAIISPPSNFTPAVRFLGHRGIYLKQLRLXRSQRL

SEQ ID NO: 148111 - protein, 118 aa, Oryza sativa
  Clone ID: PAT_MRT4530_48575C.1.pep
MTAATPEDHTADCCLGGEEKEAARRRGRRGGAAASERRRRRGGGEPGGSTAEAEWEEAAEKTMEEKERRRRVAEAKFGKIDSDLELDIEAESKEIESCRNGLRIGWAAYRLEAESEFN

SEQ ID NO: 148112 - protein, 129 aa, Oryza sativa
  Clone ID: PAT_MRT4530_48576C.1.pep
WAVDISAYDDDGKCTHILLCSNPSSYQAVPPKVIYVRPYITFTNRAGQDFYIKLSAEDEPKVLHAHDWRVSFMHSEGGTEKLQLRFGYANHCYLKMCGCMFGMQNIIYVEKKIACKYQDECLQNSGKRR

SEQ ID NO: 148113 - protein, 64 aa, Oryza sativa
  Clone ID: PAT_MRT4530_48577C.1.pep
MQVSGPCNRLSNPPRSNYQPGGGGAPFYPLRQRPRKRPGVPGGGGNSLGAIGQVSPGPGAFPPI

SEQ ID NO: 148114 - protein, 1079 aa, Oryza sativa
  Clone ID: PAT_MRT4530_48578C.1.pep
MASPTLLPDSARAALDDAVQAVADAVRTSFTPREGNTVDPTTGTSVSNFAANRASKAAHAALSDALTAFVLTTNIDGTPLSTSSSASPSDTVLPLSTSSSSSASAPTSSSAPSAPAAPPPASSPPDPVVSLPPALEAILSSARFPGAPQQPLRRPPAAPALGPDALAALHAQVVSVLNIKALVPITLDVAAANFTRWRGLFLVALSKYALTDHVLSDDHRPDLAKWFQMDCVVLAWLYGSISADLLQEVMSHDATACSVWRALELQFLGNCEQRSLNLTTEFRTFHQGDLSVNDYCRRMKTMADSLSDLGDPLSDRALVLATLNASVSVDRRRSLVALAGRAFKGRPPLWIEHCPPRRCNKQQAVILAQSHACDRLRCRPGQARLAGPHLQTPGLAPSTCGLAQRDAACSGQGLSGPPSLAQSSTGRRSAQSSANNSATDLEFLEDFSSPVQLPIGRPTTSDATASRRLAHPPPPAGPPASPSVAPGPAQETSPTFPAPHTPPAHSPGASQGSSPASPLRQASPAHSPGPAHGIHPPSAEAPWMLPPLPPVPTRPRSVRNPTAPHQPTALGESPVINEHVMTTRGKTGVHKPVQRLNLHAAALSLVPRTYRAALADPQWRTVMQDEFDALLSNRTWDLVPRPHKANIVIGKWLFKHKFKSDGSLDRYKARWVLRGFTQRPRIDFDKMFSPVVKPATETVYCIQPPGFVDPAHPDKVYRLNKSLYGLKQAPRAWYSRFASFLLSMGFIEAKSDTSLFIYRRGQDTIYLLLYVDDIVLTTSTDKLLHWTISSLQSEFSMKDLGSLHHFLRVTVDRLPSSLLLHQRQYSLDILDRVGMADCKPCSTPVDTSSKMSATVGAPVADPTDFRSLAGALQYLTFTRPDIAYAVQQVSLHMHDPREPHLTALKRILRYVWGTLDYGLHIQKSPVTDLVVYSDADWAGCPDTRKSTSGYAVFLGDNLVSWSSKRQNTVSRSSAEAEYRAVANAVAEATWLRQLLQELHTPLAKATVVYCDNHQRTKHVEIDLHFVRDKVAVGAIRVLHVPTSSQYADIFTKGLPTPVFLEFRFSLTVRSHDDATAGRC

SEQ ID NO: 148115 - protein, 112 aa, Oryza sativa
  Clone ID: PAT_MRT4530_48579C.1.pep
MWLPPLDNVGGSGEPTRENEAGVGDEHSGRHPAPHMAVSTATTSSSTAPSSPSPPVMLPVAPLSPPSPCQVRSPPSPPVVLLSPPPPCRARSPPIAPLLPPPPCLARSRPSS

SEQ ID NO: 148116 - protein, 50 aa, Oryza sativa
  unsure (1)..(50): unsure at all Xaa locations
  Clone ID: PAT_MRT4530_4857C.1.pep
PSKTPKTIYSIQRPMTXLAHRGTICGNFLNXQPINPXPSLSHKSNFAGXA

SEQ ID NO: 148117 - protein, 33 aa, Oryza sativa
  Clone ID: PAT_MRT4530_48580C.1.pep
MDPEGLLKSLSVGARGKPPGRIGIVKGFYGNSP

SEQ ID NO: 148118 - protein, 256 aa, Oryza sativa
  Clone ID: PAT_MRT4530_48581C.1.pep
FFAGARSTVSNIVMSITVFIALELLMKSLYYTPIAVLASIILSALPGLIDIKEALSIWKVDKMDFLTCLGAFVGVLFGSVEIGLAVALAISFAKIIIQSIRPQVEVLGRLQGTNIFCSIRQYPVACRIPSVLTIRIDTSFLCFINSTFIKERIIEWIREEVETSDEKARERVQSVVLDMSNVVNIDTSGISALEEIHKELASLSIQMAIAGPGWQAIQKMKLAGVVDQVGGDWIFLTVGEAVEACVTMQKGTALEC

SEQ ID NO: 148119 - protein, 127 aa, Oryza sativa
  Clone ID: PAT_MRT4530_48582C.1.pep
MTPDGEFPVAISSTVLAGGEITLVCIYSGGYINKNPNVLTGNLFPFFWEMLQDGIPFGWNDTSKGFDFSSSQFTVQAAATAQMKVAWEVSGKEIPYYSIIYVLSKSYQNFTLFNDDIVNEPLQGIRT

SEQ ID NO: 148120 - protein, 84 aa, Oryza sativa
  Clone ID: PAT_MRT4530_48583C.1.pep
MAMLLCAKFFVICKKKKKKKKKKKKKKKKKKKKKKKKKKKKKKKKKKKKKKKKKKKKKGGAVFRRTKFNFPGACKGKTFFYRAP

SEQ ID NO: 148121 - protein, 149 aa, Oryza sativa
  Clone ID: PAT_MRT4530_48584C.1.pep
GGGGVATSPSGPTPPRGGQATWVSAAAQASSHDTPGPMSPTGALRDGLMLVQRLGINRVIFQSDCLQVVDTMLNGGYAATASTAIYEECNLIWRGFDSTSIEHCNREANKVAHALAMVAFSRKESCIWIKGVGDLLFFSLARCSQKCLG

SEQ ID NO: 148122 - protein, 475 aa, Oryza sativa
  Clone ID: PAT_MRT4530_48585C.1.pep
MKPRELLERIARPFSSSSSRRGGGAERRRREEEEADLEAIAAREQRAFRYEALSAATRGFSERQKLGQGGFGPVYRGRLADGREVAVKRLGAGSRQGAREFRNEATLLSRVQHRNVVNLIGYCAHGPDDKLLVYEYVPNESLDKILFSSPPPPPRNFHWLHTVGGLPGGWIRGSTAEKAAPGSSSDGERRRRREELTWARRHEVVVGVARGLLYLHEDAHTPIIHRDIKASNILLDDRWVPKIADFGMARLFPEAGDGRSHVQTRVAGTNGYMAPEYLMHGALSAKADVFSFGVVVLEIVSGHKNSSFVPPPDSDADNLLDHAWRLYKKGRSIELLDPAVKSAAATEQVELLVRIGLLCVQADPRMRPDMKRVVIILSKKQSTLEEPTRPGVPGSRYRRRSYGTRGGGGGSHFSVGSTSGTSSPSTSTTASHATTSAASNAMTTTTSSTHTMRSQGLPLHREERGVELKKDDESG

SEQ ID NO: 148123 - protein, 542 aa, Oryza sativa
  Clone ID: PAT_MRT4530_48586C.1.pep
MSSLFRFGRRRWTLCRALTAGGSKQAEDNSGVFRDPGERGFSTRPNLSLEQLSVGPGDTADLLRKVLPGIRDASKTFAIPALKQVFEDSIRPLLVSKCLLIHQPLDKSMKTFNQRTNNLLKKSPRYLSALDVTTEKEILLEDEWTLFLEHIFKHRVIVVDDWTKCYGTVQTFLHSSDAESCSDSFKGECDASFCEQTGKAKLAFVIFKEGKLVWAEVFHEVPCKSVVEAEALAVIALLFKLIDLNLLRGTVWTDNKVCYNVLNGEYEIKVDDPNRSLFLFLRSLRGRFESLTPVWKPRELLLIPDRLVSMVDDPLISRNRLVLSILEKTVPILSQPQFRISWSSYLRTIFDKRDGGKQISNTTNEIKESDESEDSICWVKADDEEAEIASFLEIMKTFSAHRLLIVVDNFEDKSPHYQKLIKDLSQKFYTCWMSKEGSVTIVEYDSPNTEEKETKRLVVMFGGTMALDEYIHQKNLCTVVLVKTSEIKLLRDAGIEEISAKTLLSFRNIKAKPVVPKKPREDEDLEKGGGGQVVNRMRRGQV

SEQ ID NO: 148124 - protein, 44 aa, Oryza sativa
  Clone ID: PAT_MRT4530_48587C.1.pep
DILHYIILEGKDIIIYPSFLLLWRYMLHVDYHSSNPFTSLPDQH

SEQ ID NO: 148125 - protein, 495 aa, Oryza sativa
  Clone ID: PAT_MRT4530_48588C.1.pep
MGPHPPSSYSDKKTCQNVPPEKPSSTSFCHPQFPQHLLSHPAYAMNFPFPPFPHYPPYSQNFQYAVPPQYAPYSLPPPDGAMPSPYVPATVMPSKAPSDQGTPHSVTGPGQQDDDDAEPERTARRLAWTEEEDIRLISTWLINYKTDKYWDKVAAEYNSATPGARRREVKHLKNRWQRMINKVAHFNDCWCRVMAKYPSGQSEGMQQMDKTWLMYNKEAHVMYLEEAKHKFTFGHCWNAVWDQPKWKEYISSFSAKRVMRSESGGYVSSSEDSEDMQEGKCLVDPLDMLPKNHEDMTEVQPSVSNQKKQLELLTADASWPIEFQLGRHQLMTGTSKLNEHQQGVAVRDEMLEKESGPQDFEVLDNERVAREDEPKKETQPHQGFKARKVNRKRKGKASSSSCEVQEDIKHALYLQTMLNNDREKMSEVQLRLSKEQLELARIKQDEANVKKETALYMKYTELLLADTSRFDEFQKAEYEKALKHIGGILFSKDVN

SEQ ID NO: 148126 - protein, 74 aa, Oryza sativa
  Clone ID: PAT_MRT4530_48589C.1.pep
VFSLSQIYRLIYSKISTYFETEVILLYNTSTIVFFSLIFTYHSYENFLFSLIESMNLHMHSLTHRICSHTSSTF

SEQ ID NO: 148127 - protein, 86 aa, Oryza sativa
  Clone ID: PAT_MRT4530_4858C.1.pep
KEEKPSTPSPAPAAEEIKAATAGDKAGEEDGETERHELNGGKKAGVVVGAFSAAAVVGLAAVVWKKRQANIRRSRYADYSARLELV

SEQ ID NO: 148128 - protein, 85 aa, Oryza sativa
  Clone ID: PAT_MRT4530_48590C.1.pep
RNFRSTRKNKGKNPLAGPRMDQRQRLKITMNRSAHARASQLERACRPTDAVEVEASLPMMFLRPEDDYPAGPAVVGGDHGPWASL

SEQ ID NO: 148129 - protein, 66 aa, Oryza sativa
  unsure (1)..(66): unsure at all Xaa locations
  Clone ID: PAT_MRT4530_48591C.1.pep
QALAKAARVKARTYKLDSKRNKLSPQMSSKIKAAGKAWYKTIISDSDYKXFENFSKRLVVKQWIYD

SEQ ID NO: 148130 - protein, 39 aa, Oryza sativa
  unsure (1)..(39): unsure at all Xaa locations
  Clone ID: PAT_MRT4530_48592C.1.pep
TLDHLKDDDAHPSSISIKRHASMDNQPIQYPXSSAAARR

SEQ ID NO: 148131 - protein, 106 aa, Oryza sativa
  Clone ID: PAT_MRT4530_48593C.1.pep
MTEAERRGAGGSAASRCREGYRLAAEGSRRRTKAASRSSSSRRAAAGVGGEKGTRRRRWGGGGPHKVPPAKIIFFQADHLRGPPAKIKLKAQKIPLISDDLSLTIA

SEQ ID NO: 148132 - protein, 239 aa, Oryza sativa
  Clone ID: PAT_MRT4530_48594C.1.pep
MQTPAEIPPAAAAAAEAPAVPRSDDPPAASDPSSPPPPPPPVAVAAATADPPPPAQPQGQKTVTWSEKLTSESPTYVAAATAEAAESSQYVSRGPASSSSKGAVEAMKETLSRWGKSVGETTKMVESLSRDTWQHFKTGPSFTEAAMGRLAQGTKVLAEGGYEKIFRQTFAEWSYYKVVIPLHQLRAANPSVSKVNPAEKYIQVVSVEGHEFWFMGFLMYDKAVCSLQEAMNSAREMQP

SEQ ID NO: 148133 - protein, 208 aa, Oryza sativa
  Clone ID: PAT_MRT4530_48595C.1.pep
TAEAAESSQYVSRGPASSSSKGAVEAMKETLSRWGKSVGETTKMVESLSRDTWQHFKTGPSFTEAAMGRLAQGTKVLAEGGYEKIFRQTFEVLPEEQLKISYACYLSTSAGPVMGVMYISTAKIAFCSDNPLSYKAGNKTEWSYYKVVIPLHQLRAANPSVSKVNPAEKYIQVVSVEGHEFWFMGFLMYDKAVCSLQEAMNSAREMQP

SEQ ID NO: 148134 - protein, 128 aa, Oryza sativa
  Clone ID: PAT_MRT4530_48596C.1.pep
MGHTNLHSAGSRCNVEARLFADDVTGVRPVTNRRDESAIFDLAEHEFEVEGYPVVDYESDRQTAMQPRLAVAKRLRPLVDEEAVAHGTVVATVADAAMFDSKARLEALLDFHFNVREVKMGTYRPFVL

SEQ ID NO: 148135 - protein, 90 aa, Oryza sativa
  unsure (1)..(90): unsure at all Xaa locations
  Clone ID: PAT_MRT4530_48597C.1.pep
MTGDFWTGEASSAENVFMAKTVERAERRQEMAPPMATAPKTTEACELTAAAAALLAVAQRXVIGAPRAHRRSTSGIEDKGDSRGTEAYGA

SEQ ID NO: 148136 - protein, 761 aa, Oryza sativa
  unsure (1)..(761): unsure at all Xaa locations
  Clone ID: PAT_MRT4530_48598C.1.pep
MCVCVCVGRRADRWGLVWCGVVGLADAVQERVRSWLSRARGAIADAANAAREKGRSKEEAEGRKKRRKEALEEYSVGAAQEITVVRRVVRXLEITLICSHVQRSLHFKWXLFITMLAWDYPYGEEDDSGSSLDNCSILGRLVVXDAFVLIALAVESIAHSXTDHYRLSALVGSDMVISIEIWTTYLTILFWEDLWEKMPLTELHLLWHVQLIFKRLIISSGPLSVLKNTAWPGHLTLTNKXLYFEAIGLTSTNKPLKLDLTDRNSRGEKAKVGPFGSRLFDSAVSVSXGSVSNEWTLEFVDFGGEMRRDVWLAFISEIISVYRFINEYGPRDDDPATASCIWCPQGQALEFVDFGGEMRRDVWLAFISEIISVYRFINEYGPRDDDPAIHHVYGAHRGKKRATLAVKFWGGPLVTNSKAASQRASQWHRPSEDSSSAHAHIFDIDGSVYLRKWMTSPSWTSSHSANFWRNSSVKHGVILSKSLVVADKNLVEKAMVACKEKSKIVERTQATIVAATIEGIPSNIDLFKELILPFAIVSEKFYKLKRWENSRTTACFLLVVYTIIFRNMLSYVLPFSLMMLALSMLALKGLKEQGRLGRSFGKVTIKDQPPSNTIQKIIALKEAMASVENYLQNLNLSLLKIRTIFLAGQPEVTTQVALVLLASSAVLLVVPFKYVLAFFMFDQFTRELEFRREMVKAFMSFMKERWESIHAAPVVVLPYEDGGEQHNKTLPPKSTQQTQSGSVQSTDTYMNLSNGTYTLDI

SEQ ID NO: 148137 - protein, 117 aa, Oryza sativa
  Clone ID: PAT_MRT4530_48599C.1.pep
MSSSGGFRLRGSGGRSSSPPREPNGGSGDRRRRPQRRRTAAGAAAGGGERRRARGERFRRRRKTGFEGIGRGRLGGPLYRTGSSGPSPYRREKRGRHGGSAKWHEGGGNGGVQGQAV

SEQ ID NO: 148138 - protein, 93 aa, Oryza sativa
  unsure (1)..(93): unsure at all Xaa locations
  Clone ID: PAT_MRT4530_4859C.1.pep
FSXAARPRXLGXXRHXLVPXRSPLLHQQRLQSPPPXLQXXAQRRRGKXGSSPCVAXXXLSCFXTPLSLSLSLSLPLSSSPSLLVSWCVFPDAG

SEQ ID NO: 148139 - protein, 89 aa, Oryza sativa
  unsure (1)..(89): unsure at all Xaa locations
  Clone ID: PAT_MRT4530_485C.1.pep
KKKKKKKKKKKKKKKKKKKKKKKKKKKKKRGGPPKRTQPNQPLHPTKKGVVGGTKIKSTGRXLTTPELEKPCRNPXKXPGNTSPFPQLA

SEQ ID NO: 148140 - protein, 376 aa, Oryza sativa
  Clone ID: PAT_MRT4530_48600C.1.pep
MAAAPARLVVLVLVAVVVVVGGDGDAGVIRQVTDGGYWPPGLLPEAQFAAFVRRHGREYSGPEEYARRLRVFAANLARAAAHQALDPTARHGVTPFSDLTREEFEARLTGLAADVGDDVRRRPMPSAAPATEEEVSGLPASFDWRDRGAVTDVKMQGACGSCWAFSTTGAVEGANFLATGNLLDLSEQQLVDCDHTCDAEKKTECDSGCGGGLMTNAYAYLMSSGGLMEQSAYPYTGAQGTCRFDANRVAVRVANFTVVAPPGGNDGDGDAQMRAALVRHGPLAVGLNAAYMQTYVGGVSCPLVCPRAWVNHGVLLVGYGERGFAALRLGHRPYWIIKNSWGKAWGEQGYYRLCRGRNVCGVDTMVSAVAVAPPPP

SEQ ID NO: 148141 - protein, 162 aa, Oryza sativa
  Clone ID: PAT_MRT4530_48601C.1.pep
HIAFLLEAAKREGGGRTEAAAAVAVKAHGAWWRWWRLPPLAQQGRRAEVWAALGGGQGSARRLDLALRPHGGGTWRRERLPTARRRTAGAGRRRWHSRSGARSKDIPGCTKFIKTGLQNEELLEKMFEDIRNTGANHWSLGQGTIPTAMDAFRDYLAGRIAG

SEQ ID NO: 148142 - protein, 56 aa, Oryza sativa
  Clone ID: PAT_MRT4530_48602C.1.pep
LCFYPRVLITSDYPPWYAPPFYYSPWNQRWTNHAHRNTSLRSPAPSCSCFASACPS

SEQ ID NO: 148143 - protein, 55 aa, Oryza sativa
  Clone ID: PAT_MRT4530_48603C.1.pep
LSLSPQAIVTLQVRWSHGPAQVQYNGKVECVPAWLDSRCYILFQLKRVPSYWSRS

SEQ ID NO: 148144 - protein, 258 aa, Oryza sativa
  Clone ID: PAT_MRT4530_48604C.1.pep
MAECQPLQLQEGKKLQELQPYDGCNPSVYRGPILLPRQANSAPPAVPPEMSSSSGSGRSATEARALKIHSEAERRRRERINAHLTTLRRMIPDTKQMDKATLLARVVDQVKDLKRKASEITQRTPLPPETNEVSIECFTGDAATAATTVAGNHKTLYIKASISCDDRPDLIAGITHAFHGLRLRTVRAEMTSLGGRVQHVFILCREEGIAGGVSLKSLKEAVRQALAKVASPELVYGSSHFQSKRQRILESHCSIMSI

SEQ ID NO: 148145 - protein, 87 aa, Oryza sativa
  Clone ID: PAT_MRT4530_48605C.1.pep
LFLMDFLMPHSISLFICAYIIVFIIFAAENILVNSVRRGRRYLTSTFFVKGITHRSYSLDSTSGLTLHLTVTCIAFLLVSIVLQSDI

SEQ ID NO: 148146 - protein, 63 aa, Oryza sativa
  Clone ID: PAT_MRT4530_48606C.1.pep
SFQASQHFKVTNKHTEGRRPVYAIVFNFLDVRYYDIFATACGPRVRFLTRRHIDLTREVVALH

SEQ ID NO: 148147 - protein, 81 aa, Oryza sativa
  Clone ID: PAT_MRT4530_48607C.1.pep
MEGEGIGRRGLPSLLGSSSSESGGIGQEHIASDITQLIGWTPLVELKRIASKDGIDARIVGKVEAYQPLCSVKDRSALRMI

SEQ ID NO: 148148 - protein, 466 aa, Oryza sativa
  Clone ID: PAT_MRT4530_48608C.1.pep
MGPTSRNHKSSQKDVAPNEAKPPRYPQRNRSITASASASAFASPAVANSRVAKERPSSSTAGEGEPQETVLKLPSIPTLPARMAKLVPLEGLGCEAAVGSLTPSREREYKVTNKHTEGRRPVYAIVFNFLDVRYYDIFATACGPRLSTYRCLMNGKFALLQSYLDDDMNESFFTVSWACDIDGNPLLVAAGSTGIIRVINCATEKIYKSLVGHGGSVNEIKSQPSNPSLIISASKDESIKLWNVQTGILILVFGGVGGHRHEVLGVDFHTSDIYRFLSCGMDNTVRIWSMKEFWEYVEKSYSWTDATSKFPTKFVQFPVLCAEIHSNYVDCTKWLGDFVLSKSVENEILLWESITKEENPGEGHIDVLQKYPVPECNIWFMKFSCDFHHNQLAIGNRDGKVYVWKVQTSPPVLIARLNNPQVKSAIRQTAVSFDGSTILACTEDGNIWRWDEVDHPTAPVPSKKQK

SEQ ID NO: 148149 - protein, 142 aa, Oryza sativa
  Clone ID: PAT_MRT4530_48609C.1.pep
MMTVEGTDSTVTVLGTARSAFTIVKKRVVEVKEVDPAAAATTTAAATMTTTEPQEGSSGSNPLPSSRSGRQWLGARVVDPEARDGGVATGGGARSQEAGGGFGDGSGTAAHPKAELKRGWRIWVFFFCSKIIFPGGQLNLAT

SEQ ID NO: 148150 - protein, 233 aa, Oryza sativa
  unsure (1)..(233): unsure at all Xaa locations
  Clone ID: PAT_MRT4530_4860C.1.pep
WSPRAPRRFPSPPAALSPFQPYINPPRASLARFRXLPHRLLAGIELAPLPSLSSVADDLRPAFSARRDRLPPRRRLLRLRRTAVDPVQPLVEPADRRNAVDPDDPSRAAAFLRSGRLFRRRRRPKVSRGPPPLFPLPFPSLGRRSAVPMAAAGDHRGAGAASRRPRRVAATWGPAVSRQGPRVRLTRGAHGAGRCEPGCARSTVDHVAASEDPLFVEVEADVWESERGKSHHP

SEQ ID NO: 148151 - protein, 227 aa, Oryza sativa
  unsure (1)..(227): unsure at all Xaa locations
  Clone ID: PAT_MRT4530_48610C.1.pep
MPEKPGPSDLMDVGGGGALPERLRWRPSPARTAAVTLRPILSLFSPSDPHRRRLPPPRIASLAPSSPSRLVVAGGDHDCGGRRHGGLGRLAEGVADGCVWPAXQRLEEGSETGLAQLGAAEAXLSARGAGGGDGSRLSTRGAADGGRPDWRERRVRWRRLAWHERRGRRWRRRPRCEVELSVGVARSSAHEGWPAGGAGAGSHMSAEVEWWWSIGVSAVDSQVVSGG

SEQ ID NO: 148152 - protein, 352 aa, Oryza sativa
  Clone ID: PAT_MRT4530_48611C.1.pep
METPTNLTNTISAVHLLKINGYSVTRALGCSEYISSRRLAAGGYDWEVLYYPRYYEHGVYWIALRLMFMSKECKHEVKAALKCQLVHEAQIYLPSGSKSVSSKYTGQRDCGPALLLVKQDDLPGSNYFIGDSFVVECTITVLREPQEAVTNVSPNVSNPCCDLQMHLGELLLSEKGADVTFVVAGESFLAHKIILAARSPVFMAEFFGPMKESSSQCVEIKDIEASVFKAMLHFIYTGTSPELDQQHVVSDSEQDITTMTQHLLVAADRYGLDRLKLICQDRLHDDINVETVATTLAFAEQHSCTQLKDRCIEFIISSRANLDAVMATEGYKLVIASCPSVLSTLLRAAVGR

SEQ ID NO: 148153 - protein, 56 aa, Oryza sativa
  unsure (1)..(56): unsure at all Xaa locations
  Clone ID: PAT_MRT4530_48612C.1.pep
PENILIGALYSQNFLPYRPXEKDSTXSQTQLHLLGFTSXIRRVTPHIGVKTRRNKK

SEQ ID NO: 148154 - protein, 104 aa, Oryza sativa
  Clone ID: PAT_MRT4530_48613C.1.pep
LQGRYFNSFRGRAPCNSRTVTKANSIHGIITAKQPLTLYGGIEGLSTQESHCAQCRLMSLVTCSSHGWVRLTRRQRPYQRGWGGSPWSPAFTPEPRRFRRRACS

SEQ ID NO: 148155 - protein, 49 aa, Oryza sativa
  Clone ID: PAT_MRT4530_48614C.1.pep
ILGAVAVGSHNCDLGVIAYASFPIVSYMVWWPPWQLTVLPVLLGWRAEN

SEQ ID NO: 148156 - protein, 97 aa, Oryza sativa
  Clone ID: PAT_MRT4530_48615C.1.pep
WMLPKLKVPTSTRQSLLATPINLMTASLIQPAFSFTALNFFGNSNMLSIYTMTRRRRKITFSTGISWRKPSSGRPPTTNPQSIKLLSVLFNRTSRNN

SEQ ID NO: 148157 - protein, 141 aa, Oryza sativa
  Clone ID: PAT_MRT4530_48616C.1.pep
MVCCVLGASGHRGCFGGARLSRGVTDTGASNWEAPAAGAGAAGGAAEVAVRHHRALPTGAPTKDSGLLSACFFCAKIFVASKEHFSYKTHNDICCTSENGHGDVTKVFTDNGLEVLGWPVLFNVSVDAIKGSHSTVSCMAQ

SEQ ID NO: 148158 - protein, 41 aa, Oryza sativa
  Clone ID: PAT_MRT4530_48617C.1.pep
AGTEWQQDGWVHVMGRSSGACEGQDAQHGSMCQCQAVTASR

SEQ ID NO: 148159 - protein, 248 aa, Oryza sativa
  Clone ID: PAT_MRT4530_48618C.1.pep
MAMAKLFITGLSTTITCSFAVVFKGAVMAVMLLLRLVQFPGYLGCLLLRSIRAAVEGAVTAATGDAVVAAAAIGRPKALLAEMLAIFGLVALLSCRPSSRRARRVSGWSAAATRIAASKKAATKNAQIDEGPATSFLGGGLHAAPSIEGPASRRAAAGQLVAPRWTMAMVMVEAGNGRRSTDARISACWPGTAMRTVDETTTRLHRWRSRAKAEERKGIEDSWIHRFRRRGPAPGQWATAHNALRKGI

SEQ ID NO: 148160 - protein, 62 aa, Oryza sativa
  Clone ID: PAT_MRT4530_48619C.1.pep
LPSRESVANIPHIALSRLYTTHGTHALHVVRSSHHISLCEHATQQALSSMPRHCFASTLTKG

SEQ ID NO: 148161 - protein, 2049 aa, Oryza sativa
  unsure (1)..(2049): unsure at all Xaa locations
  Clone ID: PAT_MRT4530_4861C.1.pep
KPLDLRYKRDPXLGGPKRXESDGQHHHHSLRNPCTSVPQYSLYPVYGYHPSTVARQVGGLCAQGSTTMSSSLVDNIVNTNLNYGLPASTMLAWTQVGEIVFPVYTTMPISAGPSMTRNENAVAVTQDGSTSKGPPAEVEKGTSTTSELEKNSNAAKPCRSDQKHKPTRITSEATGSWCPIHKSRKHTLQACWVFLNARAEIRACKERGIQRVSPTRGVHCPIHKTKNHDLSSCKVFLSVTKTSSPKVQQPGKTLRDEDKEXGTTLTPNRFVGVIDIGSSESSILHLLEDYNSSSTSTPREVLAIDGTGTSARANTGAENQTSTLAQHIRTLNAILRETPYDPVLHDDLAQWTERLRESVTNLSNAFEEAAAATHPEXQPTAGANGENPEQQESPHRASPPPRGISNLRDHLNGRREARRTRENENRSRHHVSSRHHDNGDHRHNRHIRDDRERRTPGDTSRGRRHHDEDGRERRRDNNGGRRQYFREPGRRSRNPTPEPSDPSTSSSSSSSSSXRQPTAPSAGCRAFGRSLHDVRWPERFRPGAIEKYDWSTDPEEFLQVYSTILYAAGADDNALANYLPTALKGSARSWLMHLPPYSISSWADLWQQFVANFQGTYKRHAIEDDLHALIXSSGESLREYVRRFNECRNTIPXITDAFVIRAFKSSVRDRYTTQELATRRITTTQRLFGIVERCAHVDDALRRKNDKPKTGGEKKSATDTPESSKKKNRKNAKRKAQAEVFAAEYANPPKRPDPQGSDARKAWCPIHKSNRHSLEDCLVFKKXLEKHMTSEQGKRVRVVEKDTEMTAQESDPAYPNSDLHVSHITAVIPGRYPIVVEPTIRNIKVARVLIDGGSSINLLFASTLDAMGIPRSELTPTDQPFHGITPQSSSKPMGKITLHVTFGQANNFRTEQITFDVAEFDTAYNAIIGRTALAKFMAASHYAYQVLKMPGPKGTITIQGNAKLAVQCDKRSLDMVEQTLSPPATTEPPKKMSKTNKTPKPDGAIKTVPLSSANPDKTELALITFLRDNADAFAWQPSDMPGVPREVIEHELMVRPDAKPVKQRLQRFAPDRRQAIREELDKLLKAGFIREVLQPEWLANPVMVRKANGKWRMCVDFTDLNKACPKDHFPLPRIDQLVDSTAGCELLSFLDAYSGYHQISMAREDEEKTAFITSFGVFCYVKMPFGLITAGNTFQRTVQGALSDQLGNNVEAYVDDIVVKTKKSDSLINDLRETFDNLRRYRLMINPEKCTFRVPSGKLLGFLVSGRGIEANPEKIKAIENMKSPTRLKDVQKLTGCTAALSRFVARMGEXGQPFFAXLKKQDKFVWTQEAEEAFIALKRYLSNLPVLVAPQPNEELFLYIAATPYSVSTVIVVEREKVQRPVYYVSEALHDAKTRYPHIQKXLLYAVIMTSRKLRHYFQAHRVTVVSSFPLGEVVRNKDIVGRIAKWVVELSQFDVHFVPRTAIKSQVLADFVADWTMPDNQSNNQXTTWIMAFDGALNSQGAGAGFILTSPSIDQFKHAIHLNFRATNNTAEYEGLLAGIRAAAALGVKRLIVKGDSELVANQVHKDYKCSNPELSKYLVEVRKLEKRFDGIEVRHVYRKDNIKPDDLARRASKREPLEPGTFLDIPTKPSVKEAIGEINTAAPDISSEATEAERAIANIETTDDWHTPLIKFINSEELPEDDAEAEKITRKAKIYCTIGNDLYKKAPNGVLLKYVSSDDGRHLLLDIHERICGSHAAGRTLVGKAFRQGFFXPTALKDACDMQAHKATCTSAQDHPSYLAVLVLGAIYTRAIPTRTGRLQVPIXVAIDKFTKWTEAVPTGEIKAANAIKFIKGIFCRYGLPHRIITDNGSQFISADFQDYCIGLGVKICFASVSHPQSNGQVKRANSIVLQGIKTLLWAIHTTPTTSNKETPFFLVYGSEAMLPSELRHQSTRAQKYSDEEQEEQRNDDVNLLEEHRERVAVRAAAYQQALRRYHEKRIRARILSIGDYVLQRVQSQAGRNKLSPKXEGPYTITQVLRPGAFKIADSDGHELANSWNINQLRKFYV

SEQ ID NO: 148162 - protein, 135 aa, Oryza sativa
  Clone ID: PAT_MRT4530_48620C.1.pep
MEYRDSTYRCFIVKLQSPLAFRGVAVAARPDSRRSGAGARLMRVDGNQTARDRRWPDCVGSTASGDPATARGGEGEPAGWCWKGSGGAGAGRTALAHGVERTARCAGAECSGGGSGRGYGIAGARCGEKQRSGER

SEQ ID NO: 148163 - protein, 100 aa, Oryza sativa
  unsure (1)..(100): unsure at all Xaa locations
  Clone ID: PAT_MRT4530_48621C.1.pep
LTXGETGXXKXAPXIPDSITMXYXHAXXHTHDMPXDAIAPSXXCCLVVVQXRPGSPQPRFSSPPFSSXSFPXXNPNPNPLKTLSFNYLLSQXPAARLITA

SEQ ID NO: 148164 - protein, 61 aa, Oryza sativa
  Clone ID: PAT_MRT4530_48622C.1.pep
CLRLRRVIRRLADRVADARKCLRLRRVRRSLARAVPVAHAQTGPVRVGPVSRWLNPYDRKE

SEQ ID NO: 148165 - protein, 101 aa, Oryza sativa
  unsure (1)..(101): unsure at all Xaa locations
  Clone ID: PAT_MRT4530_48623C.1.pep
GPREGKSWRTDEGQGARGGHXTQXXFXXPPFXGLXARPRIQXKXEKXXLXFFXXXPAXXXEXVGXXFTXGNGNRXFXFXHXPGPTKXXLLPPCXKKKKKKK

SEQ ID NO: 148166 - protein, 87 aa, Oryza sativa
  Clone ID: PAT_MRT4530_48624C.1.pep
PFTLSSPTASSPALGVTSCCTVTTGQGSLTSRRVKCSTSAGTRTLLPRPARPAESRRPPRQLLWQTRCDTLKTLGLLAVGQLHVVDY

SEQ ID NO: 148167 - protein, 185 aa, Oryza sativa
  Clone ID: PAT_MRT4530_48625C.1.pep
MELDFHMAIGEAEANYANNSRLQRKALIKTKPVLEKVMRQVYMALLPPTMVVADLGCSVGINTLLFVSKVTSTVADAQCHNELGCHIMELQFFLNDLPRNDFNQVFQSLQQFTKSIAAGHPKGVALPPFYISGLPGSYYNRLFPCQSVHLFHSSYCLHWQSQVRISMEPLMACTVNALGTFVSIK

SEQ ID NO: 148168 - protein, 117 aa, Oryza sativa
  Clone ID: PAT_MRT4530_48626C.1.pep
MARAQLVLVAVVAALLLAAPHAAVAITCGQVNSAVGPCLTYARGGGAGPSAACCNGVRSLKSAARTTADRRTACNCLKNAARGIKGLNAGNAASIPSKCGVSVPYTISASIDCSRVR

SEQ ID NO: 148169 - protein, 247 aa, Oryza sativa
  unsure (1)..(247): unsure at all Xaa locations
  Clone ID: PAT_MRT4530_48627C.1.pep
MEEPLRVASDFFSCWATHEAAGGCGGDHGRVAVEESRPATGGGGEGSGWRVGVRLATGGGGGGSERRASAARSQGRRWRHTAEARLDVDAGEAAPPXPPARTRSTSVALFLPPLGPVRCAGGGASPVDEDNVRQTGNEARRDGSINNQIWLGGGAAAPALLRREGGARRPQRLPARPVVLRLRRRPXVVLTSPPPRSSTTSDSVSAPTSTLSAPSSPTTRPRAVLADRPRPPPVAPSSPCALCEREN

SEQ ID NO: 148170 - protein, 120 aa, Oryza sativa
  Clone ID: PAT_MRT4530_48628C.1.pep
FFFFFFQKTTSQLIIHQLQCEPVQPSTAPRVTSCTCNNNAITLHYFDAKTAFTTGAHSPIHPKAGRQWGITHDVTSHVVIPDSSPASCGVNSPCSCSHKHAVSLPMPVPASQASTNNLFG

SEQ ID NO: 148171 - protein, 527 aa, Oryza sativa
  Clone ID: PAT_MRT4530_48629C.1.pep
MPLRDLHSHLSPRPRPVNWDPGGPASFSVRLFRLSLSSGSPQAPSRDHLRVDHGVTSASARGSVASVATRDSSAVDVATSYGSPPPPPRATPPVARSYVASPPRAIVHHVFECMSLRLMRMSNKCMRPTALEASTYDFISSLPDELLQHILSFMTAREAVQTCVLSSRWRHIWKSLQCLNIKGSEFTSEAAYVNFMDNLVLRRGCVPLDSLLLCNSYGRVSLNHDRANLWFGYALRSNVREINIQEKHFEYSNLDHSSFISSHLKILCLNYVSISDLFIENLFSGCPALQDLVMVDCCVYATRFSSSSLKNLTFTSHSPDNGDLVHDDFKDLVIDTPSLVSLHLEYLPFLAPCLLNASSVEKAYFRLDDMSFPCFHMKYNILSALSNVKNLKLLIGQFNDDAFQLMQNEVLKRDLWRCRTFNSLKKLSVSDWCVDGELHTLIHLLRCSPILEKLTLHLGVIGGLAWEQWMSYPQSEMPDMSFICEHLKKVKITCANDDKRVPAIVNAILVNANSLPEIVIKPYTRLD

SEQ ID NO: 148172 - protein, 52 aa, Oryza sativa
  Clone ID: PAT_MRT4530_4862C.1.pep
MDNDEAARKTIELSSMQKKTQIKLESEKKKARRFYGLDSLQVQKASRLVATG

SEQ ID NO: 148173 - protein, 333 aa, Oryza sativa
  unsure (1)..(333): unsure at all Xaa locations
  Clone ID: PAT_MRT4530_48630C.1.pep
TPGTPSPASAPPPAPPPPPPTPRRRRPPSRRRWPTPPPTAAAAPPPSIPATTTTNCRLPPPPHADPPPVASPPDPAPPPPTGEGDEDDEAPPPPSLRPPPTPRRRRPPSRRRWPPPRWPPGRTASPPPTPSXTTSASPPTSRPASLPPPPPPASSGRSHLPLPRPPLPSLPERRTPPPPSPAAATSPPPPPPLTLSQPPPRPXSHPPPSPPPPRXAAGDRDPWRSRTYSRPSPTSPSPPATISPTSRPSGMTPSRPPSPTSPPGSPASRPRTPPSSSNWVAPPVLVPPXPPPPMPMYPAVPLVPIPRLKTQQPASTPEPPAKKARKTKKVAGD

SEQ ID NO: 148174 - protein, 935 aa, Oryza sativa
  Clone ID: PAT_MRT4530_48631C.1.pep
MAEPDLLAPFADLPFPPGDDFPDFPTLGDDAFALEDFDLDDLDFDFDVDLFPPDAPPPVTTSSSSSAAGSPEAGTSSAGDGGSKNEESADSSSPSRSGSDGGGGKDGKDDEAKRRARLVRNRESAHQSRQRKKQYVEELEGKVKVMQATIADLTARISCVTAENAALKQQLGGAAGAGAAAPPPPMPMYPAVYPLPMPWIHPAYAMRGSQVPLVPIPRLKTQQPASTPEPPAKKARKTKKVAGVSLLGLLFLMMVCGCLVPAVNRMYGAAYTGEGAAIVPSHHGRILAVEGPQNSVSNGVDPKVPQNGSETLPALLYLPRNGKHVKINGNLVIKSIVASEKASSRLSNYGEKGSGNQGKEETSLAIPGYVAPLEAGEVMDSAKGMNELMALAPGDGSIYREDDGMLPQWFSEAMSGPMLNSGMCTEVFQFDLSPTTADANGIVPVYSGSVTNTSQNYTENLPSGPVQKVKNRRISYSEAIPLRGSTSNDTDHFKAPPKNHSQSHAGRKPVSSVVVSVLADPREASDRDGEGRISSNSLSRIFVVVLIDSVNVFAGWNTLLSVRLLEEIAALLARMQIVCWTAPAVGVTDMWVPPTSGPLHPYSLKSSKGAPFPPRPILVFLIAIFGFYVCYISFNQITLENRSEENSGEVQAEIHCRKPHLPHEELRYVHFPKPESYSRGECSCNLVRSFVLVSMQRSGSGWFETLLNSHPNISSNGEIFNRVDRRENISSILQTLDKLYNLDWFTSAAKNECTAAFGLKWMLNQGFMDHHDDIASYLNKKGVSVIFLFRRNTLRRLISVLANDYDRDAKQLNGTHKSHVHSKEEAEILAKFKPVLDVSNLIPNIRNAEKYIRDCLDHFNTTRHMILYYEDIVRNRNALFQVQEFLGVPVRKLVSRQVKIHTSPLPGLVRNWDDVSNKLNGTQYAHFLDGADYVR

SEQ ID NO: 148175 - protein, 493 aa, Oryza sativa
  Clone ID: PAT_MRT4530_48632C.1.pep
MAAAAEGDEDPRWRRCNTDCVYFLASPFTCTKGSKCEYRHADGARFNRRNCWYWFKGNCVNPSCTFRHPPLENLNKTKSLADPLSLCSTSVKAANPCYFYYNSHCSKGDNCPYLHEPLTSNDAVGTSCKATTSNPAVSKSYVGDEMVEESKDTITNPCQDTSCHIKEVPVSINPEFGEAEAVSGALETSTDIDEYMKCSAVSDLNSGDSTMDHTEQDERDSSPGFDVLVDDCLSNKSDLEHQLTTESDNKVLHAEYGIRDPVLYDMYYHDPEYYNYEPEFCGLDDRQGYLYLCQPNGAHEHESEITLGHLLPQNTEVTSDEYDRRFFNPRNFTSSVADTNFVHQHTQIRHISKRRPENRKGAKGKKDCIKRSRCLEPKNSTQQIESMPTRQRKDYLMGECPQPANHATFRGRRKKNRGKQQHVLSAKSSEHPTADFTGPKTLAQIKEEKCKSNSSFSHSTACTPNVRSFSDDFEGPKSLTELLMTKSRSSVGK

SEQ ID NO: 148176 - protein, 882 aa, Oryza sativa
  Clone ID: PAT_MRT4530_48633C.1.pep
MGDRPDMGAGVALRFSHNDWTLEEDSKALHFLQPDLVLFTGDYGNENVQLVKSISDLQLPKAAILGNHDCWHTYQFSEKKVDRVQLQLESLGEQHVGYKCLDFPTIKLSVVGGRPFSCGGNRIFRPKLLSKWLLSFLVASPGWFLIAYYFCCVVTCSEIELQWYGVNDMAESAKRIYDAATNAPKEHAVILLAHNGPTGLGSRMEDICGRDWVAGGGDHGDPDLEQAISDLQRETGVSIPLVVFGHMHKSLAYGRGLRKMIAFGANRTIYLNGAVVPRVNHAQSSRQPAISTSEKTGLEGLTGLMVPTSRAFTIVDLFEGAVEKISEVWVTVGDARTELEQELVLYKQPHKSVPSNIAIWSSMGWLTKFFRGSTHKISEGQYHSKPAEETIWNGPSNSAVVTMVYPLESTFGQLDLLLLATDLRQLVIDDVDCCDLDVPSEFDNEETARAISLSLLEEEQRKAKAIEKDMHLEEDEQLARAIQESLNVESPPRARENGNANGGNMYQPLPFMFSSGFRTCAGCHSEIGHGRFLSCMGAVWHPECFRCHACNQPIYDYEFSMSGNHPYHKTCYKERFHPKCDVCKQFIPTNMNGLIEYRAHPFWLQKYCPSHEVDGTPRCCSCERMEPRESRYVLLDDGRKLCLECLDSAVMDTSECQPLYLEIQEFYEGLNMKVEQQVPLLLVERQALNEAMEGEKTGHHHLPETRGLCLSEEQTVSTILRRPRMAGNKVMEMITEPYRLTRRCEVTAILILYGLPRLLTGSILAHEMMHAWLRLKGYRTLSPDVEEGICQVLAHMWIESEIIAGSGSNGASTSSSSSASTSSKKGGRSQFERKLGDFFKHQIESDTSMAYGDGFRAGNRAVLQYGLKRTLEHIRLTGTFPF

SEQ ID NO: 148177 - protein, 335 aa, Oryza sativa
  Clone ID: PAT_MRT4530_48634C.1.pep
MPMFPGDVGPVMLAPPPPLPFFPIAAVQSGLGFMHMSAPPEIVTARSKLNSDAPSFSPRSPAASAAADEVEVRDVWAANLEEELRSIGALLPTYPVVSMDTEFPGTVHDVATPRHLRTPRESYAVVKRNVDELHLLQLGLALSGPAGRCPVAWQFNFAGFDARRDPHSGSSVAMLAAHGVDFTALRRHGIDHGDFARAFGRSKLACGRLTWAAFSGSYDFAYLVKVLTGGRPLPSTLEGFMAKVSKIFGPAVLDVKHLAKFCGGGGGIRGGLEHVAAALGVHRAAGRAHNAGSDSLLTSDVLHAMVDRFFPNSGVLNHAGAIDGLVKCSNLYYKY

SEQ ID NO: 148178 - protein, 307 aa, Oryza sativa
  Clone ID: PAT_MRT4530_48635C.1.pep
LPRPPVPLRQTPLEVAVTAKAESSPCFDLRRSFAASPVVAEPRRFLRGHRSAKPKAVHPFSAGIRRKVAATILPISSPAAVFIARHRVSAGKDRADLLFALVSSVSTVVPLFAVVVAIQLRSGEKSVGVAGESMPLVIEGVIMIQERCTVWYTSGQSKTIRIAVPVVMGGSLVKQSAYRASAIRRRSHRHRRSSFRRFGPHPPPLQPDETPSAAAAAIVHHGHALRPSPTPLRRSLAPRPSPAPPPRPAPVAGATSSPRVHRRRRFLTLHLSPEPPPLPVSIIEEVDRAAESVRHGSAHRVDWATLL

SEQ ID NO: 148179 - protein, 104 aa, Oryza sativa
  Clone ID: PAT_MRT4530_48636C.1.pep
MAAATAPRDGCGVETAVGDGCSGDSVRRWMRRWRRRQRLEMDAAVGVRRWMRRRQCLEMDAAAGDGCGGDGDGIRRWMRRRREMDAAATTAGDGCSGDGRAMLL

SEQ ID NO: 148180 - protein, 96 aa, Oryza sativa
  Clone ID: PAT_MRT4530_48637C.1.pep
MAGSDLGEVLAPRPLLVRPLPLCSSCRPCFAHHPSAPLATPLIRPLPLALLLAVHGSDDDLGWRRIWRRRRQRLATASTTAGDGAASGNDDLGDDG

SEQ ID NO: 148181 - protein, 140 aa, Oryza sativa
  Clone ID: PAT_MRT4530_48638C.1.pep
MEGGGRRRKRGKVELRRIEDRTSRQVRFSKRRSGLFKKAYELSVLCDAQVALLVFSPAGRLYEFASSTSSIDTIFGRYWDLLDTTIDLNIEARESRVDCNIQVWIRRQIVHGGLAPLLVGDAAPPFRGVGVGSSPSPLYL

SEQ ID NO: 148182 - protein, 74 aa, Oryza sativa
  Clone ID: PAT_MRT4530_48639C.1.pep
GLLGRKPFNLPAWWGNGKRRRNAASGGRHQRRRFTFSSRLGPQATEVSKQQEVERFSMLTPGPGHKRPRKSVIE

SEQ ID NO: 148183 - protein, 606 aa, Oryza sativa
  unsure (1)..(606): unsure at all Xaa locations
  Clone ID: PAT_MRT4530_4863C.1.pep
MDEVGGRWTFSRANEGYTSCGPVVEMSWHRVGALLLGGSVPPACPGGSGRRGIGSVLLSMARMGWKLCHVFRLYTVVMFNREKGKNVSGYASSNSSFQLNPPLASRELTRAHPWSIPSMLLSPQLPLVGSQDQNQYVFDRAFATQVDELPIPEEDVPFCHDCREQGHYALNCPWVYAKEAPSLGLTVQTSLNQPLRTKSSLQPSVQSREPNEENPLNPGNCFPPSPSYHVGSRTKQAKGKKSKNQRRKAPMRTEEEVRKMTITSTEWPPPGMTKRQRRNTFRGAPQLTEHLLANGGRVSDSEDSDQVSSDDEDQKSPQGFNQNKMERKACSRCGEIGHVASSCATTCVHCEEDHPPDRCPMSRITCFFCQGTDHVPKDCQFSFLLTKRMASQPASSNGEQHQGNTNPRQDYSFSLTSVPGQRNQNEERKCRVREDICCFNCQGMGHFADKWPKPRNIAAGTSVHATPCNQKLAPQRIVIHASRSSPIAPVATAPTPASTLPQGVNAQFQPQPPVDKTAALYLWMFQHSSQKKNQVQDEEPEXNNTFSTNHSLRRQPQQRIVVDGRSCFSPRPTPGRAKGNQPPEGDTKQKTVLRFKQQSDGSFSCE

SEQ ID NO: 148184 - protein, 242 aa, Oryza sativa
  Clone ID: PAT_MRT4530_48640C.1.pep
MELSWWCYCTVWWGAYSKMATCMQVGPVWLDGQAAAVSGATGSYDPKAFCSKTTDVASCLRVYPTLPDDVAKSQDNEQLYTRLYDYCGVKIYEASSLAESMIATTTAADPVIIATFFPQWKGDEAITTKTHPGKCLLSCNKTIGDVDAIQTCGNTYMEDRPPMIHQNLTVLFHGGHPLPLCKSGCSERSSSEGEAILATKFKYIWTLLDLLEAVLPEYLSETGTAAATVPSPNVAAPAAPAP

SEQ ID NO: 148185 - protein, 133 aa, Oryza sativa
  Clone ID: PAT_MRT4530_48641C.1.pep
MEPSEKRELLEAHRFSSELDDKTATATAAVLDLRPTQPGEKPRVVVLRTGWAVCRFLKDVDTSAYDDMQVPPPPPSPAANWKRDVQDTASMKSAIYSATGSNFDDFVKIGDEDFRYYGIGISIKADEKIREGI

SEQ ID NO: 148186 - protein, 636 aa, Oryza sativa
  Clone ID: PAT_MRT4530_48642C.1.pep
MPLKYNLQVEIFDVCGIDFTGPFPKSQKCEYILVVVDYVSKWVEAMTCRAADAKHAKRMFTEIIFPRFSTPMMIISDGGSHFIDRTFRELLRKMNAKHNIATPYHPQTNGQAEMSNKQIKNILQKTVHEMGTGWKDNRASRPNCRPVAIIVPAVVTVTSPFNASISFLIEVSFLSFYHFFDGTAYRYHPSRSAGGTTSSFSSASRENGSTFGRMRTMMGALDKMHADLHRASKTLNDKKLIQIARLQDEVDRLKVENTILQDGDNEDYPFWKQCQLGTTDNWLYGFCSKDIAPNLFKLAKRKNRNVGTELTNDEWLHSLRQITSFEEIQELIQLGGLLSRAIARQTQMMTAMMNQMQQQYQQMMQHMVQQQQQNQQQQNQQHNGPPQSKLPEFLHVRPPTFSSTTNPMEANDWLYAIEKRLNLLQCIDQEKESPGRISQEISAKAIVETRTTVIPFRARQWHSLKLRSPNSQRRSQDESPSHVSIVENPDILQISVLSQSAMDPRLFKLVLITCLRKKFKQHQKWFWVQGEDGRIFEDESDDEVGLTGQTGRQADQTTDTPPVRSAQDVWLDRLGSSGYDSVHADRDGPPEATTSTSEGTKRETTLEVATPLHIQRQHLLKEIIGNIGEGTTRSMN

SEQ ID NO: 148187 - protein, 48 aa, Oryza sativa
  Clone ID: PAT_MRT4530_48643C.1.pep
TRLQSTSFVALSMRETRARLACHYVLCGTYHVNVPKRADYVRSCDKIR

SEQ ID NO: 148188 - protein, 546 aa, Oryza sativa
  Clone ID: PAT_MRT4530_48644C.1.pep
MMNQMQQQYHQMMQHMVQQQQQNQQQQNQQHNGPPQSKLPEFLDVRPPTFSSTTNPMEANDWLYAIEKRLNLLQCTDQEKPEQRLLGMSFVVFSGKPRFPMELLHRRSRISQEISAKAIVETRTTVIPFRARQWHSLKLRSPNSQRRSQDESPSHVSIVENPDILQISVLSQSAMDPRLFKLVLITCLWKKLKQRQKWFWSPLTQKKGVSLNHVESEQQDKVMKDVPNLEDIPVVYKFEARSTDGMFLGYPAHSRGYRVLVLETNKIIETCEVTFDEASPGTRPETAGTLSQVQGEDGRIFEDESDDEVGLAGQTGRQADQTTDTPPVRSAQDVWLDRPGSSGYDYVHADRDGPPEATTSTSEELENFERNKVWTLVEPPSRHNIIGTKKVFKNKPDEDGLIVRNKARLVAQGFTQVEGLDFNETFAPVDRIEAIRLLLACTASKGFKLYQMDVKSAFLNGFIQEKVYVKQPPGFENPDFCNHILKLSKALSDLKQAPRAWYDRLKNFLLVKGFQMGKIYKALFVLKHADNQLFVQIYVDDIIFGC

SEQ ID NO: 148189 - protein, 59 aa, Oryza sativa
  Clone ID: PAT_MRT4530_48645C.1.pep
MDFKQGSSKKVDPIWGNLRILCLFSTSPKAFTSLANALTSCSGPPRYPPQGSRYASGQT

SEQ ID NO: 148190 - protein, 76 aa, Oryza sativa
  unsure (1)..(76): unsure at all Xaa locations
  Clone ID: PAT_MRT4530_48646C.1.pep
PPPPAPPPTTAKSPPPPASASPPCRRRPPPXPRAGGGVQLCGSQHTPPLPPAPHGNGHGGGGGGGGGGGGAHVRVN

SEQ ID NO: 148191 - protein, 104 aa, Oryza sativa
  Clone ID: PAT_MRT4530_48647C.1.pep
IQRKGEGDPCWKQSHRHCHGAEPIHPMAEASEHGACGDDGRALEYPRSQRWRAQLWNAGNSHCHHGSSRADAHPQERLHGLRAVLLLGCPRQGASGLNGNTSDG

SEQ ID NO: 148192 - protein, 85 aa, Oryza sativa
  Clone ID: PAT_MRT4530_48648C.1.pep
MANGGKRPWQCSPAHGAERVPAVDSDGGEVDGTARTTANATAWLGTAASGVIYNFEIPVTPTPSSPYFTRRYCFIASAPTFLFSF

SEQ ID NO: 148193 - protein, 37 aa, Oryza sativa
  Clone ID: PAT_MRT4530_48649C.1.pep
NLEPGSQGSTSHLVFVGLPAAPWWPSWHVWLLRLVDP

SEQ ID NO: 148194 - protein, 95 aa, Oryza sativa
  Clone ID: PAT_MRT4530_4864C.1.pep
MAMASLLDKYRRECGAAGLFAIGRHHNSKEDYCSSTNEDTSKSVEFYDFLQVNASSSDTKCGSSIEEQEDNRDDDQAEGQVQLIDFMEVGTTSRQ

SEQ ID NO: 148195 - protein, 88 aa, Oryza sativa
  unsure (1)..(88): unsure at all Xaa locations
  Clone ID: PAT_MRT4530_48650C.1.pep
PCNNTEQINGGTVQQISSLFYTRMYTPIYRMCIMPPDRSGEKKGDVAVNSSSRMSFSQSSSAMKLGSSPWQEGYSFGKLGRXNPSLLP

SEQ ID NO: 148196 - protein, 769 aa, Oryza sativa
  Clone ID: PAT_MRT4530_48651C.1.pep
MWPVRPCYSATARKLAVVVLSEGPIGLAGQTEVEWPVRPALARSDRHRLGLTDYGSVGFVSAIPSSTIPASTGPAERLNTLIYFALGSPRLDLVGWFYLGLMNDIVDERERGLDTDRLRCSWRKKRRTSSLSSQLDVDGGDGVLDGGGCRCSGGRGQSRRGRGAACDGDPPAIRLGAPDQGAVKVRCAVGPDGWEIYLTHINKENEDSRDRQTIDACTLSVKPTAACVLPSHARHEVRKSNPRADARPTRNTWTARIPRPRPVTDAKTPSRLVHSNPSKPKPPNSDRANRDSRHHQTRRHDTLRPKSYTARRDLVQQTQRKHSLDRHMPTPRPRHRHHALPLALALAAPLLLLAAADGQPNESRDKNNGGGGGGFMAPSGGGGGMGSQSPSFSAPMVVLLVALIAAFFFIGFFSIYIRRCGGEASTGPTIPAAALAALSRQEQRSRRQRGLDPAVVESFPTMKYAEARELRDGGKDAVLECAVCLSEFDDDEELRLLPKCSHAFHPDCIGEWLAGHVTCPVCRCNLAPDAAAAEANVVSGEVDGEQQEEEVVVAIDVDREGEEEDEERRREAMELERIGSQRRAVRSRSGRPLPLPRSHSTGHSLATTRLGDAGDLERFTLRLPEHVRREMVAAAGEESLRRTAVREGRVGGGARSARIGRSDRWPSFIARTFSSRIPFWSASRRVLDAAEAGADAAATTTTTTPTSTARTKRDKTAAAADGSVSSAKGSVRFDCLGGGGGGGGPSNRVVAFANDDEEDDDEKPIARQV

SEQ ID NO: 148197 - protein, 930 aa, Oryza sativa
  Clone ID: PAT_MRT4530_48652C.1.pep
MARPGDLANRLDSIQRCIPWSTAVREEEGLLSRSAAVVRITGILDEGCLVQDLEEPKTETKTACLCAWIWSEDPDAIPKAVHFQLEEPLLQNSPDSFWLEDLGESGLERRRTVSSKLLTYQVLIHLDQVLDSSPPPMEPVWGYSPSSQGSGMISSASVTEEVPKRHDIIWSLGVKDGQRAPREHVAARLGPGRNRSHSCSRSPPAHEHRRPSGWDVPPARTTAPTRRSSSRPPDHRGGSYGGYQRAATSPVRRERTRSPRNRQSPPPAPRPLVPQTASPPPPPSEGLTEFRPQESQIVPFPLTTPFATVLQVDQLANSIAGFDAPMMAIPLSVDPMLEEVGLGNIAPPPEQSLEQPQAQPPEQVMIGRLFAPLYPASPILSIMMLLMKKLKVSSTASFVLIDPALHYMFSCPGSAVQETKLDFIDQANFNRLLGPTFSENFCFPSTSGTRGGVLLAANDNKYELKDAHTGDFNLIVHDRDKNNANLNRGMMQAFRAALNHLEVLEIKLNGQRYTWSSETESPTLTKIDRVFCSQGWEERFPNCLLAAISTLVSDHCPLLLTANPSRPKSNIFRFEKYWLRLPDFLDTVQQAWNKTVHTTDAIKRLHTKLSRTAKALSVWNKSRVRGIKLRTDIASELIFRLDLAQEERSESRSRSTAINYSFLQEQSQDLTDLEDPFTEDEIKQVIFQARSDNAPGPDGFTGAFFNKCWEIIQEDVVLAINQVANHDTQSLWLLNSAYIALLPKRTEALQTQIPGVWRQVDWMDHFYPIYILIKDPPKRESRSSYKKKQMTRLHGGGLQMEPTRQTPHIGYNSSEASRITGRSSLPTSSISVVGTTVTSALFEVWNRRQPLTSSWTAPLQSKSGDSSGRRREMAKEQRRNFDGLFIYTTWGIWLQRNARIFNGAYSTVMQVVESIIAMCKAYDGAHNIDE

SEQ ID NO: 148198 - protein, 1012 aa, Oryza sativa
  Clone ID: PAT_MRT4530_48653C.1.pep
MSVDYANYTVLMPPTPDNQPSGGAPPAAPSAGGARPGDLPLPPYGSSSSSRLVNRRGGGDDGAKMDRRLSTARVPAPSSNKSLLVRSQTGDFDHNRWLFETKGTYGIGNAYWPQDNVYGDDGGGGAVKMEDLVEKPWKPLSRKVPIPPGILSPYRLLVLVRFVALFLFLVWRVTNPNMDALWLWGISIVCEFWFAFSWLLDQMPKLNPINRAADLAALKEKFESPSPTNPTGRSDLPGLDVFISTADPYKEPTLVTANTLLSILATEYPVEKLFVYISDDGGALLTFESMAEACAFAKVWVPFCRKHSIEPRNPDSYFTQKGDPTKGKKRPDFVKDRRWIKREYDEFKIRVNSLPDLIRRRANALNARERKLARDKQAAGDADALASVKAATWMADGTHWPGTWLDPSPDHAKGDHASIVQVMIKNPHHDVVYGEAGDHPYLDMTDVDMRIPMFAYLSREKRAGYDHNKKAGAMNAMVRASAILSNGPFMLNFDCDHYIYNCQAIREAMCYMLDRGGDRICYIQFPQRFEGIDPSDRYANHNTVFFDGNMRALDGLQGPMYVGTGCLFRRYAIYGFNPPRAIEYRGTYGQTKVPIDPRQGSEAMPGAGGGRSGGGSVGGDHELQALSTAHPDHEAPQKFGKSKMFIESIAVAEYQGRPLQDHPSVLNGRPPGALLMPRPPLDAATVAESVSVISCWYEDNTEWGQRVGWIYGSVTEDVVTGYRMHNRGWRSVYCITRRDAFRGTAPINLTDRLHQVLRWATGSVEIFFSKNNAVLASRRLKFLQRMAYLNVGIYPFTSLFLIMYCLLPALSLFSGQFIVATLDPTFLSYLLLITITLMLLCLLEVKWSGIGLEEWWRNEQFWVIGGTSAHLAAVLQGLLKVVAGIEISFTLTAKAAAEDDDDPFAELYLIKWTSLFIPPLAVIGINIIALVVGVSRTVYAEIPQYSKLLGGGFFSFWVLAHYYPFAKGLMGRRGRTPTIVYVWAGLISITVSLLWITISPPDDSVAQGGIDV

SEQ ID NO: 148199 - protein, 103 aa, Oryza sativa
  Clone ID: PAT_MRT4530_48654C.1.pep
TVSNSSSELRLHFVTNLLNRTCCQLRRILAHQPSPLRFLSHWAIRLGQYPCALLGWPLPSCGSHHRHVPPSLRPQPLMHRHRSLAVCSGLVDACGSHFSAHHR

SEQ ID NO: 148200 - protein, 153 aa, Oryza sativa
  Clone ID: PAT_MRT4530_48655C.1.pep
FNPLAPPAPARPAVFASAFRSRRRRSRPIQPLHELCPPPPHPRRQTHLRIAPPLRQLRTPTHADVFDYVSRRRWPLAPHEFAYPSSTRGHRRRRGRVQLGRGGYVHRRQARSSSPSPSSLVALADLIVSSPIRSWLSAGAGNSSHLRGRGGTL

SEQ ID NO: 148201 - protein, 83 aa, Oryza sativa
  Clone ID: PAT_MRT4530_48656C.1.pep
MILCVLDKIKKIKKKKKKKKNKKKKKKKKNKKKKKKKKINKKKKKIKKKKKKKKKGAARFRGPKFTYACLQRNSFFLGPPKLN

SEQ ID NO: 148202 - protein, 389 aa, Oryza sativa
  unsure (1)..(389): unsure at all Xaa locations
  Clone ID: PAT_MRT4530_48657C.1.pep
MVMSEFKLKSEKLPRVTDPEISGGHLSPFLGIRTVKDDDQWPDNGKNVPVPLCEKGAAEREATINXAAQAKAAQDGSGGTSSASPAVASTDVVAVPRSCEATPSGPASDLAAGRGPPAAVLTWEELQVEMGRLLGAGARGISCEIAEARAAVASSANERADRLARDLAEVREDLQKMRELVAGNERQRQGLEHRMSELENSLSEIRGSLQVTYTGLHQLAGECGIKSTIPANPDEFSLTSSLAELVTAMEEIPSKHAARIGEETSNGIYTGACHVLACVRLAHPELDLWKILDQGVASDAHKDVMEELEGIGQRLDEALKQECRRSSRYAEGHVLACIRDHHPQLHLEFLREGFSRSRRNPAEIDGLAKLMAPLVEKVFQSMDWRWPSW

SEQ ID NO: 148203 - protein, 738 aa, Oryza sativa
  Clone ID: PAT_MRT4530_48658C.1.pep
MSRRAPPTMLALPAPPRLGWGGRTVVVGVRDDAEGRELLTWALAMVAFAGDRVVALHVATPAAAAGADQEGAMRMAARRIRATESLAALLRAYDGFCDLNQISLELRICHGSSIKKALVNEASSYGAAHLILGVTNNSRSHLRPSSSPSSSSAAVAKYCAKRVPPSCSVLAVGNGRVVYRRDAAQQQLNQCISPLVETPRRIYRKIYRKLVRAATTITREKSQDDAAIAGGGRHLRRNISTPTSAPVSPVVAFTPRQAEVAAGWPLLSPDLKSALPEWTEMSVARWAMQLPSRCPAPSPLNPRNNSGDQATSPAITASETPSPATDEAAEQVAQELASLRNKYSSKYTMFSYSELARITSNFSPDRIIGKGGASEVYKGCCDDGKEVAVKVLKSSDKVMEELVSEMEIVSSVRHGNAMPLTGFCLDGGGGAAKIMLVYDYMARGSLEEILHGEKEGKDLFGWPERFKVAAGVARALVYLHGGDGDGRPVIHRDVKSSNILVSEDFQPKLCDFGLALWAAEAASPVTGDDVAGTFGFVAAAASSHLLEEFKYLAPEYFMHGKVSDKIDVYAFGVVLLELVSGRKPVSSGGGKGKESLVMWANTIIQGGKLTDLVDPSLPTDGSGVAGEVERMTLAAALCIRRSPQRRPSIANVLKLLDGDGDAVRWVRSQAGLSAGDDTDDGDGASPEKKDIQSYINLALLDVVDDSASVSSGGGDFTAANVSLEEYTKGRWSRSSSFD

SEQ ID NO: 148204 - protein, 75 aa, Oryza sativa
  Clone ID: PAT_MRT4530_48659C.1.pep
APSMDAGDSSLVSGTPPKKKPFLALLYLLGAAASPLYLMATYIRPQGVPRPPSQLIPRAVLSSPLYLNPGGCSTL

SEQ ID NO: 148205 - protein, 376 aa, Oryza sativa
  unsure (1)..(376): unsure at all Xaa locations
  Clone ID: PAT_MRT4530_4865C.1.pep
PPPAPSPWLHHLSPPPPSLSSVPATLQPPLPPCPSAGRPCRRLLQRRSRLLCAGLPSVARGDLRKCIPAGNSGVTATVPSSASCCSSLVRRPTSPSPPSTSQPPPLPRSALRFAGKPPETCPRRQXVALPPLXTASSRLCRLAXQRLSSSPSSLDVAASPSTPACPRFRRNAVARIGLALRLAGVPSATPSAVPVRRPTSPSPPPASQRQGCPRPRLPSIQTPPVFVIVGSVRPRXRLLRSVVRPRRIIVSLRRHPRRHRSGVFHAVLVSVQLLPAXLITSLPVLVVVLSSFPVVVAFVPLSSRSRPSSASVKCAAAAPSSSSSSPPLLQALRRLRLAFVQGSPPKSSPRLSSPSFPAISAAPVRCCRSLASSRGG

SEQ ID NO: 148206 - protein, 69 aa, Oryza sativa
  Clone ID: PAT_MRT4530_48660C.1.pep
KVKKKGGKIRAFWGWIPCSSKKVFVQFQVHNLKCVRKKKAKIKSDVESCVVNILQPPLLKLDILKWEAV

SEQ ID NO: 148207 - protein, 56 aa, Oryza sativa
  unsure (1)..(56): unsure at all Xaa locations
  Clone ID: PAT_MRT4530_48661C.1.pep
ENFLYNPXPNXFLFLPLDPPSLPPXFSLPSHYQSIKFPLGKXPLNXLCSRARFTPF

SEQ ID NO: 148208 - protein, 64 aa, Oryza sativa
  Clone ID: PAT_MRT4530_48662C.1.pep
SKELVRRCPSCQRQGGITARDAMPLTYNFIDKTIRDLLGDIAAKHNVATLVWFCQTRVAPVWSH

SEQ ID NO: 148209 - protein, 137 aa, Oryza sativa
  Clone ID: PAT_MRT4530_48663C.1.pep
MYRAAAAAASSISRSSSALRKQLSRGGCGEQRLWARGYAAKEVAFGVGARAALLQGVNDLADAVKVTMGPKGRNVIIERSHRAPKVTKDGVTVAKSIEFEDSAKNVGANLVKQVAEATNKVAGDGTTCATVLTQAIL

SEQ ID NO: 148210 - protein, 149 aa, Oryza sativa
  Clone ID: PAT_MRT4530_48664C.1.pep
KNRRPLLIIAEDVEGEALSMLVLNKHRAGLKICAVKAPGFGENRRANLDDVAVLTGGEVVSEDQGLDLGKVELQMLGTAKKVTVSLDDTIILDGGGDKQQIEERCQQLRESMDKSTAVFDKEKAQERLSKLSGGVAVLKIGGASEVEVG

SEQ ID NO: 148211 - protein, 566 aa, Oryza sativa
  Clone ID: PAT_MRT4530_48665C.1.pep
TREYEAKEVAFGVGARAALLQGVNDLADAVKVTMGPKGRNVIIERSHRAPKVTKDGVTVAKSIEFEDSAKNVGANLVKQVAEATNKVAGDGTTCATVLTQAILTEGCKAVAAGVNVMDLRNGINKAISSITTHLKSKAWIINSSEEINQVATISANGEKEIGDLISKAMEKVGKDGVITITDGKTLDNELEAVQGMKLSRGYISPYFVTDQKTQKCEMENPLILIHDKKISTMNSLLPVLEMSIKNRRPLLIIAEDVEGEALSMLVLNKHRAGLKLKCKLLTFFKLELWIVDILICAVKAPGFGENRRANLDDVAVLTGGEVVSEDQGLDLGKVELQMLGTAKKVTVSLDDTIILDGGGDKQQIEERCQQLRESMDKSTAVFDKEKAQERLSKLSGGVAVLKIGGASEVEVGEKKDRVTDALHAARAAVEEGIVPGGGVALLYATKELDKIITANEDEKIGVQIIKNALKAPLMTIAANAGIDGGVVIGKLIEQDNLNMGYDAARGEYVDMIKAGIIDPVKVIRTALQDASSVSLLMTTTEAAVAEPPAAKARMASRMPQMSGMDF

SEQ ID NO: 148212 - protein, 1216 aa, Oryza sativa
  unsure (1)..(1216): unsure at all Xaa locations
  Clone ID: PAT_MRT4530_48666C.1.pep
MAFAAGGIDHHVAVDVEGEEESRRRAVAEEADLLWAAFERLPSAKRRSHAVVLPDPDGLGGGDGGGRGEGQLVDVRKLDRPGLQRVLRHALATSELDNANLLHGIKARFDAVGLEVPRVEVRFQNLTVSTDVHVGRRALPTLVNYVHDIAERILISSHLLRPDKHKLVILDDVSGVIKPGRMTLLLGPPASGKSTLLLALADKLDSQLKKSGEVAYNGMALDQFCVQRTSAYISQTDNHIGELTVRETLDFAAKCQGASENWQECLKELVNLEKERGIRPSPEIDAFMKTASFRREKHNLVSDYVLRVLGLDICADTPVGSDMERGVSGGQKKRVTTGEMIIGPRKTLLMDEISTGLDSSTTFQIVNCMRNFVHEMEATVLMSLLQPAPETFELFDDLILLSEGKIIYQGPIKHVVDYFKSLGFSLPPRKGIADFLQEVTSKKDQAQYWSDQSKQHIFVSASEMAAVFKESQYEMTMTISRLPVFYKQRDNFFHPAWAFSLPNWILRIPYSFIEAVVWSCVVYYTVSVSGNMTVGTNILISHSLPTDDHWFWIGVGVLLAYSIFFNIMFTLALAFLNPLRKPQSMVPSDAGDGRDVHINTDSNKNTIGEIFENNDGFEGQTECKSKKGMILPFQPLTMTFHNVNYYVNMPKEMQAKGVPEKRLQLLSEVSGIFRPRVLTALVGASGSGKTTLMDVLAGRKTGGYIEGDIRISGHKKEQRTFARIAGYVEQNDIHSPQAFVEEVMALVELDQIRYALVGKQGLTGLSTEQRKRLTIAVELVANPSIIFMEGSQHRCLGGMDKMASRHLRQVPSAIWRMTMXTRRWPGVIYESDLRAHLGTCDPNQRWXGIIEHTASSPAPVTQIRGKVVPITEGYNPATWMLEVTTQACGLHLPSLRALAGSSSSDQRNPQSSXATLLTLVDXQEHVIFSSEFSQNRLTQFMVCLRKQSLVYWRSPEYNVVRLFFTSVAAIIFGSIFWNVGMKRESTEDILLPHCFSGQDYILLXEQNWESLSGXIFLDFQCSYRERAANMYSSFPYAAAQVYHGLVEIPYIAVQTLIVCLTIGFAPMVDRNTQDMYLFVIYAYLAFTYFMFYGIVAVRLTTIQHMASVVSSAFYSLGNLLSEFRIPQSSDPGWXICFYSICQVPRSLRGVITSKLGSLETRIMGPGFDGTVHEFLQQNLGFEQGMTGATVAVLVAFSVFFFSIYAISIKMINFQRS

SEQ ID NO: 148213 - protein, 264 aa, Oryza sativa
  Clone ID: PAT_MRT4530_48667C.1.pep
MSGYGQQPTGDRLESATLVQSMESTKDTIVRRITESAATVDSADVQAAAAKLTAAVEYRFDVAKADVDRIMAGRGRDEVDQRDGGPRGWRSEEDHGDDVAGRGKEDQDGDGAAGHGEEVHGSGGPRRWLCVGGGPRWWLWLGRRSPAVAARQGRSEKDHGGDATGRGEDDQGGGGPRGWRGKGAARRTTAATRQDAARRTRVVAVRQDVVTRTTAATRQDAVRRSTAAAVWQGTARWSTAVVARQGLARMSTAARLSQDVARGP

SEQ ID NO: 148214 - protein, 186 aa, Oryza sativa
  unsure (1)..(186): unsure at all Xaa locations
  Clone ID: PAT_MRT4530_48668C.1.pep
HWWIEQEHVISKKYQARHWSDQSKQHIFISASEMAAVFKKSQYGTYLEANLSSSCGKKNSPQVLPRXAFVGIITSXLFFRTTLHPVDEQNGNLYLAXIFRLPVFYKQGDNFFHPAWAFXLPNWILRFPYSFIEAVVWSCVVYNPVGFAPMVDRFFCFMLLLFSIYQMALGLFRIMGAIARDMTMAM

SEQ ID NO: 148215 - protein, 396 aa, Oryza sativa
  Clone ID: PAT_MRT4530_48669C.1.pep
MREFSFEEVEAATGGFAAKNLVGKGSHGNVYVARLVCGGDGGGGRVRKKKVVVVAVKRASHALGEAKLANEIAVLAAAGEVAGVVNLVGVAAGRREGERMLVMEYMADGSLHDLLHRPTTARQPPPPWPRRVEIALDVAEAVRALHGGEPRVIHRDVKSANILLGRDGRARLADFSLAVKVPAAPGGGGATAAAAGPAPAGTIGYLDPCYTEPSRLGPESDVFSFGVVLLELVSGRKVMDVSASPSSIVAWAVPLVAAGMAREVFDGRLPAPRRAREERAVARVLAVAARCVSEAVERRPAMSDVVAELHAALESAGWPRRPRRRGDAHGLAGTLYRRVVSWAASRLHVRRRRVRTSKIECTEHSGSEGSGAQAQPNYPGSNPRLSNSNKNIFDIN

SEQ ID NO: 148216 - protein, 106 aa, Oryza sativa
  unsure (1)..(106): unsure at all Xaa locations
  Clone ID: PAT_MRT4530_4866C.1.pep
TKQRLKRAEDWTXVVEAYERVRAIGTXKIXTPYQAHNVHDCTDEXLADHGSAQADESTRTIYGGHVTGANXEELASKSDADGHLEGGAXLTPERINIINCGTGYSH

SEQ ID NO: 148217 - protein, 99 aa, Oryza sativa
  Clone ID: PAT_MRT4530_48670C.1.pep
MAFRRYRALPQGEVTVEEFRAWLGQFDADGDGRISRDELQRALRSLNLWFAWWKARAGVRAADANRDGAVAGDDEVATLFAFAQRHLNVKIAELGASYY

SEQ ID NO: 148218 - protein, 171 aa, Oryza sativa
  unsure (1)..(171): unsure at all Xaa locations
  Clone ID: PAT_MRT4530_48671C.1.pep
MEAHAXRSVCSGGKVLNVGFGMGLVDTAIQRYEPEEHTIVEAHPEVYARMLKLGWGEKKNVKVVFGRWQDVLPQLGSYDGIFFDTYGEYXDMREFHQHLPKLLKPGXGIYSYFNGLCGDNAFFNVVYCQLVALELANLGYSTQFIPLPVKDCLSEEIXIAXKQKYWQLDTY

SEQ ID NO: 148219 - protein, 399 aa, Oryza sativa
  Clone ID: PAT_MRT4530_48672C.1.pep
MAAAAESKAGKSPEELLCAAAESGDAEAITGLLAEGADPTHFDASGLTPLMHAATGGHAAVVQLLLDAGAPWNALSPTGISAGDLASDSATFDLLLDHALRSELVLGTVARRQAGPADSPAESYLESRVSFSEERVMDADSKAVMMEWERPLMEAHARAVCSGGKVLNVGFGMGLVDTAIQRYEPEEHTIVEAHPEVYARMLKLGWGEKKNVKVVFGRWQDVLPQLGSYDELSVSCFEGIAKQDFYLLDSSQISAASDKYDAILNKIIALDNSVLLIHYYPKMFVHVYFITKQHGIFFDTYGEYYEDMREFHQHLPKLLKPGGIYSYFNGLCGDNAFFHVVYCQLVALELANLGYSTQFIPLPVKDCLSEEIWNGVKQKYWQLDTYHLPVCQAESEPEQ

SEQ ID NO: 148220 - protein, 60 aa, Oryza sativa
  Clone ID: PAT_MRT4530_48673C.1.pep
MEIDSPLGWKRARILTVYGCFDRFFPPRIVRQLGGAGLRRPAFHVQSYGHRKVGTKDRRP

SEQ ID NO: 148221 - protein, 693 aa, Oryza sativa
  Clone ID: PAT_MRT4530_48674C.1.pep
MSSSASPSAAPSAEYAEPSLEKTSPEKSWITWFKRISASKRVHWDEIRIGQALDLTIANSAKDEPLMAAASYFWSNTINAFLFNQGPMTPTLIEIVMITGLDVTSSANPMSLNIKNQYDFKTKSIGGWSGYVAAYMGQGSVTPREHVAFLLMWLEKFLFCGSSCGPTTNWQFVAEALETKRQFPLGKILLGYLYQMLINASAKIAVGSMVGAGGPWWLLQTWLNLIVMKVVNRPSVLEAEFPRLEPIVEDDEEERTHHRCMSYGEYASASADAGAKLSAELLKDWFCSSYEGFQKDARGRNIQASYEFYHPMSSARQLGMGQLPIGLFFADKILYRGEISSTLMMDRLLNLQGPPLGSIENIELAMFRSKNFDRWWGEWKLYLFHQPASMYMTDLFPDVVPQTTESSPPRQSNSGKDIIYAPGLIPNGGGLSPPVIGYHAPKTSTLLHGLTREPADTGQKRKTRSSAVSTLALAPKKKAKFKKTKPTDKPIDDLPALDPTIEQALDEEDIGEDVDQAVAEMSDTERTPSASPKQTPPTPSAPFILQEDYLDEAEEDTSSKALAPLSDDVKKILEDISHWLEASLDNLVTNCGSIRARFTDIQALLPDELADALTPAVYLEQHRFKLEKARQRLTDHRECQNIEATIQHNQQLVHVEKSKLDQLSEDLINSNIDRLEARKIDLMAQLQEWSTKS

SEQ ID NO: 148222 - protein, 126 aa, Oryza sativa
  Clone ID: PAT_MRT4530_48675C.1.pep
MNVEKLRLLTKAGTTVLLSAAERAGLSLSAVEWLGLLYKAEELEVLSAATDHGTPGALLGVALLLLAAGPAVVYLVTEEYPREVAVQAVVALACVVGGSATFAMSSIVSKLPSSPAEAIRDAHCLA

SEQ ID NO: 148223 - protein, 58 aa, Oryza sativa
  unsure (1)..(58): unsure at all Xaa locations
  Clone ID: PAT_MRT4530_48676C.1.pep
XIGQQGPPATIFSQFDQTLCRXQIEPIKRGPVGCFHYGTHSSIRVLSSXTPPNPQPAG

SEQ ID NO: 148224 - protein, 76 aa, Oryza sativa
  Clone ID: PAT_MRT4530_48677C.1.pep
MTLSISVGMVEAELLVDTTLAGILVRQNVQAEHVNSFFFLSISYYAKDENGLGRGGFTGVIVFYPSPLRRTASPVV

SEQ ID NO: 148225 - protein, 145 aa, Oryza sativa
  Clone ID: PAT_MRT4530_48678C.1.pep
MVGPIQQAVKDVGGKHMQEEVVSTTSHARVCGTKKAHAAACLYENSSKARRFRPSSTTAALGEKRALPVVENPGRVPKQKRYAVVRCARRLALVQYIAALCWPAAVARPLYFSRCLHSPAIFFSVYFLFLSRLNLATQIRMNAFR

SEQ ID NO: 148226 - protein, 286 aa, Oryza sativa
  unsure (1)..(286): unsure at all Xaa locations
  Clone ID: PAT_MRT4530_48679C.1.pep
EACGGARRRGAEAASAAEADHGRSAAATARVVHRRRRRHANAAENGRARQSSRAPDGTSGRPRNGASSSAARDGQWPDANAERAGGIRRPDDDATANGDGRKQQTANDVSATAGGTQWPAGDGGGRQRAGLVLATAAAGVQRPAGACCSGIAGGKQRTDVAGTTTAGGNGSGVQQLPVSPDASATAAAAAGGNGVQPPGAASTGERGGGTHDVGTTAASDDASAGGGGGTKRRDEVVGATGAGGMQLPGACAAAAGAAIQQLGXGGGGCGGGDGEGDGSSGGGARW

SEQ ID NO: 148227 - protein, 378 aa, Oryza sativa
  unsure (1)..(378): unsure at all Xaa locations
  Clone ID: PAT_MRT4530_4867C.1.pep
QPRRVADKRTPLDTTRAGSTTAQRVRGDTERTRTGQREERSLPPRDEARERQRRTGAAETDGEGTTSAAILGRRRDAAGTRLDDTEPRTKTTTGAAAAHWTNADDGRERLDGGTNATTTGNDGRTTTTTTGAGEETTRAAGSGCTEARMARXRRGGVRPKGKRCRGRRRGCDAEGGGGAADRCTGXGGTGGRTTPVRRTERFAATFRRNRGQAGVEGDAATPREETATSADALARRPGRLKAVQWRQRHCFAGEGASPVVSLRNGGLTEGEEAAVRPREKTARPGGARARRERRLEAAGAKEREGRRRERSSGGLRGKRRASRRRGGGCDAGGGDGTAGRRANAAAGAAEDGRRHGREGTTAGRWLGTTGELGRRLKR

SEQ ID NO: 148228 - protein, 410 aa, Oryza sativa
  Clone ID: PAT_MRT4530_48680C.1.pep
CSTTTQTLPTCGAPAPTPPPASLRVPKTAPHPPAAPPRTEVASSTAGHASRANPASFHRLRLSCQAGLHLHRPRLSRRTGLRCHRLRHSASSRSPTPPPNDAAPADAVVCHTLGKPSEAAMPPPTTVTVTTSPSPHTQLALSPTRPTNQIPVRLRGAYGRYLVATNYGAGRGPSDGVVAEQRDLGVRPTPPGYLWQAFRRRDSFVLRNGAGRYLRANGRFRRWHKDVSVAGDNASTMMQWRVEVVPPMASRPSLVDLPAQGLVVGEIESWVSLPFIFSAVGNRRIPRPHPRWNDDVVSQLMHRTNPPVESDLSRVIRYVRADNAGRYGEQEWAPVRVNTNNLTHLRLTMAERLGQNCDAGQITLCVRAGRYAHLSPLLVDLPMGNNPIHIVVLNHGTPAESALRYPDVEA

SEQ ID NO: 148229 - protein, 154 aa, Oryza sativa
  Clone ID: PAT_MRT4530_48681C.1.pep
SKRSEKKVKTSLAPSMARSMRGWSMARLSRVESRMPSDCAYPIPPPPPLFLKRPPPCRSLKRPPSRALGGLLLAEREQVWRWWRRAAVTASGSRRSRSDLPLGSSSLQTGSESGDGSSARRWRRMVAAHSGGGSWRWRLEAAASGAGGARRSRP

SEQ ID NO: 148230 - protein, 194 aa, Oryza sativa
  unsure (1)..(194): unsure at all Xaa locations
  Clone ID: PAT_MRT4530_48682C.1.pep
MPFTLLVIVLPGNWVPRSHFTDTPGLSAFFFLVPQQMLPFIKHCTRHLTMEVVSLFSYRRGETMVHPYDKEFSMYPDISAGGYRAIRRAPIRHNDVKVILDFHVFEVYDFALIIGHSIEKLFLDVPRTGVLDIKLDKLSFSFPISRSKNSLTEPVPESEPIENMLVVSPFEXPESLLEDDAIAFVEEEDDFEDM

SEQ ID NO: 148231 - protein, 137 aa, Oryza sativa
  Clone ID: PAT_MRT4530_48683C.1.pep
MPTGVDEALHPRRGRPRRKGHLAARSMGEEPADGAVIGEAISGEAGVDEVRREGDESRRRRWERGEQCRTEVVFSADAVGAVPPSRRALLRFRVAAAPPLLRSPLLHECATAPRATLCRVTGRLHSVARPPRATPLL

SEQ ID NO: 148232 - protein, 119 aa, Oryza sativa
  Clone ID: PAT_MRT4530_48684C.1.pep
PPPPLLTARGAGGVFPPSGAPPPVVLAPRVAGTADSIPATTVGNEGYGSGLGDHGRRRERRIRWQRRRRATGAINPALTTGTGAGGGPNGWRALVSVLPHSGRFFFFFNFIFLGGFFQP

SEQ ID NO: 148233 - protein, 87 aa, Oryza sativa
  Clone ID: PAT_MRT4530_48685C.1.pep
TRTHTRTRTFRFAPSLTFRPLVVDALGPDTDLPADVHLMIVEPAQQAPDFINAGADIDSVDCQQSFTIHLHRTVNNIKSLGTQAGVG

SEQ ID NO: 148234 - protein, 45 aa, Oryza sativa
  unsure (1)..(45): unsure at all Xaa locations
  Clone ID: PAT_MRT4530_48686C.1.pep
NTSRTVRGFLILLVGSXNKNDFIXXYPXLNLYVATKTXLLETWRX

SEQ ID NO: 148235 - protein, 55 aa, Oryza sativa
  Clone ID: PAT_MRT4530_48687C.1.pep
LLVFLNDITRNIIPSNDAEILLVYYGYRFYPQVHGYTIVAFHPRVFQGYRIYFIP

SEQ ID NO: 148236 - protein, 407 aa, Oryza sativa
  Clone ID: PAT_MRT4530_48688C.1.pep
MAKLVGATLYLYLFLFLLLLHLHCHQCKPAAAASFVVHGGGGATARAAAVRAVFVFGSSLVDNGNNNHLNGSGAVRADYAPYGVDFPLGATGRFSNGRNVIDALGELLRLPAAGLLPPFADPATRGRAALHGVNFASGGSGILDLTGKNKGEVLSLKQQITNFEAVTLPDLRAHLQGATTATTTTGHKMKGQDFFDQCYLPKSLFIIGTGGNDYLLNYFNAGSGPTRAPLSEFTSSLLTKLSNHLQRLYDLGARKFVLFSIQPLGCTPVVRTFLNATSDACIEPMNHAALLFNSGLRSIVKNHNGGVRSHMPAASFVYVNSYKIISDIIQHPAKYGIRKTSRACCEVSRGGVLCQKGGAICSDRTKYAFFDGLHPTDVVNARLARKAYGSNSPDKVYPINVKKLAML

SEQ ID NO: 148237 - protein, 53 aa, Oryza sativa
  Clone ID: PAT_MRT4530_48689C.1.pep
MGAPGGTWKVETTVLIEVTPINAGNIWPSRLSASSPSHESVPRASVDTLDLNA

SEQ ID NO: 148238 - protein, 95 aa, Oryza sativa
  Clone ID: PAT_MRT4530_4868C.1.pep
ETFRQIRRREGAAARPPPPLVLPPHPPSLPPPLDRPSTAAAGPPSPDLAEGRARLPLTPPPAADSKRESRGEGAAAKLPLPLIPPQHPPSPLPPH

SEQ ID NO: 148239 - protein, 757 aa, Oryza sativa
  Clone ID: PAT_MRT4530_48690C.1.pep
MAVRASLACFPSDAALQESSGIPWGVAVTPFSAADERGAAPATGAEGHLLPRCDSCYAYFSTLCPLHRWSWSCAICSADNDLTPDASARYARDGGQDPPEMRSAFVDLLLPGEEGEAATTTPVYVAAIDLSSSEEFLELVKSALLAALEAIPPGSLFGLLTFSSKIGLYDVQGPIPIVKNAFIPPDSDGTLLVDLEDVMPLRSFLAPVDGCKDRIAEALETIKPTSSWEITATASEVQDHALHHARGFGLAMDAVVNYLCTEYGSLFELARIFTFLSGPPNYGPGQIETRSDVDHNAAKMLGSDHTFISEQTNFYTNLAASAVQAGVCVDLFAITNEYTDLSSLKVLSVESGGSLYMYSSTDESTLPQDIYKMLSRPYAFGCVLRLRTSSEFKIADSYGHFFPDPQYMHVQHINCCDSFATYVYDFEFQKDSQFSRKSSPPILQIAFKYTTIVQQGDTSDDVSNSVSRSKFTLQRRLRVRTIQYNITANIWDLYDFVDPDVVLTILVHQVVAWHMADALAVWYFLFWRSFIQSHDVLEARIWLRDWLVNFIAQYNKAYKVVRSGGTGMSDIDVDFIHCSQLQPLSRLVFAFLLSPLLQLHGQGIHPDYRTYLQCLFSALEASSLRQAICPTLISYSSPDVEAEVHQSLSRSVFNSESPIFLLDAYTDLLVYYSPTVSSTIPFPPPRDCLLRSKIDRLKQERNITPKLVFIHGAHDDTTAFERYLIEDQSVDGSLVASATGFRSFLEGIRSRIAEYSR

SEQ ID NO: 148240 - protein, 280 aa, Oryza sativa
  Clone ID: PAT_MRT4530_48691C.1.pep
MSSPAQPPPTRPPVAAPPPSLAAAAPISVQPPPLQPKPPPHPQQPPQAVVSVGVGPPPPTPQHQQQQQGPPGHAPPQQRPRICFNAHCKDPKSDGPRRRGWRLRNGDFAELCDRCYHSFEHGGFCETFHLEVAGWRNCESCGKRLHCGCIVSVHAFVHLDAGGVECVMCARKSHAAMAPSQIWSSSMHMAQNVADRKDNFVKSWRPPAGQFSSQWRQNNMWSMSTMQSDLQQRLAFEFDRPSGSEKLLPGRTFIHAHEKKFDDMHDRSTTPAGMNQIMRE

SEQ ID NO: 148241 - protein, 164 aa, Oryza sativa
  unsure (1)..(164): unsure at all Xaa locations
  Clone ID: PAT_MRT4530_48692C.1.pep
LRVTYLVRFGYAEWRSCRRPDQVSXISLYNXAATSSQHTWNQSWVGLLLRTTLLFVVYSIPLAGAQWQSGEQLSETCAFYVLHXEEGSNKIFGFLGSAPRDCSLFVHXGSSSSSLACCALPLRDGTVNSSCRATGFPKPSVSTCFASSICSSFTVLFTCIDPMM

SEQ ID NO: 148242 - protein, 802 aa, Oryza sativa
  Clone ID: PAT_MRT4530_48693C.1.pep
MADRTPSTWYTAVSGCVRCGRDGTAFEMLRGMRERGVPLSGFALASLVTACERRGRDEGIACGAAIHALTHRAGLMGNVYIGTALLHLYGSRGIVSDAQRLFWEMPERNVVSWTALMVALSSNGYLEEALRAYRQMRRDGVPCNANAFATVVSLCGSLENEVPGLQVASQVIVSGLQNQVSVANSLITMFGNLGRVHDAEKLFDRMEEHDTISWNAMISMYSHQGICSKCFLVFSDMRHHGLRPDATTLCSLMSVCASSDHFSHGSGIHSLCLRSSLDSSVTVINALNCNSTDALKTLGQLFHTKESPNHLTFSSALGACSSPGALIDGKMVHAIVLQLSLQRNLLVGNSLITMYGKCNSMEDAEKVFQSMPTHDIVSYNVLIGGYAVLEDGTKAMQVFSWMRSAGIKPNYITMINIHGSFASSNDLHNYGRPLHAYIIRTGFLSDEYVANSLITMYAKCGNLESSTNIFNSITNKNIVSWNAIIAANVQLGHGEEALKLFIDMQHAGNKLDRVCLAECLSSCASLASLEEGMQLHGLGMKSGLDSDSYVVNAAMDMYGKCGKMDEMLQVVPDQAIRPQQCWNTLISGYAKYGYFKEAEETFKQMVATACSHAGLVDKGIDYYNSMASSFGVSPGIKHCVCIVDLLGRLGRWADVDKLRSHMKTININKRPACSWLKLKNEVSTFGIGDRGHKHAEKIYAKLDEMLLKLREVGYIADTSSALHDTDEEQKEQNLWNHSEKLALAYGLIVVPEGSTQGSAVNTSSSIDACLEPSMISTTFPCNLIESVLGAVAQGIQQNACCP

SEQ ID NO: 148243 - protein, 108 aa, Oryza sativa
  Clone ID: PAT_MRT4530_48694C.1.pep
MHPVHRLAFSRSNSRVGPRRAVGHFEAARRTRAPLGRFTASTSIAASAPPSRASSPPVPPSLTPPCHRLLANSLAAITLFAVGQGAAALGQAGPRASAALRPIARPSP

SEQ ID NO: 148244 - protein, 872 aa, Oryza sativa
  Clone ID: PAT_MRT4530_48695C.1.pep
MADRTPSTWYTAVSGCVRCGRDGTAFEMLRGMRERGVPLSGFALASLVTACERRGRDEGIACGAAIHALTHRAGLMGNVYIGTALLHLYGSRGIVSDAQRLFWEMPERNVVSWTALMVALSSNGYLEEALRAYRQMRRDGVPCNANAFATVVSLCGSLENEVPGLQVASQVIVSGLQNQVSVANSLITMFGNLGRVHDAEKLFDRMEEHDTISWNAMISMYSHQGICSKCFLVFSDMRHHGLRPDATTLCSLMSVCASSDHFSHGSGIHSLCLRSSLDSSVTVINALVNMYSAAGKLSDAEFLFWNMSRRDLISWNTMISSYVQNCNSTDALKTLGQLFHTNESPNHLTFSSALGACSSPGALIDGKMVHAIVLQLSLQRNLLVGNSLITMYGKCNSMEDAEKVFQSMPTHDIVSYNVLIGGYAVLEDGTKAMQVFSWMRSAGIKPNYITMINIHGSFASSNDLHNYGRPLHAYIIRTGFLSDEYVANSLITMYAKCGNLESSTNIFNSITNKNIVSWNAIIAANVQLGHGEEALKLFIDMQHAGNKLDRVCLAECLSSCASLASLEEGMQLHGLGMKSGLDSDSYVVNAAMDMYGKCGKMDEMLQVVPDQAIRPQQCWNTLISGYAKYGYFKEAEETFKQMVATGRKPDYVTFVALLSACSHAGLVDKGIDYYNSMASSFGVSPGIKHCVCIVDLLGRLGRFAEAEKFIEEMPVLPNDLIWRSLLSSSRTHKNLEIGRKTAKKLLELDPFDDSAYVLLSNLYATNARWADVDKLRSHMKTININKRPACSWLKLKNEVSTFGIGDRGHKHAEKIYAKLDEMLLKLREVGYIADTSSALHDTDEEQKEQNLWNHSEKLALAYGLIVVPEGST

SEQ ID NO: 148245 - protein, 717 aa, Oryza sativa
  unsure (1)..(717): unsure at all Xaa locations
  Clone ID: PAT_MRT4530_48696C.1.pep
MYGMLFMLLIVEKKVVRLRRTVASKKDEYYLDGKHISKTEVMNLLENAGFSRSNPYYVVQQGKLXGTSCKWTLIHDLLAANKRKQIDQVVHYLEERLRELDEEKEEMKKYQQLDKQRRSLEYTILDHELNDTRNELALMDDNRRKISERMSHADNEVVDVREKIRSFEKEIKFSTKGINENKAQKEDVEKKCTEVLKVVAQIELDLRDIKDRILNEKLAKDEAARDSQSVRMESERSKSELAETSKVHQTKLREEEEISKSIMDRQKQLSILYQKQGRATQFANKAARDKWLQKEIDDLECVLLSNRKQGGLLQEEIQKLKDKINNLNSYFEFYESESNKLESALAKKHSDYNDLRKQRDKLQEERNYEANVTAEKDRLKENLVNAKEKLGNATPGDIIRGLNCVSRITMEHGITGVVGPILELIDCDEKLFTAVEVTAGNSLFHVVVENDDISTKIIQVLTREKGGRVTFIPLNRVKVPDVSYPRSDDFVPLLERLECNKANHRRAFEQVFGRTVICKDLETATKVARDNGLNCITLDGDQVARKGHMTGGFHDYRCSKLKFVKTIKNNMKAIEEKEEHLKNVERNLSDILSPCLHDADKKMTDLVTKQQQMDAESDHAKSELEHFKVGIASTMKQIGSLEKALGKKIETRKEELKANLSTNLMRRQKEFEAVISSADSKTLSLEAESKEQELNSSKSSLDDLTAMLKGIDALIDF

SEQ ID NO: 148246 - protein, 72 aa, Oryza sativa
  Clone ID: PAT_MRT4530_48697C.1.pep
MRESICIHIGLDGIPVVNACWELYCLEHGIQPDGQMPGDKTGGGELTFGKDWPVKNNSWVALMNVYSPFKSH

SEQ ID NO: 148247 - protein, 35 aa, Oryza sativa
  Clone ID: PAT_MRT4530_48698C.1.pep
KLELPLYLDLQAFKQQPLFKLGNCQLEEPNFNQAI

SEQ ID NO: 148248 - protein, 111 aa, Oryza sativa
  unsure (1)..(111): unsure at all Xaa locations
  Clone ID: PAT_MRT4530_48699C.1.pep
GLGLLNFXTTNIALLCKWLWKLENENGXWQDLIKAKXLKNKTLSGVSVKPGDSYFLQGLMEIKNVFFKFCTXKVGNGENTLFWEDSWIGGRPLNIQFPSLYNKIFKKKKFQ

SEQ ID NO: 148249 - protein, 554 aa, Oryza sativa
  Clone ID: PAT_MRT4530_4869C.1.pep
MADNEKGNKVRSQDIGISSSRVNEAPDTSCVTLVQHLINQNQLLIEILQQHQTPILNLSQIQPQAQLEAVQALTPQVSMPPASRRTHGEVPHVDSKEASIICFMCDEQGLYARECPQQKRKTPMRTEDEVRKMSITSTEWPPPGMTKRQRRNTFRGAPQLTEHLLANGGRVSDSEDSDQVSSDDEDEKSPQGFNQNKMERKACSRCGEIGHVASSCATTCVHCEEDHPPDRCPTSRITCFFCEGTDHVPKDCQFSFLLTKKTANQPASSNGEKYQGNTNPHQDYSFSLTPVPGQRNQNEKRKCRVRKDICCFNCQGMGHFADKCPKPRNIAASTSVHATPCNQKLAPQRTVIHASRSSPTARVATAPTPASALPQDVTAQFQPQPSVDETEASIGIVPLDVPAQQPRNQVQDEEPEHKKVIRHAPVVEKLDTLLACVSHSALTMKKTIHQGSVPLASLSKELSSMEEVVSLPDLLQAEQRAINLRRAIPSRRPSSASNSNQKEASPMNDSNMQSYHIITEPIKDDAVTRTMPAISLQKQNEQLRLWFSVRYLSL

SEQ ID NO: 148250 - protein, 42 aa, Oryza sativa
  Clone ID: PAT_MRT4530_486C.1.pep
KHNPRSSNLIIPKHIWILRPYLHRCTARTLHDACSADIYSRS

SEQ ID NO: 148251 - protein, 51 aa, Oryza sativa
  Clone ID: PAT_MRT4530_48700C.1.pep
SVLLRNKKLPGISSIYTGFPREFVGGAYFLFKCEAIQLVYRQPASGLVKIL

SEQ ID NO: 148252 - protein, 328 aa, Oryza sativa
  Clone ID: PAT_MRT4530_48701C.1.pep
MAAARFAGVPRRAAQSSSSSSQAPLDEPPPPALTPEQVGLCREALEYFEGMCGRPEAMSDEFRRLQDTRHELMRSSNEARNAANREKNRYIDVVPFDTTRVRLKRSTTSQTSSNDYINASFIKVTEDNRVAKFISTQGPLAKTFDDFWEMVYEYQCPVIVMLTQFDSLKCDEYLPLRKQREAYGKYNVKITNAKRDSHQLWLRDVMVQCNESSRVHSVRHIEYPDWPDHGVPTNTDAVRQIRKWLQNTPMEHPIVVHCSAGIGRTGAYITIHSTIERLLLGDKSSYHLDETVKTLRTQRVGMVQTEKQYMFCYRAIADELKDLLESNR

SEQ ID NO: 148253 - protein, 138 aa, Oryza sativa
  Clone ID: PAT_MRT4530_48702C.1.pep
TKNEFQQLLATAQPKLAIGQPKLARQRWECGTHALSLSSFSLHMLDNGDDNDEARRQGGDCSEAGCSRRPPLAGPPASRRPPLAATAGATLSYLRPLPRRRRAASSRARRRAQQGTAVPTPPPRRRQRARYAEGRRRA

SEQ ID NO: 148254 - protein, 213 aa, Oryza sativa
  Clone ID: PAT_MRT4530_48703C.1.pep
MFSVRCGPPAFAFGLERAAITHPSKFSTLVVCGARGPRPRYPRVWKTRKRIGTVSKSQKLVECVKGLSNVKEEVYGALDSFVAWELEFPLIAVKKALKTLEDEKEWKRIIQVIKWMFNKGQGKTMGSYYTLLNALIEDGRVEEAEELYGKIFSRYLEGLPHTFFMRMISLYYRLESYQKRFEVGIQIYYTFVLMNTLLMLILDHGFPCMEEQN

SEQ ID NO: 148255 - protein, 156 aa, Oryza sativa
  Clone ID: PAT_MRT4530_48704C.1.pep
MAALKMGRREYGFVTMTRICDGDVDCWEFVVIDFGGQSLVDFGGDTRKGEASNTLVRTHPENAMVTAREILLDKFFRRRRPSRCSQFYVASMYWFITTLSTVGYGDMHAENTGEMVYTTAYMLFNLGLTAYIIGNMTNPVVHGTSRTRKFVSSHFL

SEQ ID NO: 148256 - protein, 308 aa, Oryza sativa
  Clone ID: PAT_MRT4530_48705C.1.pep
MFSVRCGPPAFAFGLERAAITHPSKFSTLVVCGARGPRPRYPRVWKTRKRIGTVSKSQKLVECLQFVSAFASNIFLVKGLSNVKEEVYGALDSFVAWELEFPLIAVKKALKTLEDEKEWKRIIQVIKWMFNKGQGKTMGSYYTLLNALIEDGRVEEAEELYGKIFSRYLEGLPHTFFMRMISLYYRLESYQKMFEIFADMEELGVRPDGSIIRMLGEVFQKLGMLDKYVKLKKKYPPPKWEYRRIKGKRIRVKVYPKDEIEEPMRKAGTDEVEEEENMDVDSELEEAASAGLDRNVLDEAACGDLEFV

SEQ ID NO: 148257 - protein, 464 aa, Oryza sativa
  Clone ID: PAT_MRT4530_48706C.1.pep
MMMGGRIARRGLSRLAAAVETAAVAPPRMADFNHVPLPYDGPSAAEIARKRAEFLSPSLFHFYSKPLNIVEGKMQYLFDERGRRYLDAFAGIATVCCGHCHPDVVGAIAAQAGRLQHSTVLYLNHAIADFAEALASKMPGDLKVVFFTNSGTEANELAIMMARLYTGSHDIISLRNSYHGNAAGTMGATAQKNWKFSVVQSGVHHAVNPDPYRGAFGSDAEKYARDVQEIIEFGTTGQVAGFISEAIQGVGGIVELSPGYLPLAYEAVRSAGGLCIADEVQAGFARVGSHFWGFETHGVVPDIVTMAKGIGNGIPLGAVVTTPEIAQVLTRRCYFNTFGGNPLCTAGGLAVLRVLEKEGLQANAHAVGSYLKDRLRALQDKHEIIGDVRGTGFMLGVELVTDRQLKTPAKDEICRAMEHMKEMGVLVGKGGFYGNVFRITPPLCFTKEDADFFVAVMDSALSKL

SEQ ID NO: 148258 - protein, 316 aa, Oryza sativa
  Clone ID: PAT_MRT4530_48707C.1.pep
MDPVLLDDIIRRLIEVKNLKPGKNAQLSESEIKQLCATSKEIFLNQPNLLELEAPIKICGDVHGQYSDLLRLFDYGGYPPQSNYLFLGDYVDRGKQSLETICLLLAYKIKYPENFFLLRGNHECASVNRIYGFYDECKRRFSVKLWKTFTDCFNCLPVAALIDEKILCMHGGLSPELNKLDQILNLNRPTDVPDTGLLCDLLWSDPSNDAQGWAMNDRGVSYTFGPDKVSEFLEKHDLDLICRAHQVVEDGYEFFANRQLVTIFSAPNYCGEFDNAGAMMSVDDTLMCSFQILKPARKMLGGSTNSKSGFKSLRGW

SEQ ID NO: 148259 - protein, 80 aa, Oryza sativa
  Clone ID: PAT_MRT4530_48708C.1.pep
MEAAIAEEGGSDAAGLGGKALSELEAREAAALGEGRGTRVAATGEDVGPCGLWCNFSLGLGRFGPLARPTAPLSAGNRIA

SEQ ID NO: 148260 - protein, 135 aa, Oryza sativa
  unsure (1)..(135): unsure at all Xaa locations
  Clone ID: PAT_MRT4530_48709C.1.pep
MFVSARKRLCFLFISALLLSLLAPSDGSSNSTANLNQSHNKTGRTLEMTPKVLFQLKMHALFHWSSFGFLMPVGIILARMSSKSKSGRSIRVLFXCHVISQIAAVLLATGGAALSLMTFENSFSNSHQRVGLALY

SEQ ID NO: 148261 - protein, 1295 aa, Oryza sativa
  unsure (1)..(1295): unsure at all Xaa locations
  Clone ID: PAT_MRT4530_4870C.1.pep
MSYYVDPRTSVPQYPLYPVYGYPPSTVVRQVGGLSAQGSTTMTSSFVDNSVNTNLNQRVPTSTILVWTQVGEIVFPVYTTVPISASPPMTGNENAVATTRGDSMSKDPPAEAEIGTSTTSEXRDPSAAKPCLFDRNHEPTRITSEVTRSWCPIHKTRKHTLQACWVFLNVHAEIRACKEHGIQRTSPTRDVYCPIHKTKNHNLSSCKVFLSAMKTPPPKVQQSRVPFRDEDKEQGATPISDRFVGVIDIDPHEPSVLHLLEDYGSSTTSMPREVLAIDDVGTSACTNAEAENQVITPAQHIRAVNAILRETPYDPVLNDDLARWTKRLWESVTNLSNAFEEAATAAHPKQPPTGDANGENPEQRESPHRATPPPRGTGDLRDHLNGRREARRTRVDENRSXHRVSSRRHDNEERGGRSSEDRDXDNRHNRRDHDDRERRVLGDSGRGRCHNDDDDGDQRRDNNERRRQSSREPGRRPRNRTPEPSDPSSLSSSSSSSSSDRHPRRTYDRRQPTAPSAGCRAFGRSLQDVRWPERFQPGAIEKYDGSTDLEEFLQVYSTNPGESLRDYVWRFNECRNTIPEITDASVIRAFKSGVRDRYTTXELATRRVMTTRRLFEIVDRCAHADDALRRKNDKPKTGGEKKPAKDAPESSKKKNRKSGKRKAQAEVLAAEYADPPKRPDPQGSDAKKIWCPIHKSDRHSLEDCLVFNKSLVKHMVFEKGKRIRVVEKDAEAVTQESDSAYPDSDLHVSHIFGGSTTYSSEAAPKMKXSEQKIVFSEEEHPNTAIILGQYLIVVEPTIRNIKVTRVLIDDGSSINLFFASALDAMGIPRRELTPTNQPFHGITPQSSSKPLGKITLPVTFGQANNFRTEQITFDVAEFDTAXNAIIGRTALAKFMAASHYAYQVLKIPGPKGTFTIXGNAKLAVQCDKRSLDMLEHTPSPLATAEPPKKPSDMPGVPREVIEHKLMVRPDAKPVKQKLQRFAPDRKQAIREELDKLLKAGFIREVLYLEWLTNLVMVRKANGKWRMCVDFTDLNKACPKDHFPLPRIDQLVDSTAGCMAKEDEEKTTFITPFGVFCYVKMPFGLITAGNTFQRTVQGALSDQLGNNVEAYIDNIVVKTKTSDSLIDDLRETFDNLQRYRLMLNPEKCTFGVPSGKLLGFLVSGRGIEANPEKIKAIENMKSPTRLKEVQKLIGCMAALSRFVARMGERGQPFFALLKKQDKFVWTQEVEEAFIALKRYLSNPPVLVXPQPNKELFLYISATPYSVSTVIVVEREKVQRPVYYISEAMLPTELRHQ

SEQ ID NO: 148262 - protein, 467 aa, Oryza sativa
  Clone ID: PAT_MRT4530_48710C.1.pep
MARSRPRVWLLAGCSAVLLWAFVGQLVAVGRLLALFGLAGDAEPSPPPTALPPRRVYKSNGYLKVSCNGGLNQMRSEICDMVAVARLLNLTMVVPELDKRSFWADQSNFEDIFDVKHFIDTLRDEVHIVKQLPKRFGPEDSNNILNMPPVSWSDEKYYLHQILPLFSKYSVIHFNKTDARLANNGISTQLQLLRCRVNFHALKFTPQIEALGNKLVQKLQAKGSFAALHLRYEMDMLAFSGCNHGLSQEEAEELKRMRYAYPWWREKEIDSQAKRLQGLCPLTPEETSFILKALGFQKDTLIYIAAGEIYGGEKRLEPLQAAFPKLVRKETLLDLEALRQFQNHSSQMAALDFIVSTASDIFIPTYDGNMAKLVEGHRRFLGFRRSVLLDRQKLVGFIDLYNNKTISWNNFASSVQETHRNRVVQPSCRQKLENKPKEEDYFYANPHECLANSRFCSRTKDAISVRI

SEQ ID NO: 148263 - protein, 53 aa, Oryza sativa
  unsure (1)..(53): unsure at all Xaa locations
  Clone ID: PAT_MRT4530_48711C.1.pep
GWVGEVRLNIINLFTRETTRIHDWLILLXIARVHHITQIYTLIHPYVPKLQAA

SEQ ID NO: 148264 - protein, 155 aa, Oryza sativa
  unsure (1)..(155): unsure at all Xaa locations
  Clone ID: PAT_MRT4530_48712C.1.pep
PXXNFPSYPTXKGTFSRXDSPPTRPXKLLPPDTLSSLRPRRGTFADXDCLRXDAARPHPXXRFPSXXTXXXDNXXHTHSVGASLSAXPARXGCHCRXTXXEXXHXXRTXEGXKRGRXGXXARAMASPRRHSPXXPCVDSPLVIPKXSXNGRLXLF

SEQ ID NO: 148265 - protein, 133 aa, Oryza sativa
  Clone ID: PAT_MRT4530_48713C.1.pep
MDIHGCTYFGTEEKHISLDLNACGLKRQYDTTFTWPEFAKFGAKSQAKLEDASSRSSREGVEIATVHESTCVLGDTPSTRSLSLAVAAFGGFTKKLKPSSLPRGYLVQDAAGPPQPRVTGLLASGPHAIIYYP

SEQ ID NO: 148266 - protein, 95 aa, Oryza sativa
  Clone ID: PAT_MRT4530_48714C.1.pep
GQVLQEVRKERVETFTLLACTTICLKNQRSSLPAAEIPPRGEGQVTDQLRNSPAFCPPRTQEAARGECAGHGSRPHLHPPPPLRSPKHETLGRRR

SEQ ID NO: 148267 - protein, 372 aa, Oryza sativa
  Clone ID: PAT_MRT4530_48715C.1.pep
MEAKSGEASVAPVAVATEATAATVSFQPQAAVAEQGSSSGGVLVPPPPMAAGGGGVVVAAAPVAGVVKVGKKRGRPRKYGPDGSLIRPLNATPISASVPMAASAVGPYTPASAVGAAMKRGRGRPLDFASTAKLHHHHQHQHHHQQQQFGFHFDSIGEMVACSAGANFTPHIITVAPGEDVTMKVISFSQQGPRAICILSANGVISNVTLRQPDSSGGTLTYEGRFELLSLSGSFMPTENSGTRSRSGGMSVSLASPDGRVVGGGVAGLLVAASPVQIVVGSFLPSYQMEQKNKKPRVEAAPALAQTPPAVPISSTDTHSSEQGQHSSVAPRTTNIVTSAYNPDQSWASPAQSIPDSARTPSGDVKVTASGA

SEQ ID NO: 148268 - protein, 114 aa, Oryza sativa
  Clone ID: PAT_MRT4530_48716C.1.pep
MANLTATGLLVAFLFVAAVAIADGRSLSVAHEKFHGDGADHHYVAPEHATTPLPLICTGVHGVEAGETCDSIARRFHAGLGRAPFFRLVSLNPNINCRELFVGQWVCIQGLLPV

SEQ ID NO: 148269 - protein, 107 aa, Oryza sativa
  Clone ID: PAT_MRT4530_48717C.1.pep
KEKKKRAFFFFGKRPASPFQVNFGREFFFLGFRSPKAGPGRLPEFSGPDPEENPTFPLGRPFKAGGNLGHYGPPGKMSFRSKFQKKFEPEALKVNPGGPKEKTIPHL

SEQ ID NO: 148270 - protein, 83 aa, Oryza sativa
  Clone ID: PAT_MRT4530_48718C.1.pep
MWNPRGSYADSAATSDKPGVKTTQGPKAVAVLGSASAGGGGHARAQGCGGNMQACSIGGSSSLPPIGPTPPRLPLLYVGDVGI

SEQ ID NO: 148271 - protein, 105 aa, Oryza sativa
  unsure (1)..(105): unsure at all Xaa locations
  Clone ID: PAT_MRT4530_48719C.1.pep
HDETVTNDEMAADPSEQDIKPENHEQDQGEKTSCQRNPSGRVASVGGEGDXXCSHGRTIRIDTDGDGRAHGAGAPAXRDPTKADRRGAPAARKAATSIDASHLAG

SEQ ID NO: 148272 - protein, 93 aa, Oryza sativa
  Clone ID: PAT_MRT4530_4871C.1.pep
MEVEDKSSGAARALEITDRSDIHRNVMATMWFSSGSIATATIMKLVWKGVTKEQRWFTDDGCDDDDVVAELNILVAQSGAAGGHDVSTYGNTT

SEQ ID NO: 148273 - protein, 283 aa, Oryza sativa
  Clone ID: PAT_MRT4530_48720C.1.pep
MELAMSSPLFAKLSALFSSDAACLEGLERVRGRGHERLRVVAYRLGGLGYSWAPRFRLALLLLLRDKFPELVGAVEVVDPTVAPVERRAMEELGCVVTASPALCLVVEQPTLIFMPYADRVFFENLLTLNWTPDQLGKIVVLGHSFSAMVKMLELSISKQEKCGVTEQREKVRRVLAIQSYVQELELCAEISGLFDNPLLGDEYPDELNQSDYNHSSEQCTCMHCVAHMESGALICALPSTFSIHFFHLDAEIDMEYLIPGNCATRVGSNVNVQMGYDAQLEG

SEQ ID NO: 148274 - protein, 101 aa, Oryza sativa
  Clone ID: PAT_MRT4530_48721C.1.pep
MPCRAVRNGCICMLSHLDWINPTVTLTSDHRLLFSAGWISDKSNNQFRTNHGHHYQHIRIEFLFQYGGPDHLSFSQDLINANLYIQLTGTVIDDTVEYSGE

SEQ ID NO: 148275 - protein, 511 aa, Oryza sativa
  Clone ID: PAT_MRT4530_48722C.1.pep
MGRTEGRLASVVHLPGRSRVSASPSPRRRRSPSRSPSPRRNRRRDRSPSPYRSRRDRSPSPYRDRRRQWSPYHRDRGRDVEREWARDRDHPAPRRGGGGAGAGAWSASDDDDDEQLKGLTYFEYRRVKREKLRKSMKRCIWNITPSPPRREGEDEDYGYSDEEEEEEEKKESPKKVASSDKSEEEDSKGSSESDSGESDSLSDSSKSDDTRRKKKGRKGSHRSSKRSRHRRRHHSSDTEGDDNSKAEEDSEGSYDSEDSMDRRKKKRSRRHKKSKRRGRSSRRKKRKSNDTASEGSSEEEAVAAASGSSPSPLRDSKKKSRSSRRKRSKQSDSEDQAPSDADLGVKEIDETNEPEIDPEAIKFKEMLEAQKKAALENEMPVGPMPLPRAEGHISYGGALRPGEGDAIAQYVQQGKRPPRRGEVGLSAEEIQKFEDLGYVMSGSRHQRMNAIRIRKENQVYSAEDKRALAMFNYEEKSKREHKVMADLQRLVQRTIGNDVGPSHDPFATADG

SEQ ID NO: 148276 - protein, 81 aa, Oryza sativa
  Clone ID: PAT_MRT4530_48723C.1.pep
MVVKASVRRRLSVHKAVRRVQGGKRKDQRSGRDEGDGDGGWAGFLPSAVVERTRLGVDGIRDKDGVGDGDGLINIYHHLSF

SEQ ID NO: 148277 - protein, 408 aa, Oryza sativa
  unsure (1)..(408): unsure at all Xaa locations
  Clone ID: PAT_MRT4530_48724C.1.pep
MAMARRGNGGYQYGAYSYGYGYSKPHVNYHSQSSESVTTVVTKMDEMSVHENAVQKMSSSFREEKVYEQQGGGGGDVQVCRNGGAAAGAVQKHTYAEKKEEEVYEESNHGGAGAAAAGWVQPTTATTRVAVAGGGQHHYGGCHRPLPAXRTGGLHSNQAARSLPAAAHTQVPPAKSYGCEEEDSDDDDCDDHDESDDHDDXAHQAAQGSVHSYHEAAYQHEENQHAGEHQAIEGVNGCGAGGYNYNRHQPIAVAGGGQHHYGGATAAAYGNASNKQHFTAAAAGHHSSGGHTQYHHQSYECEEEDSDEDDCEDDDDDESDDDDDDGHCPPSRQGSVHSYHQAAYQHEEKQHAGGRNHYHAYERHEEHGGGAQRYQKYESSTQVGYAGGGGGNGGCVRGNAKPCFRIMA

SEQ ID NO: 148278 - protein, 152 aa, Oryza sativa
  Clone ID: PAT_MRT4530_48725C.1.pep
SSYHEIEDQYDAAGGYGRHHGGGGGAVKQHATYKQHQAIEGVNGCGAGGYNYNRHHAVAVAGGGQHHYGGATATAAAYGRTASNKQHFTAGGGHTQYRHQSYGCEEEDSDDDDCDDDDESDDDDDLCPPSRQGSVHSYHQAAYQHEEKQHAG

SEQ ID NO: 148279 - protein, 41 aa, Oryza sativa
  Clone ID: PAT_MRT4530_48726C.1.pep
RFRFQISYSTFLVQHSSFSAQGQLSASVAPHDCKMYVLTPK

SEQ ID NO: 148280 - protein, 52 aa, Oryza sativa
  Clone ID: PAT_MRT4530_48727C.1.pep
MASNGLTRFITTQSSLALHHQFRFVCAKPLACPSPPHGPSQLSVACASPSCD

SEQ ID NO: 148281 - protein, 411 aa, Oryza sativa
  Clone ID: PAT_MRT4530_48728C.1.pep
MATAWMRWAAKAVDRTAKIEYGVEIKDERTRHGEDAWVQSDRCEGKSSCFLPGEHPTLGVVPSVWTWNLLLKFIAETGEYEMVLAAYNEMKCFQLTPDVYTFAIVTRSLFQAKKVDEALQVWAEMTEMGVKPDARGYSSFLIGLCDCRKYDLAYVILQEINREKVPVEAMAYNMVMDGLCKEMRLDEAEKLLENKARQGSNPDVYGYSYLIQSYCKMGNLIKAVDHYEAMVSHGIETNCHIVSYLLQCFRKLGMTSEVIAYFLKFKDSGLHLDKVIYNIAMDTYCKNGNMNEAVKLLNEMKCGGLTPDKIHYTCLINGYCLKGEMQNAQQVFEEMLKANIEPDIVTYNILASGFCKSGLVMEEVNIDDEELSVEIRKENEAPVVERKVKNISDTNIKRLSKFHLGCESLCK

SEQ ID NO: 148282 - protein, 45 aa, Oryza sativa
  Clone ID: PAT_MRT4530_48729C.1.pep
MEEERMAGTGTSLALQGCVQVQVQRSSLRALRVSGGGGQNHDERR

SEQ ID NO: 148283 - protein, 384 aa, Oryza sativa
  unsure (1)..(384): unsure at all Xaa locations
  Clone ID: PAT_MRT4530_4872C.1.pep
LGRRRDAAGTRLDDAEARTKTMMGLLHLTKRGRRTRTAXRRDERHDDRNRERREDDDDDDRSRRGGDEGSRRWLHGDEDDVEHAAAMPTTEAAPRDDEPGNRRDVDDENDRRRRXWTAEGFGWRGNDAEDDLAAAMPEVVVVQQADEPGRRKGRPKGRRRRRGWRGRRGDGVPAKPRSSRRGGRRCDVNGGDGDVGRRTGDEQQPAGDGEVVATPLDAGEEATPASFGRGGGDAGDEGGVAEPREVVATSSGAQAGRQRRLEAAGAEERDGRRRERSSGGLRAKRRAGRRRGGGGDAGGGDGTAGRRSGEAGEAAGGRPAPEREREKVGRGGAATGELGKRRLSRRLAMDGGGEAEHGSGGNGAEANGRGGERGGDTGDRRGRR

SEQ ID NO: 148284 - protein, 1076 aa, Oryza sativa
  Clone ID: PAT_MRT4530_48730C.1.pep
MQVNLCEGLHHMLGRLKVKLIIWDETPCSYDEQCSNSFDLMNHISRLFLIWRLSNSQETTAAARQSKKGKKQRGGESSIYGGGSISGVRGVRSRRRIGRGHARTRQRREAASGTEQGVRWATSSGGGRGAACGGLWRAAVGAAQRSARRRTRWGLTDERGAALVMRRESRRGGAAPRGRGRGRREGEVAPGAPRHAPTHAPASPVLGDEWRRREQGRGNKAATVVRRQWRGLRSRMRELGMVKTPGCSRIDVKGRAHAFYQGSIPHALEAETFQDQYLEQHPASWYGARMRAIGWLFWSKRLLLQEVAPGFLALLLRYCWVLPLFHNTLHCLKRRPAIAFAYFKDTQSIGFNHDFSTYSEMIQILSHSRQGKMLVSLFSELVSSSNASGPEILPLVDHHRRTCATPCSLSFMVDCLIKACITCYDVQATICLFSGICRLGVVPSVWTWNLLLKFIAETGEYEMVLAAYNEMKCFQLTPDVYTFAIVTRSLFQAKKVDEALQVWAEMTEMGVKPDARGYSSFLIGLCDCRKYDLAYVILQEINREKVPVEAMAYNMVMDGLCKEMRLDEAEKLLENKARQGSNPDVYGYSYLIQSYCKMGNLIKAVDHYEAMVSHGIETNCHIVSYLLQCFRKLGMTSEVIAYFLKFKDSGLHLDKVIYNIAMDTYCKNGNMNEAVKLLNEMKCGGLTPDKIHYTCLINGYCLKGEMQNAQQVFEEMLKANIEPDIVTYNILASGFCKSGLVMEVFDLLDRMADHGLEPNSLTYGIAIVGFCRGGNLSEAEVLFNVVEEKGIDHIEVMYSSMVCGYLLSGWTDHAYMLFVRVARQGNLVDHFSCSKLINDLCRVGNVQGASNVCKIMLEHNVVPDVISYSKLISIYCQNGDMDKAHLWFHDMVQRGLSIDVIVYTILMNGYCKAGRLQEACQLFVQMTNLGIKPDVIAYTVLLDGHLKETLQQGWEGIAKERRSFLLRANHNKLLSSMKDMQIEPDVPCYTVLIDGKCKAEYLVEARELFDEMLQKGLTPDAYAYTALINGYCSQGEISKAEDLLQEMIDKGIEPDELTFSVLNQSSLRSRKIQFCA

SEQ ID NO: 148285 - protein, 938 aa, Oryza sativa
  Clone ID: PAT_MRT4530_48731C.1.pep
MTSEDPLPLHHLCLHHASHPHPHILLAVVTVSYPNRGKVDAAKETLNPNFPFVQFSNPQPVPCARRGAVGRRAARARVGGAAAGTGSAAQRREQGKGSHQPGTEGRQSSFKKWLLVFLLSSCDIAGYSLCFIIHLRIPPLGLSSCPFSVLTASASVQSDCSSDDEKLNCAPSQHARKRSRPLCSDSVVQTLHCLKRRPAIAFAYFKDTQSIGFNHDFSTYSEMIQILSHSRQGKMLVSLFSELVSSSNASGPEILPLVDHHRRTCATPCSLSFMVDCLIKACITCYDVQATICLFSGICRLGVVPSVWTWNLLLKFIAETGEYEMVLAAYNEMKCFQLTPDVYTFAIVTRSLFQAKKVDEALQVWAEMTEMGVKPDARGYSSFLIGLCDCGKYDLAYVILQEINREKVPVEAMAYNMVMDGLCKEMRLDEAEKLLENKARQGSNPDVYGYSYLIRSYCKMGNLINAVDHYEAMVSHGIETNCHIVSYLLQCFRKLGMTSEAIAYFLKFKDSGLHLDKVIYNIAMDTYCKNGNMNEAVKLLNEMKYGGLTPDKIHYTCLISGYCLKGEMQNAQQVFEEMLKANIEPDIVTYNILASGFCKSGLVMEVFDLLDRMADQGLEPNSLTYGIAIVGFCRGGNLSEAEVLFNVVEEKGIDHIEVMYSSMVCGYLLSGWTDHAYMLFVRVARQGNLVDHFSCSKLINDLCRVGNVQGASNVCKIMLEHDVVPDVISYSKLISIYCQNGDMDKAHLWFHDMVQRGLSVDVIVYTILMNGYCKAGRLQEACQLFVQMTNLGIKPDVIAYTVLLDGHLKETLQQGWEGIAKERRSFLLRANHNKLLSSMKDMQIEPDVPCYTVLIDGKCKAEYLVEARELFDEMLQKGLTPDAYAYTALINGYCSQGEISKAEDLLQEMIDKGIEPDELTFSVLNQSSLRSRKIQFCA

SEQ ID NO: 148286 - protein, 152 aa, Oryza sativa
  unsure (1)..(152): unsure at all Xaa locations
  Clone ID: PAT_MRT4530_48732C.1.pep
GPYPPAWPEPDPEPEPDPPYCPPPPPPPXPEPCPDPPYCPPPPPPPXPEPYPDPPFCPPPPPPPYPEPEPYLDPPFTPPPPPPPWPPPXQPDPEPYPDPPFXPPPPPXPPPPPLAYAPPEDPPAXPYPEPEPDPHPEPSSDPPPPPPPLPPP

SEQ ID NO: 148287 - protein, 107 aa, Oryza sativa
  Clone ID: PAT_MRT4530_48733C.1.pep
MAMIFEIEPSRDDEFGHGFVRPFSKKPTFRKAVDERMDTSLRQENQSLLATRGCVFSLLLLLVRDHLVSVAKEVRQLHETGELTRPALPQESAIITVILSHKRHSRK

SEQ ID NO: 148288 - protein, 561 aa, Oryza sativa
  Clone ID: PAT_MRT4530_48734C.1.pep
MGDPPALKRPKLEKDDYESAYWPRPAASNASSASKPPQSSSSATATAATQEDEEDDIAEEAVLALIAHRERDVERCKLKLSHYQSLLDTAEKKLAEAQDRLARYRDRKPPPPPTHRDPKPSLPPTTTQRDPKPSPPQHKAPERPQLVIPGANNRPPPRPEPMPGLKKTAAPSSSSASVPPERPRALEKKPKLKIEQKEHQNLIQSVKKSSATVLRFYGGTVICSQHKRKLRCLELCPVNDQLVATSALDGIVTLWQVQPKGNLSNIRKTLWFDGKPVIATQPVISLLSTTDCFSPKHRWPEDVAWHPHGELIFAVYSADNGDSQVSVMNRNLSGQKKVSFLPVKPHTKGIINNINFMPWSDVCFVTGGSDHAVILWQEKDDSWNHKKVHKDLHSSAVMGVAGLQQKSTILSVGSDKRIISFDLAAGRTESKNLIDYKCMSVLPNPCDFNLYMVQTAAPGRQLRLFDVRLRQTEVHTLGWKQESSESQSALINQSWSPDGWYLSSGSADPMIHIFDIRHNGQNPCQSVQAHQKRVFKALWHRTAPVLTSISSDLNIGIHKYS

SEQ ID NO: 148289 - protein, 161 aa, Oryza sativa
  unsure (1)..(161): unsure at all Xaa locations
  Clone ID: PAT_MRT4530_48735C.1.pep
GPYPPAWPEPDPEPEPDPPYCPPPPPPPXPEPCPDPPYCPPPPPPPXPEPYPDPPFCPPPPPPPXPDPEPYPDPPFXPPPPPXPPPPPLAYAPPEDPPAXPYPEPEPDPHPEPSSDPPPPPPPLPPPSALAYLATLAALARPTLSRTTKLRDTNLVLAIAN

SEQ ID NO: 148290 - protein, 79 aa, Oryza sativa
  Clone ID: PAT_MRT4530_48736C.1.pep
IRQIILFFSSSILILVYISIRTVNVLLPTKHWVNRNLHFNFGCYRSARWSAKSTDTPSRNSFVIHEADRLSHVLLIIEI

SEQ ID NO: 148291 - protein, 60 aa, Oryza sativa
  Clone ID: PAT_MRT4530_48737C.1.pep
MAPIGQSESEKGGAATAEKIRPFAPFPVPKNLCDLDVAAREVAKRLLPLEVKYTGKMAMV

SEQ ID NO: 148292 - protein, 50 aa, Oryza sativa
  Clone ID: PAT_MRT4530_48738C.1.pep
PTPKLRPRPRGLPISPPCVESPLGPPPPHPKLLLVIAVLGSVPHHIYKVG

SEQ ID NO: 148293 - protein, 222 aa, Oryza sativa
  Clone ID: PAT_MRT4530_48739C.1.pep
MSRIRLINEWAKNPEITRPIGPKFTSLHIGTKEQATCRNWARPTQPMVRPNPLQLRSMQGFDGRPGLIPNDGWRTIEESRAGGTYRETRNTARNEREGSTSSTLVLMYEAGWEPTGDASGWTQAPHHSIGGSGWESASESRWLISGIPPSPGEWRSSFSRWDLGEITRRMNTLDMQMGEIHYNLEEHIAQTQEWQQNVDAQFTNINNLMQQQHVDLQAYFHF

SEQ ID NO: 148294 - protein, 348 aa, Oryza sativa
  Clone ID: PAT_MRT4530_4873C.1.pep
MAVRVLLPPPRRWFLLSSLLLVVAAAVPVVHGYGGGGGLTVGFYKESCPEAEKIVRKVVAAAVHDDPTTTAPLLRLHFHDCFVRGCEGSVLINSTKKNTAEKDAKPNHTLDAYDVIDAIKEKLEHKCPATVSCADILAIAARDAVSLATKAVRQGRWSKDGNLYEVETGRRDGRVSSAKEAVTYLPDSFDGIRRLITRFASKGLSLKDLAVLSGAHALGNTHCPSIAKRLRNFTAHHNTDPTLDATYAAGLRRQCRSAKDNTTQLEMVPGSSTTFDATYYGLVAERKGMFHSDEALLRNDVTRGLVYEYMRSEESFLRDFGVSMVNMGRVGVLTGSQGEIRRTCALVN

SEQ ID NO: 148295 - protein, 123 aa, Oryza sativa
  Clone ID: PAT_MRT4530_48740C.1.pep
VNSPPQTTLPTKSEVRSRPCLVVCFDLRCCNPVVLRCFYLGKIESHSWTDRNPRPIPLPCLTRSLPQSVSLLCYASELETYPTPSMSQPLQIESCAIRLPATQALATFHGPGFNTNTCTPPSP

SEQ ID NO: 148296 - protein, 105 aa, Oryza sativa
  Clone ID: PAT_MRT4530_48741C.1.pep
CFSPPECRSPRAQAPPRFGTRMPVNLPSSLYQQRPPWLAASVTIRTTIPVCSARPNVVNSSAGAAQPAVQILSASPRKEEPEARTNTSDTSNAATASSELNKLHI

SEQ ID NO: 148297 - protein, 57 aa, Oryza sativa
  unsure (1)..(57): unsure at all Xaa locations
  Clone ID: PAT_MRT4530_48742C.1.pep
XXSKNTKKRFLSTCRTYSTTREHYRAKEMDFGATILDKYNRFFVRFNHPTFKVAENF

SEQ ID NO: 148298 - protein, 45 aa, Oryza sativa
  Clone ID: PAT_MRT4530_48743C.1.pep
VALNCSDEQFTDQNHFIASAIYCKAMGTKLKSIKAVYLSPEFSSF

SEQ ID NO: 148299 - protein, 809 aa, Oryza sativa
  Clone ID: PAT_MRT4530_48744C.1.pep
MKTKTAAAATCLVALLVVVLAEAAGVGGTTVTYNDRSLVIDGERRIIISGSIHYPRSTPEMWPDLIKKAKEGGLDAIETYVFWNGHEPHRRQYNFVGNYDIVRFFKEIQNAGLYAILRIGPYICGEWNYGGLPAWLRDIPGMQFRLHNAPFENEMEIFTTLIVNKMKDANMFAGQGGPIILAQIENEYGNIMGQLNNNQSASEYIHWCADMANKQNVGVPWIMCQQDSDVPHNVVNTCNGFYCHDWFPNRTGIPKIWTENWTGWFKAWDKPDFHRSAEDIAFAVAMFFQKRGGPYITTSYDYDAPLDEYGNLRQPKYGHLKDLHSVIKSIEKILVHGEYVDTNYSDKVTVTKYTLDSTSACFINNRNDNMDVNVTLDGTTHLLPAWSVSILPDCKTVAFNSAKIKAQTTVMVNKAKMVEKEPESLKWSWMRENLTPFMTDEKGSYRKNELLEQIVTSTDQSDYLWYRTSINHKGEASYTLFVNTTGHELYAFVNGMLVGQNHSPNGHFVFQLESPAKLHDGKNYISLLSATIGLKNYGPLFEKMPAGIVGGPVKLIDNNGKGIDLSNSSWSYKAGLAGEYRQIHLDKPGCTWDNNNGTVPINKPFTWYKTTFQAPAGEDTVVVDLLGLNKGVAWVNGNNLGRYWPSYTAAEMGGCHHCDYRGVFQAEGDGQKCLTGCGEPSQRFYHVPRSFLKNGEPNTVILFEEAGGDPSHVSFRTVAAGSVCASAEVGDTITLSCGQHSKTISAINVTSFGVARGQCGAYKGGCESKAAYKAFTEACLGKESCTVQITNAVTGSGCLSNVLTVQASC

SEQ ID NO: 148300 - protein, 824 aa, Oryza sativa
  Clone ID: PAT_MRT4530_48745C.1.pep
MAAAATCLVALLVVVLAEAAGVGCTTVAYNDRSLVIDGERRIIISGSIHYPRSTPEMWPDLIKKAKEGGLDAIETYVFWNGHEPHRRQYNFEGNYDIIRFFKEIQNAGLYAILRIGPYICGEWNYGGLPAWLRDIPQMQFRMHNAPFENEMENFTTLIINKMKDANMFAGQGGPIILAQIENEYGNVMGQLNNNQSASEYIHWCADMANKQNVGVPWIMCQQDSDVPHNVVNTCNGFYCHDWFPNRTGIPKIWTENWTGWFKAWDKPDFHRSAEDIAFAVAMFFQKRGSLQNYYMYHGGTNFGRTSGGPYITTSYDYDAPLDEYGNLRQPKYGHLKDLHSVIKSIEKILVHGEYVDANYSDNVTVTKYTLGSTSACFINNRNDNKDLNVTLDGNTHLLPAWSVSILPDCKTVAFNSAKIKAQTTIMVKKANMVEKEPESLKWSWMRENLTPFMTDEKGSYRKNELLEQIVTSTDQSDYLWYRTSLDHKGEASYTLFVNTTGHELYAFVNGMLVGKNHSPNGHFVFQLESAVKLHDGKNYISLLSATIGLKNYGPLFEKMPAGIVGGPVKLIDNNGTGIDLSNSSWSYKAGLAGEYRQIHLDKPGYRWDNNNGTVPINRPFTWYKTTFQAPAGQDTVVVDLLGLNKGVAWVNGNNLGRYWPSYTAAEMGGCHHCDYRGVFQAEGDGQKCLTGCGEPSQRYYHVPRSFLKNGEPNTLILFEEAGGDPSQVIFHSVVAGSVCVSAEVGDAITLSCGQHSKTISTIDVTSFGVARGQCGAYEGGCESKAAYKAFTEACLGKESCTVQIINALTGSGCLSGVLTVQASC

SEQ ID NO: 148301 - protein, 134 aa, Oryza sativa
  unsure (1)..(134): unsure at all Xaa locations
  Clone ID: PAT_MRT4530_48746C.1.pep
PXSNPASGHARSAXSNLWXKGFHPVXPXTLKNQGSSAFTQKTGXENVPWMXPXFWRDLLKPPXSIXLLXQXRXIKWLPPEXXKXCXSLPASXFEXTLGGIPSPXEXIYLDSNXSFKNPFPGXXXXIELPXKILL

SEQ ID NO: 148302 - protein, 815 aa, Oryza sativa
  unsure (1)..(815): unsure at all Xaa locations
  Clone ID: PAT_MRT4530_48747C.1.pep
MDLSATPSRSKSGLRSSPRKPVAAPAVAQMDLSTPSKPTPRRKPKAPPGGGSDVPRDPVLRPPLLPPPRDADQGNFRDPREAHPNPEAEXRAAPSPSPKTPTQSEPKRQRQRQRQRQQPKKPKKRAYYRKVVYDGGEFAAGDDVYVKRRDGAESDAEDPEAEECRVCFRAGAAVMVECDVCLGGFHLRCVRPPLRRVPEGDWACPYCEAERAGKAIERPKPPEGKRIVRTAKEKLLSSDLWAARIESLWREPDGIFWAKVRWYIIPEETAAGRQPHNLRRELYRTNDLADIEMETILRHCYVMSPKEFKDASDQGDDVFYCEYEYDIHWHNFKRLADIDDEPETKEDPGDEPYNAGNDYVSDSDEDSEYDEEEEPTKCSSARTHQSHALAANLRKGRTYGLQKIGIRKIPEHVRCHQKTNLEKAKATLLLANLPKSLPCRDKEMEEISAFVKDAICNDQCIGRCLYIHGVPGTGKTMSVLAVMRRLRSELDSGNLRPYSFIEINGLKLASPENIYKVIYEQLSGHRVGWKKALHYLTEHFSGGTKIGKQANQPIILLIDELDLLLTRNQSVLYNILDWPTRPNSNLVVIGIANTMDLPEKLLLRISSRMGIQRLCFGPYNYRQLQEIITSRLKGIDAFEDQAIEFASRKVAAMSGDARRALEICRRAAEFADYRVKQSGHTSVNRGKNVVCMGDIEAAIQEVFQAPHIQVMKNCPKFGKIILVAMVHELYRSGLGEVMFDKLAATVLSWCHVNRELLPGYDNLLKICCKLGEGKIIFCEEGTKHKLQKLQLNYPSDDVTFALKESPDIPWLSKYL

SEQ ID NO: 148303 - protein, 40 aa, Oryza sativa
  Clone ID: PAT_MRT4530_48748C.1.pep
GKPTGMALVLCAVNICLQWAICKRFNNQVYFFWNTKNQKT

SEQ ID NO: 148304 - protein, 140 aa, Oryza sativa
  Clone ID: PAT_MRT4530_48749C.1.pep
MINHRLFDHARARVQSAHLLTVNTVPSPLLAALPNVRRCHLPNGEKKTPPKRSRCLHVSTSHRAKAATPMPITPYYYSSGGSNARGRGPSRSGARAAAAATWHGEEQTNGKKGDSLLPQPPKVKPPGAWCWWPAAHAMAP

SEQ ID NO: 148305 - protein, 102 aa, Oryza sativa
  Clone ID: PAT_MRT4530_4874C.1.pep
MTFDWHPPDNDDDNLQVRQGQGDLEVNKRWAGRQSARMGGVRQVRGRAVGGSGWWTVAQGQALAGGGNSVDRDSSGREVNSYFFLVKTMAGLSRLNITLSHN

SEQ ID NO: 148306 - protein, 79 aa, Oryza sativa
  Clone ID: PAT_MRT4530_48750C.1.pep
RSRRRRRRLPPRRGSSGVCGRRWRTAARRVTSSCGTGARRRSGRVHRRRRRGRRRRSRSPAAEERRRGGEEGTRASGTS

SEQ ID NO: 148307 - protein, 165 aa, Oryza sativa
  Clone ID: PAT_MRT4530_48751C.1.pep
MAPPRFPPSSSAARLPPRSTPPEPRPSPPAAAAGAAALAPGSLEEVLLQAAFDGNLRLVRKMARALDEGDGRRLGDKVGAVRDGNGVGALHLAAGRGSLPVCGYLLEELRVDIDAVEDRGETALTFAINSGNADMVRYLLDHGADTEKLNNDGLTVLHFASGEGV

SEQ ID NO: 148308 - protein, 118 aa, Oryza sativa
  Clone ID: PAT_MRT4530_48752C.1.pep
MENVDQKVPLPASISGLQSSARTDLRPATSRYRRIKCSDFTSRSQKLAKQHHATRICPTIWADCNMLTSSTAGQNCNGQLDKTAATFSEAMYENPIMAFNYTINMERPSILRYVTLIN

SEQ ID NO: 148309 - protein, 58 aa, Oryza sativa
  Clone ID: PAT_MRT4530_48753C.1.pep
FFFFFFFLELIVPASSIDISSSDPKKKATFLFMNLIFAWASPLEQKLICCCYYYYLLG

SEQ ID NO: 148310 - protein, 50 aa, Oryza sativa
  Clone ID: PAT_MRT4530_48754C.1.pep
HPNWCACGLGSQAFTVPYFYMSDRPKYLNNICDSISFIFHEFAYVYLCLR

SEQ ID NO: 148311 - protein, 177 aa, Oryza sativa
  Clone ID: PAT_MRT4530_48755C.1.pep
MPRLPSPLGSLSAAATAAPRRAAAAAGLSPLLLRRRAPIAGALLFLSLGAFAGVRSLSSSASARMESTSTTVPSIVVYVTVPNKEAGKRLAGSIISEKLAACVNIVPGIESVYWWEGKVQTDAEELLIIKTRESLLDALTEHVKANHEYDVPEVIALPIKGGNLKYLEWLKNSTRES

SEQ ID NO: 148312 - protein, 43 aa, Oryza sativa
  Clone ID: PAT_MRT4530_48756C.1.pep
LSSAASMQGPSTMAEADPRDQGLPPVRARQERTRRSGGVINED

SEQ ID NO: 148313 - protein, 70 aa, Oryza sativa
  unsure (1)..(70): unsure at all Xaa locations
  Clone ID: PAT_MRT4530_48757C.1.pep
MAPSRVILALLLAAAAVMASSAHLDEKFYSNSCPTLEARIPNEMVRALXXXGSLAGPLLRMHFHDCFVRG

SEQ ID NO: 148314 - protein, 279 aa, Oryza sativa
  Clone ID: PAT_MRT4530_48758C.1.pep
MDFMVLQSKREWCSEVLCMNVASRVEESISLIHLCYCGSNWSITFKFFEVCCICIIVCKSLCIDKSMLDIAGESESDSEASDVSGSDGEDHSWISWYCSLRGNEFFCEVDDDYIQDDFNLCGLSSQVPYYDYALDLILDIESSHGDMFTEEQNELVESAAEMLYGLIHARYILTSKGLAAMLEKYKNYDFGRCPRVYCCGQPCLPVGQSDIHRSSTVKIYCPKCEDIYYPRSKYQGNIDGAYFGTTFPHLFLMTYEHLKPQKPSQRYVPRVFGFKLHKP

SEQ ID NO: 148315 - protein, 72 aa, Oryza sativa
  Clone ID: PAT_MRT4530_48759C.1.pep
RAAGIRHATCPCDATLRSAGRSAADRRPTCRFPDTLVSLSRRLYRPPPSRRYIRCFRFEGGGCFRLLIYTRE

SEQ ID NO: 148316 - protein, 168 aa, Oryza sativa
  unsure (1)..(168): unsure at all Xaa locations
  Clone ID: PAT_MRT4530_4875C.1.pep
MLLYGDLRIIGPRWTEYTETVHGSTEADPVCQPRRVADKRTPLDTTRAAHVETTRLPSGHTNTVTTRTXNDYRHRYTGTGADNRTTGTGXHRKDEDGAARERDPYHHATRRGNDNDERARRRRSGTTETNGEGTTSAAILGRRRDTAGAGLDDAEARTKTTTGLQRHT

SEQ ID NO: 148317 - protein, 515 aa, Oryza sativa
  Clone ID: PAT_MRT4530_48760C.1.pep
MGIEERLALLRSQISGKLESIQQRATAVAAKRRQLAGRRRKVAEDVGSAASRHKDLERELEEACEAEDFERAEKISDSLAALEKDKDRLLTALRDAELNYDSVDLELQDVLDSRIAAEEEAASLLEHFAKDATDHTDSASKEAEEISLKEIEGWRESMELLETKKLETEVEKELTELLKLVRLKEAEIAENNAQIQEVQERITAVVSRFYGSQTDIDLKLKTLQEAQTKMDSEAQALALKKNEIDSFISLSEQKDSKLREIINDCSSEAKACQQSVDIRRKLASSILKSREDRIGLLKMEEEILQDIQVLRQQTSDARISLQEISSRKAVIQQDIATFKQKLSFIDKRGPELEAEKRVAAAARNFKEAGRIAAEAKALYSEKEELHAKLEKAATDLEVIEKDITATTDKIQECEGLIILKEKESAMTSYKRLRLDAAAARAELTAATETDDSEEVEVLRKEAEAAESKAMELKTCYDLELDDNEIMFQPVVPIVFITNSTGQHLLEIASSFGLSP

SEQ ID NO: 148318 - protein, 929 aa, Oryza sativa
  Clone ID: PAT_MRT4530_48761C.1.pep
MEVSPRNLLLVGTASVALLAVAFVVYTGVWQGKADGEVETPLRRAVRSVTPLDAPRMMDLPQENNGIDHCLFGFYKGCFMFEPHSGYDWFVIVDCLQFQGDHKESLYWGTYRPNVYLGIRARTPLSLIAGIMWIGAKNGQYFLRHVCQDSDELSTYGWTDHNGRDYGHQVLVDHGLLLTTSFLKEKGEGSGYGGDWAVRLNAKTDGPSLSEDQESTTHLFFYIADEAGNSITMDSHIPSSRGHVLLASGSREEIGDWKVYLRSEENLEIHRAGFKSISMHNLSDLVQQALATNAMQSGNLNLPDMAEDSSNVIVYQVSMKRSAEVDIVFLSGAASENPMIEERINRLTGPVLSTRLESKQKDFEKRYDQIFNANNKINPKELSVGVAALSNLLGGIGYFYGQSKIALPKGFTQKNGDKYIPYWPAALYTAVPSRSFFPRGFLWDEGFHQLVIWRWDVHISMDIIGHWLDLINADGWIPREQILGAEALSKVPEEFVLQYPSNGNPPTLFLALRDLASGIHANQFSDEESEKISTFLKRAYVRLNSWFQWFNSTQTGKYEGTFYWHGRDSMATRELNPKTLTSGLDDYPRASHPNDEERHVDLRCWMLLATNCMCSIAEFLKTDSSLEKDYYKMSNQLSDFGILNKMHLDDKTGAYFDYGNHTEKVRLRWYEVRENDVMRRELLRETLQPPQLQLVPHVGYVSMFPFMMGAIPPESWVLEKQLDLISNSSILWTNYGLRSLSRTSSIYMKRNTEHDPPYWRGAIWINMNYMILSGLHHYAHEDGPYKDRAKELYDELRSNLIRNIVKNYHETGFFWENYDQKNKGKGKGARSFTGWTSLVVLIMGESYPTLHRRDDYPNLSWFSWINICLSLRVNFACYFCKHMISLSNASKVPEDYRDRTAAVTARSSVMKTDTANTTNSIPTICPDKN

SEQ ID NO: 148319 - protein, 524 aa, Oryza sativa
  unsure (1)..(524): unsure at all Xaa locations
  Clone ID: PAT_MRT4530_48762C.1.pep
MTFVSVKKYRSSGLKVVARSFPLQTYSVRIQKGTSGSRLGKCRYKDFRLPILENMGWLSKIFKGSVNRVSRGHYNGNTHEGHSAWHTKAYEHDSDHEDIDRAIALSLSEEDQRKGKAVDEVDIDHRLHEDEQLARALQESLNDEPPRQNVPVKDVHSESTPATFMPPYIFPSTGLRVCAGCKTPIGQGRFLSCMDSVWHPQCFRCFACDRPISEYEIPTNKDGHIEYRVHPFWMQKYCPAHETDRTPRCCSCERMEPKDSKYITLDDGRKLCLECLNTSIMDTDECQPLYIDIQEFYEGLNMKVEQQIPLLLVERQALNEAMEAEKTGHHLAETRGLCLSEEQIVRTILRRPVIGPGNKIVDMITGPYKLVRRCEVTAILILYGLPRLLTGSILAHEMMHAYLRLKGYQTLDPKVEEGICQVLAHICSAYVAPSQKCHLGSSSIIASIAASSSSSSSSSAPSSKKGYTKHGTFEKKLGEFFKHQIDXDPSDVYGDGFRDGIKAVERYGLRKTLDHMKLTGVFPC

SEQ ID NO: 148320 - protein, 215 aa, Oryza sativa
  Clone ID: PAT_MRT4530_48763C.1.pep
MGWLSKIFKGSVNRVSRGHYNGNTHEGHSAWHTKAYEHDSDHEDIDRAIALSLSEEDQRKGKAVDEVDIDHRLHEDEQLARALQESLNDEPPRQNVPVKDVHSESTPATFMPPYIFPSTGLRVCAGCKTPIGQGRFLSCMDSVWHPQCFRCFACDRPISEYEFAVHEGNPYHRSCYKELFHPKCDVCKNFIPTNKDGHIEYRAHPFWMQKYCPAP

SEQ ID NO: 148321 - protein, 61 aa, Oryza sativa
  Clone ID: PAT_MRT4530_48764C.1.pep
EGGRKARQVRQMAHLALLYNKLMYLCQHPVIPWPKQSTIIEAPICSSHQTYAFFLSFFLSS

SEQ ID NO: 148322 - protein, 196 aa, Oryza sativa
  Clone ID: PAT_MRT4530_48765C.1.pep
MEAEKTGHHLAETRGLCLSEEQIVRTILRRPVIGPGNKIVDMITGPYKLVRRCEVTAILILYGLPRLLTGSILAHEMMHAYLRLKGYQTLDPKVEEGICQVLAHMWLESEITSGSSSIIASIAASSSSSSSSSAPSSKKGVQTDFEKKLGEFFKHQIETDPSDVYGDGFRDGIKAVERYGLRKTLDHMKLTGVFPC

SEQ ID NO: 148323 - protein, 56 aa, Oryza sativa
  Clone ID: PAT_MRT4530_48766C.1.pep
MTKNIQQLDRVSHGDGLLDDVLPDSGGQGENSFFGSLARIKDFKIGVGIVSLVTFR

SEQ ID NO: 148324 - protein, 402 aa, Oryza sativa
  Clone ID: PAT_MRT4530_48767C.1.pep
MAAAADRLLHLLRAAPASPAPAAVPSSRTRATFYHQPRSLRLAAGASGMRRVAVACSSAGAGGSGVEGDEEGMTYKGAGVDIDAGTELVRRIGRLAPAIGGFGGLFPFVLTPGDQFLVAGTDGVGTKLKLAFETGIHDTIGIDLVAMSVNDIVTSGAKPLFFLDYYATSKLDVDLAEKVIKGIVDGCRQSDCALLGGETAEMPDFYKEGEYDLSGFAVGAVKKDKVIDGKNIMEGDIIIGLPSSGVHSNGFSLARRVLEKSGLSLNDQLPRNDGMITTVGEALMAPTVIYVKQVLEIINKGGVKGIAHITGGGFTDNIPRVFPSGLGAKIFTAAWEVPPVFRWIQEVGKIEDAEMRRTFNMGIGMVLVVSKEAADGILEGTHGPNHAYRIGEVISGEGVHYV

SEQ ID NO: 148325 - protein, 51 aa, Oryza sativa
  Clone ID: PAT_MRT4530_48768C.1.pep
MARHGEISEIMRCPWKVVCVAWMLALMCGLVIENAWKGCSCTASRKARRMV

SEQ ID NO: 148326 - protein, 45 aa, Oryza sativa
  Clone ID: PAT_MRT4530_48769C.1.pep
PPPVPLPTCGAISNTGQTNRTIPMSNDPADSQCTRESNHLHLNRP

SEQ ID NO: 148327 - protein, 230 aa, Oryza sativa
  unsure (1)..(230): unsure at all Xaa locations
  Clone ID: PAT_MRT4530_4876C.1.pep
RSPMVTGGGYRHGGAAAERGEGKGETRRRSTAHPRSTATTKKAAGAEEGGGAARVDGDRGAPAVGELDKGVNGDGDGAAKPEDATPGRETVPASGESRPKVVVDGGERGRRCELDASEETVXARGGNGRGRRGEGLNRVGRRRGRPGEEGNRPGGPAAINGAGEICGSKSARLNARERXKMGGKGEGITESGGIRGGSGARRGRGGGSGGRKEMTGGPHPSATVAGGPAR

SEQ ID NO: 148328 - protein, 101 aa, Oryza sativa
  Clone ID: PAT_MRT4530_48770C.1.pep
ELEQHIQTTFPCTDRHINPTSQLPNSIHHTFLRIQISAYVCPASYGISAMFCYEHADYATQVVVLQCSPLLESQLMMFARSLVRRLALIGQRSRASYGSVL

SEQ ID NO: 148329 - protein, 821 aa, Oryza sativa
  unsure (1)..(821): unsure at all Xaa locations
  Clone ID: PAT_MRT4530_48771C.1.pep
MASTSRRGGGEDNXDEPYLLGFIVANAVGLQYYQGGRAITRRESVGLVREPHNPHDANAIRVDNARGEKIGHIGRRAAAALAPLLDAGHVAAAHGIVPKPASKRLYSLPCQVHLFARPPHAALVAAALAASGIDLIHVDHPEFALSESAIVQEQQTKRSRGDVDRLFSHVGKGGRARIAPMEAPRDVVVSELFEHQKAALGWLVHREESCDLPPFWEEDNDGGFKNVLTNQKTNERPPPLKGGIFADDMGLGKTLTLLSLIGRSKARNVGGKKARGAKRRKVEEAVEEESRTTLVVCPPSVFSSWVTQLEEHTKTGSLKVYLYHGERTKEKKELLKYDIVITTYSTLGQELEQEGSPVKEIEWFRVILDEAHVIKNSAARQTKAVIALNAERRWVVTGTPIQNSSFDLYPLMAFLRFQPFSIKSYWQSLIQLPLERKNNGIGLARLQSLLGAISLRRTKETESGSKSLVSIPPKTVLACYIELSAEEREYYDQMELEGKNKLREFGDRDSILRNYSTVLYFILRLRQLCNDIALCPLDLKSWLPGSGSSLEDVSKNPELLKKLASLVDDGDDFECPICLAPPAKTVITSCTHIYCQTCIMKILKSSSSRCPICRRSLCKEDLFIAPEIKHPDEDSSVNLDRPLSSKVQALLKLLRRSQSEDPLSKSVIFSQFRKMLILLEGPLKAAGFNILRLDGSMTAKKRSEVIRQFGCVGPDSPTVLLASLKAAGAGVNLTAASTVYLFDPWWNPGVEEQAMDRVHRIGQTKEVKVVRLIVKDSIEERMLELQERKKKLISGAFGRKKGGKEHKEIRVEELQMMMGMK

SEQ ID NO: 148330 - protein, 51 aa, Oryza sativa
  Clone ID: PAT_MRT4530_48772C.1.pep
LAPKASCPREGPEAPKGGAEALAGGPGLDDSEAVRDPPGTSERVRQWHRLA

SEQ ID NO: 148331 - protein, 143 aa, Oryza sativa
  Clone ID: PAT_MRT4530_48773C.1.pep
IPLYHGWIVDPQDTDTATSIGSKSYNALASGLAEFKSGESTKENRHVQEEETVDFAAATTAALGVPSPSVSRGISFDENTLTDPVELHIRRGDREEEEELRRVLSLSKAENANACDGSGSFDTQSNSSNMEETGHTDKFPLEA

SEQ ID NO: 148332 - protein, 282 aa, Oryza sativa
  Clone ID: PAT_MRT4530_48774C.1.pep
MGPLIFVVVLVAIGQSVALCSIGRSSSSHRQWPSPCCIFSCDLSCVTHLLRTITGAAVHHQRQLFVRPLLLSCFPTSPSDFYQTTTNVAHPSSVAMQQLPLHLACPSLAARPARHERTFSGVFGFAPVGTFRLLSPTSSAAVGDGEGAIGSGATATNADVRAASTAKKTVEPRNEEYTSTATRSHGPSSPPAAAAAGLCLRRRTISDAATRWPHVRHARTTAGDRRLSLVVADGGAAAIDGILFCLPNSQAAAATRATTAATGTHIHLLAENLAPALRPPLS

SEQ ID NO: 148333 - protein, 70 aa, Oryza sativa
  Clone ID: PAT_MRT4530_48775C.1.pep
MAWRDRWEEGWIGAMVSHSSLAPIATSHSYHNLLALDLCGPRDVAWRRSATTMARRVKAELGPHQGDGDV

SEQ ID NO: 148334 - protein, 60 aa, Oryza sativa
  Clone ID: PAT_MRT4530_48776C.1.pep
LAYENYRMCWNINQQIGSCLVEMFTNCKIFLCTTSRMMVHAGKKKKKKKLETSSSLSPSC

SEQ ID NO: 148335 - protein, 105 aa, Oryza sativa
  Clone ID: PAT_MRT4530_48777C.1.pep
MELNYAWHQGDTFDHLTTWIEEARRLGVGGAKLTICFIGNKCDLSDRRAVSYEEGEQFAKQNALLFIEASAKAAHNVNEAFTLTARAMCHKVEDAWVCLMRKFDP

SEQ ID NO: 148336 - protein, 298 aa, Oryza sativa
  unsure (1)..(298): unsure at all Xaa locations
  Clone ID: PAT_MRT4530_48778C.1.pep
MEITVAEPEVQIVASVGTYIEEVVRLEWDGTEPEIFEDPSPAKDPEVQETPVPEKATDNSKVPKVLMSHDSKSKDENNEKFMVTIFRGDFEDLHAIYHRDKMNVNYVAVRCMMQYMDAKKKNKPISFLDPTRICQTQHTVRLAPGSDQLKGKTPQEITEYKKGLHKEKXDHYIYLIIHQKDGTVVVLDPLDYIHQSYKEFLTILQXCHKQPIGTVFCGYYAYEFLRVNGRYKVNAEDLLRIERRTSFDNTSITNVQRDLCQFIHHECCHVKGEFFDPEGALSTSDEFKKFREWSTTMP

SEQ ID NO: 148337 - protein, 489 aa, Oryza sativa
  unsure (1)..(489): unsure at all Xaa locations
  Clone ID: PAT_MRT4530_48779C.1.pep
MEPRSPRRFPSPPXAALSPSPLYLIVPRAPLLRFRRSPPSLPVGIVPAPSSSLSAVAAEFRFAAVVAPDLLPLRHRLHRLRRVLVDLVRSSVSPADRRSAAVSVHPNRAAAFSRFGIASIGFAASSSTSSAPPFRPPTAGAPPSPSTRTAPPPSPASAAVSVVAVDPGGASEPPPVGRTGEAAFGRAPRLPDPEVQETPVPEKATDNSKVPKVLMSHDSKSKDENNEKFMVTIFRGDCFGGECYVWLDFEDLHAIYHRDKMNVNYVAVRCMMQYMDAKKKNKPISFLDPTRICQTQHTVRLAPGSDQLKGKTPQEITEYKKGLHKEKVIIVAYDHYIYLIIHQKDGTVVVLDPLDYIHQSYKEFLTILQYVYNYYKFKGEEQTRTREKLLVHTYWPCHKQPIGTVFCGYYAYEFLRVNGRYKVNAEDWPVAGSGRLRDLERFRSRQGGGRVRAVRPPRAVPLPQRQRRWDDVTVTTGVGNVGGHPPPPP

SEQ ID NO: 148338 - protein, 53 aa, Oryza sativa
  Clone ID: PAT_MRT4530_4877C.1.pep
RPHKIHRSQNPSVVFFDKGKSSPQLLKTINCNKNNSLPKHLLQPKLLPQYSLL

SEQ ID NO: 148339 - protein, 63 aa, Oryza sativa
  Clone ID: PAT_MRT4530_48780C.1.pep
FAMTPVVCVAAFRSTSRYLRRCSTVRARGYIPVACRGADWGYGVCTTCTSEVQYELKDGVTKG

SEQ ID NO: 148340 - protein, 170 aa, Oryza sativa
  unsure (1)..(170): unsure at all Xaa locations
  Clone ID: PAT_MRT4530_48781C.1.pep
MKLPDDLAAVFTTRASSPHRSRLNPTSTSIQSGSREVGVILQPLGTVSTEELDGYLSSLGVDSRQPTEILDYDYFGYYYDFNNLDDFDDLDEDYEDNCTPLFFGVFMADNEXAAEQRARQEAERLRLEQERQAQEQARLQREQQERERLAREAEERRQCALASGRRARDL

SEQ ID NO: 148341 - protein, 377 aa, Oryza sativa
  unsure (1)..(377): unsure at all Xaa locations
  Clone ID: PAT_MRT4530_48782C.1.pep
PPVFPLKAAAAAEADASPAKFAVGFSQGTSADQDTRFSNKQAKLLKTQKFAPELEHLVDMTKVKMDVMKPWIATRVTELLGFEDEVLINFIYGLLEEKVADGKKIQIQLTGFSEKNKGKLMKYLXTPLMTAQQNASGMPLKFIDTKXADQQQTKRSAQEIRKKREKDGRKQELEKQKLMIASPIIWVHIVLYLKTAVGRXAGNSRLGPDRADAEEEKELDSKHSSRTKSRLVLPSXTGTTFKSVTSASHFRESLRSRSISLSPRGRRRSVSPRRRSPSPSRNSISFGRQQRSSRRSVSPRRSFSPRKRSPRSTPSMSRRRSPYSRRSPSVPRHRSPSPHRRSHIRRKSPPFVRQRSRVPHEEKCREEVAKRGKPARP

SEQ ID NO: 148342 - protein, 87 aa, Oryza sativa
  unsure (1)..(87): unsure at all Xaa locations
  Clone ID: PAT_MRT4530_48783C.1.pep
KKERRRRREDRPRRKPDRQASKLKPKACLTCXIWLQILKRIVESDSDADARKKGSYNGRDESDQQKLEIELREKALESLRAKKAINH

SEQ ID NO: 148343 - protein, 104 aa, Oryza sativa
  Clone ID: PAT_MRT4530_48784C.1.pep
QTTIRLVAADRFKEIEEATRERELAIEEELIEGVVQMEGEEKASARAPPLVCRAASSRGERKLTVESKVGSCVSGSRVGGGKGASELERGVGRINRGRRATTLS

SEQ ID NO: 148344 - protein, 167 aa, Oryza sativa
  unsure (1)..(167): unsure at all Xaa locations
  Clone ID: PAT_MRT4530_48785C.1.pep
SLLSHASPPPEQPSVKPGXLQRRRRRGSPFSSLLVKWLGXPMRPEHEGRSSARTARSGAVEFGSGPPLAGSGLDAQVGGEGGSRGXRPRREGRAEEATVAATAARGAHGGGGGGGRGSRTARRRLRREDLAATVAAVRGRASTAASLACVHQEAVGGGDVSFPRRLK

SEQ ID NO: 148345 - protein, 86 aa, Oryza sativa
  Clone ID: PAT_MRT4530_48786C.1.pep
RRRNVFFFSFSYLELVGVSGCMIIFNFSYALCLCCLVCLLSLMSSIVLLDWGPACLPWCNIWFWGGRKCFVWELGLPEAATNSFHN

SEQ ID NO: 148346 - protein, 87 aa, Oryza sativa
  Clone ID: PAT_MRT4530_48787C.1.pep
ITVCSCAHASVPEKDDAKALTIHTFDPNLTSLVLLSALILIRTFRSLMRCDEKNPLELAGGLTCSIMHTTGNRSFSCKLLTKKKRCI

SEQ ID NO: 148347 - protein, 454 aa, Oryza sativa
  Clone ID: PAT_MRT4530_48788C.1.pep
MKQLTSGMNVQKRDLAKTHNDEITACDWDYLGTQYDSSVVPESDLRFETAELLLETPKNGDAMPGKSFLPIVEANLENSRRKLFQGSADCYSQSAVDNIHAYCTSRGKEVATNHVSGILPCPRESQLIPDHHFSDSLEVPSDYMAMNPSAVSQHLRGLHRRSLFNDKVRDPTMGVQSVSNLGASTCATRHRSIPDDNYSKLVGSPVCALPNVDLHLVRMTEEMLAPNTSEMNTHNQGDYSSQATMPTSAGNSGQENPKRKRQKCQNDNVDSCKRCSCKKSKCLKLYCECFASKVYCSESCSCRGCFNDHSHEETVLSTRNRIESRNPLAFAPKVIRTCGPGLEFGEDSNATPASSRHKRGCNCKRSYCVKKYCECFQSGVGCSMSCRCENCKNSFGVRKGIERFETKEIERADRKMKDHPKEEQSEMDKYHALCEIWGVRSTENLFTTPSMDSR

SEQ ID NO: 148348 - protein, 646 aa, Oryza sativa
  unsure (1)..(646): unsure at all Xaa locations
  Clone ID: PAT_MRT4530_48789C.1.pep
NIPTLTDSISSKHVAKFKRLRCSLKKWSSTFAKLSRTIERCNKVILFLDRLEEFRLLNVPELRFRIIVKAHTAHLLNWQEXYWKHRFKQKLVLFGGENTKFFLAMATERFRCNTISCLQDLDGNQVFDHERKAAIFWSVFRDRMGVSDKPKMVFDLSEQIEDKGDLSSLCAQISTKEIVDVLKKMLVDKXPGPDGFNGCFYKSCWEIIAQDFYRLCADFWGGSVDLAAINYSYITLVPKMSAPQTPNDYRPISLMNFSVKILCKIFADRLQVLMLRLVHXNQYGFIKGKSIXDCLAWAFEYIHQCKHSKREIVLLKLDFEKAFDTVEYEEILNVMAAMGFPSQWNAWMKVIFSLASSAVLLNGVPGKFLXCKRGVRQGVPLSPLLLALGADLLQSIINKAHQRGILSMPIPIPGDDNFPVIQYADDTLIFMQASAPQLHALKALLNSFALSSGLKVNYSKSCMIPLKLTEDKAQMFAXTFGCSIGTLPFTYLGLPLGTTKPKVIDFAPLTDRIERRLXASSAFLSYGDRLTLVNSVLSLLPTYYMCSLSLPVSVIDSIDRARRHCLWRGNDLNSSKKSLAAWSKVCRPKDKGGLEVIDLKXKNRALLMKHLHKFYNRANIPWVNLIWLSYYGNQPHRRIHGRCWVA

SEQ ID NO: 148349 - protein, 158 aa, Oryza sativa
  Clone ID: PAT_MRT4530_4878C.1.pep
HASGAPTRGKLSYVLDGDNLRHGLNKDLGFKAEDRAENIRRVGEVAKLFADAGLVCIASFISPYRRDRESCRALLSDGSFIEVFLNMPLELCESRDPKGLYKLARAGKIKGFTGIDDPYESPLNSEIEIKEVDGVCPSPSDMAGQVVTYLEEKGFLHD

SEQ ID NO: 148350 - protein, 115 aa, Oryza sativa
  Clone ID: PAT_MRT4530_48790C.1.pep
MPSDFRRRHHTQTPSAAAASSAATTSRKLSYPDRLYRNLLPQEAVPRRLPPLQAPFAAASLIRILYVFEDGRMAGGGSDADGGGSGDGKEVIGGGMWEDHFAKESLEGLRSDFPH

SEQ ID NO: 148351 - protein, 789 aa, Oryza sativa
  unsure (1)..(789): unsure at all Xaa locations
  Clone ID: PAT_MRT4530_48791C.1.pep
MAAAGGGGRGGRPVEEDFIELSSSDSDSAGEGGGGGSAKRSRGVGAGGSAGKRARVSAAGVAVDLPPGFLDPLPHAASAAAGAEASAGPSKSATKQFWKAGDYDGKPLGDGAPQSCQLSGLDHVRVHPKFLHSNATSHKWALGXVINGATYVNIDMLENNKDKTRMLLVEDDGGGMDPDKMRQCMSLGYSAKSKVASTIGQYGNGFKTSTMRLGADVLVFSRSGGKGGKRLTQSVGMLSYTFLRSTNKEDIVVPMIDYENQQGWKRKPRTTFADWNTSLQTIITWSPYSTEAELLEQFSSIKEQGTRIIIYNLWEDDEGHLELDFDEDIHDIQLRGGNRDEKNILMAKQFPNSKHFLTYRHSLRSYASILYLRVPSFFQMILRGKEIEHHNIVTDMMLKKEMVADVTIGFVKDAKHHVDVQGFNVYHKNRLIKPFWRVWTAAGSGGRGVIGVLEANFIEPAHDKQDFERTTLLARLEARLIQMQKDYWSGNAHRIGYSGTRAGRSNETEEDAPEVTQSAQQSPYSTGKNYGKSNKKQSPYSTGKDNGKSNTKSGKASTSFHTQRRTDKSATTKQPGRSIMYGLSDTSDESDSEFVGAPTPTSSRSHILNPHRKSFQNGTALETTPTYERTERKRYKSLSHPVKLNATSLGDYNIGDNHTINMYQMDENSXVEXSDIVTQSQIRLMKVEVKLSQELEIERAKSKSLTERQTKCLTQYLLSGSHFLMQLEDTQRQLETSNKEQLALIDIFSEERGRRDLEEENLRGKLKDASSTIQDLLEQLNAARKGRKF

SEQ ID NO: 148352 - protein, 100 aa, Oryza sativa
  Clone ID: PAT_MRT4530_48792C.1.pep
ISCFLNKKKKNFLTGRGGGANFFQPGILFFQGHRGKNPLQEVWGFLHCREFGSRARFFCFFFALYIGVSPRGLKGPGWFFPPWGFFFFIFSKIWGGGVKK

SEQ ID NO: 148353 - protein, 53 aa, Oryza sativa
  unsure (1)..(53): unsure at all Xaa locations
  Clone ID: PAT_MRT4530_48793C.1.pep
RQKLGKSGGFGGGGGGEPILLGLGARARAGGRRIWRDMGGNXGHGGFGLGSRR

SEQ ID NO: 148354 - protein, 75 aa, Oryza sativa
  Clone ID: PAT_MRT4530_48794C.1.pep
MALLAMEGKGSAGFSVTAEGFFLESSLRRPTSREEDVSSKIFTLIERMALGELGQFSVYFLTKAIPSQGRLGTYL

SEQ ID NO: 148355 - protein, 59 aa, Oryza sativa
  Clone ID: PAT_MRT4530_48795C.1.pep
LHKLDLPDSRAVGIPAVDLSPCKGHTVVAVEPLKERAICAAQQALAVGAPVSFAPCVLV

SEQ ID NO: 148356 - protein, 71 aa, Oryza sativa
  Clone ID: PAT_MRT4530_48796C.1.pep
AAHFFFFFLVQIVVYSYSLNITAPQKHTLKLVVHSMKIIAVQKGETLEKKHNGANLAQEPRPRKFPRAPHI

SEQ ID NO: 148357 - protein, 36 aa, Oryza sativa
  Clone ID: PAT_MRT4530_48797C.1.pep
LVFDLVGGALPFVLVLGGLTHLTVVVKLSVHVPIVN

SEQ ID NO: 148358 - protein, 41 aa, Oryza sativa
  Clone ID: PAT_MRT4530_48798C.1.pep
LRACTTHQGNNFLSLGFHLTMGKRHCLFFKIKSSRSRTQIL

SEQ ID NO: 148359 - protein, 96 aa, Oryza sativa
  unsure (1)..(96): unsure at all Xaa locations
  Clone ID: PAT_MRT4530_48799C.1.pep
FSEPGAECTDSSGTPPXFLLGSCTRRGRSRMSAKLPGTPPELLLTLYLILMYKRYNRASCNSAQSCVFXSEKETSLYRFQMTVRGMGNDQNTLQPP

SEQ ID NO: 148360 - protein, 174 aa, Oryza sativa
  Clone ID: PAT_MRT4530_4879C.1.pep
MGVGGSFWDLLKPYARHEGAGYLRGRRVAVDLSFWVISHSAAIRARSPHARLPHLRTLFFRTLSLFSKMGAFPVFVVDGQPSPLKSQVRAARFFRGSGMDLAALPSTEAEASADAPVQPRNAKFTRYVEDCVELLEYLGMPVLRAKGEGEALCAQLNNQGHVDACITSDSDAFL

SEQ ID NO: 148361 - protein, 43 aa, Oryza sativa
  Clone ID: PAT_MRT4530_487C.1.pep
FRLSDKFRGLYSKPLCVQAPTTFSSSPETPMNSRQDIWDYWVP

SEQ ID NO: 148362 - protein, 247 aa, Oryza sativa
  unsure (1)..(247): unsure at all Xaa locations
  Clone ID: PAT_MRT4530_48800C.1.pep
MTGRGETRPTTTMGYIGGDATAVVAHASRGGGGNAVEAVSKACHSAVAPYGGRVPFDYGYDAQLQTARVHNHRWRALCLWGRKQCGEREMGEKVRITXPPNYRGCPNYTPKPQNRTFFTPNYANRTNYPPQPNPRWFWSTWQSKRGGGSGGGERRGRRRRGGGGGELXRRERRRRGGGGEASAAAVRQAAGAEEARRRERRRRGSDGXGERGGGGGGGAAAERRGGGGAEARRQRRRGGWLGDDVAP

SEQ ID NO: 148363 - protein, 139 aa, Oryza sativa
  Clone ID: PAT_MRT4530_48801C.1.pep
AYHAAPAYAPAYGKAVVDEYDPHPQYSFAYDIQDAHTGDYKSQHESRDGDVVHGSYSLVEPDGSKRTVEYTADPHNGFNAVVHKEAGAHPVAYAAPKYAAPAYAPVAKYVAAPAYAAPVAKYAAPAYPAYAAPVAKYVA

SEQ ID NO: 148364 - protein, 492 aa, Oryza sativa
  Clone ID: PAT_MRT4530_48802C.1.pep
MKEWMPKPIEIEEPVVVQAEKEKQVEKDEQRVVKDDLLPKEDMDINMVCMLPMEFCAMDEVEVAQLSLGPRDAVFEKADESNRHMKSLYLNGHIDGKPISFGRGDDELKKTNMTLNSFNGEPMEAKGIFSVELTRGNKTLPTAFFIVDVQDCFYLVLACFFDLLARIRLICIGKINNPRRGLHKGKRDGHAQPRLLHHQRDIATSSRIAYEGAQNIHHEEKSDMLEMSSPSLTKEEEKTDAPTLSEEGIKGKLNGADITQVFHCVLILSMMFTLLMMLRNVILNGLCDEHRIEKSRTVFREEGEDDVTMATTDTTIAHIMEEQDNIKIKSSKCWNPIRPPTTLLNSIGRRICIQPPFLTRIRLICIGKINNPRRGVSITKAQHNISYGCSQIVMFLPNRSYLQLTERSGQQQLRVHHKDRLRIHRSLLPDIALLRTRTGRTSVILRVVTTSYLLWDAEKTPEINYRDTASKQLITYLNVSYALKQSLYFSGL

SEQ ID NO: 148365 - protein, 105 aa, Oryza sativa
  Clone ID: PAT_MRT4530_48803C.1.pep
KYLAPLGLQRVKVNRIQRFSKAYVEEEWTYITELCGVGKYAADAYAIFCAGRATEVVPADHKLVDYWKYVCFELPMIQQSQDMQEAGVTEMEHAVPKVEELAVCC

SEQ ID NO: 148366 - protein, 51 aa, Oryza sativa
  Clone ID: PAT_MRT4530_48804C.1.pep
DLFVKFVIGLHLTCLPLHALSSMVATINAMLICANLHLYIGRMRPANYSVE

SEQ ID NO: 148367 - protein, 83 aa, Oryza sativa
  unsure (1)..(83): unsure at all Xaa locations
  Clone ID: PAT_MRT4530_48805C.1.pep
XGXXXKXSREXXXXXAXXGQXPDRXXWXSQGXVAKXPPVPXXASXAXPXSSTTXPSXXAAXARXAXRGXPXVVFLKXHPCSQG

SEQ ID NO: 148368 - protein, 75 aa, Oryza sativa
  Clone ID: PAT_MRT4530_48806C.1.pep
SRTSGSPGLQEFGTSLSASPADPLGLVFRRHDDHWDRLQRAQRLQTSNEAMSQSHIRLAAAAGHRRRLWTVMALV

SEQ ID NO: 148369 - protein, 75 aa, Oryza sativa
  Clone ID: PAT_MRT4530_48807C.1.pep
VIVYHIIEINGPPVSAPGSQISSTKKVFFLLKTKLNGHFTFMDAMYLGKTKISSLGELGKCSKNILFFFPKYKAA

SEQ ID NO: 148370 - protein, 59 aa, Oryza sativa
  Clone ID: PAT_MRT4530_48808C.1.pep
RELGAPNLGDPIFKVFPDSRKGDLKGGGENLRGFLKVEIPNGEGGVCYWLGKFGYKLGY

SEQ ID NO: 148371 - protein, 62 aa, Oryza sativa
  Clone ID: PAT_MRT4530_48809C.1.pep
RTPTINRPARCFSFLSFTGSMSALPSNWYSNKAQCHILGSSSHEHLMNNQHYEFSPPHSVVV

SEQ ID NO: 148372 - protein, 85 aa, Oryza sativa
  Clone ID: PAT_MRT4530_4880C.1.pep
KCKQKPPGGSMCGPHPILYPKKKETGRILEKKKKLVKVVQSPRRQGGAPKVNRPARSGKKTFFFWGGQPERFAPSPGGRGPKKTS

SEQ ID NO: 148373 - protein, 422 aa, Oryza sativa
  Clone ID: PAT_MRT4530_48810C.1.pep
MGISARWLKSLVGMRKVEKQQQQSKEDGDGGRVAQKRDGANHFHCQNQHGQDHDNLGAPEEFPDENGPSEGDSNALSCSEPAFSSPNVPVPQTEEELKEIWAATVIQTVFRAFLARRARRALKGLVRLQALVRGHIVRKQAAITLRCMQALVRVQARVRARRVRIALESQTDQQAILQEKINETHVREIEDGWCDSIGSVEDIQAKLLKRQEAAAKRERAMAYALTHQWQARQHAAITAFQPDKNSWGWNWLERWMAVRPWESRFLGSYAADGIPVSSGAMQDEENAVYTPHKKHVRRQTSTLHSNILNQKTCLPNSEGGGSSSNRSGGSASAKSKLKLSSREGCDEISSRPSGLGTRSSSNPKERTGHLDPQGNKRFSLPASCVEAGKRMTNKSAVNRSLKVTKHHLASSIELPRRVELQT

SEQ ID NO: 148374 - protein, 145 aa, Oryza sativa
  Clone ID: PAT_MRT4530_48811C.1.pep
LSTDFTLYLNQYSRVTSFPDRCIGVGLVSDYSDALCRLQGCRVVFSNVSAVLRLLDTINRGYILRMRGGPLMVTAQYGYSSALVYNPKLIPWGGYSSVFSPGCMVMMGCRKELGRQGWLLETPRGHWVRGIGYMTSARSISFVKR

SEQ ID NO: 148375 - protein, 513 aa, Oryza sativa
  unsure (1)..(513): unsure at all Xaa locations
  Clone ID: PAT_MRT4530_48812C.1.pep
MGSTGDCGNGKAAAGGGGLVVPEIKFTKLFINGEFVDAASGKTFKTRDPRTGDVLAHIAEADKADVDLAVKAAREAFEHGKWPRMSGYERSRVMNKLADLVEQHADELAALDGADAGKLLTLGKIIDMPAAAQMMRYYAGAADKIHGESLRVAGKYQGYTLREPTSVPVMSLMKFKTVEEAIEKANCTKYGLAAGIVTKNLNIANMVSRSVRAGTVWVNCYFAFDPDAPFGGYKMSGFGRDQGMVAMDKYLQVKTVIXPSRTRPGTDKSNQAAAIARXVPCTMNAAACVVFSDVFLLNSAAXLVWLYVVWLWGEIWCRLKGVLMIMXDPCLVELVEKWMYRTHVPSFEIVQNVXSQVDKVQFERVLKYIEIGKNEGATLLTGGKPTGDKGYYIEPTIFVDVKEEMTIAQEEIFGPVMSLMKFKTVEEAIEKANCTKYGLAAGIVTKNLNIANMVSRSVRAGTVWVNCYFAFDPDAPFGGYKMSGFGRDQGMVAMDKYLQVKTVITAVPDSPWY

SEQ ID NO: 148376 - protein, 78 aa, Oryza sativa
  Clone ID: PAT_MRT4530_48813C.1.pep
MATGLYETTPDGHRSRSLIRWDLFTKTGKSSRAQAMRARRRPAALLPDLDEKAKERQLYNSTPDSTPGVKFRSWSSTK

SEQ ID NO: 148377 - protein, 494 aa, Oryza sativa
  Clone ID: PAT_MRT4530_48814C.1.pep
MARGKVVLMVVVCLAVAAAAASAASGGGHSRGRPGKSARLQLVPAAPGASMAERARDDRRRHEYISARLAASRRRRRAEETSSVSSAGAVAASAFAMPLSSGAYTGTGQYFVRFRVGTPAQPFVLIADTGSDLTWVKCRGAASPSHATATASPAAAPSPAVAPPRVFRPGDSKTWSPIPCSSETCKSTIPFSLANCSSSTAACSYDYRYNDNSAARGVVGTDSATVALSGGRGGGGGGDRKAKLQGVVLGCTTAHAGQGFEASDGVLSLGYSNISFASRAASRFGGRFSYCLVDHLAPRNATSYLTFGAGPDAASSSAPAPGSRTPLLLDARVRPFYAVAVDSVSVDGVALDIPAEVWDVGSNGGTIIDSGTSLTVLATPAYKAVVAALSEQLAGLPRVAMDPFDYCYNWTARGDGGGDLAVPKLAVQFAGSARLEPPAKSYVIDAAPGVKCIGVQEGAWPGVSVIGNILQQEHLWEFDLNNRWLRFRQTSCTQ

SEQ ID NO: 148378 - protein, 65 aa, Oryza sativa
  Clone ID: PAT_MRT4530_48815C.1.pep
MRRQWHGKFAMAWILVVLLASLASSGHPPRVSTTVLSPSSSWEPIRPARVVAIVHLPSEEEEEEV

SEQ ID NO: 148379 - protein, 100 aa, Oryza sativa
  Clone ID: PAT_MRT4530_48816C.1.pep
LKQMRFLIMAAIRWVVLAYIVVIGCATIARGDEQPLSRIAIERATVAAVDSASVKAQPTVLGLKFSMQYQHADYTEVARDAEAELITRGRLSFGLFGASA

SEQ ID NO: 148380 - protein, 232 aa, Oryza sativa
  Clone ID: PAT_MRT4530_48817C.1.pep
MARQARYQNLLGLNPRTESRSLIWCRRFSVRPNCLGLLYRKNCFEKTLEPGIYSFWDFRSELELFLIPRSDQFFIVTNQEVLTKDNIPLRFSYIVNYRITDGQKLLTYIDPAQMGYIEGLASMIQTLIHPLTQIYWRSAISVINSLELNEQWEAFIPNIPDELQESAQKFGVMIEAMKLRDITFPKNIQTLFALQLEAKIRGQTDLENARTEVATARALKNASQLIGDDPLE

SEQ ID NO: 148381 - protein, 60 aa, Oryza sativa
  Clone ID: PAT_MRT4530_48818C.1.pep
KIIINLEIKKKNIFRQKNKSKVREKLKKLREKALGPDDKNGAIRKKEYLKKILIKPNISE

SEQ ID NO: 148382 - protein, 324 aa, Oryza sativa
  Clone ID: PAT_MRT4530_48819C.1.pep
MAAAAPALPAFASLLLPSSSSPPRRIPWPRPLPSRRGALRPVKLLPAISAVEKGKGAAAEAKEVELEGMPPEYYDEEWQARQREKTKEWNAYRKKEEAEEERLTNEYREIGMRLKAYPQEEVRKARILVSSFIRAGEDIEEEIEKAAERGELTELVLMVIWNRLDVARRDDERDAIRSLDLLYRRVETEILRSEATPAMRLLNDLLNLHDGSDDDKWLKKCKKHMLEVFPREDPFTMVFPAGFNMEEHQGQIKLPPQDDDVLLRVDFIREVDELLKEVQAAHENNKVPTGNDPEAVATKLKYQEKLRTIRQVESLLELASSLKW

SEQ ID NO: 148383 - protein, 102 aa, Oryza sativa
  Clone ID: PAT_MRT4530_4881C.1.pep
PGAVAQPKATEERIPPRANARLRGGTAQAEKQTVRRRRELGERLQDTHCLCSKASFTVPATEKKMFGQRWLHKQNQIISSKSRVTYGIRHILFINLEHDKRK

SEQ ID NO: 148384 - protein, 118 aa, Oryza sativa
  Clone ID: PAT_MRT4530_48820C.1.pep
ASGGRLHRPAPLHGPSSWHHALGAALCRSVRSCSTQLSFTPACAPGDNGKRGSTARAQSSSTRTSSTSPGRRALTLHERSQDYHCAIRRTAPGIRTTLISGIQDGGPGHELHPLGVRL

SEQ ID NO: 148385 - protein, 155 aa, Oryza sativa
  Clone ID: PAT_MRT4530_48821C.1.pep
NKHAGYCPSKFKPTLQHGSSFLDQNKCSEEQKRIQQQAICINLYIMFSLLPIERHSAYGTSSKLPVNKKTKPSTSAHATVSFVLLSSKNISCTGQNYILPRIGSLTFISFMLAFDVGVSVQAGSRPYHVNQDWLMSHSQTMHCLLFKLQHPKCQN

SEQ ID NO: 148386 - protein, 56 aa, Oryza sativa
  Clone ID: PAT_MRT4530_48822C.1.pep
GITGQFDQRRTIFQRCIYTRKLLCAAETKESVVNANFDPLSDPQDKMLGYILEWIS

SEQ ID NO: 148387 - protein, 561 aa, Oryza sativa
  Clone ID: PAT_MRT4530_48823C.1.pep
MTLSLAIDDYGDARAPPSSAARARLYRKNNMLTSSWQLARARRLINEVDHEPGNRRRINIRTRRPVSGSWGGGTRSSPVSTPRSRHERSKSVATIFSPSSPEVTHWLVQSYGGVVMEMEEKKTSCTLQEVDGLRQSDGGVDKEVVGGGAACSDDRVRLLEREVATAKATEMNMLESLIQQTKEMEQAKIALEEAKLEVATLRQQQGRAPAAEPAAAAQWSVMDLMFGGVDEEINGLRAKLRAAVQAEEKSRKAADDLTAALSAVTMEAKQVKAWLSDAQAELEDANAEVDRLRESLHAAEAELWSTTEQLDGLTSDWKEAAVSWRAREKVLLARVRAAEDEAHAAGQENVELAELHRVVDDENGSLRRALERAVEEVNAANESLELATGENSKLQDAVAEKESAMEALRQENESLKASEAEARGRAKELDGQLAAARKAADHGHGAGELAAAADPLSSLHKWRGDMHGKLSATFLDSNRVMAGRKDRMFASLSNIAELKSAAAAAAMDDFDYEFDHFDGGQYGDLDHAMKQKKRRSILRKFGDFFRRRSLYKRNLAPVIHY

SEQ ID NO: 148388 - protein, 111 aa, Oryza sativa
  unsure (1)..(111): unsure at all Xaa locations
  Clone ID: PAT_MRT4530_48824C.1.pep
MEQKTXTQQHTKNEGTKEQTPHEPTPRRETATSGHRTDEQTKRPTRKEGASAQRQRGRRRPRTTDKKTSGQKENTPRRRRPSEDNNNQKPDRPRGANKTANKKQREHAAHG

SEQ ID NO: 148389 - protein, 154 aa, Oryza sativa
  Clone ID: PAT_MRT4530_48825C.1.pep
MASPTTMVGVATSAHLHTTTTGRLSCACAPPTRGTRRRRLAVAVRVRVRVRASASEAMATEKLGVRVERNPPESRLSELGVREWPKWGCEKSKFPWTYSAKETCYLLQGKVKVFPDGAGEDFVEIAAGDLVVFPKGMSCTWDVAEAVDKHYKFE

SEQ ID NO: 148390 - protein, 253 aa, Oryza sativa
  Clone ID: PAT_MRT4530_48826C.1.pep
MAATALQLPVASSQRLTLRRFPGSGSLGRYSGLRWPVAAQARRAAEEGFRLRVAFNPSGNFDLSLSTDQDDAPQVEPPPPPTEGRFEIVINTDIIRTLDLSPVHEVLGDLNSLTPAQTRNLLDRTVGFTINYEREDPYDVRELSEFPDIRLWFVRLDACYPWFPVVLDWRAGELARYAAMLAPHQMSMRLGVVFNPEALELFVMKKVFIVYSWLKQQEHPKPGLKTADMARMLGFGIGDELFDLIEKYPAGPS

SEQ ID NO: 148391 - protein, 111 aa, Oryza sativa
  Clone ID: PAT_MRT4530_48827C.1.pep
MAGSTGKLLRREVTEIVFTVSNIRAVLQHGAGHLELQRLGAELGGGAMLGGRRSGRRQHVSGFGAGTASVAELAKEKGGSRRGGGGWQWILGSSPVVASATGGEMVCSPGW

SEQ ID NO: 148392 - protein, 79 aa, Oryza sativa
  Clone ID: PAT_MRT4530_48828C.1.pep
EEQWEGSRGQSGSKQHTGSGVGHDNGKKGDAHGGDCEDDDDDGSSTSSGLDRQDPVECAPLDRIPWNALHSIAWLVKLS

SEQ ID NO: 148393 - protein, 532 aa, Oryza sativa
  Clone ID: PAT_MRT4530_48829C.1.pep
MAVWGGLGQAATVAQLVGADVGGLISSIIQAAATARQNKRECDQLARRVVMIADLLPHLQDPEVMRRPEVRRPLAELGDTLREAHELVASCQGRSAAYRFVMAGRLADRFRDVQSKIDSYLIVFPFIAHIDITRRLDQIYRILAPNDTAAASSSSSAGSSQSDQIYNILVSNDTTAASSPSSAGSLQSPDALEFARISQGDGGEEFTVKELVAATNNFANEIGRGSSGSVYKGRLRDGREVAIKSLVKTSPDHGREESLMRGLAILSRLRHDHIVRLLGFCVVREKKRESTLLLSFRKKKKAAAERQAGELLLVYDYMENGSLADQLHGHLSSSSSSSPVMASWKMRIKMLLGVSRGIQYLHHGATTTPIIHGDIKLSNILVDSSWVPHLTDFGAAVINGMERPSTVVHGTAGYIDPEFYSTMNQTRSSDVNSFGVVMLEMLTGKRPIFIDRKEEGEVTNLVAFSLPIIEDGELGRLLDRRPAEPTARQLEALEMVARTAARCVQLQRKERPAISEVVAILETELDLLLRDG

SEQ ID NO: 148394 - protein, 63 aa, Oryza sativa
  Clone ID: PAT_MRT4530_4882C.1.pep
SKLKALRAGTWQVTFQCYFRDYEVVRKEQNNDYNQKLIMCTQFRVPLEGRKSVGNLTRGIPRA

SEQ ID NO: 148395 - protein, 127 aa, Oryza sativa
  unsure (1)..(127): unsure at all Xaa locations
  Clone ID: PAT_MRT4530_48830C.1.pep
PPPPPPPPSGSTPVLWFRRHREQGEERWGGSKGEAGVGHHQQASQPPRPLRSGPGVLRRSHGHGVPRLFASLLRSTAAPRTPSTPXCLFNRAVAAAYSSSAPXNGQGFPLXQSETASRLXLFSSPGD

SEQ ID NO: 148396 - protein, 116 aa, Oryza sativa
  unsure (1)..(116): unsure at all Xaa locations
  Clone ID: PAT_MRT4530_48831C.1.pep
MENATLSNCASSADILSNRGSSTALPVERGLFVINGEHDPVELRQFDGYPVEQGQFDSPACRTGAVRQVLSNGSLPISSPVALWPFDRRPIELHPSXRDLLSRFSPXVDPYFCDFP

SEQ ID NO: 148397 - protein, 131 aa, Oryza sativa
  unsure (1)..(131): unsure at all Xaa locations
  Clone ID: PAT_MRT4530_48832C.1.pep
MSRHRHAPPPPSAATVTGLTPGLQGGAAEREAQSLGILLSTLDNLAIDHPRIDLAIDGANEASIAAFDVGREKAAAAAEFAGRRSFKTMPLTNGDSSADTTTRRNAEDFLVILLKVXSAHWNLIAAWRGLG

SEQ ID NO: 148398 - protein, 120 aa, Oryza sativa
  Clone ID: PAT_MRT4530_48833C.1.pep
MGRPDGLGNSRGGGTPDMDSPHFRFEVGIVCRGAMEAHSPWSGCRNARVTEKLGSDKSHVLGASWSAGLKAYIHCSVKYGKQYESGCEGKPDQARLGLDLDDVEVPLETTPEEGEPEEMP

SEQ ID NO: 148399 - protein, 363 aa, Oryza sativa
  Clone ID: PAT_MRT4530_48834C.1.pep
MGTCLTTAEQRAMEVPAASVKGGGGRRSDEEAPGRIAGNGAGNVACLFTRQGKKGTNQDAMVAWENYNGRSDTVFCGVFDGHGPHGHLIARKVRDILPSRLCDLIYEDCGDSPTSNSDVSTLEENLSPYADAECRSPTLAGQKEHQEFFNAMKESFRKAFKNVDKELKLQRNIDSICSGTTAVTLIKQGHDLIVGNLGDSRAVLGTRDQNDKLVAHQLTVDLKPDHPREARRIRRCNGRVFAHQDEPDVARLWLPNCNSPGLAMARAFGDFCLKDFGLISVPDVTYRQITEKDEFIVLATDGVWDVLSNQEVVDVVASCSGRFAAARSVVDLANETWRFKYPTSKTDDCAVVCLFLNKYEVTG

SEQ ID NO: 148400 - protein, 41 aa, Oryza sativa
  Clone ID: PAT_MRT4530_48835C.1.pep
FLPRQLKEHLVKMLIAHRIHCELLISRTTCPDNDGCFYWKI

SEQ ID NO: 148401 - protein, 52 aa, Oryza sativa
  Clone ID: PAT_MRT4530_48836C.1.pep
FFFFFFRKKNIHGRKSVSPRSCPPTIAVISGQILLKIAGHHAVSVSQCDRMT

SEQ ID NO: 148402 - protein, 252 aa, Oryza sativa
  Clone ID: PAT_MRT4530_48837C.1.pep
MAEEGYKVVLNVYDLSNGLARQLSTSFLGKPIEAIWHTGVVVYGNEYFFGGGIQSLAAGRTPYGRPVRVVEMGETHIPREVFEDYLRDISPRYTAETYRLLSHNCNNFSNEVAQFLVGAGIPDYILNLPAEVMSSPMGPLIMPMIQNLESTLRTNAAPQATQFVPSSVPPPPPPQNKPGEGSSSSKQEDKAAKAKQGSAADPLGGARGKVQEEVMREFAAIMASGTLRASEAAALAMRRVMERHGNATMQQS

SEQ ID NO: 148403 - protein, 59 aa, Oryza sativa
  Clone ID: PAT_MRT4530_48838C.1.pep
MSIAETGDWAAADFGEDGVPVAGVDPDPEPEEDGAGAATLMQNLDGELVTPQKVCSVLF

SEQ ID NO: 148404 - protein, 104 aa, Oryza sativa
  Clone ID: PAT_MRT4530_48839C.1.pep
TRLVPPPPPRAARRGGRRLLSLALSPRDGVKRHLIPRPRPLAAGSCRDWFVTSATWQPDDLLPRILLLPRSTLHSLCLILLINIYDRSSLLACADSIFAVLLLC

SEQ ID NO: 148405 - protein, 80 aa, Oryza sativa
  Clone ID: PAT_MRT4530_4883C.1.pep
MGHPRLQAGPARPDGWWAVPGREAQPMDSAQHAREKEDDPLWSNREQSREALPKNLIAVFSRCRTSKAKFTDCAITGLVK

SEQ ID NO: 148406 - protein, 353 aa, Oryza sativa
  Clone ID: PAT_MRT4530_48840C.1.pep
MRRCMHSGVATETRMEARGGLKLNRGMHPRVAAKACMEARRGLKHNRCSTSTSLKEIISTNLLILVALSYLVHAVSAQSLDEPFRGTGAEIYEMTYDLKQDQQASFIVSFIDCATKESEFHLGTLKVLRNQTDTDREVPFGWILPRLIARKGSVTLAFRTDNLYLIGFTDKYGGWYSFNGYKVLIPGSTELEINGGYGEGGMGGFRKLEDLPLSRRHALDAVDILWDYDPSTTPKEVLQNATATLLLVIPESARFKEVFEPVIADWDSNEGISLKEKIKSIGLLHNWGMLSSVGMIGLPWDSSEVQGYVKKMRKDEVYINSKEDALRPLKVLLMSKAMRPKELVIKRINDPQS

SEQ ID NO: 148407 - protein, 572 aa, Oryza sativa
  Clone ID: PAT_MRT4530_48841C.1.pep
MWLFQSFFVPQLLHGAVVGGCYFQPRRGTAGHTSRVISGRTAWLAVSELGEEYDVVQTRLRGLRSQGLTGAMVFGDYFRRRIVPLQERSRGTWEYTGPNDPMRTHVGERWDWGEDDAKTVIRRVLGLDTAEQTLIPDRILPICSDRDRESILAVMSAVGAGRGRSRRGSAVGMGSSGATVGGSRTSGSGGGGSSRAPGPSRGPGGDSANDPKGKRKMSKSRPPSPPCIGGAERVADRPKLDGRRSGSGRKVLATADSTVREGLNAQVQAPAEERAALEAEWAQLVADRARVDEGRRAVDDMVEVGRKMRQAQLAEIQTREEAALITSSILDEALGDIRLQYEAYAKDLTKRVENACGVIDAAAAQERRASEADASLRARTAALEAERKALDERARSAQEFEATVRRRIEVLDRNQREQDARSREQAQRAQELEEQAQALEEQARLLDQRESTLAAHERTATEAEASLRLREEAAAERDQTTLAAKASAARRVEELRLREEACRERDAALAERKAEVNRHEVATRRLRVTPRNSRIEFQVECALKSPSRTGRGTQATKLTYRSTSYKHYKSLT

SEQ ID NO: 148408 - protein, 64 aa, Oryza sativa
  Clone ID: PAT_MRT4530_48842C.1.pep
DDAATVKAHRGVGVMATIGTCQLCGDVAVALENSSLVGDIAIGDIGGGHGLCEGLCRWVDTATA

SEQ ID NO: 148409 - protein, 207 aa, Oryza sativa
  Clone ID: PAT_MRT4530_48843C.1.pep
MRRRPLGALPPSLSAVCGRWRSARRTRRQWAAPRRALEDKGGGTAAGADTAWGGGMAAEVARGVEDNGRWQWDNGKRGSVAALFFRMEATDRLAPSPTVLRHPALWPSAVRTSDGDRRRMDLRRQALSATPLLCHSGESFATAKGYSHLFTATRCTAGVVGPPPPCRSDGAPNSPAGQLLRSCCLSPTQIPHRRWAPAAGYRDLSSV

SEQ ID NO: 148410 - protein, 226 aa, Oryza sativa
  Clone ID: PAT_MRT4530_48844C.1.pep
MAITLSNVNSEAGLQKLDEYLLTRSYISGYQASKDDMTVFTSLPSAPAASYVNVTRWYDHISALLRSSGVTAEGEGVKVESTACSVSPTADQKAPAADEEDDDDVDLFGEETEEEKKAAEERAAAVKASGKKKESGKSSVLLDVKPWDDETDMAKLEEAVRNVKMEGLLWGASKLVPVGYGIKKLQIMMTIVDDLVSVDSLIEDYFYTEPANEFIQSCDIVAFNKI

SEQ ID NO: 148411 - protein, 116 aa, Oryza sativa
  Clone ID: PAT_MRT4530_48845C.1.pep
MAEKLKRDVRILFGTCNDILEKMNLIDAVHRLGIDHLFQEEIGSAISDIKGSEFTSSSLHEVALWFRLLREHGIWVSPGDSELHLFALILWNNFSVSVRTNHTTTSVSNCSNCLSI

SEQ ID NO: 148412 - protein, 886 aa, Oryza sativa
  Clone ID: PAT_MRT4530_48846C.1.pep
MAAVARMAAAVVCLPSSSSSSSACRAAPLPWSRGVVVGVRRRRTVARAARRRGRRPGRRGLVIVDEFAGQYEEGFEDVHTEIMNYFTYKATSTVLHQLYEMNPPAYTWLYNYVVVNDPKEGKHFLIALAKERQDLAERVMITRLHLYSKWIKKCDHAKMYEKISNENLEIMRQSAQARYIIVPYTSLLPSDLGCHNSIDLCQLQNRDYSQEIFTACQVVIELIPKDKLNFTESNHNGSATIQLQEDAFYNKAVKLTKDELNGKITQSVGRAIYTDPVPLWDSTTGQLASFTTRFTFKIYAPTNDSSYGEGLAFFLSSYPSVVPNNSMDGYLGLFSNSNDQSDPLNQIVAVEFDSHKNTWDPDGNHVGINIHSIVSVANVTWRSSINDGRIANAWVTYQANSRNLSVFLSYQDNPQFSGNSSLSYSVDLSKYLPDKVSIGFSASTGKFVELHQILYWEFDSTDVHLMKTEKTKGILVISLSTSGSVVVCSIGLVCFFLCFRRIRRTTRSREKEKEKLDCDESIDSEFEKGKGPRRFQYNELVVATDNFAAERKLGEGGFGAVYQGFLKDQNIEIAIKRVAKGSTQGRKEYISEVKIISRLRHRNLVQLVGWCHEHGEFLLVYEFMPNRSLDKHLYDGGNLLAWPLRFKITIGVASALLYLHEEWEQCVVHRDVKPSNVMLDSGFNAKLGDFGLARLVDHDRGSQTTVIAGTMGYMAPECVTTGKASKETDVYSFGILALEIACGRRPVVPKEDNDRISLVQWVWDLYGRNEILNAIDGRLDGEFEEREVISLMVVGLWCAHPDYNIRPSIRQVISVLKFEAPLPDLPPKMPVAMYFAPPISLCRFSQSSNGTLKELERPNSYGNTSSSSATNDSCAPPSVRLPEVGY

SEQ ID NO: 148413 - protein, 65 aa, Oryza sativa
  Clone ID: PAT_MRT4530_48847C.1.pep
ILYQTFEQIHNVRQQRYAVIPQMHAINIKHKAQECSPTNDIRRYTRKITRVASHSICSQNALEAM

SEQ ID NO: 148414 - protein, 95 aa, Oryza sativa
  Clone ID: PAT_MRT4530_48848C.1.pep
GAGAHGHAVVVVVDGGRADGHVVNSQTMHRVYAPGSRHHRPRPRRPLTERARAHRVSQRVGHGSRVRRQGVPPPPPPSARSPAMPRLRVAAAVES

SEQ ID NO: 148415 - protein, 85 aa, Oryza sativa
  Clone ID: PAT_MRT4530_48849C.1.pep
HESPSVALAVPKIRSSCPVPVARRRRAPRLLQLHELTGHELISESSLFLARTIRRIATTSCITEKAHAICNWCLRINVLFHMPVH

SEQ ID NO: 148416 - protein, 49 aa, Oryza sativa
  Clone ID: PAT_MRT4530_4884C.1.pep
MAVCNRQGVWLLDPFVSVDLHGGPLCAGSHDAALIPFPSSYAPVVKGKL

SEQ ID NO: 148417 - protein, 124 aa, Oryza sativa
  unsure (1)..(124): unsure at all Xaa locations
  Clone ID: PAT_MRT4530_48850C.1.pep
RISDEDAAQQRRPEDVNQENATQRWVQDGIGKGGGNFLQFVANARDDVGDQVHDRAEALTVVSWTPDADALRRDLQHPFLEKRIELFHYVQNACLALSLAQXDASMPSKTWLLAMAGEARSKGT

SEQ ID NO: 148418 - protein, 76 aa, Oryza sativa
  unsure (1)..(76): unsure at all Xaa locations
  Clone ID: PAT_MRT4530_48851C.1.pep
DVETKKKKKKRKKKKKKKKKKKRDYKIKKKEKXHKSKCKQKMNSLKKSKKKKGGRGFKRTKLVTRCGNLKLIVWGI

SEQ ID NO: 148419 - protein, 149 aa, Oryza sativa
  Clone ID: PAT_MRT4530_48852C.1.pep
MTPPFRPSPSAGSIPRGCGGDRCASGRDAWPLHHVRHDGVFCRLCSSCVLLYHPAAFCSACLLLFPPASASASASAATAVQEPRLDPILSPPGPTAACSSCGLFVAHHSCVPDSASFVCPSCAAAAEGKPFSYTPAGGRPARAGRARPA

SEQ ID NO: 148420 - protein, 119 aa, Oryza sativa
  unsure (1)..(119): unsure at all Xaa locations
  Clone ID: PAT_MRT4530_48853C.1.pep
STTTPPPFPAPPRASPPAAACMPSPEEPPAPPPSXPATPPTFLSAGPTTIPNAPSLAPPSPTRHPQRAIATDGRRCPCWRVAAGAAIVVSAAVSQPRGNIAPQGMVSVPLVLVSVPLVF

SEQ ID NO: 148421 - protein, 78 aa, Oryza sativa
  Clone ID: PAT_MRT4530_48854C.1.pep
MEPGRSPDLPRWFNRRMVIAGTCGWVQEKDKKARRAACGEAAKEDNPSLKDKWIVELRVVIGDKGVELESDSVTRQLF

SEQ ID NO: 148422 - protein, 77 aa, Oryza sativa
  unsure (1)..(77): unsure at all Xaa locations
  Clone ID: PAT_MRT4530_48855C.1.pep
GRSRSSSSRGPSPRPPHPTLPSLLPRHRPTTATTPHQSPARGRDLEIGPGAPXVFNVDVEITMGSIVKHELDKTTGM

SEQ ID NO: 148423 - protein, 531 aa, Oryza sativa
  Clone ID: PAT_MRT4530_48856C.1.pep
MTSLNKVVSNGDTRSMLPNKVTALNPNAAEFVPSCIRPSFESSAVSDVSKADLRASGKTILDRSESSKSNNSDDEAHQFWRKQLPDDIIPDFSFEKIEQEPEELSLAGLSLNAPPFYGTTASRFSREHDLSSQANKSLELGLTSLLYEDNSQASFPTMGSSNWEQNFVGDLHFTNGNQGLHYDSESAAGFSDSFASDYAAATDDVLDPLAYLASQFPDFSSESLAELYYANGCDFNHTIEILTQLEMQVDATSNPTLTPRTPNFSTGDFPALPTVEDQNGFSKGNADILSIFNGRSSPSVSTGTGDFVSAVRKLASQNSGHWKYKKGPEYGNGVSTVSVPKQYSSTTKTSSGNKFQSVSSARAAPWLETGDAVANMYSESRGEARDFARIRNACFEQARQAYLIGNKALAKELSMKGQTYNTQMKASHEKAREAIYRQRNPSSQRGSDRLIDLHGLHVNEAIHILKVELGTLKSTARATGERMQVMICVGTGHHTKGSRTARLPIAVEQFLLEEGLHYTQAQPGLLRVVVF

SEQ ID NO: 148424 - protein, 83 aa, Oryza sativa
  unsure (1)..(83): unsure at all Xaa locations
  Clone ID: PAT_MRT4530_48857C.1.pep
VSQLSFWRESPPLWISSCSFFLSYFQCVSCVFVVLIVDYWIFPVRVLLVWLPHVRCFCYLFIVSSLFWSSFXFLSSLLYVCSL

SEQ ID NO: 148425 - protein, 107 aa, Oryza sativa
  Clone ID: PAT_MRT4530_48858C.1.pep
MVEKRGRKFPLFPLFLSRVLSLAAIAPQVPLVHGALSDDVPHCPDQSKYTPCSQADLTAPEVVASPALHQDSPFMCPPSPAPCISHNHGSTDHCLLHVVPGFFTRLH

SEQ ID NO: 148426 - protein, 516 aa, Oryza sativa
  Clone ID: PAT_MRT4530_48859C.1.pep
MAGGGGKAAAGGGEAPAITLEHTPTWIVSAVCFVIVIISRSFERLLHRLGKRLKKSRKKPLYEGLLKVKEELMLLGFISLLLNVFQGLTQKICVKASVMDHLQPCKLDFSGAKTAKTTAHLAAAGVRRLLAGGGAKSDYCEKKGLVPILSVEAIHQLHIFIFVLAVSHVVLSAVTVLLGIAQTRKWQHWENKIQASDENGMMKEHSPLGKWIIGMKLSGPQMIKHVQEFPFIKNHFKGHGKRWKTFGWLRSFLKQFYGSVTEEDYVTMRLGFIMKHCRGNPKFNFYKYMIRALEDDFKKVVGISWYLWAMLIIFLLLNVQGWYVYIWISAVPFVMLLVVGTKLEHIITELAHQVAEKHTAIEGELVVSPSDELFWFHRPKIVLLLIHIVLFQNAFEIAFFFWLLVTYGFKSCIMGNKGYVIARLVISVISQLLCGYSSLPLYAIVSHMGTSFKKVIFDENVVEGLANWAQNARRRNARAARTQNVGDSPVDESNVGEVQMTSPPTKSVQQGTARLI

SEQ ID NO: 148427 - protein, 146 aa, Oryza sativa
  unsure (1)..(146): unsure at all Xaa locations
  Clone ID: PAT_MRT4530_4885C.1.pep
ATTFVAVGSNAGSSCCCRHTRSRRCRRIRRGNSSAPSSPSDPLREATATAGLGRGKRPAPLVSPDLPAGSRHTXRRHQEGRRGXEGVAERGRGAARRGGVGSGGEGTVEEERRHRLGXGGRGRGIAGQERGGEGESRAEGGARGRV

SEQ ID NO: 148428 - protein, 95 aa, Oryza sativa
  Clone ID: PAT_MRT4530_48860C.1.pep
ELGSLAWFTVGCLVGRSIIQTWSGVVFLQFFFLTPVCRNFSDKQQGFISVRCNDFSECFVGYRIFDVIKQWIILSISKCSLMSTIKRCHHCSLDV

SEQ ID NO: 148429 - protein, 107 aa, Oryza sativa
  unsure (1)..(107): unsure at all Xaa locations
  Clone ID: PAT_MRT4530_48861C.1.pep
AHAQEAAAENKPPPRDQPPRKGTEPEDPEPNXERKPXXDEPXXGXAXKNTTDPXGGATTXARRDPGKXGXAGQNEHNANKDKKERTGRRXETQANSKEXTTXAXAGD

SEQ ID NO: 148430 - protein, 279 aa, Oryza sativa
  Clone ID: PAT_MRT4530_48862C.1.pep
MGRQPCCDKVGLKKGPWTAEEDQKLVSFLLGNGQCCWRAVPKLAGLLRCGKSCRLRWTNYLRPDLKRGLLSETEEKTVIDLHEQLGNRWSKIASHLPGRTDNEIKNHWNTHIKKKLRKMGIDPVTHKPLYPAPPLADGGSPEQKVPEEEEEVEEKSSAAVESSTSTCAGHDVFCTDEVPMLHLDDIVLPPPCDVVGDTAGSPAESSSTSTSSSGGGGIDEEWLLPIMEWPESMYLMGLDDVDMVTTAAPAMATSWEFEDPFNAYQRIALFDHHHELTWA

SEQ ID NO: 148431 - protein, 87 aa, Oryza sativa
  Clone ID: PAT_MRT4530_48863C.1.pep
FGTAVGTVWREEAQGARLPPPVVVNYLCPLDRVAVEEPVVVAADGVDDGGERVDHIHSPVRVTVHGGGGVERFARLHRRMEERVRVE

SEQ ID NO: 148432 - protein, 118 aa, Oryza sativa
  unsure (1)..(118): unsure at all Xaa locations
  Clone ID: PAT_MRT4530_48864C.1.pep
ASEKSHXKSFARARTSRRAPWRXAEAPXPRVVAHHELLHDQAWPRDRRVKRKKPQQIKKVGEEKVKPSPCGPEGSTRRSWPGSSVSAISPVTLKRSGAARTKELISSIKYAAKRRRRR

SEQ ID NO: 148433 - protein, 160 aa, Oryza sativa
  Clone ID: PAT_MRT4530_48865C.1.pep
MAHRAKIAVEIEWGLRCGWTAGIRAQGNVDADERHQFKNGRDQVQVCNVYTIVETNSDEWLTLVIPCIVAPKKTLILPPFHNREYQIVDLAFFLPLHKCYFAVELNFSLIAKALTSYVRPLLDHAKARSAAALCGHPEYYTIQCPTRPPHTIGEVGSIHA

SEQ ID NO: 148434 - protein, 594 aa, Oryza sativa
  Clone ID: PAT_MRT4530_48866C.1.pep
MASPPPPPRLLTPKPDPDAPLPPLPYPDPNLVQSMLFSAQSPQAQPQAPPPHIQPPASASAEAPSGDEKNKKKKKRARASQEMVRITNLSIADHLHYRSLVRRARLTFEALRAIYQRQDLATAGGIRNRFDLRASSKMLSKGLWMHRDIRTVGSIPGLLVGDSFFYRAELCVLGLHTAPQAGIGYIPASIVDQGHPVATSIVSSGGYLDDEDSGDVLVYSGSGGRLRNRLDHSADQTLQRGNLALHYSCHYGIEVRVIRGHACDHSPSSKVYVYDGLYRVVTSTFGPGKSGRDVCKFKLVRIPGQDDLGSKAWHTAAELKDALDSKIRPPKYISLDIAKGKEPFRVPLYNKLDDDRSPLFYDYIACPDFPTTQQLLKRQTQRGCHCAELCGSRCSCERKNRGADGPVYTSDGILLRGRPLVYECGPLCGCPMTCPNRVTQQGMKHRLEVFRSKETGWGVRTLDLIQPGAFICEYAGDVLSLDSHSGDAPLPPMEDGSSIIDPTKFPERWREWGDASVVYPDRVPHFPLFAGARYRLDVSQRRNVACYISHSCSPNVFLQYVIRGNEDESYPHMMVFAMETIPPMRDLSIDYGLD

SEQ ID NO: 148435 - protein, 90 aa, Oryza sativa
  Clone ID: PAT_MRT4530_48867C.1.pep
MQEQAIAPGSRPVDLLSAAPFPLAVPTLFPVAGPPIRRSACATVHHRLTPTTTYYGHGNGAARHAEKEKEAANHAGPPPCRVEDAAAINA

SEQ ID NO: 148436 - protein, 94 aa, Oryza sativa
  Clone ID: PAT_MRT4530_48868C.1.pep
MGERRTGERRAGRGARGGDATLARRGSSDGDAARQAARVTAHGDRRRRAARRGLGAARAAVIDSFPGANTWWNQLKDKRELKAQAGVRVPQAPP

SEQ ID NO: 148437 - protein, 148 aa, Oryza sativa
  Clone ID: PAT_MRT4530_48869C.1.pep
REAVRDTVAYVLRPLVDNFNRLLSLKTAFDIKDYNIGMPTGALIACVGCYQLLKMNPFVFVDAVLGYAFYKLSVLSSQVRKQEFPNEYITRIKPGGYGSGYGVGDDDDGDRDGDGGEDSGGSFRIRPSSSHSSSLPLGLASVGRCQQR

SEQ ID NO: 148438 - protein, 504 aa, Oryza sativa
  Clone ID: PAT_MRT4530_4886C.1.pep
MKSNRNLTRGDGRRLGNAALIAFMLGSLLVLSLVRARFSPIGKPGEAIKTEEQEAMRKGSVKMETLEAADEAAASAAAAEEEEETQPKAGDTTAGGGGGGASSAAVAAASTTATDHLTKPVCYESSRRSDTCEATGDVRVHGRSQTIHISPLEQEWKVKPYCRKHDAFALSHVKEWALRPLSTADTYPAVPHCTVNSSATAFVLSTGGFTGNPFHDYTDVLIPAFITAHRFAGEVQFLVSSFKSWWTNRYMQIFQRLSKYELVDIDNDDEVRCYRSVVVGPTFHKELGVDASRTPSGYSMVDFRTMLRGALGLERAVAEPSGDRWDIRRRPRLLIISRRNSRAFLNERAMADMAMSLGFYVRLGEPDISTDVSKFARLVNSADVMVGVHGAGLTNMVFLPAGAVLIQVVPYGGLEWLARGTFKEPAADMQIHYLEYMIQLDETTLSEQYPKDDPVLKDPYSIHKQGWNALKMVYLDKQNVRPHLGRLKNTFMEALKLLPHGHTN

SEQ ID NO: 148439 - protein, 242 aa, Oryza sativa
  unsure (1)..(242): unsure at all Xaa locations
  Clone ID: PAT_MRT4530_48870C.1.pep
KEPCGRRLPPLPRALSSPPAVAVGGGEDGAKRKGGARCKTAGARSRGAKEARTTGQRWLVAHSRCAAPPPAPLDGDAPLPASLPICPPLTLSPPPPPDPPPPCLPSAGSARGGRGRAPPSSPAIARLRPPPDPPPPSLPSAGSASGGEQKGEGRRGRSPPSSTAVPMPXSPPDVRGEGGAARLRRRPSPCCRLRLRPPDPPPPCLPSAGSPPPSSVLLLINAPRWLLQLSFCILLIQASTGH

SEQ ID NO: 148440 - protein, 150 aa, Oryza sativa
  unsure (1)..(150): unsure at all Xaa locations
  Clone ID: PAT_MRT4530_48871C.1.pep
YGGGGAVPWSDGLMASSVSRRSSAGGEKSLGLAGQDGLAGEKLGEDAGMQLVLQRSTTTPYSDASRRSSGGWYQSVTTRLVSGCGLAASKKVAMSKLAILSMPVAVDERVGALDVPMQHXLDLRLREVQPRRGGEVGEVVVHVLEDEVEG

SEQ ID NO: 148441 - protein, 279 aa, Oryza sativa
  unsure (1)..(279): unsure at all Xaa locations
  Clone ID: PAT_MRT4530_48872C.1.pep
GEAPAKVREVAVAAAAAARRPKGRCHPGAQQGQRAGDAAHGAAGAHPGAGARRPPRRRAGQREEPLHVPQLLALRPPVREEGALLLRLLLLIRRRWASCCHLRLRRRRRKKDEAPARQAXEELIETVFITTTPENDGFHWRKYGEKNILNSEFRKLYYRCGYSDERKCQAKKYVQQENNKHPPEFRVTLTNEHTCNTVFQDQPSSSSTNSQVLDFTKASISSSLMDSHVGAPILKEEEEEEVPSIDESTRIMSTIMRNYGSYGDYDESSPQPWNGAGWK

SEQ ID NO: 148442 - protein, 61 aa, Oryza sativa
  Clone ID: PAT_MRT4530_48873C.1.pep
MEEEPAGHEVNVAAASWPANCASKAAVHSLLGRGTPASHLAAGSSPSQTGKATARDRWCAC

SEQ ID NO: 148443 - protein, 177 aa, Oryza sativa
  Clone ID: PAT_MRT4530_48874C.1.pep
RCAAAGGRGGSGAQPRRHISRSCGRKRKGRREVAGSGGRRLCPNSSLSRATAAVARCPGGPVGRLDGKQRVEEVERRRREVPWFGWARMQDGLAGEKLGEDAGMQPVLQRSTATPYSVAPRRSSGGRYQSVTTRLVSGCGLAASKKVARPKSAILSMPVAVGEQVGALDVPMQHVPF

SEQ ID NO: 148444 - protein, 159 aa, Oryza sativa
  Clone ID: PAT_MRT4530_48875C.1.pep
MAWRLRGNSIWKNNKPHVVFIYLGLAGQDGLAGEKLGEDAGMQLVLQRSTTTPYSDASRRSSGGWYQSVTTRLVSGCGLAASKKVAMSKLAILSMPVAVDERVGALDVPMQHALFMAVAEPDEDLRPEALDLRLREVQPRRGGEVGEVVVHVLEDEVEG

SEQ ID NO: 148445 - protein, 555 aa, Oryza sativa
  unsure (1)..(555): unsure at all Xaa locations
  Clone ID: PAT_MRT4530_48876C.1.pep
MSFSPLFFFLLXLHLSLLSPDTIESXRCAAAGGRGGSGAQPRRHISRSCGRKRKGRREVAGSGXAALTKQQQRTRRVRDPCERGGEERXGEGVRAYVTVEGYGGGGAVPRWPXSDGSMASSVSRRSSAGGEKSLNVSAIFRRNGKSDADPFHPRIDDIMTYRWRVEVIIFIYLPWFGWARMQDGLAGEKLGEDAGMQPVLQRSTATPYSVAPRRSSGGRYQSVTTRLVSGCGLAASKKVARPKSAILSMPVAVGEQVGALDVPMQHVPFMAAAEPDEDLRHEALDLRLREVQHRRGGEVVVHVLEDEVEGPQAGDRASAAAAATASGGQSGGGGASPTRYVMTNFGNFQLLAWDKSSLEWITFSSFPTHQCTTYGYCDITTGAAAAAATCKCLDGFEPASGGEWSAGRFSGVCRRKEAPPRRRRGWFLGAAADEGAGQVLDARREHDVRRVRGEDKTALNWVEGGNSSGIESSGVCFVHRKGAGGGQVQQLTEERHVHNQPPAIPVCVLSTASVRAQTTGWGMATRGTTPPAGGWSCLPRRPLLQPARLIKARLV

SEQ ID NO: 148446 - protein, 296 aa, Oryza sativa
  Clone ID: PAT_MRT4530_48877C.1.pep
MRTHRSSSSAVAAALSLCKVLLIVLALICTLHTASVDGDTIESQRCAAAGGKGGSGVQPRRHVSSGCGRKRKGRRKVAGSGGRRLCPEELSSSRGHHASEEERRGRGEDGLAGEKLGEDAGMQPVLQRSTATPYSVASRRSSGGRYQSVMMRLERLRPGGVKKVARPKSAILSTPVAVDEQVGALDVSMQHAPFMAAAELDEDMRHEALDLRLHEVQPRCGGEVMVHVLEDEVLLMILALICTLHTVPVDGAGRDRSRRSLDPNYRPSVPPGRPYTPTPPGCNAVYGCRNSPPSSP

SEQ ID NO: 148447 - protein, 855 aa, Oryza sativa
  Clone ID: PAT_MRT4530_48878C.1.pep
MPPPPPPPPPGNVAEEQPWEYTLRKYLLLLATLVATVAYGAGFSPPGGVWSDAKDGVHLAGDPVIRDHYNGRYLLYFYCNATAFVSSLVVIVLILLFAVLHEKRNVRVTVMPLRAVMVLDLVSLMGAYAAGTCRDRTTTTFTVVLVSLVVVYVALQVVLASLPAGEHDGDEHVVKEKSRKVLLLLATFATSLTYVAGLSTPGGFWSDSDAAAGHRAGDAVMGDRHPARLTVFLLCNTTAFVASLLVIVLLLDRKLRDGTVRAWELYGCVLVSLAGLVGAYAAGSSRAAHTTAYVVALIGAVLAYIAIHLAVVACAARALSNTGMSEKLAGMYSSVKERRYHLRQPARELAQANDDREKLLNQALEKARSLVLLLATLAATITYQAVLDPPGGYWQVDKDGHKAGDPILLTINAKRYKTFFYFNSTAFVASLLAIILVQSKSLLKRHALEAAMILDLFGLMGAYAAGSCRDASTSINVMAIAGAVLVYVVIHIVFFTLDHNDGSMLGEDNALLEKRRKRLLLFAILCATITYQAGLTPPSGCWQDDDKQHGYHAGHPVLFSNHPRRYKAFFYCNTTSFMSSIALIILLVNPNLYRPAIHSYALSVCMVAGMFGLMGAYAAGSSQHMRTSIYIFVLLFIFLVLLLVAFVVHQKSQGTQNRRTNEAEVPNTNDIKRKQYTKRKNLMLLGILAASVTYQAGLHPPGGVWQSNDDAGHAAGDPVLHDKQKLRYHAFFYSNSISFMASIIVIILLLPESLKLNVNEWLLKAMNTTVVLDMIGLLVAYGTGSSRDWDTSGYVIAMAIFVLGYISIHAMLSKLSQVANHRVASEDPESQVLGNGLHQARGVCVGLHPSINVVQ

SEQ ID NO: 148448 - protein, 69 aa, Oryza sativa
  Clone ID: PAT_MRT4530_48879C.1.pep
MKREKKRKAAGLIEWPFDREKKPPLATPVPRISSLSGLPVGVRPSIDDDGGGPRGGGDGSTSTNLRGCA

SEQ ID NO: 148449 - protein, 123 aa, Oryza sativa
  Clone ID: PAT_MRT4530_4887C.1.pep
MAALGRLTLGGRRRRRCEGDNDDGAGRTTTSALGRWWGRQGGSSLRRHREGALFAGGGVARMGGVGGENATGGTGFGRRREATGGRENRGGAHDLASASDFGQPGCWSANLSQNCYNITWKVG

SEQ ID NO: 148450 - protein, 96 aa, Oryza sativa
  unsure (1)..(96): unsure at all Xaa locations
  Clone ID: PAT_MRT4530_48880C.1.pep
TSVCTRIGRVGLQNHALMRRLHGRAGDQVFGSVRRDYSLFVNIYFTFTNMSNTXDNGNTAYKQKKAPVNINGGNAASNSSGGPFLGSRGECKMPLF

SEQ ID NO: 148451 - protein, 79 aa, Oryza sativa
  Clone ID: PAT_MRT4530_48881C.1.pep
MEVGEAKAVEWWGWSVARLHRPTEQKSVSGIDLSGEAGCTCNGDRWAQAQNVCVRRRPIPLQAQNACVRRRPIPFQPQH

SEQ ID NO: 148452 - protein, 106 aa, Oryza sativa
  Clone ID: PAT_MRT4530_48882C.1.pep
PRRTTCFICLMTMMKGTAFPIAREILLRMSRSLQQTLCISRYTTPPEVKMYQRALFKLSVQPHECIPPAYNRTTLGYSNKAQASFVFCKKISWVITVLNFQELGSH

SEQ ID NO: 148453 - protein, 502 aa, Oryza sativa
  Clone ID: PAT_MRT4530_48883C.1.pep
ILADWCFGLQLGAANVVLMGTNLTLSFDDVEASFAPGVKGSGFEGVVYTAEPLDACSPLTSKAEKGPPSPFALIIRGGCTFDEKVKNAQDAGFKAAIVYDNENSGVLISIHLALFRLWGHMVLHYLTLKFTVAGSSGGIHIYAVFISKASGEVLKKFSGHTDVEVWILPAFENSAWSIMAISFISLLAMSAVLATCFFVRRHHIRRDRPRIPEAREFHGMSSQLVKAMPSLIFTKVQEDNCTSSMCAICLEDYNVGEKLRVLPCRHKFHAACVDLWLTTWRTFCPVCKRDASTGIPDPPASETTPLLSSAVRLPSQSSSFRSSVAASPPRPISRRPSSQSISRIYAASGTPNSPNPIRSFTNSTAMSISRSNVDLSNMSSRPRASHLASAHSLVGSHLSPPINIRYASPHMSHSGYASPSPHVSSSYVSNSGYGSSSYYLGSSSQHRSYLRRCGESGPSLSTMAPQSPQQSQLGHSGAYGLSLSRSILRPVVRRSSLRLCAD

SEQ ID NO: 148454 - protein, 76 aa, Oryza sativa
  Clone ID: PAT_MRT4530_48884C.1.pep
MGGSSRNGNGRRHVGATSSGTNTSVGWVRLAPTTFVARAAPAMLTLRAAAPRRREGEAVDECLAVGLSMDVCDGSR

SEQ ID NO: 148455 - protein, 56 aa, Oryza sativa
  Clone ID: PAT_MRT4530_48885C.1.pep
CMHRVYNTKSRWYFEKRFAEAAMDVFIEAFDLNFQVPVTNCLRSHLLLRGCLRLPG

SEQ ID NO: 148456 - protein, 188 aa, Oryza sativa
  unsure (1)..(188): unsure at all Xaa locations
  Clone ID: PAT_MRT4530_48886C.1.pep
PAGLRQAARPALELQRLGACEDDCWIWPSIXQRAYQAAEIIAAANEITRSHIVPEYSFLDARGLGAFEGKSLETLPEVYASDSISPDIKPPPISDGTPNESVADVFVRVTQLMSILETQYSGDTVVIVSPDSDNLSILQAGLIGLDLRRHSSLFFQPGEVRPVDPASIPEYKQPASTVFKCTNPPSCK

SEQ ID NO: 148457 - protein, 253 aa, Oryza sativa
  Clone ID: PAT_MRT4530_48887C.1.pep
MQVQAASPATAASSPVAPSPPPPPRAALSPCPRRRELLLLSASLPLPLPLLAPAAASARGLFRMPPPRLANRYFLVRAGESVYEGQGVVRTNPVSKTSVDSGLSPAGLRQAARAALELQRLGACEDDCWIWPSITQRAYQAAEIIAAANEINRSHIVPEYSFLDARGLGAFEGKSLETLPELLRFMDQPFFCLVYASDSISPDIKPPPISDDSDNLSILQAGLIGLDLRRHSSLFFQPGEFILQTNGKRCTLW

SEQ ID NO: 148458 - protein, 245 aa, Oryza sativa
  Clone ID: PAT_MRT4530_48888C.1.pep
MPPPRLANRYFLVRAGESVYEGQGVVRTNPVSKTSVDSGLSPAGLRQAARAALELQRLGACEDDCWIWPSITQRAYQAAEIIAAANEINRSHIVPEYSFLDARGLGAFEGKSLETLPEVYASDSISPDIKPPPISDGTPNESVADVFVRVTQLMSILETQYSGDTVVIVSPDSDNLSILQAGLIGLDLRSSSYRPMGKGVHCGNPAHLVTLFTIQFTDPLLLVNHAQGYVQYNLHQGVVQSRYKL

SEQ ID NO: 148459 - protein, 374 aa, Oryza sativa
  Clone ID: PAT_MRT4530_48889C.1.pep
MTVDQRTTAKAIMPPVEMPPVQPGRKWRARGSRGDPASVQETVKRWAELNNQQELDPQGPKKARQAPAKGSKKGCMKGKGGPENTRCDFRGVRQRTWGKWVAEIREPNRQSRLWLGTFPTAEAAACAYDEAARAMYGPMARTNFGQHHAPAASVQVVAQAAVKCALPGGGLTASKSRTSTQGASADVQDVLTGGLSACESTTTTINNQSDVVSTLHKPEEVSEISSPRGAPPAVLEDGSNEDKAESVTYDENIVSQQRAPPEAEASNGRGEEVFEPLEPIASLPEDQGDYCFDIDEMLRMMEADPTNEGLWKGDKDGSDAILELGQDEPFYYEGVDPGMLDNLLRSDEPAWLLADPAMFISGGFEDDSQFFEGL

SEQ ID NO: 148460 - protein, 71 aa, Oryza sativa
  Clone ID: PAT_MRT4530_4888C.1.pep
LSVLEPVEAPAMASHSFFCPYYYHCSLQFQISVSLTGSDTFLMGLGLVLGEGGSQTSLILLYITVLVPNSL

SEQ ID NO: 148461 - protein, 94 aa, Oryza sativa
  Clone ID: PAT_MRT4530_48890C.1.pep
FRPTDRKKRPRRSRDGPTSVAETIKRWAELNNQQELDPQGPKKARKAPAKGSKKGCMKGKGGPENTRCDFRGVRQRTWGKWVAENSEPDRQSRL

SEQ ID NO: 148462 - protein, 68 aa, Oryza sativa
  Clone ID: PAT_MRT4530_48891C.1.pep
MYLDHVICEPRWKIILHKCNSLLSWACCTTKTSVGHILFLVTTLRYERRAVGMHIRPTVALYAWCAVS

SEQ ID NO: 148463 - protein, 239 aa, Oryza sativa
  Clone ID: PAT_MRT4530_48892C.1.pep
MGHRRAGHLCGHTGGSDGGRGRSDGPDRPRDRGGGNWLPGEDAARGGSDPTGRPLAAAARRELAQDATDEAEKEGEGGERSSGNDTVGRRPAKLEAEGGGGAPVTSDAQEGVYELGRDLGMGFKGVREARGGRNSEEGWPKAMRVAELTGERGRWSSGEVFDGVGRCPWYGTVQRRWGDHRGSGWRCGGDPSGGGGRLNDTGERLRLVARWGGFSMVVGENGVAAWLALAAAKLAMTAE

SEQ ID NO: 148464 - protein, 42 aa, Oryza sativa
  Clone ID: PAT_MRT4530_48893C.1.pep
DVAKYLHSTKLSTDYSLAIAPLYRGTVSLAKMRMAIRHHLNG

SEQ ID NO: 148465 - protein, 110 aa, Oryza sativa
  Clone ID: PAT_MRT4530_48894C.1.pep
MAPHTQSDYTCRVVFDFSDWSEERDSITGAAAGSGAVLAVARDGGGGGGKGRGIDLGGRRGWGKGERNTPLGREFSAARFVMGFFSSDSGKLPLFSSAVDTPNSSRRQAN

SEQ ID NO: 148466 - protein, 85 aa, Oryza sativa
  Clone ID: PAT_MRT4530_48895C.1.pep
QSHSGSEFPGADFSRTFFNQLLILWCRQVSDLHADIGGCLVRSLTLPHFLGYFVFTSGGCGMPKFFNSKAHMSYTHLLAKSCLRC

SEQ ID NO: 148467 - protein, 332 aa, Oryza sativa
  Clone ID: PAT_MRT4530_48896C.1.pep
MGTLVGQLGELLSRAVMPPPPRVCGAPGGPPVTAPRVRLSDGRHLAYEESGVPKEAARYKIVFSHGFTGSRLDSLRASPEVAEELGVYMVAFDRAGYGESDPNPNRTVKSAALDMAELADALGLGDKFYVVGVSLGSHAVWGALRYIPERIAGAAMMAPVVNYWWPGFPAEDAAAAYGRQSYGDQWALRVSHHAPAILHWWMDQSWLPTSTVVDNTTFLPNKRDADIRRTLTADGTLQKKKEMATQQGINESYYRDMTVMFGKWEFDPMALPEPPCPVHIWQGDEDGLVPVALQRHVAGKLGWVSYHELPGTGHFLSAVPGLGDTVLRTLFG

SEQ ID NO: 148468 - protein, 74 aa, Oryza sativa
  unsure (1)..(74): unsure at all Xaa locations
  Clone ID: PAT_MRT4530_48897C.1.pep
TSAWSISRRTRTGTGALARAGSSRTCQTPLISFTIRRHSLWYMVRAVGXVHQAIMVQEYDHRERYRRWRVCQAL

SEQ ID NO: 148469 - protein, 713 aa, Oryza sativa
  Clone ID: PAT_MRT4530_48898C.1.pep
MEVTAGAMRALLPKLAKLLKDEYNLEKHVREGVKSLEIELTMMHAALRKVAEVPLDQLDDQVKIWASKVREISYDMEDAGDAFMVRVEDDSHSGPSTFKNRVKRPIKKISKLFRKAKELHQIADAIKEAQALAQQMAGLRERYSGLELQNSGMVTSTIDPRLTALYIDATDLVGIDHAREELIKTLTEGEDSSKQQLKIISIVGFGGPGKTTLARAVHEKIEAQFDCSAFVSVSRNPDVRMIFKKMLHQLDKVKYANINESSRDEIQLIDELREFLQDKRYFIIIDDLWDERVWDYIKCAFPKDNLGSRLIITTRNVNVSKACCSANNDIIYKMKPLSEDDSKKLFYKRIFPHGNGCPCELEEVSNEILKKCGGVPLAIITIASLLANKELQTKDQWFTLHNSIGRGLTEGRNVEDMQKILSFSYYDLPSHLKSCLLCLSVFPEDYEIRRNRLIWRWIAEGFVQQTQNGGSLFEQGENYFNELVNRSMIQPIDIDAEGRAKACRVHDMVLDLICHMSSQQNFITVFNDIGNITCSRNKTCGLIKCDRGIYKSLENWQHRGACSGEICGQHQRLPTRDRVPSMFPRGAMPRVRYLEFSLRAWDNDMAIGNGSSGDLDLAMGHLPSLERVSVTLLVHELAGSIFLEIDITIDNMSMYAELAVIGFVSNDRNRMDALHSSGDDVETKLTISTYFDMVIVGFIYFVSVLSLQVAQCF

SEQ ID NO: 148470 - protein, 112 aa, Oryza sativa
  Clone ID: PAT_MRT4530_48899C.1.pep
LACSRESRHRRAMAAMHVDASTGVMNTLLPKLSKLLEEYTNIKGAARNQITFLRDELSSMKPVLEMFADVDDGLDPLKREWRDNVRELAFDIEDYTDSFMIRVSHESDELPT

SEQ ID NO: 148471 - protein, 66 aa, Oryza sativa
  Clone ID: PAT_MRT4530_4889C.1.pep
QLALKAYLMPSTSTALLASSSISHSIQHVLHLFQVFMDVAISVQMGKCVYARIHTPPSDRISVFSM

SEQ ID NO: 148472 - protein, 491 aa, Oryza sativa
  Clone ID: PAT_MRT4530_488C.1.pep
MDTFFSAVLGDLLSRSVSFLINRYHQQQKDAEENQQRLHRVLLRIEATVEEADRRCITNQAMLLQLRMLRDVMYRGYYFLDSFRYRNIQAHAQDEVGDHSLGLSHFCPLKRFCISTRTWKILSQVLEKKELQEMLDHLQGIVSDMQEFVVLMSSYPRMSRQPYGSYLLLENCMFGRQIEKERIINFLLEPHRPAGSKGIDVLPIIGPCRVGKTTLVEHVCHDEMVRKCFSKILMYGADSIECGELVPLTEIGVIKHRNPASTGQSLLIIELVNDMDNETWTRILHRLRGDHSTPVGKIIITSRSNKVATFGTTEALQLDFLPEEEFWYFFKTMVFGSANPEEEPELAAICMEIAALMNRSFMGTYIIGDILRSNLNPQFWYKFLECFKYYTDIHIRELGEHPTETYKRISGHTCVWTPENRCVTEATYALTYTLYQASSEDLNDQPMVLASDVLVGNVQLQGKVDVLQWRSKIPPYYCYMAHFEIISILVY

SEQ ID NO: 148473 - protein, 106 aa, Oryza sativa
  Clone ID: PAT_MRT4530_48900C.1.pep
MSLKKVSDVVGGEHDGEELPAPCMHCKNSIAAAERRYRRSPWPQRRRGTAWGGSPGTGGGRRAVFAWPGGLTAGANDSHLSGKDRFTSSPSIVTKSKFYPEPQYYI

SEQ ID NO: 148474 - protein, 508 aa, Oryza sativa
  Clone ID: PAT_MRT4530_48901C.1.pep
MAGNQQLRVLHALDIARTQLYHFIAIVIAGMGFFTDAYDLFSISLVADLLGHVYYHGELPRNIHAAVTGIALCGTVPGQLVFGWLGDKMGRKRVYGITLLLMVVSSLASGLSFSKHEGMNIIAVLCFFRFWLGVSIGGDYPLSATIMSEYANKRTRGAFIAAVFAMQGFGNLAAGIIGMIVSAAFKHSSASKIDYAWRIILMFGAIPAALTYHWRMKMPETARYTALISKNAKKAAKDMSAVLNVNITPDDEVINELARQDEYGLFSFEFLHRHGLHLLGTTVCWFVLDVTFYSLNIFMKNIFTEVGLLPRLDSEYHHTLQRMITMTAVHTFISLCGALPGYFFTVAFVDRIGRVKIQLIGFTMMTVFMLCLAIPYDQWLRHKNKYGFAVMYGLTFFFANFGPNTTTFIIPAEIFPARLRSTCHGISGAVGKIGAIVGVFGFLYTEYHIRIFLFVLIGCNLVGFIFTLLLPESKGKSLEDLTGEIEEFQEEDEGSEVALSRPIHTVPL

SEQ ID NO: 148475 - protein, 102 aa, Oryza sativa
  Clone ID: PAT_MRT4530_48902C.1.pep
RLTRCSGSPRRRRRGSSPSPPRRRSAGTASAPPGRRSGTPAPPRRRCSPRSSTGSSPSPRTCTSCARRRRRRARRDRSPPAAGRRRRSRSCSASTRSCLWRS

SEQ ID NO: 148476 - protein, 325 aa, Oryza sativa
  Clone ID: PAT_MRT4530_48903C.1.pep
MDRKKAGVPLVCHGHSRPVVDLFYSPVTPDGCFLISASKDSNPMIRNGDTGDWIGTFEGHKGAVWSCCLDTNALRAASGSADFSAKVWDALTGEELHSFEHKHIVRACAFSEDTHLLLTGGLEKILRIYDMNRPDAAPREIDKSPGSVRTVAWLHSDQSILSCCTDMGGVRLWDVRSGKIAQTLETKATVTSAEVSQDGRFGLVKSYNMPCNVESASLEPKYGNKFIAGGEDMWVHVFDFFTGEEITCNKGHHGPVHCVRFAPGGESYASGSEDGTIRIWQLGPATSDEQESPPNANGKLKVNTVSDAARKIEGFHLPKDGQTEG

SEQ ID NO: 148477 - protein, 112 aa, Oryza sativa
  Clone ID: PAT_MRT4530_48904C.1.pep
PPPPPGRSSTRCRRSPPLPHQRSPPPVSSSPLPVPATDGRSSAHRRRSPTIPHARRRREIERPPSPISTSPPAIQRPTLPASSSSSPPSAGGAASSSSPPPSSSSLSLWSSA

SEQ ID NO: 148478 - protein, 706 aa, Oryza sativa
  Clone ID: PAT_MRT4530_48905C.1.pep
MSGFVGVVVSDPSLQGQFTQVELRSLKAKFLSLKRDSGGHATTKNLPGLMKKLRGLNEVISEEEIAAHLSQSYPDADQEIEFESFLREYLNLQSRVSAKEGARGGGGGGKTASSFLKSSTTTLLHNLNQAEKSSYVAHINTYLREDPFLKKYLPIEPTDNQLFDLVRDGVLLCKLINLAVPGTIDERAINKKRVLNPWERNENHTLCLNSAKAIGCTVVNIGTQDLVEGRPHLILGLISQIIKIQLLADLNLKKTPQLVELFDDSKDIDEVLSLSPEKMLLRWMNHHLKKAGYKKTVSNFSTDVKDGEAYAYLLKALAPEHSPETTLETKDPSERAKLVLEQAEKLDCKRYLTPKDITEGSANLNLAFVAQIFQHRNGLTSDTRQVTLNQTASRDDVLLSREERSFRMWINSLGVDSYVNNVFEDVRHGWVLLEVLDKVSPGSVNWKLASKPPIKLPFRKLENCNQVVKIGKELKFSLVNLAGNDIVQGNKKLIVALRGRLMRFNMLQLLNRLRSHSQGSQGKEITDADILKWANSKVKASGRTSQMESFKDKSLSNGRFFLELLSAVQPRVVNWKVVTKGEDDEEKKLNATYTISVARKIGCSVFLLPEDIIEVNQKMILTLTASIMYWSLQKQPQSQSETSEQSEPSSMASDAASDIASEDAASITAASEGEEVNSLSDSMSNLTTYDAISNAPPAENGNGVAG

SEQ ID NO: 148479 - protein, 138 aa, Oryza sativa
  Clone ID: PAT_MRT4530_48906C.1.pep
MGALVQRNENLLAIQCQRSIYIMCAQYYCCRYVEVNESTSVRLFYYFVKSEKDPDVDPLLLWLSGGPGCSSISGLTHEIGAGFSYAATMEGSKSSDTKTVKQLYIFLRKIIKGIAELNDTDETVVELVRLGHPATWLL

SEQ ID NO: 148480 - protein, 74 aa, Oryza sativa
  Clone ID: PAT_MRT4530_48907C.1.pep
MKSKTGEEQAATKRRQDTGGPHAAACQHRARVGSGQTDASMHMRKMENVGGFNFLVDMTYDRKNYDQPGAFTTM

SEQ ID NO: 148481 - protein, 85 aa, Oryza sativa
  Clone ID: PAT_MRT4530_48908C.1.pep
MGSLTGMDGGVPIDRAAGSECCCSAVAPCAVRTADVSFSKWDEERRGDQERPGIEPVRWPLRRGGLRLRHGMDDTALAARNLERV

SEQ ID NO: 148482 - protein, 163 aa, Oryza sativa
  Clone ID: PAT_MRT4530_48909C.1.pep
MADLNLVFLFFLLLSPPILSDGVLQVMGTSMNRRSLLQAKGGCPVSFENQNYTTITSKCKSPWPADLCCPALNEFACNFSQYINDESTNCAESMWVYLNAHGSYPAGLFSNECAVLDCNGNNSTISTNQTANGSGTRGAKGISEMYSLVTTLIVSGLPVLLFY

SEQ ID NO: 148483 - protein, 856 aa, Oryza sativa
  Clone ID: PAT_MRT4530_4890C.1.pep
MDAVVSVSHGALGPLLGKLSTLLADKYACLKGVRREIHSLRSELSNMQAALHKYASLEDPDIQVKAWITELRELAYDIEDCIDKFMHQLGANGEQHRTSNSIEDFFRKSIQRLKTLGPRHNIAGEIEELKARVISVRDQKNSYKLDDIFCSSSSNTNASVDPRLATLFAEENHLVGIDGPRVELVNWLDAESRLIKCRKVLSIVGFGGLGKTTLANEVYRRVKVHFDCHAFVSVSQKPDFKNIFKDITYNMPTKDGFLKDIDTWNEKKFIEKLRELLVDKRYLVIIDDVWSISAWKAITVAFPDNDCSSTIIVTTRVSDVGWSCCLNGIDRNYQMEPLSEVHSGRLFCKRIFSTNEDGCPDILQEVSTDILKKCGGLPLAIISISGLLANRPVIKEEWEKVKESIGFALDKNQNLEGMKIILSLSFNNLPNYLKTCLLYLSIFPEDCIIERNMVVWRWIAEGFISEDCGQKLEDVAESYFYELINKSLVQPVDIGFDGLEQYLENIDKLFQLEYLSLCCSNISHIPTQIAKLQNLVTLDLRQTCVEEFPTEFCRLIKLQHLLGDRMLKLPDGIGNMRNLQVLSGINISSSSASAVAELGELTSLRDLKISLSDKLSKCKTKEEMLLASLCKLSSYKLQSLHIIDHSTDDFLERWFPIPCFLRLFHMITDYYLLQLPKWVKPYLTKMAYLSINLREIKKEDMETLGDLPALLSLEIWLEPDPKEQLTVQSTGFLFLKEFVLACSDHNGGAYLTFEKGAMPKLEKLEILFHVLMAEPHDFYFGINNLQHLKEVEVFIYRVGAEDSDAEAAVAAIRSEANANPNHPRLAIKEAYVEEISNKECDDNKDAEDQQGGVTVN

SEQ ID NO: 148484 - protein, 125 aa, Oryza sativa
  unsure (1)..(125): unsure at all Xaa locations
  Clone ID: PAT_MRT4530_48910C.1.pep
RQIPSYFSCSFXHASPQHTNIMAKKFRRHGPFKVGSSPTSRFILXPILLSRLVGKLAKNGGYDYGALKALGGXDNGKGSAPGGSPVLANPHXXGKXSRSEGQKMGTPXIQXGXXLCPXGGXTQXG

SEQ ID NO: 148485 - protein, 47 aa, Oryza sativa
  Clone ID: PAT_MRT4530_48911C.1.pep
SSYNQIVVIASYCVELYSMCKMGACPSVWLYAKKNLVSYNLIKCMNK

SEQ ID NO: 148486 - protein, 136 aa, Oryza sativa
  Clone ID: PAT_MRT4530_48912C.1.pep
MAAARNPKSFRTVFTPKSKKGAGSLTLASSSIEEVEGLAEAVEDAVGEWQRMRSIQWDLFSLAHDSGRARGDLPTDGHHPTPSSRLRALVPPSSHLPCHATGRRHGIELHDDGAHDHATLGEGHATAVDLVTEGSL

SEQ ID NO: 148487 - protein, 100 aa, Oryza sativa
  Clone ID: PAT_MRT4530_48913C.1.pep
MDPTAPVLVAADLATPLLTTTNPAERRRDGVCGRDEGRWWQRRLDCRLDYLRSVGFLKDYPVEALACFRWYTGGNGMGSHAHYSGYQITGNIIQMWQLAL

SEQ ID NO: 148488 - protein, 469 aa, Oryza sativa
  Clone ID: PAT_MRT4530_48914C.1.pep
MLKLETEPIQLGHQQAVDQSSESKVGQYPTSMLQQQTSCDQQSLCIQVDTKLQEMPPNEHLLDQVPPRSQKKLCMDDRLSDLPDTILHHIMSLLSAQEVARTCILSKRWKELSASAPCLDICVDKFGMDRVRFSEFVAHLLLSRAPNSLHTFRLHSFAIDHASSWINRAIELKAQVLEFTEYIRWESFYLDPQLMAFASQYLKCLKLTNVTLDSNAFEPLNHACPALENLQLSQCFLEVPEICSASLKKLDIMECSLLMNLQIQTPRLVSLRFRCLQYKCSSCSRYPVITAAVTLCDLPNAENIDLSCSGRQVTFGREIQKFPMYGKLTSISLGEWCLSDKFSRLFCLLRHSPELKELTLKLEVERQDHNGEDEIRLMVGRSFSAENLKKICISTMQELSRKIARRQSWGMLSRFNKKDTAVSTITMPQEVKPEAMAYLVACTPIRSRSSLCKSHLEARLGGNTEIGLG

SEQ ID NO: 148489 - protein, 190 aa, Oryza sativa
  Clone ID: PAT_MRT4530_48915C.1.pep
MGLCQWRLERQEAVSRCKARRDMAAEHVVYLRALRAMGVALLQFASVDADHPRQIPRSRAAAGTRRPHLCLHATVGSAAVLCRLVFPRRRMLQKRREKSAEPPSSVSHPDASRTRPSEMSPPHAGYRHASPPRPAAQHLLCKQAQPHSTSAASLEAGWQPARAVTAQGKHSTGSIEAPLQLFICFPHYLR

SEQ ID NO: 148490 - protein, 118 aa, Oryza sativa
  Clone ID: PAT_MRT4530_48916C.1.pep
MMKLRWWRVDASEVAAVTAMGVWEAVLAGGGRRFLKRKDSDAGETGRALEELRSSLYNEMHSSEGAKRQQQRFCGPSVALTFNFAVAVGIIMANKMVMGSVGFKFPIALSLIHYAGAF

SEQ ID NO: 148491 - protein, 379 aa, Oryza sativa
  Clone ID: PAT_MRT4530_48917C.1.pep
MTASRNRETSARFHFTTYRRGGAHLAGPLQASLDAKLTAICHSLAAAPPASSKKAAAAAAHPDSPKGSASTTTTTSEGDESAISACSPPLPPPPPPPPAALPEMANLDFTEAPWDESDAFHLYKCPSWEIDWDSILSMSHHLYKANNSPYNVENLIRNLLKILLDPTEEEAELTASEEAGWRWRRRRDRVLELPTGNRHGAIKFGKLQTALVWGKLEVRTQRSVKTGCRMTPNSHVSTSSHADARCPTRTNDKLPISSNLATEARKATTTKTSATMVAMLGASAVRGDGRGRLYIYTMVGEVEEVVVAVPPFVPVGCSTTVPPERELDANTGVEREEARRPVTTPDVDGGDDNAIGHHGRGAVGMADHGRCLGTHFLPL

SEQ ID NO: 148492 - protein, 525 aa, Oryza sativa
  Clone ID: PAT_MRT4530_48918C.1.pep
MKPSIVHCLKLLMLLALGGVTMHVPDEDDVVASLGALRLDGHFSFDDAHAAARDFGNRCSLLPAAVLHPGSVSDVAATVRRVFQLGRSSPLTVAARGHGHSLLGQSQAAGGIVVKMESLAAAAARAVRVHGGASPHVDAPGGELWINVLHETLKHGLAPRSWTDYLHLTVGGTLSNAGVSGQAFRHGPQVSNVNQLEIVTGRGEVVTCSHEVNSDLFYAALGGLGQFGIITRARIALEPAPKMVRWIRVLYSDFETFTEDQEKLIASEKTFDYIEGFVIINRTGILNNWRTSFKPQDPVQASQFQSDGRVLYCLELTMNFNHDEADIMEQEVGALLSRLRYISSTLFYTDVTYLEFLDRVHTSELKLRAQGLWEVPHPWLNLLIPRSTVHKFAKEVFGKILKDSNNGPILLYPVNRTKWDNRTSVVIPDEEIFYLVGFLSSAPSSSGHGSVEHAMNLNNKIVDFCEKNGVGMKQYLAPYTTQKQWKAHFGARWETFERRKHTYDPLAILAPGQRIFPKASLPMSL

SEQ ID NO: 148493 - protein, 177 aa, Oryza sativa
  unsure (1)..(177): unsure at all Xaa locations
  Clone ID: PAT_MRT4530_48919C.1.pep
ALLCCWRNLGDYFEVRRSVGRAGIGRWLAREGEGRRHTGPTRQWLKGGGPMWTGITRVVHRRSTGPTAQIXALSRSGGGGRGGRRARLGIKAGRPAMASXRRHAADGDGERRHGRRRRRPKATAHDLKRRRGTRRERKGKRGEGCLTASGRRGGRRWLTAMASHGKTAATGGRASGC

SEQ ID NO: 148494 - protein, 141 aa, Oryza sativa
  Clone ID: PAT_MRT4530_4891C.1.pep
HAISFPSGHPSARLALKDSLPIPHFRTHATPKSPIPIPKSSPPPPQKFSLPSTLCHFVIVEPAVPLPSLGATVLRHLPVEPTATVVFSWSQWSALPPTISSTAISSLLVAAACRLLHTSPIVGILLLRLALLWSLYRYDSY

SEQ ID NO: 148495 - protein, 66 aa, Oryza sativa
  Clone ID: PAT_MRT4530_48920C.1.pep
NQLFSCNILYACGTYSQYTYAQHSFSRRSLTLSMGYRSCLSFCITSKLLHIFDMHIRSHRCLVSIG

SEQ ID NO: 148496 - protein, 162 aa, Oryza sativa
  Clone ID: PAT_MRT4530_48921C.1.pep
MALLLSATVGRGLLLSLATVTQAVMVPKFGYIRKAVAAARGGITTTVEFDLFTLPGGVDAFDKAARYCYRANFQLSVRNAAALLCASAFLDMQPPLARWPDASTRPRSWRQGRVPWLRRHSRASAPASRGEGGEAARQPPGPLPTRGCLAPLRPGVAAAAPS

SEQ ID NO: 148497 - protein, 57 aa, Oryza sativa
  Clone ID: PAT_MRT4530_48922C.1.pep
MPAGEPELEPVDVSASALSVRGVVGWSCIFVAAWVHGLRAVHYHGGSHGRGRCVASS

SEQ ID NO: 148498 - protein, 201 aa, Oryza sativa
  Clone ID: PAT_MRT4530_48923C.1.pep
MVMGVGVTFYPWTRLLETRRHHGRTYPRPPGMGTGTEFCPLTLVGRVRAGNVGHWVGRPDPLPSLYPSLTPTPSNHRPGPTFHRPYVTPSLCLFPSRPRYTEGKRERGGSGADRHWTRATHGLDVATPSRVFISSQLHRSFPFLTLVPTKPRANDLSLSDALSPLPAAKKDDPANCRHAVVVAIFSLIHDLLSTPVPSLLA

SEQ ID NO: 148499 - protein, 63 aa, Oryza sativa
  Clone ID: PAT_MRT4530_48924C.1.pep
QRKIWKFFKIPRQQSLKKRKMGWARFFFFLKKAKKIFPKKKLGKRVFFQKNITRCLFKIVKWV

SEQ ID NO: 148500 - protein, 193 aa, Oryza sativa
  Clone ID: PAT_MRT4530_48925C.1.pep
MAGTKLVALGFIVLLSIGLANASRVARYSSAQGSGSGSGEGSGSVNGGGSGGGSGTGSGQSGYNGAHASGGGRGGGGGGSQYGGSGSGSGSGSGSGSSQYSSNYYGSGGEYSSAGGSGGGGGGGQGNGNYGSTGQGSGSGTGSAHGSANSNYWRGPSYANANAGGYGNGNGYGQNGGSGGGGGSGSGYGDANP

SEQ ID NO: 148501 - protein, 294 aa, Oryza sativa
  Clone ID: PAT_MRT4530_48926C.1.pep
MPLLLVAGTVVLALLASPAAAFNITRILGEFSDFSTFNHLLTQTKLADEINRRQTITVLALDNGAAGGVSSLPSDEQRKVLSVHVVLDYYDTEKLGGMKMKNRSAVLTTLFQSSGQATDRMGFLNYTKRSDGIMVFGSAEPGAQATSQMVKVVVTRPYNISVLQVNSPIVPPGIASVSNSNTGAPPPHPAKSSAPAPSPSKSKGKKSDAPAPGPSDDVDDDTAADAPGPAVDGPTADGPAADGPAADGPTEADAPAHDKGDVADAPSAAGRAVASSAGLGVVALVVLIFPSVSL

SEQ ID NO: 148502 - protein, 217 aa, Oryza sativa
  unsure (1)..(217): unsure at all Xaa locations
  Clone ID: PAT_MRT4530_48927C.1.pep
RHEASLCLVYDIAKKDGSNTIGQAASNQFYFQFLTYYQHHEGQMRLRATTISRRWVSGSDSVQELIGGFDQEAAAAVMARLVSFKMETEADFDPIRWLDRALIRLCSKFGDYQKETPSSFSLSPRISIFPQFVFNLRRSQFVQVFNNSPDETAYFRMVLDREDVTNAVVMIQPSLISYSFQSGPEPVLLDVTXIAADKILLSDSYFTVVIFHGITIA

SEQ ID NO: 148503 - protein, 108 aa, Oryza sativa
  Clone ID: PAT_MRT4530_48928C.1.pep
VKRALHIPTNTTGPWAKCHEAKSAQKLPKGTITDGDMRSPKGWRPKLNASGSEHRLYSLELAGQLFCSEINHNRRTRDADLAQTLRPDRGSTSDSGDSNSFSGTGNGK

SEQ ID NO: 148504 - protein, 859 aa, Oryza sativa
  Clone ID: PAT_MRT4530_48929C.1.pep
METRSGGSGSASGGGGGGRMRLRKTESAEMRWVVSGGAYEEDEIESSDGGGGTPAAASGSRGGCSDSDDNYEEAEMLRQRLVRTGPRADSLDVEAQDVAGMNRHQEITVGRSIVLAVQTLGVVFGDVGTSPLYAFDVMFNKYPITSKEDVLGALSLVIYTLILIPLLKYTLIALWGNDDGEGGTFALYSLICRNARVSLLPNQLRSDTRISSFQLQVPSVELERSLKIKERLETSSMLKKLLLMLVLFGTSMVIADGVVTPAMSVMSAVNGLKVGISSVNEGEVVMITVAVLIVLFTLQRFGSSKVALAVGPALFIWFCCLAGIGIYNMKTYGSAVLQAFNPMYIYYYFERNPTQAWMSLGGCLLCATGSEAMFADLCYFSVKSVQLTFVFLVLPCLLLGYLGQAAFLMENLTENQQVFFLSIPNQAFWPVVFIAILAAIIASRTMTTAIFSTIKQATALGCFPRLKIIHTSRSFMGQIYIPMMNWFLLVSCLAFVTMFGSINEIGNAYGIAELGVMMMTTVLVTIIMLLIWQINIIVVLCFLTLSLGLELIFFSSVLGSVADGSWVLLVFAAVLYLIMYIWNYGTKLKYETEVKQKLSMDLLMELGCNLGTVRVPGIGLLYNELARGVPGIFGQFLATMPAIHSMIIFVCIKWVPVPVVPQNERFLFRRVCPKSYHMFRCIARYGYKDIRKEDYISFQQLLIESLEKFMRREAQERSLESDQYDGTDSEEEVASASSRALVGPNGSINSLGVPPAEAAGTTEHPTIGSSMSFDGSLDEAIDGRGSLDDELSFIHKAKESGVVYLLGHGDIRARKESFFVKKLVINYFYAFLRRNCRRGIAALSIPPSRMMQVAMQYMV

SEQ ID NO: 148505 - protein, 77 aa, Oryza sativa
  Clone ID: PAT_MRT4530_4892C.1.pep
LYRASVEKKIYYLVIHSAGIAHTYIPSKKPKKKLKKSDCTSENSVKGSRKTDTLDAANIKINCKYLTTHHVQKEIVE

SEQ ID NO: 148506 - protein, 89 aa, Oryza sativa
  unsure (1)..(89): unsure at all Xaa locations
  Clone ID: PAT_MRT4530_48930C.1.pep
MRVPRAGRARGVAMRVACEKVVGIDLGTTNXSAVAAMEGGKPTVIXNGEGQRTTAFVVAXTRAGSGLFGKIAKRKAXVNPRXLFFKGLI

SEQ ID NO: 148507 - protein, 64 aa, Oryza sativa
  Clone ID: PAT_MRT4530_48931C.1.pep
MILIRTRGLKSETFHRCCSNVAVVLKMSLDHLQYHQTQLKALAHASGVVQSNDYSQSTVPSYYS

SEQ ID NO: 148508 - protein, 225 aa, Oryza sativa
  Clone ID: PAT_MRT4530_48932C.1.pep
MYYLIPSPTIFVTTQAGMLPFATVHVCIVRQRARAAPGRDRRESPAQAQVAEQAAFRGRDHRAPCESLDEARKAHARHVKLGVDRSLRHARPLLAACALAADWPGSMAYAASIFAALDDPEAFDYNTLTRDYSASPAAAAPAAALSLACHRRLRVTRRGRRCSVPCLPPMRERKSEREERGRVGGKQVGPITFLKIELLTGLSRRLKPPQIGSRGGNSSGLHSWG

SEQ ID NO: 148509 - protein, 163 aa, Oryza sativa
  Clone ID: PAT_MRT4530_48933C.1.pep
MAKSVPTVSNKRGFSSFVDKPLYISKASSEHRAQQSAFTNRFLEFLRGFRLGNTEEPYYKGTAASMVFLDLPMMDVKFDHIKIFDNELALMICHDFERSRLDLNYAAKSFIMDFRSQLEGMFMKKFESFDNIIVRIDGLPKIDRLMSLEAFVKLPGNHFVEPR

SEQ ID NO: 148510 - protein, 64 aa, Oryza sativa
  Clone ID: PAT_MRT4530_48934C.1.pep
MVLIMAQRRRVRSRIPFAFCPVFLPNGHLLQEPGGGGQQAQQHYTLEGDVESGLNFSLYIYTLI

SEQ ID NO: 148511 - protein, 56 aa, Oryza sativa
  Clone ID: PAT_MRT4530_48935C.1.pep
GNERGQCHNDASKRGATPKGIAIVSWPTSRRGFRQRLPVQTHTTNPHKKDRRRSTT

SEQ ID NO: 148512 - protein, 1046 aa, Oryza sativa
  Clone ID: PAT_MRT4530_48936C.1.pep
MESLPGGPRGRVLCGKGGSHISCDGPCMRSFHAKIGTGEDSYCDTLGYTEAEVQAMKTFLCKNCEHKQHQCFICGALEPSDGPAAKVSLQQQNTQRKDHEIDTDIDTPIRDHIKFPRTPNIEKPARLLKKSTKVVKKKRPFSESVPDQLSTELRKLPDMVCIQESDRARKISARSSSEQFVVKPDKKKARFLKDTPQPDPCLLKDASTGITKPAKEQGKLLVTMPSSSTSTKIPQSSFPRVDSETEKRVMALVEREASYLTLKDISRKCLMPSTHAYSGRQVDRIIATGKLERSVQAVGAALKMLENGGNVNDAKAVCEPEVLKQLTRWHSKLRVYISPFIYGTRYSSFGRHFTKVEKLVEIVDKLHCYVEPGDTIVDFCCGANDFSRLMKEKLDKVQKKCHFKNYDLIQPQNCFAFERKDWMTVRPKELPHGSKLIMGLNPPFGVKASLANKFIDKALTFKPKLVILIVPKETKRLDQKKTPYDLIWEDSDCLSGKAFYLPGSVDVNDKVVEGWNASAPPLHLWSHPDWTRKHRKVAEEHNHTSIGRIASHVEEDNLSDNLPMMKETESYGIHNSRSGKEENAGQTSCNLKGTNLSDLPVRRQAEAGNKRNVGPGKEKETTEKTSCDVREVILSDDRPVKTQAGYGQVKAKEYHRSDSLPVKKQAETNYQQISQSGKEKEHSMDESNSTHNRSRKRTPDQVDGSLPPEKQVEVAYEERMAIPIKKSTHQEKQLDAGDRLNAHRGSEIMGAKFTEQANSDMSMSSSDSSNAQNKSRSGSPFIPIGHPADKSTGRDSFISYPPKEHLVSKQATYQGRYLASNNECNNAFEGKIDPPFHTNIDDISRKFSPGTDFEVNRQHFTAPTGNVYSLQSLRDSDRFYRTQRSEDRNTNSLESTTGDAPLHGHPTRYSRQVGDDNYLQTSRVPSTLHEQAHPRTHVGHADGYLQTSQYSLGSSGATYGQQTSSYGLPGTSTPYSIMDKYAPGFLAPSAQRSSVMDMYALVPSASGSSVMDKYAPPLEDTNYSARGVPQYPYRQLGSSGGGWPRS

SEQ ID NO: 148513 - protein, 95 aa, Oryza sativa
  Clone ID: PAT_MRT4530_48937C.1.pep
MEQWMDLIVDLYASENTKQIEAHGFELTPVDSGSRQQLSLTSRAAYGTNHGESPSTARSDWDPSAIVAGNLGRHPQLTIPPAGRPAAIWIDIKYY

SEQ ID NO: 148514 - protein, 500 aa, Oryza sativa
  Clone ID: PAT_MRT4530_48938C.1.pep
MDSDDHPPEFIIHVVDDLAPPPPPPPRAQPALVPPRILPLPPPAFHGAAVQRRRPRPPPRDEATNNRTLLFVFQVCMFTMMVINLSIAIYLTVHPSPEESIADERSGVRMTCVFIISAVHGVVERAVEKCRFERRDEAVPDAAARAELGRGPGARNGWERAIDEDELLDALDGEDLERAHEQALVLVHEAGGIGVGHADGKVFGVDKDERGGAPNLAPAGGERGSACGVLDGEAGDDPAESTSGRRLRRSTPSSGKSAERRAGDRHIGDGEVDVGEDGADGLVHILRDLAALPELGHDRFRHYKCVFMDFEYIRDARLNTGIADSWIHKYLGGDPFVHMMFEDTDVEVPMPNVDLRTSTNGAKGSTKKSSNYTCKEDIQLCISWQSISSDPIIGNEQPGKAYLKRITEHCHANRDYESVGNMGPGAEWGRVCPVPSACSRACLPVHESTKVSMELRGNDRDVPRVSRRTALGSTWGQTTALLPDEGMDDSSTQDMWAPIQ

SEQ ID NO: 148515 - protein, 140 aa, Oryza sativa
  Clone ID: PAT_MRT4530_48939C.1.pep
PTRPSSPAPPRVGVVARPPSSSPSSACRIGRGTSGTRTPASTRRRPASGASTSTSTSTSMGTTWRTAPPPSSAATRSTSSASRGSSSGTGMASRCAAAGTSWATASPRPTCSRRAAAGSPGPAQARPVGQGGGRFRRRRR

SEQ ID NO: 148516 - protein, 84 aa, Oryza sativa
  Clone ID: PAT_MRT4530_4893C.1.pep
MACVPLSFPPLLFFPLFSRPRSYIVQVVIHYFDKQSAEFINSAAGAITVSYIMQLLTGLLGREFSAVIYATQSISNILSISGEE

SEQ ID NO: 148517 - protein, 429 aa, Oryza sativa
  Clone ID: PAT_MRT4530_48940C.1.pep
APKSEHAVVIVVDEVVGAPFAVAGLLRPNLGLLLLFPLICNEPHPLVGEILLRIPPDDPTRLVRASAVCKRWRRVLADPSFAARHRAFHPRAAAAAAAPVLGVLHNPADRELDRFVPAAASSFRAAAGDRRKHHILDCRHGRVVLYDYDSHYPTDGHVVWDPITGEQHRIPNVMDALTHPAVISGAAAGGGGGSASFIVAFVGVQNWERHFWDAHACFYSSETGEWSVHINIHLDLDGYHLEDRPAALVGGDTLYFVGKSGILLRYRYGLPLRCGRDILGHGITSADVLSVVDPPPGAKRRLRLGYTVVMAAPESDGGGLRLGVLHRHKLALWDREEDGSAAAAAARWVWRVAIDLEQVLPWPVGNTKGKERACLAAVAEDPNVIFVGTEEDGVFAVELDSLRIKKVCELGKSQGRFFPFVSYCAESFL

SEQ ID NO: 148518 - protein, 499 aa, Oryza sativa
  unsure (1)..(499): unsure at all Xaa locations
  Clone ID: PAT_MRT4530_48941C.1.pep
MATCLDSLGPLLGGAANSTDAANYICNRFTDTSSAVDATYLLFSAYLVFAMQLGFAMLCAGSVRAKNSMNIMLTNVLDAAAGALFYYLFGFAFAFGTPSKGFIGKQFFGLKHMPQTGYDYDFFLFQWAFAIAAAGITSGSIAERTRFSAYLIYSAFLTGFVYPVVSHWFWSTDGWASAGRLTGPLLFKSGVIDFAGSGVVHLVGGIAGLWGAFIEGPRIGRFDAAGRTVAMKGHSASLVVLGTFLLWFGWFGFNPGSFTTISKIYGESGTIDGQWSAVGRTAVTTSLAGSVAALTXALRQEMADGALERDRRLQRSPRRLRXAITAGCSVVDPWASVICGFVSAWVLIGCNKLSLILKFDDPLEATQLHAGCGAWGIIFTALFARREYVELIYGVPGRPYGLFMGGGGRLLAAHIVQILVIVGWVSATMGTLFYVLHRFGLLRVSPATEMEGMDPTCHGGFGYVDEDEGERRVRAKSAAETARVEPRKSPEQAAAGQFV

SEQ ID NO: 148519 - protein, 56 aa, Oryza sativa
  Clone ID: PAT_MRT4530_48942C.1.pep
MKASALCAVAKVAVDRADGQLEAFMGRKFVSNQLLKYIADRGLIYNGILLGRDDAG

SEQ ID NO: 148520 - protein, 101 aa, Oryza sativa
  Clone ID: PAT_MRT4530_48943C.1.pep
PPLGFSQGVKGVQSLGGPFLGSFFFFFAVPGFLVPPFGWPFPLLGFMWGLGPPFVSLFGSLSLILLKNPPSFWLLGPPKCLAHTYFPFFGFAEPFVFFFCP

SEQ ID NO: 148521 - protein, 94 aa, Oryza sativa
  Clone ID: PAT_MRT4530_48944C.1.pep
TRAAAAAAFRSGTSPPAPWLPLQGSWRSCSSFLLSRRRLPRRRRWLAAATATCSWGCCPPAASAGARWGSALRGETLTRYDELSFFLCLVILTL

SEQ ID NO: 148522 - protein, 76 aa, Oryza sativa
  Clone ID: PAT_MRT4530_48945C.1.pep
MAATPAPLPIYKGRRRLMLQVGALPLSISGWNYGSVAKPCMVVVKHGTECRGDTADSVAGRRGGGEEQGKAGEIPF

SEQ ID NO: 148523 - protein, 96 aa, Oryza sativa
  Clone ID: PAT_MRT4530_48946C.1.pep
MRPLRLCASLCQSHGRLRGSAARGRARVPGRVWGPTSQWHVRGAWPTCQSLLSFRVLLVSRRNGVWWAFGDRLVGLGLHVTAGWGPRWCEAHMSLS

SEQ ID NO: 148524 - protein, 89 aa, Oryza sativa
  Clone ID: PAT_MRT4530_48947C.1.pep
MGGQSALGCESVIHSSGTENQALDPRGIRKLEQGQLDNANIISTENTKEAYVEKITLQFLKIQQAQVDVGGIYVSNLLNKLLDNIMQFE

SEQ ID NO: 148525 - protein, 61 aa, Oryza sativa
  Clone ID: PAT_MRT4530_48948C.1.pep
KGPPRFFCFHHCSYKKIILSMWLSTSFLQKVVFFFCEKATTSFAVLASPPVLGQFFCYLNR

SEQ ID NO: 148526 - protein, 160 aa, Oryza sativa
  unsure (1)..(160): unsure at all Xaa locations
  Clone ID: PAT_MRT4530_48949C.1.pep
KYISKRTPTGAVAVEAVRGRDGCHRRLRRTPPSLRRAGETGRRAGEGTRTPPSSPLTLPHPPSPHHAGEKGGRREGKWRRWWERRHRWRGRRPAWGRGRGGRWGEGTALPEGGEGKWRQWGEGEGXGGVGRGGGGRLGGGGWGGGGXRVRDRVFINLELI

SEQ ID NO: 148527 - protein, 59 aa, Oryza sativa
  Clone ID: PAT_MRT4530_4894C.1.pep
PRVRLRYSWRRLFVPYSQHPDRPWATSHPIPPKLFNLFTITHGTQDPYARVNYGSRLDP

SEQ ID NO: 148528 - protein, 65 aa, Oryza sativa
  unsure (1)..(65): unsure at all Xaa locations
  Clone ID: PAT_MRT4530_48950C.1.pep
IRGGARRSNKCWFCFSTGYPGHGMQLMLNDXKIFKSXPTKCDKESKMKRNPRQAKCALKKNKKLW

SEQ ID NO: 148529 - protein, 87 aa, Oryza sativa
  Clone ID: PAT_MRT4530_48951C.1.pep
SHTDISYSNSCTYSQIVIVIVNVMFLKHINEDELVDNTLRESCPQQDLVVLLIHHRRSRLARSSPKSDRPDLLKRPPFLPLISSPLH

SEQ ID NO: 148530 - protein, 91 aa, Oryza sativa
  Clone ID: PAT_MRT4530_48952C.1.pep
RGRDGCHRRLRRTPPSLRRAGETGRRAGEGTRTPPSSPLTLPHPPSPHHAGEKGGRREGKWRRWWERRHRWRGRRPAWGRGRGGRWGEGTA

SEQ ID NO: 148531 - protein, 71 aa, Oryza sativa
  Clone ID: PAT_MRT4530_48953C.1.pep
LAIGRPATRRRTRLLMTTTIPTSKSACSVTTRPGNAAVDYGGAQIRAYLHHLATVVTIRGEIDAPNVERIS

SEQ ID NO: 148532 - protein, 108 aa, Oryza sativa
  unsure (1)..(108): unsure at all Xaa locations
  Clone ID: PAT_MRT4530_48954C.1.pep
MGKIKIGINGFGRIGRLVARVALQSEDVXLVSVNYPFITTDYMSYMFKFYTVHIHWMHQNFDSQDSNTLFLNASPGSLPEIKHGDIPADCLGTIHPGTCSLSFTLLRK

SEQ ID NO: 148533 - protein, 111 aa, Oryza sativa
  Clone ID: PAT_MRT4530_48955C.1.pep
MAAGWRETPAASAAFPVAYTAVLALYLLLGVFPRPRGAPPCEALLWELADWAAVAPNTVVDEVVKIVWKEQNMKSIALQKTRSITAVLPNKSVVLQSARSITVEFENLSEN

SEQ ID NO: 148534 - protein, 57 aa, Oryza sativa
  Clone ID: PAT_MRT4530_48956C.1.pep
MSFLGGERSLRSTGRGPDVGVSRSPGDEFLVVRDRYDLLVENQVVRDRYDLLVENQV

SEQ ID NO: 148535 - protein, 333 aa, Oryza sativa
  Clone ID: PAT_MRT4530_48957C.1.pep
MCTLEQRGRVFVLTLTGDGEHRLGHSLIGSIRAAVSSVAAAAAAAGPGAALVTVAEGRFFSNGLDIGPGGIPPSRVGELVVALRPLAADLLALPMPTVAAVTGHASAGGFLLTLCHDYRLMRADRGVLYMSEIDIGLPLPPYFVAILRAKITAAHALRDVTLRGRKLKAAEAKEMGIVDVVCPTAAETAAEAVKLAEQLAARKWNGNVYSSIRLSHWAAAGSLYYLLPPLLPHPLHNFIVRDTTSAPTSLGCCSHTTPSFASTAAPPLPMRISSTASPRNSSPVLTASDLLSVPSGGSGGFRSWPVAARVRMKRRKPRGCAVVGTEAEAEEGG

SEQ ID NO: 148536 - protein, 73 aa, Oryza sativa
  Clone ID: PAT_MRT4530_48958C.1.pep
TIRLQDLQLREQSGSISLEKVVQQSYYGQLLEEKCLLAQLFFGLKVPPMRCPRPHSYWLVWLHARYVQHISRK

SEQ ID NO: 148537 - protein, 75 aa, Oryza sativa
  Clone ID: PAT_MRT4530_48959C.1.pep
GCRNRHEGPAVLGTSLRRISRPRWFLRSSPVRPDEVTFAHASARPSAHASGACQLVPKFSTICRTNLYQIKRIKF

SEQ ID NO: 148538 - protein, 170 aa, Oryza sativa
  unsure (1)..(170): unsure at all Xaa locations
  Clone ID: PAT_MRT4530_4895C.1.pep
VAQSRQKSYAXNRRRDLEFAVDDFVYLRVTPLRGVHRFQTKGKLAPRYVGPFRIIARRGEVAYQLELPASLGNVHDVFHVSQLKKCLRVPSEQADSEQIEIREDLTYVERPVKILDTMERRTRNRVIRFCKVQWSNHAEEEATWEREDELKAAHPDLFASSSESRGRDSV

SEQ ID NO: 148539 - protein, 78 aa, Oryza sativa
  Clone ID: PAT_MRT4530_48960C.1.pep
LKRKQDVCCLRTTENSWETYVRNLNNFVVGGDLVDNISHADGDASFQAFTTMYVIPIDYDVRFLTVYFNIWFGIKVIY

SEQ ID NO: 148540 - protein, 165 aa, Oryza sativa
  Clone ID: PAT_MRT4530_48961C.1.pep
MAAEKRTIGLGMDYSPSSKAAAKWAVDNLVKAGDRIILVHVLPKGADASHKELWKSTGSPLIPLLEFMEMNVQARYGINPDKEVLEILQAESKSKQVEVLAKVYWGDAREKLCEAVDDLKVNTFVLGCRGLGPLKRALLGSVSNYVVNNATCPVTVVRAPTVSNA

SEQ ID NO: 148541 - protein, 750 aa, Oryza sativa
  unsure (1)..(750): unsure at all Xaa locations
  Clone ID: PAT_MRT4530_48962C.1.pep
ERASMAGNMHSYKPQKRYRTCVKGSRVPTQMQGAPMPMQFKQVNKQQDPHHYDNQGKKXTKYRKASAVKSIGELEEKAEDQHPNQYTAKTGDAPSGPTSKPMDHSTVTAVQSATEMMGAPNKPDTATNSLPTGTGPSHNMENTSGSSNNAKQNGGESSLVTPAINTDNPSVASDAGIISSTYVSPSRSXTADTLNGALAEXMEDKKTLAFPGXNYLTPVEYIASEEEPVTYANKSXAIMAFKALLESSNVESDWTWDQAMRYLNQRKKLEAEERRIKQRKARDDFLAMLEESKELTSSTRWSKAITMFEDDERFSAVERPREREDLFESYLMELQKKTSTQWRKVQERLEDDERCSRLEKIDRLEIFQEYIRDLEKEEEEHKRIHKEQVRRQERKNRDEFRKMLEEHVAEGMLTAKTRWRDYCAQVKDSSVYLAVASNISGSMPKDLFEDVMEELEKQYQDDKARIKEAVKSGKIPMTTSWTLEDFETAVTEDDTLKGITNINMKLIFDDQVERLREKEVKEAKKRQRLGENFSDLLYSIKEISASSTWDDSKALFEDSQEYKALDSETYSRELFEECVVHLKERLKEKERLREEEKARKEKEREEKERRKEKEKKEKERKEKERDKEKEREKDKGKDRSRKDEMDIDAVDADSHGSKDKKREKDKEKKHKRHHHDTADDVSSERDEKDDSKKSRRHSSDRKKSRKHTHASDSDSENRHKRHKKDRDSSRRNGTRDDLEDGELGEDGEIH

SEQ ID NO: 148542 - protein, 102 aa, Oryza sativa
  Clone ID: PAT_MRT4530_48963C.1.pep
GAGCLDTAASSVDIGWSHTDEPLLLRSWFGPTAPIARVTYHHPPADGGGTCAGVRAVLPQPDEPGPAPARLPRRQLLPHPGPRRGPPQRVRRAVGRLRGLRR

SEQ ID NO: 148543 - protein, 100 aa, Oryza sativa
  Clone ID: PAT_MRT4530_48964C.1.pep
MARTNGAVAAAHRGIELLGYSFGHGRCEVEAEGRGAGRSRSSGRGGEIIEGPGHVLRASTKDLLKFVSCLDRIENRYGLFVHAVQDMNNDDFELITTSKF

SEQ ID NO: 148544 - protein, 109 aa, Oryza sativa
  Clone ID: PAT_MRT4530_48965C.1.pep
HFLSSFEAKYEVQMTLSETVCWFSTTSAMQFDPTKSSCCPSPYFEFSIDLDAFQSAANALLCSKLLFLPISDKPRPDQQLSALSGPPRESRAFAYPELKIPPVFSGAHC

SEQ ID NO: 148545 - protein, 92 aa, Oryza sativa
  unsure (1)..(92): unsure at all Xaa locations
  Clone ID: PAT_MRT4530_48966C.1.pep
IGWSMNELDVATTTNTLKRIILGREAFCLYMKXRLLDTSSTHCCYRVLQFDCCICSMYNRISIIIISGWMQIHLFLHLVCCKRHLPFIQTVG

SEQ ID NO: 148546 - protein, 101 aa, Oryza sativa
  Clone ID: PAT_MRT4530_48967C.1.pep
SHLTGGFRVGDASIVCDAYFPLRMANKVLLPQAYCLCLLNHETSTTIRDSNCKRPSRKSLVGIICSIQIYLRLLEQIICSCTITLSLLSENHKNFCCWVLH

SEQ ID NO: 148547 - protein, 34 aa, Oryza sativa
  Clone ID: PAT_MRT4530_48968C.1.pep
RKVSISTLKSFIYDKDNIMCSDIILMISSFSGVK

SEQ ID NO: 148548 - protein, 47 aa, Oryza sativa
  Clone ID: PAT_MRT4530_48969C.1.pep
PPALLPMGPPPAESLASRSQPPPPRRDACCWSRLGGALGGGRDGQHW

SEQ ID NO: 148549 - protein, 509 aa, Oryza sativa
  unsure (1)..(509): unsure at all Xaa locations
  Clone ID: PAT_MRT4530_4896C.1.pep
MRSSSDCKVVAAAARKKEKEAAAWPWSLWGFLLTGCLGGGGGGGKKKSGGKKVRPRGGGGGGLRRLSFTDLTGAADQDLSVSLVGSNLHVFTVAELRDATRGFVSGNFLGEGGFGPVYKGLVGDGVKPGLRPQAIAVKLWDPEGAQGHKEWLAEVIFLGQLRHPNLVKLVGYCCEDENRLLVYEYMEHGSLENHLFKQIPAVLPWSTRLNIAVGAAKGLAFLHDAEKPVIYRDFKASNILLDSDYKAKLSDFGLAKDGPEGDDTHVSTRVMGTHGYAAPEYIMTGHLTAKSDVYSFGVVLLEILTGRRAVDKTRPNREQSLVXGRYSPAAAREXAAAVAYRCLSGSPKNRPDMSAVVDALEPLLVATDDVPLGPVVLFVAPDQEADAAAAADDDEDDKARRRQRRTRKDEQHRRRSRLRTSPKGSPRKPAVAAACRNEEFWVWHVPADHKARKMELPLRCFHGAKVAAVAAAGDGGVAGRAAVPAKGGGGGVARGVKVVPYSSSIRCFV

SEQ ID NO: 148550 - protein, 240 aa, Oryza sativa
  Clone ID: PAT_MRT4530_48970C.1.pep
MKPVAAGSGWDEAHRRQIWPSSSWSPLVTVRRPGCRRRRRPRRHPLVVVVVAAHSSSSSSLPPTRRRRGRPLVVGVVVVGVGAAATTTPGEERPHVEGSVDGGAETVRGEKRVSDGKETTSDSVGAWRRQDPGAVVVGQWGDDAAGGAPDHHGRRQPRSLPIKLLKRLLLFVVLVVGFLAAAALLLLGGTGASYGRGAGDAATGDERLAQHKRRGAALGGVDGATGYQVSVDIQVPRPDT

SEQ ID NO: 148551 - protein, 175 aa, Oryza sativa
  Clone ID: PAT_MRT4530_48971C.1.pep
MYIYIYVCIYIYMCIYMCVYIYVHVYMYMCIYIYIYVYVYVHVYIYIHVCVYIYTCVCVCVYIYIYIYIYIYIYIYIYTHTYIYIYIYTYIYIYIYIYIYIYIYIYIYIYIYIYIYIYIYIYTHIDIHIHTIIYIHIYFRPYFHIYIRTYVLIFLLNIFGVIFTLYFFHPPRVMS

SEQ ID NO: 148552 - protein, 93 aa, Oryza sativa
  Clone ID: PAT_MRT4530_48972C.1.pep
FFFFFFLEKQLSNYNSQHLFYRCHRLCFFFLWLLRCFSSPGCLLPAHGFSRQFKRLTYLGISGSMLIFNSPKHFVATPFLVSGYLGIHRLVPN

SEQ ID NO: 148553 - protein, 68 aa, Oryza sativa
  unsure (1)..(68): unsure at all Xaa locations
  Clone ID: PAT_MRT4530_48973C.1.pep
DDLIHKKFIYKTKDIVNKSRYNLISKIPNTSLGYYWXRVTTIPALDKSCLARKTCVSIFRXSHQNSQV

SEQ ID NO: 148554 - protein, 149 aa, Oryza sativa
  Clone ID: PAT_MRT4530_48974C.1.pep
MARRYPPTLPPLARPSTPLQRCPTLFACHFVLVGVTWGFGSISASVTNSNDATTSPLKLGGAADASDLGYLPYLGCSCGLEQIRENRLAGPLEASFDPHPSFAVAVNTLLHVSPVTVARDLWPCSPHPPHQPKPGTILPWDLKYIAFVN

SEQ ID NO: 148555 - protein, 710 aa, Oryza sativa
  Clone ID: PAT_MRT4530_48975C.1.pep
MSSSASPSAAPSAEYAESNTINAFLFNQGPMTTTLIDITMITGLDVTSSANPMSMNSKNQFDFRTKSIGGWSGYVAAYMGQGSVTPREHVAFLLMWLEKFLFCGSSCGPTTNWQFVAEALESKKEFPLGKILLGYLYETLNNASAKIAVGSVVGAGGQWWLLQTWLNLMVMKVVNRPSVTDAEFPLPEPIAGDDGEERTHRRCTSYGEYASTPTDARAKLSAELLKDWFCGFYEGFKKDARVWFPYEDSADLELPSVFRFEDINHEKYQKSREVLTAAISPCILPVGIHQGRNIQTIDSSPPHQSNSGRNIEYSPGLIPNGGGLSPPVIGYHAPKTSTLLHGLTREPADAGKKRKTRSSAVSTLALAPKKKAKFKKTKPTDDLPALDPSIEQALDEEEIGEDIDQIVAEMSDTERTPSASPKQTPPTPAPVHFRRKKKTAVKKKPAATIVKSAPPQSSSDQTPSAVGSHHIEEEEQPASSAIPVLADLFSFDIRDYLDEAEEDTSSKALAPLPDDVKKTLEDISHRLEASSLDNLVVNCGPIRTRLHEIQALIPDELANILTPVVYLEQHQFKLEKSKLRLAECRERKDIEATIQANRQLVHEEKSKLDQLSESPIKSNIDWLEARKIELLAQLQECNAELDQEHKKLADLPRSIEEQKARLKSAIKNVADLTKSLKIIPGTDAQDAQAIEEVELIRQRAISAIQQYLSQ

SEQ ID NO: 148556 - protein, 123 aa, Oryza sativa
  Clone ID: PAT_MRT4530_48976C.1.pep
MEMADELGHLLVFGFLFNLGVYMVAPAMTDVTMDALCPGQDECSLAIYLTGLQQAITGLGALVATPIVGNLSDKYGRKALLLLPATASILPLVILACNRTKAFFYAYYITRMVTAMVAEGSMH

SEQ ID NO: 148557 - protein, 459 aa, Oryza sativa
  Clone ID: PAT_MRT4530_48977C.1.pep
MSSSASPSAAPSAEYAEHLSNLIAIPSLSHENHYFLGPIGNLDSTDFIIGETNRIPFRLANPNLSHWKNTFKSWPSLEKTTPEKSWITWYQRVSANKKVHWDEIGIGQALDLTIANLAKDEPLMAAASYFWSNTINAFLFNQGPMTPTLIDITMITGPLLGSIDNIELAGFRSKNFDRWWGEWKLHLFHQSASMYMTDLFPDVIPQKKKTAVKKKPAATIVKSAPPVLADLFSFDIRDYLDKAEEDTSSKALAPLSDDLEASSLDSLVVDCGSIRTRLHEVQALIPEELADVLTPAAYLEQHQFKLEKAKLRLAERRERKEIEATIQVNRQLVHEEKVKLDQLSEGPIKSNIDRLEAHKIDLLAQLEECNAELDMEHKKLADLPKSIKEQKARLKSTIKNVADLTKSLKVISGTDAQDAQAIEEVEQIRLSSSTYLNNSCVIGPRNFCNRLRCLNTPLF

SEQ ID NO: 148558 - protein, 59 aa, Oryza sativa
  unsure (1)..(59): unsure at all Xaa locations
  Clone ID: PAT_MRT4530_48978C.1.pep
VLERNSSRRVRIKRAPNSIVSPAIVTLNRPSSTIGQPMISLLSTRTLXSSLHYQLRTRM

SEQ ID NO: 148559 - protein, 526 aa, Oryza sativa
  Clone ID: PAT_MRT4530_48979C.1.pep
MSSSASPSTAPSAEYAEHLSHLVVVPSLSHENHYFLGPIGNLDPTNFIIGETNRILFRLANPNLGHWKNTFKLWPSLEKTTPEKSWTTSYQCVSATKKVHWDEIWISQVLALTIANSTKDKPLMAAATYFWSHTINAFLLNQGPMTPNLIDITMITGLDVTSSANPMSMNTKNQFDFRTKSIGAEALESEKQFPLGKILLGYLYQTLNNASAKIAVGSVVGAGGPWCLLQTWLNLMVMKVVNRPSVTEAEFPFPEPIVGVDGKERTHRRCTSYGEYASSPTDPGAKLSAELLKDWFCSFYEGFQKDARVWFPYEDSADLELPSDFRFEDINHEKYQKSREVLTAAISPCILPVGIHQGRNIQVSYEFYHPMSSARQFGLGQLPIGLFFADKIQCRGGISSTLMMDRLLSLQGPPLGSIDNIELATFRSKSFDRWWGEWKLHLFHQPVSMYMTDLFPDVVPQTTESSPPHQSNNGKDIQYTLGLIPNGGGLSPPVIGYDAPKTSALLQGLVREPADAGKKRKTRSSA

SEQ ID NO: 148560 - protein, 177 aa, Oryza sativa
  Clone ID: PAT_MRT4530_4897C.1.pep
MPAGKVKMMLVPVEQPPALQRSHSPEVTKLPTRQHIAARRCVGGLRVLVDTVTLDLVGGRRTTAVGKNLRRQRERQAVSPEQPFTVGRNLVYVARGFVYVAKKVGRDVKWERRDNNDLDPVGAARSTPPAPPATGIIRHQGKEKHNGTSAGVAGQSLASTPRISTWRRAVREGEMRC

SEQ ID NO: 148561 - protein, 191 aa, Oryza sativa
  unsure (1)..(191): unsure at all Xaa locations
  Clone ID: PAT_MRT4530_48980C.1.pep
PKYVARHSSLPCSICQLATFEIRESSEGNQAKPFTXTLTVRAHQPRRGPTFANRPLKKLIPQMVLSLSGAVPPPTWRGDAEEHTRTNHIKNKLKRTKYVTYGIFQSSTEKLLSSKTQSCKRNLEILISPNPVKQRXIGCNFFYRCPWIYYLSDSEXRGGATHAGALLLPRRFACATVTGGRRQRGWTTAPA

SEQ ID NO: 148562 - protein, 337 aa, Oryza sativa
  Clone ID: PAT_MRT4530_48981C.1.pep
MAVFSTNHAAVAVPLIAPNRAGVTVGVPVPAPPPISSIHAARVAVSAPDPRLCAPQITVGRSRRARRRKLIPSAIDRRGIYMVALMRGTLVWAYNLVDDDELVKLVSSGAVVEGQAFAPGKAVVPKPGENRTVVFVIFFEEGLRFPFNMLFPEILRLFQVELPQLSPSALVRIAIFDWACRIAGFDPSADLFGTMFYATVNSKTVDRNWVAKWFYLSIPFEAGSDAAKALRRRRRVIAPNRKPKVAVDGAMEARFALLHKSWQVEVDGLPKLVMPAGANVLTLAQADTEARKLIGDVSVAEFSQLLSRQAARRANRCRIEMSTRRGGDSGSNISLGK

SEQ ID NO: 148563 - protein, 653 aa, Oryza sativa
  unsure (1)..(653): unsure at all Xaa locations
  Clone ID: PAT_MRT4530_48982C.1.pep
QTLNNASAKIAVSSVVGAGGPWWLLQTWLNLMVMKVVNRPSVTEAEFPLPEPIVGDDGQEHTHRRCTSYGEYASTPTDAGAKLSAELLKDWFCSFYEGFKKDARVWFPYEDSVDLELPSDFRFEDINHEKYQKSREILTAAISPCILPVGIHQXRNIQVSYEFYHPMSSARQLGLGQLPIGLFFADKIQCRGEITSTLMMDRLLNLPGPPLGSIDNIELAGFKSRNFDRWWGEWKLHLFSSIDFDVYDRPIPXVIPQGIDSSPPHQSNSGSDIEYAPGLIPNGGGXIPPVIDYHAPKTSTLHHGLFREPADAGKKRKTRSSAMGTLALAPKKKAKSKKTNPTDKPTDDLPALDPSIEQALDEEEIGEDVDQAAVEVSDIERTPSTSPKQTSPTPSARTHFTRENKIAMKKKSAAATSKPAPPPPPPPSPSVQQSSSDRTPSAVGSQHIEEEQPAAPAIPALADLFSFDIRDYLDETEEDTSSKALAPLSDDVKKTLEDELADILTPGVYLEQHQFKLEKAKLRLAERRERKDIEATIQANRQLVHEEKSKLDQLSEGPIKSNIDRLEARKIELLAQLQECNAKLDLEHKKLADLPRSVEEQKARLKXAIKNVADLTKSLKIIPGTDAQDAQAIEEVEQITQRAISAIQLYLSQ

SEQ ID NO: 148564 - protein, 44 aa, Oryza sativa
  Clone ID: PAT_MRT4530_48983C.1.pep
ASTPLAVHIQMPRTNTGEGSPKRSMTAAPLKAKHIRLPHYLKRH

SEQ ID NO: 148565 - protein, 766 aa, Oryza sativa
  Clone ID: PAT_MRT4530_48984C.1.pep
MLAPSSCHVDSRVPRWQEDGAREAGRRRQPLSHRHHPLRRRRAPLPLPPAASPPARSSGGEGAASAAACRLSSRQIRRKGGHHLRRCPPPAASPLARSSKGEGTSSAAARRPLPGRLPSRRIWRRGGRGIRRRRRASAAPIRPIPMRVFVVVVVVVQGHGNKRADYARLAVALRQDHGMPAVVVARVSACPDWLRKAVAWASWEHGCAGHPSRSEAAAPPPPSSSVPSARGDELIHLLPPGVWAAAAATPRADATVGTLLMRKHEAWEICLTPVQVQSSPSASKKAHWDEIGIGQALDLTIANSANDEPLMAAASYFWSNIINTFLFNQGPMTPTLIDITMITGLDVTSSANPMSMNTKNQFDFRTKSIGGWSGYVAAYMGQGSVTPREHVAFLLMWLEKFLFCGSSCGPTTNWQFVAEALESKKEFPLGKILLGYLYQTLNNASAKIAVGSVVDAGGPWWLLQTWLHLMVRKVVNRSSVTEAEFPLPEPIVGDDGEERTHRRCTSYGEYASTPTDAGAKLSAELLKDWFCSFYEGFKKDAQIYSLMSYLRQSTLPLHTKVTVAGTLNMPQGTSRCRQEKENQIISREYFGLISKKKAKSKKTKPTDKPTDDLPALDPSIKQALDEEEIGEDVDQAAAEKKKTAVKKKPAATVIKSAPPVLADLFSFDIKDYLDEAEEDTSSKALAPLSDDVKRTLEDISHRLEASSLVDCGSIRTRLHEVQALIPKELADVLTLAAYLEKHQFKLEKAKLRLAERCEHKEIEATI

SEQ ID NO: 148566 - protein, 275 aa, Oryza sativa
  Clone ID: PAT_MRT4530_48985C.1.pep
KKKTAVKKKPAAIIVKSAPPQSSSDRALSTVGSHHIEEEEQPAAPTIPVLVDLFSFDIGDYLDEAEEDISSKALAPLSDDVKKTVEDISRWLEASSLDSLVVDCGSIRTRLHEVQALIPEELADVLTPAAYLEQHQFKLKKAKLRLAERRERKEIEATIQVNRQLMHEEKVKLDQLSEGPINSNINRLEARKIDLLAQLEECNAELDMDHKKLADLPKSVEEQKARLKSAIKNVADMTKSLKVIFGTDAQDAQAIEEVEQIRQRAILAIQQYLSQ

SEQ ID NO: 148567 - protein, 36 aa, Oryza sativa
  Clone ID: PAT_MRT4530_48986C.1.pep
PCVRFHDSCLNNMCGGKIQVECHLKVEKLSRCLIFK

SEQ ID NO: 148568 - protein, 58 aa, Oryza sativa
  Clone ID: PAT_MRT4530_48987C.1.pep
FFVLKLSKWTPSDKYGGKIRKVMFRSLCHSPLCPPDTAVTEWQRASFSKNKTNLVRLN

SEQ ID NO: 148569 - protein, 53 aa, Oryza sativa
  unsure (1)..(53): unsure at all Xaa locations
  Clone ID: PAT_MRT4530_48988C.1.pep
ERLIXXEGAENGLEFTIXRPFXWXXPRXDFXPGVXGPSEGXPXXWACFXNXLL

SEQ ID NO: 148570 - protein, 53 aa, Oryza sativa
  Clone ID: PAT_MRT4530_48989C.1.pep
RVAFSLLFICCCCLSVLVIPCFFFFFFVFPFGPSLLGWHVDSGLFRNLQMVSY

SEQ ID NO: 148571 - protein, 203 aa, Oryza sativa
  unsure (1)..(203): unsure at all Xaa locations
  Clone ID: PAT_MRT4530_4898C.1.pep
TLAGAMGPTRQPHPRARAADGRAPPGSRGARPKAASPARPTGGGAPAPRWSPPATTGAAGWRPRERREEGSEAAVLGSPRVDGGDKNGDRSGERRRCGSDRRGRRRSDGRQAKRRGGRGXRGRGEAEGGDAETGGDPGRRRRRIGARRRRRRERTTARARIRRGESAASGGNGGAKHEERLYSVGSERGRPERKETGAAISAP

SEQ ID NO: 148572 - protein, 578 aa, Oryza sativa
  unsure (1)..(578): unsure at all Xaa locations
  Clone ID: PAT_MRT4530_48990C.1.pep
MPSLLFSLFSLPIFGPAPGGIGDRGGGPARQQSGGGLRVERTAGERGGGCRLVCSGPADCEIGCFVARFVDRTYASSPGSGNSRGISYMDGIQTSDSSHHGIVENSPYRTPYDRYAEGGQLGASWYFSRKEIEENSLSRRDGIDLKKESYLRKSYCTFLQDLGMRLKVXQVTIATAIVFCHRFFLRMAAHHMATATIATVCMFLAGKVEETPRPLKDVILISYEIIHKKDAAAVQRIKQKEVYEQQKELILLGERVVLVTLGFDLNVHHPYKPLVEAIKKFKVAQNALAQVAWNFVNDGLRTSLCLQFKPHHIAAGAIFLAAKFLKVKLPSDGEKVWWQEFDVTPRQLEEVSNQMLELYEQNRVAPPPSQGNDTEGSSASVVNQRASGKAPGSSEEPPTHENHLAPRQSSTPGHQGYDHPHPEKQNSSQRVPQNDARDGTANSNEGPNMSSTMDAMKKIDKDKVKAALEKRRKSKGDVAKKVDIMDDDDLIERELEHGVELAAEDEKIKHERRQSWPHSAHREDHQGVARLTENTEEGELSIDSQEYRSPELDNRKRKDMHEHRNYDRGERDLKRLRS

SEQ ID NO: 148573 - protein, 276 aa, Oryza sativa
  unsure (1)..(276): unsure at all Xaa locations
  Clone ID: PAT_MRT4530_48991C.1.pep
MMGFCNLQSCGIGVDXSYDDDDAQEGLSAPSGEEEEEEEPARAPVRSRRRQEEEEEEAAPGHDRFKLINGKEIFQEKAYLVGVECKRSGGSMFSIEESLEELEQLADTAGLMVVGSTYQKLSTPNPRTYIGSGKVAEIKSAIHAHDVETVIFDDELSPGQLRNLEKSFGGGVRVCDRTALILDIFNQRAATHEAALQVTLAQMEYQLPRLTKMWSHLERQSGGQVKGMGEKQIEVDKRILRTQISALRKELESVRKHRKLYRNRRQSVPIPVVSLV

SEQ ID NO: 148574 - protein, 845 aa, Oryza sativa
  unsure (1)..(845): unsure at all Xaa locations
  Clone ID: PAT_MRT4530_48992C.1.pep
DNSYGAKNNCIARSTAQIYWTSFIDIKGNMYDIVVEGFQLLSRWTGRIWEQCAWKFSRPCKEPPSDSQHGSTTFFDYEKVVRWNYTGEERRALLELIGYIKSIGLMMQRCDTLVSEALWETIHMEVQDFVQDKLDTMLRTTFRKKKDLSRLILSDMRTLSADWMANTSKGDPEHNSLETEEMRQSTFYPRPVAPTAAQVFINTLSCESFCFXALCSYSNXRAGIPVEDLKQLETFFYKLSFFLHILDYTATIGTLTDLGFLWFREFYLESSRVIQVSFPIECSLPWMLVEHVTETQDAGLLESVLIPFDLYNDSAQHALTCLKQRFLYDEIEAEVDLSFDLLVEKLNEIIFTYYKSCAASTLLDSSFTYLCDDGEKYFVKPLRFDAIFKLRRVMRFESGDLCGVVELQQLLDILELTHQSISKFLELDSYSLMLSEMQENLSLVSYSSRISXIWNEMQTDFLPNFILCNTTQRFVRSLKGTHHSSQRSSASTGKAYFYCGSHDLTMAYQGISGLYRDFFGIPHMFAVVKLLGSRSLPGIIRALLDHISSKVSCLSSQEALPKSIGLLSXHEILTWEAKSEVKTEVLHDLKEIGSALYWMSLLDIVLRQIDTTQFMQSAPWLGLIPGNDGQVKHAYSDNTPFTTLLSAATNAVASSPACPNPSSFLVMAKQGLLYKSNLNSGSVLEYALAFTSAALDRHYSKWSATPKTGFIDITTSKDFYRVFSGLQYVSYLEESINPSRKQEMLGDSVAWAGCTIMYLLGQQQHFELFDFSYQFLNVAEVENATVSLYQYGYEGILEAMRKARRLNNHVFSMLRAWIRSPAGRSQQAAATPSSPLPLHEHLAQC

SEQ ID NO: 148575 - protein, 75 aa, Oryza sativa
  Clone ID: PAT_MRT4530_48993C.1.pep
VKSGEIAHRSISNHPLVQSHTTTYIFYVKLYSATHSASKRSLVHMMKKFPQHFRKYMSLYGSTLYIYINARLVMP

SEQ ID NO: 148576 - protein, 248 aa, Oryza sativa
  Clone ID: PAT_MRT4530_48994C.1.pep
MAVFYHRQRHRRKRSTRLRIRCEEKPSPLHMAGEGRGRVVSRLSCGARMASPPPGDDEAARALALEQCERDFNAVIDRMLNLNLDGDDAAASSAASPEPPAPQAAPAPEVAAAAAVDGAARGDRGYWVETMMRELWAAASMDDARERGARVLDAFGAAVGAGTAARLDAASRQIGFLKRAVLFHHRLRTAQEKAQRELRWQLDDYREQVRRLEASNYALSLHLRQADLRRGGGGGGAMPHGPGNPEIF

SEQ ID NO: 148577 - protein, 229 aa, Oryza sativa
  Clone ID: PAT_MRT4530_48995C.1.pep
LLGGGGRRRGGSLRRRWLASVAAVTAAATLEAVATSAARKELGAREVQPMVAEAGSAREAQAAEMEAGLAREARPVEGGRIGARRRGAAGDGGGDLGVRRSCRWVWRGLRRMKAGRRGTPVQGSHMSAKLVWWWSIGPTTANPPASGSATVDLDSQDPVVADLMLLRPVTADSSYGGHIAVFTIVVIVVITSVVVVVATFIVAGPIDVPLPPKAHQVGVIDGADFYRQG

SEQ ID NO: 148578 - protein, 128 aa, Oryza sativa
  Clone ID: PAT_MRT4530_48996C.1.pep
MCDAPRVPRDPTYLHLRQLLLLREGTPMTNLGPRLQCRHHPAAHEHTTTLIIIITIVMHLIRWRLEKLIEILLVVVVDGRRPSFFLRVSRLIAQFRSKSKRERDIAFSDSPHRLWYRKFAWKNWSPSR

SEQ ID NO: 148579 - protein, 577 aa, Oryza sativa
  unsure (1)..(577): unsure at all Xaa locations
  Clone ID: PAT_MRT4530_48997C.1.pep
MASAAAAAAAAPKSPTLMRGIQSRGFWSAGECPVTPGPGIXHATRSTATTRWPRRVXTLLKMGEIVSSAIVHETVNRIISGLIDKCERKSSAREHLDRLEMAQIKLELALETSKKWQIISDLSXSELPLLRWQKKLKRVAEECDDTIRMCRQRVQEEQEAKQVARDSFFPRRIAHATKSLISSIFYGNIDEPTRSTVRRFEWFADGANDFLRSVESGGTPRRYLFFDPLIGHLLAGEMLEYKLVQGNKQHLFWIRPNNIAERIEGMVFFVYNDGTAPEDNFFLGMILQISESTNIVGTIIKCLQLFAPHFESVTETVRKELTLLPTQDFSWIPHSRLYHWDNLHSIATEWFRPNPVCCKHHDQKVCGSGNMNMIELPDFSLESVIQVNLQCHVALPGFRERGTIVEGKSSLKEYLRGPHLNVLLAYTPHGSSESLFPSVEGSVIEVINANEQHCLHTNIALQQMEEIMLPRAVDYFHQNAKATVYQMLWKPKHGVAYLHAVKATVNILSTRRTIRGARKSKLLRQQDHKMHHRTDGISDFLSLWAAHAPVQLQGSILDWVQKEKEVQLAAPLLRLKF

SEQ ID NO: 148580 - protein, 1294 aa, Oryza sativa
  Clone ID: PAT_MRT4530_48998C.1.pep
MADPARGSSGSAFLYPQLTSTNYTSWVIRVQAMMEDQGVWEAIEPAAGAAVDPRKDKKVKSHLLQSLPEDLLMQVAKKRTAKEVWDCLKTRFVGADKVRDARLQTLKGEFASMVMEAGESLDQYAGRITMMGVRHSALGATLNDAAMVKKLFDTVPEKFVSLVVGIEQFYNVDDMPFEEAVGRLKAYDERVRKKKAAASGVTADGQVLLTKAEWEARFKKGRGETSSPQKNKPSGEGANRGQARRSRGRGRGRGGTQSSGGGSGGGGRDKSHIKCFNYEEFGHYSTQCPHPKKKKAEAHLVQTDDAGPALLLAVTKAVQNAPGQGMDCGLVVHEERVWPRLMLAEKGAAAGDLWYLDNGASNHMTGDRRKFRELDETVTGVVRFGDASSVQIMGKGLILFACKNGDQWLLDDVYYIPSLCCNMVSLGQLTETGHRVVMDNDDLEVFDKNPWRLVIKVRRTSNRLYRIELQLASPVCLLTSLGDPAWLWHARLGHVNFQTLKLLVDKEMAAGVPQVHHPNQLCQACLMAKQIRQPFPAMANYRAEAPLELLHMDLCGPITPSTFAVNRYFLLIVDDFSRWMWVFVIKTKDQALEMFAKFKPLAENTADHSIKTLRTDHSGEFLSGEFARVCDEAGIERHLTAPYSPQQNGVVEHRNRSVMAMARSLLKGMSVPGRMWGEAVRHAVFLLNRLPTKSMGEHTPFEAWTGKKPHLGHLQVFGCTAHTKVTTPNLKKLDDRREENSTEFVVEEPVGEQQPALAEQSTTVEASLSTAGSDDGPLRYRSLADIMLEAPRVDLVDEEDGEALLAETEEPSSYREAAGEPAWVDAMQKELEAIEKNSTWSLCTLPVGHKAIGLKWVFELKKNTTGEVIKHKAWLVAKGYVQRHGVDFEEVFAPVARLDTVRTILAVAADRGWRVHHLDVKSAFLNGELEEEVYVAQLEGFIKKGQEHLVLKLSKALYGLRQAPRAWNICLDKSLKELGFMRCKQEQAVYTRGRGAEAMIVGVYVDDLIVTGENPARVEAFKKQMMGEFEMNDLGLLSYYLGIEVGQVPVDPKTQLQKDADGHPVDAIEYRRVIGCLRYLLHTRPDLSYAVGVASRFMEHPTMTHLKAVKQILRYLKGTIDCGLVYTAGIGEITITGYTDSDLAGDVDDRRSTGGMAFYINNSLVAWSSQKQKTVTLSSCEAEFMAATAAACHALWLRALLGELLGEEAKLVKLFVDNKSAIALMKNPVFRGRSKHIDTRYQFIRECIERRQILVEFVRSEEQRADALTKGLPAAKLVTARFLLRVRDLGERQA

SEQ ID NO: 148581 - protein, 75 aa, Oryza sativa
  Clone ID: PAT_MRT4530_48999C.1.pep
VHRFTISQAMSFFSPAAHGEEVEMDGRVAHRKGKLTAAVVEVRRKASGELVAIGRQWMTSTRARPEKNGESRSKL

SEQ ID NO: 148582 - protein, 529 aa, Oryza sativa
  Clone ID: PAT_MRT4530_4899C.1.pep
MRSSSDCKVVAAAARKKEKEAAAWPWSLWGFLLTGCLGGGGGGGKKKSGGKKVRPRGGGGGGLRRLSFTDLTGAADQDLSVSLVGSNLHVFTVAELRDATRGFVSGNFLGEGGFGPVYKGLVGDGVKPGLRPQAIAVKLWDPEGAQGHKEWLAEVIFLGQLRHPNLVKLVGYCCEDENRLLVYEYMEHGSLENHLFKQIPAVLPWSTRLNIAVGAAKGLAFLHDAEKPVIYRDFKASNILLDSDYKAKLSDFGLAKDGPEGDDTHVSTRVMGTHGYAAPEYIMTGHLTAKSDVYSFGVVLLEILTGRRAVDKTRPNREQSLVEYARPCLRDPLRLIRIMDPALEGRYSPAAAREAAAVAYRCLSGSPKNRPDMSAVVDALEPLLVATDDVPLGPVVLFVAPDQEADAAAAADDDEDDKARRRQRRTRKDEQHRRRSRLRTSPKGSPRKPAVAAACRNEEFWVWHVPADHKARKMELPLRCFHGAKVAAVAAAGDGGVAGRAAVPAKGGGGGVARGVKVVPYSSSIRCFV

SEQ ID NO: 148583 - protein, 69 aa, Oryza sativa
  Clone ID: PAT_MRT4530_489C.1.pep
MAWSFKEKIYLPCDKNEPLTNHVRVQGLDGPQTEPQTKPYPLDMWKYGSALQQRPELNPYSGRGATSHN

SEQ ID NO: 148584 - protein, 93 aa, Oryza sativa
  Clone ID: PAT_MRT4530_48C.1.pep
MEIQYELNSDRDPNRSPRGLGGPSDGSYIFVRGVTSGGIASPWEYGEENARGGEGRAGAIDYFLYIDARYFARVPSTSQRLLPLRSASSGNDL

SEQ ID NO: 148585 - protein, 494 aa, Oryza sativa
  Clone ID: PAT_MRT4530_49000C.1.pep
MALVPVTADPARGSSGSVFLYPQLTSTNYTSWVIRVQAMMEDQGIWEVIEPAAGAAVDPRKDKKAKSHLLQSLPEDLLMQVAKKRTAKEVWDCLKTRFVRADRVRDARLQTMKGEFASMVMEAGESLDQYAGRITTMGVRHSALGATLNDAAMVKKLFDTVPEKFEAVGRLKAYDERVRKKKAAAGGVTADGQVLLTQAEWEVRFKKGGGETSSPQKNKPSSDGANCGQAGRGRGRGRGHGGTQSSGGGSGGGGCDKSHIKCFNCEEFCHYSTQCPYPKKKKAEAHLAQTDDTGPALLLAVTEAVQNAPGQGMDCGLVMHEERVWPRLMLAEKRATAGDLWYLDNGASNHMTGDRRKFWELDETVTGVVRFGDASSVQIMGKGSILFACKNGDQWLLDDVYYIPSLCWNMVSLGQLTETGHRVVMDNDDLEVFDKNPWRLVMKVRRTSNCLYRIELQLASRLVDPSKHSGQTAVASSCPASSRGCAMRLASSDI

SEQ ID NO: 148586 - protein, 1010 aa, Oryza sativa
  unsure (1)..(1010): unsure at all Xaa locations
  Clone ID: PAT_MRT4530_49001C.1.pep
MALVPVTADPARGSSGSVFLYPQLTSTNYTSWVIRVQAMMEDQGIWEVIEPAAGAAVDPRKDKKAKSHLLQSLPEDLLMQVAKKRTAKEVWDCLKTRFVRADRVRDARLQTMKGEFASMVMEAGESLDQDREFYNVDDMPFEEAVGRLKAYDERVRKKKAAAGGVTADGQVLLTQAEWEVRFKKGGGETSSPQKNKPSSDGANCGQAGRGRGRGRGHGGTQSSGGGSGGGGCDKSHIKCFNCEEFCHYSTQCPYPKKKKAEAHLAQTDDTGPALLLAVTEAVQNAPGQGMDCGLVMHEERVWPRLMLAEKRATAGDLWYLDNGASNHMTGDRRKFWELDETVTGVVRFGDASSVQIMGKGSILFACKNGDQWLLDDVYYIPSLCWNMVSLGQLTETGHRVVMDNDDLEVFDKNPWRLVMKVRRTSNYRGGEFLSGEFARVCDEAGIERHLTAPYSPQQNGVVECRNRSMMAMARSLLKGMSVPGRMWGEAVRHAVFLLNLLPTKSMGERTPFEAWTGKKPHLGHLRVFGCTAHAKVTTPNLKKLDDRSEQFVYLGIEEGSKAHRLFDPRRRRIHVSRDVVFDENTPWQWSAAVGEENSIEFVVEEPVGEQQPVPAEQSATVPFTPTPGLTSTHSAEVEASPSTAGSDDDPLREPAWVDAMQKELEAIEKNSTWSLCTLPAGHKAIGLKWVFKLKKNTAGEVIKHKAWLVAKGYVQRHGIDFEEVFVPVARLDTVHTILAIAADRGWQVHHLDVKSAFLNGELEEEVYVAQSEGFIKKGQEHLVLKLSKALYXGLRQAPRAXNICLDKSLKELGFGXNPTRVEAFKKQMMGEFEMSDLGLLSYYLGIEVGQGVNGITLKQTAYANKVLSQFGMLDCNSTSVPVDPKTQLQKDADGHPVEAFMEHPTMMHLKAVKQILRYLKGTIDCGLVYTAGSGEITITGYTDSDLAGDVDDRRSTGGMAFYINNSLVAWSSQKQKTLALSSCEAKFMAATAAACHALWLRALLGELLES

SEQ ID NO: 148587 - protein, 82 aa, Oryza sativa
  Clone ID: PAT_MRT4530_49002C.1.pep
SKIKCVEKIPFLYLGGNRRKDNPDGLFKKLDLIDGKWERPLWTPIKEWWWWVYPMEYNYFVRALFPILLRFYPFFTAKVPGF

SEQ ID NO: 148588 - protein, 54 aa, Oryza sativa
  Clone ID: PAT_MRT4530_49003C.1.pep
SHAQLENEYSMKTLWAKTNDPIVTGAVRWESKGHYRAGGYMLQNPSLKIDRGFW

SEQ ID NO: 148589 - protein, 389 aa, Oryza sativa
  Clone ID: PAT_MRT4530_49004C.1.pep
MVAEHPTPPQPHQPPPMDSTAGSGIAAPAAAAVCDLRMEPKIPEPFVWPNGDARPASAAELDMPVVDVGVLRDGDAEGLRRAAAQVAAACATHGFFQVSEHGVDAALARAALDGASDFFRLPLAEKRRARRVPGTVSGYTSAHADRFASKLPWKETLSFGFHDRAAAPVVADYFSSTLGPDFAPMGRVYQKYCEEMKELSLTIMELLELSLGVERGYYREFFADSSSIMRCNYYPPCPEPERTLGTGPHCDPTALTILLQDDVGGLEVLVDGEWRPVSPVPGAMVINIGDTFMALSNGRYKSCLHRAVVNQRRERRSLAFFLCPREDRVVRPPPSAATPQHYPDFTWADLMRFTQRHYRADTRTLDAFTRWLAPPAADAAATAQVEAAS

SEQ ID NO: 148590 - protein, 544 aa, Oryza sativa
  Clone ID: PAT_MRT4530_49005C.1.pep
MADGGKPPTPEKKSWADVEEEEEAKAKAAAAAEAASSSSSNEPAVDAQAKQIEALSLSVPEEHGGSGGGGDDQGPPLLDDSDESQIQAVTSGGTVYESAAAFEDLKLTPELLKGLHDEMGFSRPSKIQAVTLPMILTPPYKDLIAQAHNGSGKTTCFVLGMLSRVDPNRKVTQAICICPTRELAQQNKSVLMRMGKFTGITCACAIPPAQKDYVPIAKMPKITDQVVIGTSGTLMKWINHKKILTNDIKILVFDEADHMLAENNGGFMMIDFLTRSGIPKIIYGLYTQLEEIHSYGYVLHLDGFRSDSERIMRDIQRSAGGCQVLLFSATFNERVKDFVTRVIKDGNQIFVKKEELTLEKVKQYKVQVPDERAKIAVIKDKIFEFGQKVGQVIIFVRTKQSTKDVHNALTLEDYVCSSIQGSLDQSEREKIIQEFKNGYTKVLISTDVLARGFDQAQVNLVINYDMPIKFGTRDEPDYEVYLHRIGRAGRFGRKGAVFNLLCGETDNTVMRKIETYFQHNVPEVRNWQSEEDFERALKDAGLVE

SEQ ID NO: 148591 - protein, 127 aa, Oryza sativa
  Clone ID: PAT_MRT4530_49006C.1.pep
KLHGCMHRPGIPGDAPRVFHTPGRHKPQGRITKKDGDTNRCLCLILTGYTLLMNLHHLLPRCRIILPVARRAQLHRPPREATSGRGACCRGCGSCTTQAMDQHQALLPEPLALTPIEKLHQSILRKR

SEQ ID NO: 148592 - protein, 94 aa, Oryza sativa
  Clone ID: PAT_MRT4530_49007C.1.pep
HGMPSAQAVLHCLPPLIRPPCATANPTALRCLLPLIAPPRPPQLCAKVYVEGAEHKSVVYVARHVGSQTWSKDDWTRGVAGRGCVLVLCLKSFA

SEQ ID NO: 148593 - protein, 71 aa, Oryza sativa
  Clone ID: PAT_MRT4530_49008C.1.pep
EAWPPLGAFWSPVRVIWAVATFGGPYPACCRNCQLILFARFPSNRLGGLLFHVSGTNASPPPGEGSLCGWE

SEQ ID NO: 148594 - protein, 287 aa, Oryza sativa
  unsure (1)..(287): unsure at all Xaa locations
  Clone ID: PAT_MRT4530_49009C.1.pep
QRLFKYITKCLVNRLRPLLSEVISPMQSAFIPGRMITDNALIAFKCIHAIQKGPVRNSPFCAYKLDLAKAYDRVDWDFLESALIKLGFCSRWVKWIMTCVTSVRYSISFNGNQLEPFSPSHGLRQGDPLSPNRFLFVAEELSCTLNNEVESGNLRELKVCRRAPGISHLLFADDSLLFFEASAQQASVVQHALRLYRDCTGQLLSQAKCSLLVNENCPDEVFTDLKEMLNIQTHGFESXYLGLPTLEGRMKAERFKLSKERLAKRMNSWSEKFMSGGANDVLIKSLA

SEQ ID NO: 148595 - protein, 789 aa, Oryza sativa
  unsure (1)..(789): unsure at all Xaa locations
  Clone ID: PAT_MRT4530_4900C.1.pep
KENPKRSSFSPPPSLLGRLGPLLPPSLSLLPRGPSASPRARAADRRARPPLSLTGGAHLSSPSSRRARRRARALAPPPPRIAPHPAVPARIKERGITPRDSLSRFPRFPLSLSLGSVRIHPVILAGDIYGARDPRAXFPSSPAAFSPSRCYIIAPRAPLFRFRRSPLALAVGSVLAPCSSLSAVAADLRLAADVAPVLLPARRHLPRHRRIAVDLVRASVSLADRRSAAVIVIPSRAAVSLRSVRRSRRRRCPGVSRGPXPLRFPLPSSLSGAAPPRRWSPAATIGARVRRSRRPCRRGRLRARPRGCQVGPAVSRPRPRVRLTRGTHGADRRQPRAPGPPWTERLTRGPHXPWTRANEGYTSCGPMADNEKGNKVRSQDIGTSSSRVNEAPDTSCVAVVQHLINQNQLLIEILQQHRMPILNPSQMQPQVQLEAVQALTPQVSAPPTSQKAPHAMPHVDPKEASIICFMCDEQGHYARNCPQQKRKAPMRTEDEVRKMIITSTEWPPPGMTEHQRRNSFRGAQQLTEHLLANGGRVSDSEDSDQVSSDDEDKIELKACSRCGEIGHVASSCASTCVHCEEDHPPDRCPTSRITCFFCEGTDHVPKDCQFSFLLTKKMANQPASSNGEKHQGNTNPRQDSSFSLTPVPGXRKQNEKRKCRVREDICCFNCQGMGHFADKCPKPRNVAASTSVHANPRNQKLAPQRIVIHASRSSPITRVATAPIPMSALPQGVNAQFQPQQRIVVDGRSCVSPRPTPGRAKGNQPPEGDTKQKTVIRFNQQSEGSFSCE

SEQ ID NO: 148596 - protein, 62 aa, Oryza sativa
  Clone ID: PAT_MRT4530_49010C.1.pep
MTIGTKNMATATFLIVGMAIMYTVTPGSSTVSDSVGRELEEEGYPVVDYESDLQTAMSTAVR

SEQ ID NO: 148597 - protein, 262 aa, Oryza sativa
  Clone ID: PAT_MRT4530_49011C.1.pep
MATMASSGAAAAAMAVFLAMALVLSGTEARFLSNNITVVGSVYCDACSNNTFSKHSFFLKGARVLIQCSFKVNSTMAEELSLEAERTTDQNGVYKLDVPAAGGFDCREGHDLRSACRATLVRSSSAACNVPGLRGSTQHIALRSRATNACFLNLNALNFRPAKRDAALCHGGDGAGAGGGAAFGSSLFFWPFLPLFWPPYRLPGGGGGTVSFPWPFPVPDWLVPFLRPPFLPFTLYQPAPAGSAPPPFYRFPPSQEASPSQP

SEQ ID NO: 148598 - protein, 167 aa, Oryza sativa
  Clone ID: PAT_MRT4530_49012C.1.pep
MTMQQRSWLEPKVNDHDKEKELNKGDKAQALAIKGELGWGLAVKPFAREVEILKMAKPAEGFKVMVERVARELERVEKLAAGAAVNGKTVAWAEGKKKKVMVKASQSYIDYVLSLPPSKVPFPSLLDDFPSGLRGKQIPTRLLAMKPQLKGRHADISLAAKFQTNRR

SEQ ID NO: 148599 - protein, 54 aa, Oryza sativa
  Clone ID: PAT_MRT4530_49013C.1.pep
FFFFFFFFFFFFFFFFFFFFFLKTRGPNIISKKAQKISPTNKKPRGGNKGPTNF

SEQ ID NO: 148600 - protein, 111 aa, Oryza sativa
  Clone ID: PAT_MRT4530_49014C.1.pep
LSTPCDCGLLYRSCCRPWPAWLPRHPSRLLRPPRRRLGLGANHRDASGGAGCFRRILLAEVNLSVPSASTPGGLLASSPTPAAARADLLPASSGAVVLFTYQWCQLILMVT

SEQ ID NO: 148601 - protein, 167 aa, Oryza sativa
  unsure (1)..(167): unsure at all Xaa locations
  Clone ID: PAT_MRT4530_49015C.1.pep
TQEQISSALINTRTDSINTRTQENADTGRAGCRRRCHRRRATRSPPPPLPSPPLTLDPGRXPPPPPLPLDPAEGRAPPLPTDSPPAGREGAAAHYRRALPRPHGEGDETRGGEAPPPVAARGRREPPTPRSRSLAAAPRPVAHRCSPGERRRRPGGGSRGGGTGRQG

SEQ ID NO: 148602 - protein, 131 aa, Oryza sativa
  unsure (1)..(131): unsure at all Xaa locations
  Clone ID: PAT_MRT4530_49016C.1.pep
FXXYXDVQFSSFLHPWYDNEQTLKKFXSNSFMXQGHPVALFHTTLPGIRFRATHQWLHTCLTSTHDTVVTHTHGGDGDTTTTTFYQRPPLCGHFWHSMGGIKRKNPLXTFPRGTNSYKATPSFITIHESSI

SEQ ID NO: 148603 - protein, 166 aa, Oryza sativa
  Clone ID: PAT_MRT4530_49017C.1.pep
MQGSVRPSRRQRSLASLSSAARRSVHVHLLSDVKRTSRHMGDELNSGEAGLRARTSKMGRYGGGERPSLRHCSSLCPHLPPFLRREEDNEAYGGVEAQGWRGDGERGGRRGHAGAVCSATGRCWGGMLLLLHLSIVATMMRTDVLLEPNLASWERQLCAQVTAPLM

SEQ ID NO: 148604 - protein, 1474 aa, Oryza sativa
  Clone ID: PAT_MRT4530_49018C.1.pep
MADPFVADDQTDADFFDKLVDDDDDLSPAPAPAPVPAQQSAEAALLPALSDLSLADDDTDPSPAPPPVEAPPEGASPESGKGAVHTTVKQVQWASFGGAADDGADPFSDLSGGAADDGFLGTMAGNQSFQTSVIGSVGASAHGIFGGSQSLTAEVTDQDFFGGTSDQNTDTQQQQLEQSGSSAFDSTDPKYLESIYPGWKYDEATQQWYQVDNSDTHGNATQVDTSTENIQQQQLAASYMHNPTQSSLETIAEEGTTTGSVSTWGQGGTSEYPPNMVFYAEYPGWYFDTNTQQWQSLESYQQAVTASAVQDGANNGVVASSAETNYSVKQTEDLPAHNQVAQHNSFSNNYSYQSQWQTNSFSNSMQPESATASLPDSFQSLGQHAISESFNSSTNSQVSFNTAETATSHYGNVNLDSSSTQGGYTASGGQQTGYKGFEPFTGHQAGYKGFEPSTGHQTSHKLFDPSAGNQNSYKPFEPSTGHHQHKGFEPSTNHQGDYKAFEPSTHNQGGYKGFSPSTVQQPGYKGFEASTGLQTNFKGFEPYSGQQAGYTGSLPSTGHQSSYMGFETSSNQGYGDANNVANSQGFVPMESMYGSHNQAHTNPQVPLSNSYLSVDNSKNFSQQQFLGPNASHLQFGQSPHEERSSAGRPPHALVAFGFGGKLILMKETNSMATNYDSGNQGNSSGTVSVLNLSEVVTDKADALSASNGSALSYFHALCRQPVPGPLVGGSAASKDVNKWLDDMIALYESSTSEFQRGDPRKLLISLLKILCHHYGKLRSPFASDPSHEDTDGPEMAVTKLFSSCKRSSFQMGDFGSHVRCMKNIPSENQMQAVAQEVQNLLVSGRRKEALQCAQEGQLWGPAIILALQLGDKFYVDTVKKMAHCHFLSGSPLRTLCLLIAGQPADVFNADNNISSNYGSQQPMEPSPNGMLDDWEENLAIITANRTKGDDLVITHLGDCLWKEKNEVAAAHSCYLVAELNIDPYSESARLCLLGADHLKCPRTFASPEAIQRTEIYEYAKVLGNSQYILLPFQPYKLIYAYMLAEVGRVADSLRYCQASMKVLKASGRAPELEAWKQLFSTLEDRIRTHQQGAVSDRESYTAPGATKFANSQSVMTMSSLMPSASVQSMSEMSDSGRKIAHNRSVSEPDFGRTPKQGAGSDSTQSTAPGSGSSRFGWLGSTLQKTMGFVSKSHRQAKLGQQNKFYYDEKLKRWVEEGAEIPAEEPPLPPPPSKPSFQNGVVDYKLNGPMSASHTPNGFMEGKSSTSSEHGSGMPPIPPSQNQFSARGRMGVRSRYVDTFNKGGGGGAVPSYNKPAVASVTPPSGAKFFVPTAAVVAAEQMPNQTAETHGETFRPDERSSPAETSFSSPPPATQFSAPLMVPTIQRYPSMDNITTPNNGSGLSSGSNSSSFSRSRAASWSGTYSEQINAVAGARSPDQQTMPSPLMPGKQSHSRSNSNSSVQFNSLTEDLHEVEL

SEQ ID NO: 148605 - protein, 84 aa, Oryza sativa
  unsure (1)..(84): unsure at all Xaa locations
  Clone ID: PAT_MRT4530_49019C.1.pep
MKLSMKRSPYNHTCRVGIDLAEXIAERRRYPSRSGFLDVCEAGPTVGQPLVGPRGAGAYSCVAIGRTAMCKPKLNYNLMHVITD

SEQ ID NO: 148606 - protein, 112 aa, Oryza sativa
  Clone ID: PAT_MRT4530_4901C.1.pep
MASFSEAPPGNPKAGEKIFKTKCAQCHTVDKGAGHKQGPNLNGLFGRQSGTTPGYSYSTANKNMAVIWEENTLYDYLLNPKKYIPGTKMVFPGLKKPQERADLISYLKEATS

SEQ ID NO: 148607 - protein, 1514 aa, Oryza sativa
  Clone ID: PAT_MRT4530_49020C.1.pep
MADPFVADDQTDADFFDKLVDDDDDLSPAPAPAPVPAQQSAEAALLPALSDLSLADDDTDPSPAPPPVEAPPEGASPESGKGAVHTTVKQVQWASFGGAADDGADPFSDLSGGAADDGFLGTMAGNQSFQTSVIGSVGASAHGIFGGSQSLTAEVTDQDFFGGTSDQNTDTQQQQLEQSGSSAFDSTDPKYLESIYPGWKYDEATQQWYQVDNSDTHGNATQVDTSTENIQQQQLAASYMHNPTQSSLETIAEEGTTTGSVSTWGQGGTSEYPPNMVFYAEYPGWYFDTNTQQWQSLESYQQAVTASAVQDGANNGVVASSAETNYSVKQTEDLPAHNQVAQHNSFSNNYSYQSQWQTNSFSNSMQPESATASLPDSFQSLGQHAISESFNSSTNSQVSFNTAETATSHYGNVNLDSSSTQGGYTASGGQQTGYKGFEPFTGHQAGYKGFEPSTGHQTSHKLFDPSAGNQNSYKPFEPSTGHHQHKGFEPSTNHQGDYKAFEPSTHNQGGYKGFSPSTVQQPGYKGFEASTGLQTNFKGFEPYSGQQAGYTGSLPSTGHQSSYMGFETSSNQGYGDANNVANSQGFVPMESMYGSHNQAHTNPQVPLSNSYLSVDNSKNFSQQQFLGPNASHLQFGQSPHEERSSAGRPPHALVAFGFGGKLILMKETNSMATNYDSGNQGNSSGTVSVLNLSEVVTDKADALSASNGSALSYFHALCRQPVPGPLVGGSAASKDVNKWLDDMIALYESSTSEFQRGDPRKLLISLLKILCHHYGKLRSPFASDPSHEDTDGPEMAVTKLFSSCKRSSFQMGDFGSHVRCMKNIPSENQMQAVAQEVQNLLVSGRRKEALQCAQEGQLWGPAIILALQLGDKFYVDTVKKMAHCHFLSGSPLRTLCLLIAGQPADVFNADNNISSNYGSQQPMEPSPNGMLDDWEENLAIITANRTKGDDLVITHLGDCLWKEKNEVAAAHSCYLVAELNIDPYSESARLCLLGADHLKCPRTFASPEAIQRTEIYEYAKVLGNSQYILLPFQPYKLIYAYMLAEVGRVADSLRYCQASMKVLKASGRAPELEAWKQLFSTLEDRIRTHQQGGYGTNLAPAKLVGKIFTSLDKSISRMMGTPSAPLPPLPQGAVSDRESYTAPGATKFANSQSVMTMSSLMPSASVQSMSEMSDSGRKIAHNRSVSEPDFGRTPKQGAGSDSTQSTAPGSGSSRFGWLGSTLQKTMGFVSKSHRQAKLGQQNKFYYDEKLKRWVEEGAEIPAEEPPLPPPPSKPSFQNGVVDYKLNGPMSASHTPNGFMEGKSSTSSEHGSGMPPIPPSQNQFSARGRMGVRSRYVDTFNKGGGGGAVPSYNKPAVASVTPPSGAKFFVPTAAVVAAEQMPNQTAETHGETFRPDERSSPAETSFSSPPPATQFSAPLMVPTIQRYPSMDNITTPNNGSGLSSGSNSSSFSRSRAASWSGTYSEQINAVAGARSPDQQTMPSPLMPGKQSHSRSNSNSSVQFNSLTEDLHEVEL

SEQ ID NO: 148608 - protein, 92 aa, Oryza sativa
  Clone ID: PAT_MRT4530_49021C.1.pep
SPPLSKSEGTRLLYSLSSAIGKIFFPTIVYTRNFEILEAIRYLYVAVKNDFSLNILQSYINLPNELNFFPTIFLQHKYFSYNCFIQLLKIKR

SEQ ID NO: 148609 - protein, 333 aa, Oryza sativa
  Clone ID: PAT_MRT4530_49022C.1.pep
MEAGHKPSDALDRRLAPLLLLGVGHAAAADDGDGMSVYSLPRGEMLHLPCLHPGSAFVRDHRIWATPQGWLLMARRGSPETFLWDPFTGTRIGLSPDHDGTVLAVDHWRRRCLLSRRRPTDPGCVVLVVDLEDTVLWHCRPAPAGRGNGTDEPPPPPPEEEDDQQWARHEYLQPGTPHHEHRDDVLRAIGRLTAVDGSKLLVDLVDHRLAVLELSSQEPVVTVVAAEGVSVACTSNSTNLVESDGELYCVWFRYPIRCLRIVARVSVYKLDYMAAKGSATWMKVKSLGGRRSFFIGQDRIGASFDAEEAGLKPNCIYYYWLLNNRAAFSVYKN

SEQ ID NO: 148610 - protein, 164 aa, Oryza sativa
  unsure (1)..(164): unsure at all Xaa locations
  Clone ID: PAT_MRT4530_49023C.1.pep
IKRLCISYLAKRRTKKQRPKKSKKKNTQTQTRQTKTEGEERKENSKSTQTQTQKGGAKRKDTSPTTTLSGTXCTTRPSEKKRNASSDKTKMLQPATPTKTWGQTKPTRRERTTPSKKATAQTTSGEPEPGTGPTVPGGGGTTPGPVPKNTTIVQGKTNTTSKPS

SEQ ID NO: 148611 - protein, 83 aa, Oryza sativa
  Clone ID: PAT_MRT4530_49024C.1.pep
IRQMDMAFWLFVSFQKGNVIVLYKFDDPGFFLFQYLKQKAWNGIRIHHRRLITWQVGGGKSGSSIKGAALPVFVAFQFAPRYI

SEQ ID NO: 148612 - protein, 126 aa, Oryza sativa
  Clone ID: PAT_MRT4530_49025C.1.pep
MQDIDVASLLNLSKRPVGQMTIVEVGSVGLIVDVINVVAKAEAQHNIVAILFYLSSNNPDASRSTTNQGRAIAAGTVSALAALLSTDRDDLARDSIALLSRIAKKPSSIMAVLSQSGLVAHFAASL

SEQ ID NO: 148613 - protein, 123 aa, Oryza sativa
  Clone ID: PAT_MRT4530_49026C.1.pep
WDYVLAREGLTRTRNGARAFSPKRSQRHPTILYEHHRLHAGSIVVALGGCDGETPSRRRRFGNKASDDRRFSIPRTMGPDAKAQDVCPTYTARIRPILGRRPRSPYRPAGQKNPGLAAISSPG

SEQ ID NO: 148614 - protein, 73 aa, Oryza sativa
  Clone ID: PAT_MRT4530_49027C.1.pep
NIKIQTGKVRRCSQCILQEFHCGENRALLGWLASLVSEQPARVRSLGSSPARLTGIYSQINFQLSRASATIVE

SEQ ID NO: 148615 - protein, 184 aa, Oryza sativa
  Clone ID: PAT_MRT4530_49028C.1.pep
MEGSEEHGETSKAPLSRGVSKGVSILDVILRFVAIIGTLASAIAMGTTNQTLPFFTQFIRFKAQYSDLPTLTFFVVANSIVSAYLILSLPLSIVHVIRSRAKYSRLILIFFDAAMLALVTAGASAAAAIVYLAHKGNARANWLAICQQFDSFCERISGSLIGSFAAMVVLVLLIFLSAIALARR

SEQ ID NO: 148616 - protein, 484 aa, Oryza sativa
  Clone ID: PAT_MRT4530_49029C.1.pep
MEPILNPVLRIPRWMSSQHHFSSCLQTYQWRPAAHLCLPPLSWCSNTRRGRKQTVLQPPQSSWSWVPGCRIPPSLVCTGCCRNLIWRGMEGQKWVLVCSLPPPPPLGPCRLRRQELHRPRRPNHVPGAVSHSALDAAWCAAGRCVQRRVESSRVLAQYFHRAPALLRPLWDTPPKPFIRIPHYYAPNISMPQLCQLHGWGILPTPRRVFDAVLFSNELDILEIRYGELLPYVDRFVILEANATFTGIPKSLSFLENINRFAFAGSKIVYDMLPVMEMDPGSHRQPFHVEAGHRRALNMLLRRSGIAVGDVLIMADADEIPSPETVQLLKWCDGIPQVMHLELKNYMYSFEFPIDYNSWRATAHVFTEHTLYRHSRQSNLLLADAGWHCSFCFKDIKEFAFKMKAYSHADRVKQDSFLNPDRIQRVICNGEDLFDMLPEEYTFKDLFKKMGPIPKSGSAVHLPSYLIKNADKFRFLLPGGCLRPG

SEQ ID NO: 148617 - protein, 367 aa, Oryza sativa
  unsure (1)..(367): unsure at all Xaa locations
  Clone ID: PAT_MRT4530_4902C.1.pep
LARFPNRRLQLPRRVDLPKVRGARTGSTGVGPTRQPHGPRWTGRTXLAPAGAVSATRQPXVRPKAATAARPAGGGAPAPRWSPAAAIGTAERRPREGREXGGNEAAVHGSPXVDGDDXKGGRSGRRRRRGSGRRGRRRSGGRRAKRRGGRGRRGSXEPKXGSAEVGGGTGRRRRRTGARRRQRRERAPARALFRRGXRCGKGGNGRGRRGEGLYKVGRGRECPEGKETGAVISGSINGAGEVCGGXIRPFEREREREKXRERERESRGMIXPTLLHAGTAGCGGIRGGGGVRAQARRRERREEGDDRWAPPVSEGGGRARPSVARARGEAEWAAGRXREGEGDGPSRPKREREGKXLFRAFLFIKSF

SEQ ID NO: 148618 - protein, 198 aa, Oryza sativa
  Clone ID: PAT_MRT4530_49030C.1.pep
YCATDRTPQLLPGPRRPATGAPWLLQPADLLLLPAAMLCPEEYEKGVGGRGRGPHLAIPSHLPLGSRRGARRRRRRSSPPRRRPNADDALLHGAASTLWPRAPTPSSTPPPLAPCGPARRRRPAPACLRRQSRPLAPWGPARRRRPAPAQLTPNRCTGGILKPVAIGVVVFVGAGEAGGETGARPPPPMEEAAPYLRR

SEQ ID NO: 148619 - protein, 69 aa, Oryza sativa
  unsure (1)..(69): unsure at all Xaa locations
  Clone ID: PAT_MRT4530_49031C.1.pep
RTXVSTIYSTFKTLFLLGIXMKSGNHGLTVSXIASFINXYMQGLSDYPGNVQLDFSCRWSXVKIDMSNH

SEQ ID NO: 148620 - protein, 76 aa, Oryza sativa
  unsure (1)..(76): unsure at all Xaa locations
  Clone ID: PAT_MRT4530_49032C.1.pep
WEVSGATATAILDAICGGRSLELSPSPSSMPSVRXGSGAAAAVLDPRREECSGAAATVLFAVAPDGGKDGEMKLLH

SEQ ID NO: 148621 - protein, 201 aa, Oryza sativa
  Clone ID: PAT_MRT4530_49033C.1.pep
HARILTGASSSATPAATPPASTVFFVNTSPSSAATLTASASSSATSAATSLASATSRASPSATSRSSLVSIVTDSLSAAATLTANAFSSVTSAATPPAFLASVFTTAPSTAATLAGSSSSSVTSAATSPASLLSASSLPWTSSWPLTPPPNRALAVFSPSPRSTWTRSSATSMTSMRLQNKAYCSSSSNAPTQDELPEDVM

SEQ ID NO: 148622 - protein, 374 aa, Oryza sativa
  Clone ID: PAT_MRT4530_49034C.1.pep
MEGAHKLNAKLGDNGDTQFSLDEKQEVVDSFRGTRMWWKLSKASDDYSLYGRKIQRRNYMLVFHKRHRQLVQDSYLPEILQQGRALTAKNRQRRLYTHHENHMSTWTHVPWKHPATFDTLAMDPGKKDELIEDLKMFQKGKEYHSKVGKAWKRGYLLYGPSGTGKSSTISAMANFLKYDVYDLDLTTVTNNTDLRNLFLQTTEQSIIVIEDIHAMELEDKRMSTDFQWYYERKKITLSGLLNFIDGLWSACGGERIIVLTTNHVDKLDPGLIRRGRMDKHIEMSYCRFEAFKVLANNYLDITEHPLFTKIQRLLDETDMTPADVAHNLMPQGKRKRNTNKCLTGLIQKLKKAKLESGTRLSRGRVLPTGHQGII

SEQ ID NO: 148623 - protein, 55 aa, Oryza sativa
  Clone ID: PAT_MRT4530_49035C.1.pep
MEELFMQVFERRDWVAAQLRQQVESYDQSLACALLAPAAPPRRGSSRRAPLRRRI

SEQ ID NO: 148624 - protein, 151 aa, Oryza sativa
  Clone ID: PAT_MRT4530_49036C.1.pep
MDLIVASGEMRSPQRVRAGLPPLGTWNLGGSRPGVPGPRGRDGALVAVHLAGAGCGGGRQAARGVADNERRLTDGGLAPPLSLPLSIVVILPGLLRLAPSPAGGGKPDRDGNGGDANGVGRGANPSAPQLLVLTPAPADARSGEGGAVRQD

SEQ ID NO: 148625 - protein, 95 aa, Oryza sativa
  Clone ID: PAT_MRT4530_49037C.1.pep
RKGTPRGKGSGGFGIYLPHFESGQEQVGPQFEAAVSLAGGNLLKGVFLGLNINNPKVGPFFNHRVLVKKAQLAHLAQKGQKLNNLRGGEVNPWGG

SEQ ID NO: 148626 - protein, 155 aa, Oryza sativa
  unsure (1)..(155): unsure at all Xaa locations
  Clone ID: PAT_MRT4530_49038C.1.pep
MTEHLTIHIPHPAIQAGNACWELYCLLHGLHPVGXLPSHTTAADQHDPLDTFFSATLPGKTLPRPIFVHLXPTALSQGPTSTPRRVFHPGNLTPARRAASPPSRRSLSLPTASWCSSLPSGGHLTHGYYTAVGKNISATLIYFDSLPYRVSAGPG

SEQ ID NO: 148627 - protein, 117 aa, Oryza sativa
  Clone ID: PAT_MRT4530_49039C.1.pep
SQVSIIQYLHVLIRSPMTIYIIYPSRRHAIQPSRRSTSQAAQTSSACRSPTGFARTYSMGIRDSTSISNHCWSRRQQHLRERPRRAPAGGDSGGSHRGISHQNHARMCERKRGRTRG

SEQ ID NO: 148628 - protein, 105 aa, Oryza sativa
  Clone ID: PAT_MRT4530_4903C.1.pep
PCAAAVPVIVIAQEGHRRDRQVVAVLVRPFATVGDRRSIVAVVDPISAVASSSSPSPSVGLPPSLGSPCRRSLASVRRPSRPSRRAAAAGGDVIADVIVALFHEP

SEQ ID NO: 148629 - protein, 358 aa, Oryza sativa
  Clone ID: PAT_MRT4530_49040C.1.pep
MSFTIFTRLRSCSPPRPPPPPPPPGKADDRAEAELGLGHPPPPLPFSIFDAVSWMAAGRGINQLLRRTLHNQSSGSSLLSSFRIKHEESSAGLRALALLGVGASGLLSFATIASADEAEHGLAAAEYPWPHAGILSSYDHASIRRGHQVYTQVCASCHSMSLISYRDLVGVAYTEEETKAMAAEIEVVDGPNDEGEMFTRPGKLSDRFPQPYPNEQAARFANGGAYPPDLSLITKARHNGQNYVFALLTGYRDPPAGVQIREGLHYNPYFPGGAIAMPKMLIDGAVEYEDGTPATEAQMGKDVVSFLSWAAEPEMEERKLMGVKWIFLLSLALLQAAYYRRMRWSVLKSRKLVLDVVN

SEQ ID NO: 148630 - protein, 188 aa, Oryza sativa
  unsure (1)..(188): unsure at all Xaa locations
  Clone ID: PAT_MRT4530_49041C.1.pep
PLPPSPDPTIARTGGASSFLCAPQSPPPPSSSLRALATAAAPRPLPSACRPPPPPPLPSAQAVAVAPPSPDPAARALPSGLPPXSSSAHRPLPLPRSFCAPAPTPPLPPSFHAGAASLPPHAGGAASSFRPGSGRLPHSTPAPPPSFLHMPAAPLLPSGPAATAAGPASLPTPPLHPQTPPPHGQTPP

SEQ ID NO: 148631 - protein, 56 aa, Oryza sativa
  Clone ID: PAT_MRT4530_49042C.1.pep
IYNVNYFKNELTNVVHKRTEREYICVHAWRYTHTHTYHRFTILYMLKFGNKDIDLC

SEQ ID NO: 148632 - protein, 91 aa, Oryza sativa
  Clone ID: PAT_MRT4530_49043C.1.pep
SRYLQRSTGSCCLLALVLLFVTLRILLLPRISLWRLPGSGASSASFTSSVIPDVGGDGTSQASSAAASASPGTASIVHLPRPLCSAYRNQT

SEQ ID NO: 148633 - protein, 62 aa, Oryza sativa
  Clone ID: PAT_MRT4530_49044C.1.pep
PTRPQLPRSPLVGEDCFILVEYPLKTDMAESCGSLIKVADRRFGRTNLLIYGPTWAEKKRRS

SEQ ID NO: 148634 - protein, 124 aa, Oryza sativa
  Clone ID: PAT_MRT4530_49045C.1.pep
MAVVGGSPPAKGGQYNPSYQNFKIVDPKVFMAAQTLELQSRTTRISSKCMSLFSQSLLVSAMEGELWRTKKTITQRRLQRSSSTSCQEQEDGLLSVLPARRMKLPTGQCLKARILCIIDEVSSC

SEQ ID NO: 148635 - protein, 120 aa, Oryza sativa
  Clone ID: PAT_MRT4530_49046C.1.pep
SCEAILTKTSALQHKLEKSMSRLVNLRSLAMPSYKELRIPTDWMLDSGIASKLAKVYVKRALKELDRETGGEALLAQTVHFAYRVHQFAGGLDCEAMRLFEDLTKRPHKASSPLSFLKMN

SEQ ID NO: 148636 - protein, 76 aa, Oryza sativa
  Clone ID: PAT_MRT4530_49047C.1.pep
LVWFDLVENSTSSGYCLVNPSEDAPVIQALVQGEKLGVLACKLLCTVYTVDFSYLICRQFSFGFINSGSNFNLHVH

SEQ ID NO: 148637 - protein, 265 aa, Oryza sativa
  Clone ID: PAT_MRT4530_49048C.1.pep
RGRPGKKKKKKKKKIPTLLIPLAIRGPSVFPFPLWRKRKKISRLLRSLRRQDESRLNRGGAAISIWRAEQARGLCEKKCIKSQEYASEHGLPILKNVLLPKTKGFLCCLQELKSSLDAVYDVTIAYKHRLPDFLDIIYGTDPSEVHIHIRTVKLCDIPTSEDEVTDWMIERFRQKDQLLSDFFMQGHFPDEGTEGDVSTPECLANFIAIVSSTGFFLYLSLFSSVWFKVYVLLSCAYLTFVTYFSIQPPQLICSSEGGTHAKKVL

SEQ ID NO: 148638 - protein, 414 aa, Oryza sativa
  Clone ID: PAT_MRT4530_49049C.1.pep
MNGSSGSQGHNVNGGQKKVQHASPLTLNNGSKHRPLTPMRRCRGVACVVIILSTAFTLIVFIAPITTFLVRLVSVHYSRKATSVLFGMWLSLWPFLFEKINKTNVVFSGESVLPKKRVLLFANHRTEVDWMYLWDLALRKGYLGYIKYILKSSLMKLPVFSWAFHIFEFIPVERKWEIDEAIIQNKLSAFKDPRDPLWLAVFPEGTDYTEKKCIKSQEYASEHGLPILKNVLLPKTKGFLCCLQELKSSLDADIRFHFCEKLEVLLLIYDVTIAYKHRLPDFLDIIYGTDPSEVHIHIRTVKLCDIPTSEDEVTDWMIERFRQKDQLLSDFFMQGHFPDEGTEGDVSTPECLANFIAIVSSTGFFLYLSLFSSVWFKVYVLLSCAYLTFVTYFSIQPPQLICSSEGGTHAKKVL

SEQ ID NO: 148639 - protein, 79 aa, Oryza sativa
  Clone ID: PAT_MRT4530_4904C.1.pep
LKRGLEKPPGGLFLGQGFFSPLQVFFVNLPRTGFGFSVVFHAPLGICLCGGVKMLGKVPSPLWVIWLKFFLGNAIMFCF

SEQ ID NO: 148640 - protein, 397 aa, Oryza sativa
  unsure (1)..(397): unsure at all Xaa locations
  Clone ID: PAT_MRT4530_49050C.1.pep
MSSSLLTDLVNLDLSESTDKVIAEYIWIHLILNHHQFLFMVVLLVSLSQNAGSLLSILHLKEVNHTLSGPVDDPSKLPKWNFDGSSTGQATGDDSEVILHPQAIFRDPFRKGKNILVMCDCYAPNGEPIPTNNRYNAARIFSHPDVKAEEPWYGIEQEYTLLQKHINWPLGWPLGGYPGPQGPYYCAAGADKSYGRDIVDAHYKACLFAGINISGIXNAEVMPGQWGSSRLALSVGVSAGDHVWVARYILERITEIAGVVVSFDPKPIPGDWNGAGAHTNYSTKSMRSNGGYEVIKKAIKKLGMRHREHIAAYGDGNERRLTGRHETADINNFVWGVANRGASVRVGRDTEKDGKGYFEDRRPASNMDPYLVTAMIAETTILWEPSHGHGHGQSNGK

SEQ ID NO: 148641 - protein, 100 aa, Oryza sativa
  unsure (1)..(100): unsure at all Xaa locations
  Clone ID: PAT_MRT4530_49051C.1.pep
VADWPSCHXPXKSSPASHGFXCXXFXPPPVGKGASRRPAAARRPGRLGRWHGPLGAXXPNVGRGGRRAQAPLXSLDSNLKAFSHNPAHGSFAPLAFXPSA

SEQ ID NO: 148642 - protein, 274 aa, Oryza sativa
  Clone ID: PAT_MRT4530_49052C.1.pep
MIRGRTAGFVTRAAPRPLPRRSRRASAVAARRRPWPPARAAPPPPPASAKLSQRQGESPSAPAPPARPDAAPRELDRCSRSAKIPPPLHEGYVWCVDRVVVVFSYEFEQVYAIKLVYNTINLFGTMSKQAAKGDGGQHTIEILISTVRSSLTSINLTSINQSRERDGERDDHQTEKTLILVEIEELRAPFSKLPRPIYVAYTFLSIGLLDKDQKQEGLHCAARFTRLVCRRPPFRIAGRQSGLTVIRPDPPACFVLSGEDRGFRQSCRRWTASV

SEQ ID NO: 148643 - protein, 129 aa, Oryza sativa
  unsure (1)..(129): unsure at all Xaa locations
  Clone ID: PAT_MRT4530_49053C.1.pep
GWMGLDVGPDAVKIFTXALDTCYTIFWTAFMGVFEFDKFPVVSDXLPSSXADLTSSKGATTIVXGVTSGAAVQKLGLVARVSYISPSGGTILELFKGXPLPGVLDFDEASANSACFHLAVCTFVLGLFL

SEQ ID NO: 148644 - protein, 131 aa, Oryza sativa
  Clone ID: PAT_MRT4530_49054C.1.pep
MPPNAHLCTPSSSSSSQESGRRPKPRPPHQRATVYPISVYCSIGRRTIVCPPLRPKLLRSHLPASSNARPAKPVVDPLAIEQPTPMVVHPTPGWHSPLATNNDDCHIVTAIVRCPRVQQATATPQSNPSSE

SEQ ID NO: 148645 - protein, 81 aa, Oryza sativa
  Clone ID: PAT_MRT4530_49055C.1.pep
FLLPRYTICMKHLPVNCLTKNGHCPRLHVTKINTTKMESELCNTNITDFSSPCIYNTSKSTTPLLLIGFGNPIYYLIYKII

SEQ ID NO: 148646 - protein, 57 aa, Oryza sativa
  Clone ID: PAT_MRT4530_49056C.1.pep
MRSPSLSRTLPLLVVLQQPVVPMTAGVAWMVCTEEIAVADAVDVPRRFADQRRRCRG

SEQ ID NO: 148647 - protein, 211 aa, Oryza sativa
  Clone ID: PAT_MRT4530_49057C.1.pep
MAVTTYHIPLQAHNNRSGESVDNPGTPPDSPKKKANISGTSPEHPRRECRHLSATWKAVARGATPGSAEPGKLLLFTDLPWETIRTVNTDPGIDTGKHNRFWFPKSGTDTGDATHDPHGPAHRSSTCHSLPLWWHLVSVEGLRVCVRYPTNGANVRTKSNSYRTRQSVYLIPVLYSFFCPLSEGQATYLCGPVFRGNPGGRQVTPTFGINQ

SEQ ID NO: 148648 - protein, 390 aa, Oryza sativa
  Clone ID: PAT_MRT4530_49058C.1.pep
MATATATTTTRNSASLGHGHAIAVHPVPGSLCVALRRSPLHRLHAAAASLDSGDPPAALHLVSASLNPPRTKPHSGLGADEGFWQCGHLREQGLDAKHSMAFIRDKKAESMVARACSRSARVTGLQWSLPVWSGWCGWISAMVSSVGWKAGDPVLRRYGHATIQAYRRTLHVRLLWLVDNGPWLHLSNLTTTDYGLASFWLYELKKALTDADALLENWRCEILRAESIGSRGTATKVRRTFSGVLDPLKVIPRHSKEFDVALQEELADVFVSIVGMGGIGKTTLAQMVYDDDIVQQHFPVRLWVTVSEDFDTTTILQGIVGPSIQGTDDGCGIGQLKGLNLEGQLEIYNLKNVKRIEDVKGCGELRSVWVTHGANHPDSVRCGGHASDAP

SEQ ID NO: 148649 - protein, 98 aa, Oryza sativa
  Clone ID: PAT_MRT4530_49059C.1.pep
FTLIYIYIYIYIYIYIYVCVCVCVCVCVCVCVCVCVCVCVCVCVCVCVCVCVCYFLPHKQHEEHYPYPYYGAPQPVMSCIFFFFSFSFFFSSLPLLLF

SEQ ID NO: 148650 - protein, 366 aa, Oryza sativa
  unsure (1)..(366): unsure at all Xaa locations
  Clone ID: PAT_MRT4530_4905C.1.pep
MSRVSTSWGFVXSRVNKPRGGARGPGPRGWGPRGSPTVHGGPGAPGLTPAGAGGPTRXPHLRVRAADSRAPRGSRSVRPKATTPAQXAGGGAPAPLWHGGAAAERGEGRGETKRRSTAHPGSTATTETATGAEEGGGAARVDGVGGALAVGERNGGVDEVGEDAAKPKEAAPRGKVVRGDDGGGPELGGDGGERERRRELDSDGEXGGXVAETVEGGTRRVYIGLGVRGGGRRRGKRARESRPPLMAPARLGEEFPNESEGEREGKMGGKGEGIPGNNSPLLIARGADGGGGIRGGGGARARARRREQREEGDDGWAPPVSEGGGRARPSAARARGGGRMGREERRGRGKEMGRGGPRGRGGKRDF

SEQ ID NO: 148651 - protein, 196 aa, Oryza sativa
  Clone ID: PAT_MRT4530_49060C.1.pep
TRNSSPPSPSVGPVWRGRVRRRPDEAARPPPGRRPRRARRRSAPSMTVPSSRASSRQRAGVVKAADVVVVSAGNVPAASHFLTAIHNHPLHALAAAPRHAAPGPPPLAPSRPRGRLRRPLDLPPELPAAAQQRHLHLRRRGRRARRRRRRPGERGVVTTSEAAASGPRPDPTSCGGRLRAGRRFPLFFFFCFVRAE

SEQ ID NO: 148652 - protein, 87 aa, Oryza sativa
  Clone ID: PAT_MRT4530_49061C.1.pep
MAASVSAVIWATIQQSSASDCMHGTAVQAMVEERSDVSVTAVAAASDVAVAPPSDLAVVAPPPFLWCEVGTETVEHMDCTWHELLAG

SEQ ID NO: 148653 - protein, 195 aa, Oryza sativa
  Clone ID: PAT_MRT4530_49062C.1.pep
MAPWWNALPSDPLWNSSFVGHRDQGSLVTLRRSQMHRFDRTETSGLIGEVASVYPHIALMSLVVAAILTALKPPLPSVVLERVRFGAGLLQVVKFALARGASLLHRQVVKFIFVVRVSLLQAVKCVLVEVQVRLGGSLLFSGHLGVSVLPFNFIARFGAGLLEFREFSVVVCREASGPIVGTWKLLEEERVPVLR

SEQ ID NO: 148654 - protein, 88 aa, Oryza sativa
  unsure (1)..(88): unsure at all Xaa locations
  Clone ID: PAT_MRT4530_49063C.1.pep
IGRKLKQQQQQHGRVNGSGRVPTVGGGNGGGGDKIEIKVAAAAGALPLRQXHDGLHGDVQVSLFFFLSSSSARLACCQFLLLSCCPHK

SEQ ID NO: 148655 - protein, 112 aa, Oryza sativa
  unsure (1)..(112): unsure at all Xaa locations
  Clone ID: PAT_MRT4530_49064C.1.pep
WIPRAARIRHDVFMDHFTNDYNDNHPNVTHVSVIGNAGGDNWNSMTDADKAPFVTNADKLNADYTNNIDAYNNKHAXGPATSGDSDKSNSDVNTTTTASVTRGGPVPNSPYS

SEQ ID NO: 148656 - protein, 154 aa, Oryza sativa
  Clone ID: PAT_MRT4530_49065C.1.pep
MAKPQLLLVVAAAALLLVVAASAKKSGDVTELQIGVKHKPESCSIQAHKGDRVKVHYRGKLTDGTDFDSSYERGDPIEFELGTGQVIKGWDQGILGMCVGEKRKLKIPSKLGYGAQGSPPTIPGGATLIFDTELVAVNGEPASKSDEDDDDSEL

SEQ ID NO: 148657 - protein, 158 aa, Oryza sativa
  unsure (1)..(158): unsure at all Xaa locations
  Clone ID: PAT_MRT4530_49066C.1.pep
RVLSYIISLLLTLSLSYGFVSHRRHFTPSRRHSPPSPPPSPXPSPSPSMSPVLASPPPPAPLPSPLPPSKPVSPPSPPSPPPASPRRLVSPLGSHPPPPLPSPASRLTSSRLHPSLPPRSPRHQPSPPRHLHPPPPPRPPPHQPPAPFSTPLGDPASP

SEQ ID NO: 148658 - protein, 198 aa, Oryza sativa
  Clone ID: PAT_MRT4530_49067C.1.pep
MAPVMSSPGQQEAVASPTAAPTAARPYYGCVFCKRGFTTAQALGGHMNIHRRHRHRAMPSRRPTATGTTSMVSRDDVDCYNQHRYLEYSPPPPTPAPPPVTSPPMSSSFAATSYAGGTATVAGVDGEAMRAAGSSDSHIRELSLLGGADSSTDRDHDLHLRLGRHGRGGDGSPRTPEGSPERKPDLDLELRLGRRPRH

SEQ ID NO: 148659 - protein, 91 aa, Oryza sativa
  unsure (1)..(91): unsure at all Xaa locations
  Clone ID: PAT_MRT4530_49068C.1.pep
MAVPPPCLWLLQWRTRAMGGAPVASRRRRVARRWPTRIVGFHNGKTFNQVEIKPEXIGHYLAEFSISYKPVKHGRPGIGATHXSSRFIPLK

SEQ ID NO: 148660 - protein, 73 aa, Oryza sativa
  Clone ID: PAT_MRT4530_49069C.1.pep
LGARQMLVNALCSTMVQCLYPMPQKLAHFQCHLFHPSTWQYSSMVVTPTLGLSLPKSSQARDLRGIMYFVPGS

SEQ ID NO: 148661 - protein, 155 aa, Oryza sativa
  unsure (1)..(155): unsure at all Xaa locations
  Clone ID: PAT_MRT4530_4906C.1.pep
MRIPATKLDGEGAAGVXRTWPGEARFRRPTWGVGEEREVGFENRIPAISGAGAGARERGNGCGRCGARADVADVARRRRRRGRGGGCGRGGAGWRKETGPTGGAHLSASRGEREGRLGPAHKEEGARGGVDWADGPRRGKGGERKKRKEEKNFPG

SEQ ID NO: 148662 - protein, 84 aa, Oryza sativa
  unsure (1)..(84): unsure at all Xaa locations
  Clone ID: PAT_MRT4530_49070C.1.pep
TPPGRLSPWLRRNVLHLGALAGASASTDETGAAGRWLRHGARLISQQGLVTYEKLSEPHPNPKPKTDPRPTPXPDAKPDPERKP

SEQ ID NO: 148663 - protein, 89 aa, Oryza sativa
  Clone ID: PAT_MRT4530_49071C.1.pep
LMESLSIMGWGCTVPPCGTLLPPRRLRCLCASLPPAAGVAPSSTTSVRVDGRVLRLVPSYQCRAVRIRRECSWSCTPHGGVLCVWVPAG

SEQ ID NO: 148664 - protein, 379 aa, Oryza sativa
  unsure (1)..(379): unsure at all Xaa locations
  Clone ID: PAT_MRT4530_49072C.1.pep
MAIGGCPIYVSDKPGNHNLELLRKLVLPSGSGLRVRLPGRPTRECLFSDQARDGARVAKKTHVHDAAPGTLTGAVRADDVDAIAQVADDGDGDDGWDGEAVAYMQRARELVRLPCDAVLPVTLGALDYEVFHVCPVRAIAMAPGGTVVAFAPVGLLDTVDATAAAVALRVHGCDHFGAYFSRRPARCTLDGADVGFTYDGDTRTCSQRDPRRINLSQGKTVMAPACVSDEHAVAVSAERLWKAFMDASTLPKACAGFVDDIAVEGNGGPGTIYTMKLNPAAGVGSTYKTRVAVCDXAARVLKSEVLEAESKVGKLKSHSTETKLEATGDGSCVAKLKVEYELADGSSLSPEQEKAIVDGYFGMLKMIEAYLAAHPAEFA

SEQ ID NO: 148665 - protein, 124 aa, Oryza sativa
  Clone ID: PAT_MRT4530_49073C.1.pep
PPTDMNREFSVDRRSQVRYPYLMAVLLSDLPLVLHVRLILANGHQGCFHSHGGPPCGARHYAYQPLSQHPSLARQCVASSRSLSNVDSRAVPLGPEPDARPGRGSSPRSAGLIAPLSMAVGLNK

SEQ ID NO: 148666 - protein, 764 aa, Oryza sativa
  unsure (1)..(764): unsure at all Xaa locations
  Clone ID: PAT_MRT4530_49074C.1.pep
MTVTPQITVSDGRLAVRGRTVLTGVPENVTAAHASGAGLVDGAFVGADAGEAKSHHVFTFGTLRECRFMCLFRFKLWWMTQRMGSSGRDVPLETQFMLIEVPATAAGDGHDGGGDGEPVFVVMLPLLEGKFRAALQGNDDDELQICIESGDKAVQTEQGVNMVYIHAGTNPFDTITQAIKAVEKRMQTFHHRDKKKMPSFLDWFGWCTWDAFYTDVTADGVKQGLRSLANGGAPPRFLIIDDGWQQIGTEDDDTDEHPAVAVQEGAQFASRLTGIKENVKFQSKNGGAGEDTPGLRMLVEEVKGEHGVRQVYVWHAMAGYWGGVAPAPAMERYEAALAYPVQSPGVTANQPDIVMDSLSVLGLGLVHPRKVLDFYDELHAYLASCGVDGVKVDVQNIIETLGAGHGGRVALTRAYNRALEASVARSFPDNGCISCMCHNTDMLYSARQTAVVRASDDFYPRDPASHTIHVASVAYNTVFLGEFMQPDWDMFHSLHPAAEYHGAARAIGGCPIYVSDKPGNHNFDLLRKLVLPDGSVLRARLPGRPTRDCLFSDPARDGESLLKIWNLNNCGGVVGVFNCQGAGWCRVAKKTRVHDAAPGTLTGAVRADDVDAIAQVAGGDGGGWDGEAVVYAHRARELVRLPRGAALPVTLGALEYEVFHVCPVRAIAAAPGGAAVAFAPVGLLDMFNAGGAVEECAVDAAAAVALRVRGXCAGVGAYFSRRPARCALDGADVGFTYDGDTGLVAVDLPVPEQEMYRWNLEIHV

SEQ ID NO: 148667 - protein, 766 aa, Oryza sativa
  unsure (1)..(766): unsure at all Xaa locations
  Clone ID: PAT_MRT4530_49075C.1.pep
MTVTPRITVAEGRLVAHGRTILTGVADNIALTHASGAGLVDGAFVGATADEPKSLHVFTFGTLRDLRFMCCFRFKLWWMTQRMGTSGRDVPLETQFMLLESRDGGGGGEAVYVVMLPLLEGQFRAALQGNDRDELEICIESGDKAVQTAQGTYMVYVHAGANPFDTITQAVKVVERHLQTFHHREKKKLPSFLDWFGWCTWDAFYTDVTADGXSLSRRAPPGQAALASYXISDDGWQQIGSENEEDDPGVAVQEGAQFASRLTGIKENVKFQSKNGGAGEDTPGLRMLVEEVKGEHGVRQVYVWHAMAGYWGGVAPAPAMERYERALAYPVQSPGVTANQPDIVMDSLSVLGLGLVHPRKVLDFYDELHAYLASCGVDGVKVDVQNIIETLGAGHGGRVSLTRAYHRALEASVARSFPDNGCISCMCHNTDMLYSARQTAVVRASDDFYPLDPASHTIHISSVAYNTLFLGEFMQPDWDMFHSLHPAAEYHGAARAIGGCPIYVSDKPGNHNFELLRKLVLPDGSVLRARLPGRPTRDCLFVDPARDGASLLKIWNLNNCGGVVGVFNCQGAGWCRVAKKTRVHDAAPGTLTGAVRADDVDAIAQVAGGDGGGWDGEAVVYAHRARELVRLPRGAALPVTLGALEYELFHVCPVRAMAVAPGGGGGAFAPVGLLDMFNAGGAVEECDVVRALDAAGEAEAEAEAAVVRLRARGCGRFGAYSSRRPARCALDAVEVEFSYDADTGLVALDVPVPAHELYKWTVEIQV

SEQ ID NO: 148668 - protein, 213 aa, Oryza sativa
  unsure (1)..(213): unsure at all Xaa locations
  Clone ID: PAT_MRT4530_49076C.1.pep
WIPGLQANHSFSAANRSDMVVGAVLNNLTALTELHLAGNEITTTGWISNLTSLQVIDMSSNKLHELNGICGLHQLKYLSLGFNMIQGVINPCLGKLQHLVYLDMGSNFLTGEIGQYLLSNLTQVEEVHLGDNNLTGTFDFSSLANNSELHNIVLSNNCKLEIETELVRWTPLFQLEYLNLSNTIVNKRKQTGSSPTFXLSAQVSLSGIDLSIC

SEQ ID NO: 148669 - protein, 171 aa, Oryza sativa
  Clone ID: PAT_MRT4530_49077C.1.pep
MDVRMHFFMVICKRKSTCSSTRYDRLLSLSGGNKASMFMEVTTYTGQQGDQLASDQPITVCTRLHQEKNKPCYKIHGDIWTTTPQPYYVNSEFRAKEVDEHLDDGHEIATTRRKYWRAINEELRHHSSEKIRMLLQHIDKKIQSAINEGRLHVELQKSHMPWITDLIREMV

SEQ ID NO: 148670 - protein, 94 aa, Oryza sativa
  Clone ID: PAT_MRT4530_49078C.1.pep
SLDSLLSDALMNLCISFSDDHNQLIPIAANSSVELALRLKLSFRKKIACLSQFVLSCTFYIRSSLCFDCWGLKVFVLFPQFCVLFFHFIAMPLV

SEQ ID NO: 148671 - protein, 57 aa, Oryza sativa
  Clone ID: PAT_MRT4530_49079C.1.pep
MEATLIIVLNFLLTGAIVFKGVDSELGLIKIVLHNGHETMEFHLLKSYLSFKNNDNK

SEQ ID NO: 148672 - protein, 335 aa, Oryza sativa
  unsure (1)..(335): unsure at all Xaa locations
  Clone ID: PAT_MRT4530_4907C.1.pep
QAGPPAALADGWGPPVIAFLPPLPPPARALAPPPPRIPPHPAVPARHNEGGIIPRDSLSRFPRFSLSLSLGFVRXNPASFAGVFKGGRDLRAXFPPSPAALSPSRRYIFAPRASLLRFRRSPLALAVGFVLATSTSLSAVAADLRYAADVAPGSLPTRRHLHRLRRVVADPVRPFASPADRRSSVALVIPNRAAAFLRFGRRFRRPRCPGVSRGPPFRFPLLSALSGAAPPRRWSPAVTIGARARRSRRPCRRGRLRARPRGCQVGPAVSRPRPRVRLTRGTHGADRRQPRAPGPPWTERLTRGPHXPWTRSARPLPRLVHPRINKTLTSGHYIH

SEQ ID NO: 148673 - protein, 129 aa, Oryza sativa
  Clone ID: PAT_MRT4530_49080C.1.pep
MDHHAWAMKIYGPFSPALLRSSAHINTLAARAHGAPRALAKQSMASLARSPAPPAIVVETSRRLAMKRKAFCPLRGCARASVSAAVSPRAPRPAGVSVRGRIFPAHKTPGLAISYVVVAEAMIDVGCHD

SEQ ID NO: 148674 - protein, 182 aa, Oryza sativa
  Clone ID: PAT_MRT4530_49081C.1.pep
MCDLVARTGRHQQRYEHGRRLVAGCIPFRYKDNNDETSDDGHKKLVEVLMINSQSGSGLLFPKGGWENDETVEEAAAREAIEEAGVRGDLVQLLGFYDFKSKTHQDKFCPEGMCRAAVFALRVKEELASWPEQSTRKRTWLTLSEAVERSRYPWVREALTTGFTTWHENWSNGDDHVDPSSR

SEQ ID NO: 148675 - protein, 260 aa, Oryza sativa
  unsure (1)..(260): unsure at all Xaa locations
  Clone ID: PAT_MRT4530_49082C.1.pep
SPPAKFFLHFSLHRISSQQQQQQQQPPWIPRRTRSQPRPGPPVVSPPVSANPYVVSAPSAQPPAKSARENLREKLDVVGRRFGDAARKTEGIVGDIWQHLKTGPSIADTAMGRIAQISKVIAEGGYDKVFHQTFECLPDEKLKKAYACYLSTSHGPIMGVLYISTAKIAFCSDSPVAYVTEDNKNQSSIYKVVVPVAQLRSVTPTASQQNPAERYIQVVSVDNHDFWFMGFVNYDGAVKSLQEAXVRGGKASLHHHMYFL

SEQ ID NO: 148676 - protein, 35 aa, Oryza sativa
  Clone ID: PAT_MRT4530_49083C.1.pep
NLLYGLHEDLYRVKHRPYIQPTHANGLSDNEVGDE

SEQ ID NO: 148677 - protein, 184 aa, Oryza sativa
  Clone ID: PAT_MRT4530_49084C.1.pep
MYGEQHKGRRRPGFVPQLGPVVLAYRLRSRCAAGEPQPPPPSPRRRPPPPSLPPVPGRSHRQSAGGLPAGGVGAGRTMKPVVGIVVSNKMQKSVVVAVDRLFHHKMYNRYVKRTSKFMAHDETEDCNIGDRVKLDPSRPLSKRKHWVVAEILRRAKVYSPSAAAAAVSAQPGATVQQAEAASKS

SEQ ID NO: 148678 - protein, 167 aa, Oryza sativa
  Clone ID: PAT_MRT4530_49085C.1.pep
MAVVPRPHGKQRECAERHEEEQRRPYHRNHVRRQWQDQLHLQTAPGSKQSDIKQCKINGYPSKKVQIASVYDTMMLMISTKSLCPSTQNTVTRESPIPKPRGEAVVHMDVAAKTGWSTCSEKPLHVQGLPASSLISFALLRSGSEEGDGGVGRHVTAGIGRRSDRRA

SEQ ID NO: 148679 - protein, 72 aa, Oryza sativa
  Clone ID: PAT_MRT4530_49086C.1.pep
GGIAAYGLVDGLDWIGSVMPAEEHDDAAADDVEPGLVLPHHLAYSSSSSFLLLLLHLSSSSSSSSLYLSIYV

SEQ ID NO: 148680 - protein, 41 aa, Oryza sativa
  Clone ID: PAT_MRT4530_49087C.1.pep
SQNHNHHRIIHLTGKRIFKELCVQTRRRPVSCLHRLQLWAS

SEQ ID NO: 148681 - protein, 129 aa, Oryza sativa
  Clone ID: PAT_MRT4530_49088C.1.pep
MAQLAMAATGQPLPGRCDDLGLPGPCTADECRGMGGDSTRASCNNAGKCCCPARNALVCERYDHCRDRIDGCRKKCEDDWALSPAGAYCKDGSGNVRDSCCCRPNATVAVDDDVDHHRRIHLHQLDLRR

SEQ ID NO: 148682 - protein, 115 aa, Oryza sativa
  unsure (1)..(115): unsure at all Xaa locations
  Clone ID: PAT_MRT4530_49089C.1.pep
SLACFLIANKGFIGVSADELSGRCISLXELHPIANWIMLLLXLYYCQLIAFISLFTSSIRIYIGHIADSSKPYRYRLGQTDWHARISSXFGPALELSISPRPMCVFRINNDVFYK

SEQ ID NO: 148683 - protein, 73 aa, Oryza sativa
  Clone ID: PAT_MRT4530_4908C.1.pep
MESIEILQCQSLSTLGGLGALASLKILKIQQCTHLTATSSETSASLEDLYLMDLKCLSCLRNGYCRIVLSWNI

SEQ ID NO: 148684 - protein, 150 aa, Oryza sativa
  Clone ID: PAT_MRT4530_49090C.1.pep
MRGEANGEEEQQPPRRNHLRDDAEEEEEVERRAARPVSGQQQQQQRRRPTDVGGGAAMRSVGYVGKHRLSAAIARLDQELQSLQDELNELETMEPASAACQGVITSTEGKSDPLLPVTIGPENASWERWFQRVRSSRSNKWWASKGSDFS

SEQ ID NO: 148685 - protein, 57 aa, Oryza sativa
  Clone ID: PAT_MRT4530_49091C.1.pep
MYHPPYFYGGMPMMLPALVIAVASVEHVAVDALYVAVNMHYPGIVHGTSQDQASLRD

SEQ ID NO: 148686 - protein, 389 aa, Oryza sativa
  Clone ID: PAT_MRT4530_49092C.1.pep
MASASGADAAAAAVAPPSLLVFSGGTAFNGVVEELKKVTTRVAHVLPVSDDGGSTAEIVRVLGCVLDRYQIVEGEHALWDGVSQPYRETIRAFLVYFHNEILRRSAEMFCFTNGSIGNFFFAGARIFFQSLDAAIFLFSRVSQIPAESLVLPVISTNDRLTLGCELWDGTIIRGQNEISHPSNGRKEVVNKDCNSCSALPSRIKRVFYMSSEGSNLLHEVFPEANRTVLEQLSKVDCIVYAMGSLFTSVCPSLVLRGIGETIASRSIPKVLLLNGSHDRETTGLPASGFVTAITDSLNRTYGYPDKSLKNLPKDYVNALLVPKGGQIPLDIKNLSSKGIFHVVTVDSIHDGKTGIIFDPHSLIQALTSLISDRRFVEPDLLTENVESVC

SEQ ID NO: 148687 - protein, 198 aa, Oryza sativa
  Clone ID: PAT_MRT4530_49093C.1.pep
MDGGYTASVSSWRMGKPALPLIQCPQCELKTIVRRKAKTSENYGRIFYTCPSHQRNGTGCDFWYWEEYYEQYLIKRGYLQACSRSRGKRQVIDLHGEGEGEGEGVGGRQVAEQIEDKQLPMQCPDNSSAETPMKPLLTIKKRARDYGSKHDLVFTSIRLECRGPSPADANSHNKPYPSSVIEADAAQLEIRTHREKRK

SEQ ID NO: 148688 - protein, 124 aa, Oryza sativa
  Clone ID: PAT_MRT4530_49094C.1.pep
RHNRAHWGMVKWQNAEVARRSKFPSSGSGGNTSGHGVAGLGGAELPCKCLTDVIERPHLHQPSSTGRAAGSSLARLARPRAGRATATHGPHQCSTWGADAWVDREFRTVLGVQFPIVSRLSWGN

SEQ ID NO: 148689 - protein, 124 aa, Oryza sativa
  unsure (1)..(124): unsure at all Xaa locations
  Clone ID: PAT_MRT4530_49095C.1.pep
THRPKQTKPXVDXKCHRVPRSLHDSYPVASITIAYSLLQKLSDHNTGRKRAQPHPFLHHPLXKPFSFTIHPNPPQXNKQHIVALVARHTPIADHTLHYXISAATISSEQNPPTXVXTXTRLGIT

SEQ ID NO: 148690 - protein, 153 aa, Oryza sativa
  Clone ID: PAT_MRT4530_49096C.1.pep
MDRGPILWGPYTCIDVAFSPSQIGWRFHHTSNYFVALKNAEPNVTTGREREDRGEALCRHPRAPRCRAYWTVEEGDEVRSASDRTGDTTPWPQTKKRGEKAAAAAPPDSVSARYLSFLRQAPSPRFPSPGASSSSGGGKGREDIGGDEKWASC

SEQ ID NO: 148691 - protein, 71 aa, Oryza sativa
  Clone ID: PAT_MRT4530_49097C.1.pep
MVARGDGYGGDFGYAGKTVLGRWFAGNGVVVVVRSGMAKPEALVVQRGGGTSGSRACPEYDSRRWSSGLRR

SEQ ID NO: 148692 - protein, 113 aa, Oryza sativa
  unsure (1)..(113): unsure at all Xaa locations
  Clone ID: PAT_MRT4530_49098C.1.pep
MAIPLRDPYANMITTLISNGSSVFMPTLIWMMLDLLEILSHHLSNVSSXYQNSSRGTSTAHHGWYNIVCGVAIAQRSELVLVGSHVANITANQNESYPLTRRSGHKRDHNHLS

SEQ ID NO: 148693 - protein, 90 aa, Oryza sativa
  Clone ID: PAT_MRT4530_49099C.1.pep
MQVIFRATYWLRQWVQLPKYEEDGVFLNVACRNLETMVMQLFAHHGWRFTHRLEYCFPCHVRSSLNFGWLPCFILDYVFLSLPTFCNNCL

SEQ ID NO: 148694 - protein, 107 aa, Oryza sativa
  Clone ID: PAT_MRT4530_4909C.1.pep
GGLHRRRRGARGRVRDGDHDGDLPDRRRRLERRRSTAGAAATTAARGYTGLGLYRQRQAKARVATGSGDSGGPFKGARRRRRRPTMTGDAMETSGFGGKRPIRFDLE

SEQ ID NO: 148695 - protein, 537 aa, Oryza sativa
  Clone ID: PAT_MRT4530_490C.1.pep
MEVQELVPSPWPSSSSFLVLVLATLLFVAAFLRRRQGARRKYNIPPGPRPWPVIGNLNLIGALPYRSIRDLSRRYGPLMSLRFGSFPVVVGSSVDMARYFLRANDLAFLDRPRTAAGRYTVYNYAGVLWSHYGEYWRQARRLWVTELLSARRLASTEHVRAEEVRAMLRGLSRRAGAGTAVVLKEHMLMVTLNVISRMVFGKKYIVEEGEGSSPTTAEEFRWMIEEIFFLNGVFNIGDMVPWLGWLDPQGYIGRMKRLGGMFDRFLEHILDEHVERRRREGDGFAARDMVDLLLQFADDPSLKVPIQRDGVKAFILELITGSTDTTSVSVEWAMSEVLRNPSVLARATDELDRVVGRRRLVAEGDIPNLPYLDAVVKESMRLHPVVPLLVPRVSREDAFSVSVAGAAASYDIPAGTRVLVNVWAIGRDPAVWGDDAEEFRPERFAAGGERGGVDVKGQDFELLPFGSGRRMCPGFGLGLKMVQLTLANLLHGFAWRLPGGAAAEELSMEEKFGISVSRLVQLKAIPEPKLPAHLYDE

SEQ ID NO: 148696 - protein, 66 aa, Oryza sativa
  Clone ID: PAT_MRT4530_49100C.1.pep
KLGPAQKFSPALKKNAHVRIGGIRVLQRKQRGGFRENSNWFRDSFKQPGCTIDYSLGCMQSSYLTF

SEQ ID NO: 148697 - protein, 701 aa, Oryza sativa
  unsure (1)..(701): unsure at all Xaa locations
  Clone ID: PAT_MRT4530_49101C.1.pep
CGPTRPRTPPALALTKANDQQVFGYLLSPLSRDVMIQVAMWKTATEAWRAIEKIYSSCTRARSVNTWLALINTKKGTMKVVEYVARMKALGNXMGVGGRPLDEEDLVQYIITGLDEDFSPIVSTLCTKTKPMTVGXLYSQLLNYETLLDLYRNTSQGGAAXFVTNCGRGIGRHDGGNNSGSSDRGTSQGHGGGQGRSRGHGTRGPDKRPTCQVCFKREHIAIDCWYRFDEDYVADEKLAASATNSYVVDTNWYIDTCGTDHITGVLEKLNTKEKYNSGEQIHTASDAGIDISHIGHTTVHTPSHNIHLNNVLYVPQAKKNLISASQLAADNSAFLELHFKLFSLKDQVTKDILVKGRCRHGLCLITKSFGRSSNKQALGAVKLSLSRWHNCLGRSFLPIVKQVTSKXNLQCLDEXANQFVYNACQKAKSHXLPYVRFTSVSXSPLELVFSDVXGLALESVGRNKYYVSFIDDFSKFTWIYLLRYKYEXFEKFRELQALVEXMFDRKIIAMPAYWGGEXRXLNSFFSKIGXIIICIVHIYTHRQNGLAERKHYHIVEVGLSLLSHASMHLKSWDEAFVAATYLIXFNRKPDSSLRVFDCAYWPHLHHYNTHKLXFHSKQCVFLGFSTRQKGFKCLDISSSHVYISRDVVFDENIFPFSTRHSNAGARLRSEILLVPSSLINHDTRGLLNTRLKLMCTTMPSP

SEQ ID NO: 148698 - protein, 71 aa, Oryza sativa
  Clone ID: PAT_MRT4530_49102C.1.pep
MQVKKVPREEGWSDRSSVGGQTGCDSGGSRSPSQSTATGIQEASQTGVNPTVRLAKACRSYRLEAIGHYPS

SEQ ID NO: 148699 - protein, 181 aa, Oryza sativa
  Clone ID: PAT_MRT4530_49103C.1.pep
MTKTDPREQQPHVEFIGRAHKKGQHCQSRSAPIAVAPFAKATTVAASIGEAQLRRSFRIRRIEQNQGGLSDSFLSIQLLIHRGRRPLAADVVSSGAGGGGADPRGSPSPRRHHPHQASPLVSIPTRPPCRIPHRGQGLPPASTTSPSPSLSLNPLGTLVHLAYECRLALTDDGDDRQGHRR

SEQ ID NO: 148700 - protein, 1109 aa, Oryza sativa
  Clone ID: PAT_MRT4530_49104C.1.pep
MAERAVAHNLSPSASGDDGEQNPRRRARTPPSPSRRSLGREEALEEVERSATSPPAGNGEGRRDGERRLLVYGDGSTPQGALQAAGALLRHPPVVPDPETPARRWLDDVADLVMTAQQRLGTGGRSSATKASGAATAGSVSSRRRARRAAAVTRRSSAIPSPTPPTQEDVRGGPDARLNIEHRRNGRRAAHATEGASSSGAPLRSGHGGQPPVSPVGGAGCRAFVASLRNVRWPPRFRPTITEKYDGSVNPAEFLQIYTTGIEAAGGRGVRHNRMLEKIASKEPQTTAELFQLTDRVARKEEAWTWNSSGSGVAASAAPGSAARSGRRDRRRKKRSAHSDDEGHVLAVEGASRATRKGRPASDKKKEAGAPSRERPTGKWCSVHNTSLHDLVDCRAVKSLAERTRKWEEERRQERREGKAPVAPAGNRRGEAKQKATAEDIDDGDDDLGFQEPEATVATVDGGACAHASRRSLKAMKRELLAAAPTHEATRRARWSEVALTFDQTDHSPCVARGGQIAMVVSPTVCNVKLGRVLIDGGAALNILSPAAFDAIKAPGMVLRPSQPIIGVTPGHTWPLGHIDLPVTFGGSANFRTERVNFDVADLSLPYNAVLGRPALMKMPGPGGPITVHGDLKVALACMEQRADHLAAASKPAGGDERLSTSVPAAPRQRMITCDEVPEDALVSFLRANADVFAWRPADMPGVPREVIEHRLAVRPGARPVRQKVRRQAPERQAFIREEVARLLEAGFIREVIHPEWLANPVVVPKANGKLRMCIDYTDLNKACPKDPYPLPRIDQIVDSTAGCDLLCFLDAYSGYHQIRMAREDEEKTAFITPIGTYCYTTMPFGLKNAGPTFQRTTRISLGSQLRRNVEAYVDDLVVKTRNQETLLSDLAETFESLRSARIKLNPDKCVFGVPAGKLLGFLVSARGIEANPEKIRAIERMRPPSKLRDVQCVTGCMAALCRFISRLGEKALPLFKLLKRFGPFTWTEEAERALTQLKVYLSSPPVLVAPKPDEPLLLYLAATPQVVSAALVVERDEDNPHSAHPHSVSTRPGREQGGEAPEPNSGPRPPTAGAGPPPVCPMVPGAPDPQDGPGATAGRPRLSPSDPE

SEQ ID NO: 148701 - protein, 1329 aa, Oryza sativa
  unsure (1)..(1329): unsure at all Xaa locations
  Clone ID: PAT_MRT4530_49105C.1.pep
MAERAVAHSLSPNASGDDGEQNPRRRARTPPSPSRRNLGRGEALGEVEGSATSPPAGNGGGRRDGARRRLVYGDGGTPQGALQAAGALLRHPPVVPDPETPARRWLDDVADLVMTAQQRLGAGRRSSATGTSGAAAAGSMSSRRRARGGVRHNRMLEKIASKEPQTTAQLFELADRVARKEEAWTWNSSGSGVAAPAAPESAARSGRWDRRRKKRSARSDDEGSAQPASGVPCTTPPSTTSRTAXVKSLAERTRKWEEEKRQERREGKTPAAPASNRRGEAKQKATAEDIDNGDDDLGFQEPEATVATVDGGACAHASRRSLKAMKRELLAAAPTHEAMRRARWSEVPLTFDQTDHPPCVARGGQIAMVVSPTVCNVKLGRVLIDGGAALNILSPAAFDAIKAPGMVLRPSQPIIGVTPGHTWPLGHIDLPVTFGGSANFRTERVDFDVADLSLPYNAVLGRPALVKFMAAVHYAYLQMKMPGPGGPITVHGDLKVALACMEQRADHLAAASKPAGGDERLSTSVPAAPRQRMVTCDEVPEDALVSFLRANADVFAWRPADMPGVPREAPERQAFIREEVARLLEAGFIREVIHPEWLANPVVVPKANGKLRIQIGRNVEAYVDDLVVKTRNQETLLSDLAETFESLRSARIKLNPDKCVFGVPAGKLLGXVSAALVVERDEDNPRSAHPHPVSTRPGREQEGEAPEPNGGPRPPTAGAGPPPACPTVPGAPDPXDGPGATAGRPRLSPSDPEVVGTEAECAPRGLSDEERPGDAAPGEEDRPXAERKLRHYFQAHRVTVVTSYPLGQILHNREGTGRVVRWAIELSEFDLRFEPRHAIKSQALADFVAEWTPAPEPVSTPEASSGPSQLPHTAYWVMQFDGSLSLQGAGAGVTLTSPSGDVLRYLVRLDFRATNNMAEYEGLLAGLRVAAGLGIRRLLVLGDSQLVVNQVCKEYQCSDPQMDAYVRQVRRMERHFDEIELRHVPRRDNAVADELSRLASSRAQTPPGAFEERLAQPSARPDPLGGTDAPERPPRPVGVQASGPEGSAPSSPRLIAWITEIQAYLADKTLPEDREGSERVRRISKRYVLVEGTLYRRAANGVLLKCIPREQGVELLADVHEGECGAHSASRTLVGKAFRQGFYWPTALNDAVDLVRRRAPGGFEYLYVAVDKFTKWPEAYPVIKIDKHSALKFIRGITARFGVPNQAMAKWSXANAEILKGLKTKTFNILKKHGDSWIEELPAVLWANRTTPSRATGETPFFLVYGAEAVLPSELTLRSPRVTMYCEADQDQLRRDDLDYLEERRRRASLRAARYQQSLRRYHQRHVRA

SEQ ID NO: 148702 - protein, 1706 aa, Oryza sativa
  Clone ID: PAT_MRT4530_49106C.1.pep
MAERAVAHSLSPNASGDDGEQNPRRRARTPPSPSRRNLGRGEALGEVGGSATSPPAGDGGGRRDGARRRLVYGDGGTPQGALQAAGALLRHPPVVPDPETPARRWLDDVADLVMTAQQSLGAGGRSSATEASGAAAAGSTSSRRRARRAAAVTRRSSAIPSSTPPTQEDVRGGSDARLDIEHRRDARRAAHATEGASSSGAPLRSGHGGRPPVSPVGGAGCRAFVASLRNVRWPPRFRPTITEKYDGSVNPAEFLQIYTTGIEAAGGDDRVMANFFPMALKGEEADLHAVQRRDDESLRSYIQRFCQVRNTIPCIPAHAVIYAFRGGVRHNRMLEKIAFKEPQTTAQLFELADRVARREEAWTWNSSGSGVAAPAVPGSAARSGRRDRRRKKGSARSDDEGHVLAIEGASRAPRKGRPASDKKKEAGAPSRERPTGKWCTVHNTSLHDLADCRAVKSLAERTRKWEEEKRQERREGKAPAAPAGNRRGETKQKATAEDIDDGDDDLGFQEPEATVATVDGGACAHASRRSLKSMKRELLAAAPTHEATRRARWSEVALTFDQTDHPPCVARGGQIAMVVSPTVCNVKLGRVLIDGGAALNILSPAAFDAIKAPRMVLRLSQPIIGVTPGHTWPLGHIDLPVTFGSSANFRTDRVDFDVVDLSLPYNAVLGRPALVKFMAAVHYAYLQMKMPGPGGPITVHGDLKVALACMEQRADHLAAASKPAGGDERLSTSVPAAPRQRMVTCDEVPEDALVSFLRANADVFAWRPADMPGVPREVIEHRLAVRPGARPVRQKVRRQAPERQAFIREEVARLLEAGFIREVIHPEWLANPVVVPKANGKLRMCIDYTDLNKACPKDPYPLPRIDQIVDSTAGCDLLCFLDAYSGYHQIRMAREDEEKTAFITPIGTYCYTTMPFGLKNAGPTFQLTTRISLGSQIGRNVEAYVDDLVVKTCNQETLLSDLAETFESLRSARIKLNPDKCVFGVPAGKLLGFLVSARGIEANPEKIRAIERMRPPSKLRDVQCVTGCMAALSRFISRLGEKAVPLFKLLKRSGPFTWTEEAERALTQLKAYLSSPPVLVAPEPDEPLLLYLAATPQVVSAALVVERDEDNPHSAHAYPVSTRPGREQGGEAPEPNGGPRPPTAGVGPPPACPTVPGAPDPQDGPGATAGRPRLSPSDPEVVGTEAECAPRGLLDQERHGDAAPGEEDRPRRKVQRPVYFVSEALRDAKTRYPQAQKMLYAILMASRKLRHYFQAHRVTVVTSYPLGQILHNREGTGRVVKWAIELSEFDLRFEPRHAIKSQALADFVAEWTPAPEPVSAPEASSGPSQLPHTAFWVMQFDGSLSLQGADKTLPEDREGSERVRRISKRYVLVEGTLYRRAANGVLLKCIPREQGVELLADVHEGECGAHSASRTLVGKAFRQGFYWPTALNDAVDLVRRCRACQFHARQTHQPAQALQTIPLSWPFAVWGLDILGPFRRTPGGFEYLYVAVDKFTKWPEAYPVIKIDKHSALKFIRGITARFGVPNRIITDNGTQFTSELFGDYCEDMGIKLCFASPAHPRSNGQVERANAEILKGLKTKTFNILKKHGYSWIEELPAADQDQLRRDDLDYLEERRRRAALRAARYQQSLRRYHQRHVRARSLCVDDLVLRRVQTRAGLSKLSPMWEGPYRVIGVPRPGSVRLATGDGTELPNPWNIEHLRRFYS

SEQ ID NO: 148703 - protein, 1480 aa, Oryza sativa
  Clone ID: PAT_MRT4530_49107C.1.pep
MAERAVAHSLSPNASGDDGEQNPRRRARTPPSPSRRNLGRGEALGEVEGSANSPPAGDGGGRRDGARRRLVYGDGGTPQGALQATGALLRHPPVVPDPETPARRWLDDVADLVMTAQQRLGASGRSSATEASGAAAAGSMSSRRRARRAAAVTRRSSAIPSSTPPTQEDVRGGLDARLDIERRRDARRAAHATEGASSSGAPLRSGHGGRPPVSPVGGAGCRAFVASLRNVRWPPRFRPTITEKYDGIVNPAEFLQIYTTGIEATGGDDRVMANFFPMALKGQARGWLMNLPPASVHSWEDLCQQFTTNFQGIYPRPGEEADLYAVQRRDDESLRSYIQRFCQVRNTIPCIPAHAVIYAFRGGVRHNRMLEKIASKEPQTTAQLFELADRVARKEEAWTWNSSGSGVAAPAAPGSAARSGRRDRRRKKGSARSDDEGHVLAVEGASRAPRKGRPASDKKKEAGAPSRERPTGKWCTVHNTSLHDLADSAARSKVWLSGRGSGRRRRGRSAIRMAREDEEKTAFITPIGTYCYTTMPFGLKNAGPTFQRTTRISLGSQIGRNVEAYVDDLVVKTRNQETLLSDLAETFESLRSARIKLNPDKCVFGVPAGKLLGFLVSARGIEANPEKIRAIERMRPPSKLRDVQCVTGCMAALSRFISRLGEKALPLFKLLKRSGPFTWTEEAERAFTQLKAYLSSPPVLVTPEPDEPLLLYLAATPQVVSAALVVERDEDNPHSAYPHPVSTRPGREQGGEAPEPNGGPRPPTAGAGPPPACPTVPGAPDPQDGPGATAGRPRLSPSDPEVVGTEAEYAPRGLSDEERPRDAAPGEEDRPRRKVQRPVYFVSEALRDAKTRYPQAQKMLYAILMASRKLRHYFQAHRVTVVTSYPLGQILHNREGTGRVGAGAGVTLTSPSGDALRYLVRLDFRATNNMAEYEGLLAGLRVAAGLGIRRLLVLGDSQLVVNQVCKEYQCSDPQMNAYVRQVRRMERHFDGIELRHVPRRDNAVADELSRLASSRAQTPPGAFEERLAQPSARPDPLGETDAPERPPRPVGVQASGPEGSAPSSPRLIAWITEIQAYLADKTLPEDREGSERVRRISKCYVLVEGTLYRRTANGVLLKCIPREQGVELLADVHEGECGAHSASRTLVGKAFRQGFYWPTALNDAVDLVRRCRACQFHARQTHQPAQALQTIPLSWPFAVWGLDILGPFRRAPGGFEYLYVAVDKFTKWPEAYPVIKINKHSALKFIRGITARFGVPNRIITDNGTQFTSELFGDYCEDMGIKLCFASPAHPRSNGQVERANAEILKGLKTKTFNILKKHGDSWIEELPAVLWANRTTPSRATGETPFFLVYGAEAVLPSELTLRSPRVTMYCEADQDQLRRDDLDYLEERRRRAALRATRYQQSLRRYHQRHVRARSLYVDDLVLRRVQTRAGLSKLSPMWEGPYRVIGIPRPGSVRLATGDGTELPNPWNIEHLRRFYP

SEQ ID NO: 148704 - protein, 75 aa, Oryza sativa
  Clone ID: PAT_MRT4530_49108C.1.pep
LAMHNTKLHRPGIEPAQRDTLTEQILPSIRYAEHTHTRGRRRRTYMPLTYIHRLNTRTRTHTIPERHTWERTYLA

SEQ ID NO: 148705 - protein, 1780 aa, Oryza sativa
  unsure (1)..(1780): unsure at all Xaa locations
  Clone ID: PAT_MRT4530_49109C.1.pep
MAERAVAHSLSPNASGDDGEQNPRRRARTPPSPSHXNLGRGEALGEVEGTATSPPAGDGGGRRDGACRRLVYGDGGTPQGALQAAGALLRHPPVVPDPETPARRWLDDVADLVMAAQQRLGAGGRSSATEXSGAAAAGSMSSRRRARRAAAVTRRSSAIPSSTPPTQEDVXGPTITEKYDGSVNPAEFLQIYTTGIEAAGGDDRVMANFFPMALKGQAWGWLMNLPPASVHSWKDLCQQFTMNFQGIYPRPGEEADLHAVQRRDDESLHSYIQRFCQVRNTIPCIPAHGVIYAFRGGVRRNRMLEKIASKEPQTTAQLFELADRVAQKEEAWTWNSSDSGVAASAAPGSAARSGRRDRRRKKGSARSDDEGHVLAVEGASRAPRKGRPVSDKKKEAGAPSRERPTGKWCTVHNTSLHDLADCRAVKSLAERTRKWEEEKKQERCEGKTPAAPTGNRRGEAKQKATAEDIDDGDDDLGFQEPEATVATVDGGACAHASRRSLKDMKRELLAAAPTHEATRRARWSEVALTFDQTDHPPCVARGGQIAMVVSPTVCNVKLGRVLIDGGAALNILSPAAFDAIKAPGMVLRPSQPIIGVTPGHTWPLGHIDLPVTFGGSANFRTERVDFDVADLSLPYNAVLGRPALVKFMAAVHYAYLQMKMPGPGGPITVHGDLKVALACMEQRADHLAAASKPAGGDERLSTSVPAAPRQRMVTCDEVPEDALVSFLRANADVFAWRPADMPGVPREVIEHRLAVRPGARPVRQKVRRQAPERQAFIREEVARLLEAGFIREVIHLEWLANPVVVPKANGKLRMCIDYTDLNKACPKDPYPLPRIDQIVDSTAGCDLLCFLDAYSGYHQIRMAREDEEKTAFITPIGTYCYTTMPFGLKNAGPTFQRTTRISLGSQIGSNVEAYVDDLVVKTRNQETLLSDLAETFGSLRSTRIKLNPDKCVFGVPAGKLLGFLVSARGIEANPEKIRAIERMRPPSKLRDVQCVTGCMAALSRFISRLGEKALPLFKLLKRSGPFTWTEEAEQAFTQLKAYLSSPPVLVAPEPDEPLLLYLAATPQVVSAALVVERDEDNPHSAHPHPVSTRPGREQGGEAPEPNGGPRPPTVGAGPPPACPTVPGAPDPQDGPGATAGRLRLSPSDPEVIGTEAECAPRGLSDEERPGDAAPGEEDWPRRKVQRPVYFVSEALRDAKTRYPQAQKMLYAILMASRKLRHYFQAHRVTVVTSYLLGQILHNREGTGRVGAGAGVTLTSPSGDVLRYLVRLDFRATNNMAEYEGLLAGLRVAAGLGIRRLLVLGDSQLVVNQVCKEYQCSDPQMDAYVRQVRHMERHFDGIELRHVPRRDNAVADELSRLASSRAQTPPGAFEERLAQPSARPDPLGETDAPERPPRPVGVQASGPEGSAPSSPRLIAWITEIQAYLADKTLPEDREGSERVRRISKRYVLVEGTLYRRAANGVLLKCIPREQGVELLADVHEGECGAHSASRTLVGKAFRQGFYWPTALNDAVDLIRRCRACQFHARQTHRPAQALQTIPLSWPFAVWGLDILGPFRRAPGGFEYLYVAVDKFTKWPEAYPVIKIDKHSALKFIRGITVRFGVPNRIITDNGTQFTSELFGDYCEDMGIKLCFAYPAHPRSNGQVERANAEILKGLKTKTFNILKKHGDSWIEELPAVLWANRTTPSRATGETPFFLVYGAEVVLPSELTLRSPRVTMYCEADQDQLHRDDLDYLEERRRRAAXRYQQSLRRYHQCHVRARSLCVDDLVLRRVQTRAGL

SEQ ID NO: 148706 - protein, 1239 aa, Oryza sativa
  Clone ID: PAT_MRT4530_4910C.1.pep
MVEAAAIAFAKSSAIFVGKKVAETVISYVVNKALDRLPLENEDLKTKLKSKLSKTQAMLYGITLQEIQDNQGLVEWLWQFRDAIQEAEDALDELDFFDLEKVCNRKAESSSSLVPKFMRLQLSVSSNNSNSSRKNLKNALMRLESVFDDAANFRVVTGHGLHTSPQRNEGRIQDTTNRNETTRVLATPVFGRQKEKDEIIEWLGVEAPGRDSKLSVCAIVGGGGMGKTSLAQLVCQDKKVQDHFGDMIIWVHVPKRFEPVVLVARMLESINRNRVTASSLDILQLDLTKELVTKRFLLVLDDAWEDGENELWGQFLSPLRNIIAPMGGRILLTTRMGSVADAVKRQMPSNEYKCVVLGGLDHRDIMQILNHHVPPNEDLELRSVAEWIVHNLEGCPFVAKVIGQYLRDNTDHSNWNDFLNKKVCHLDDIAPRVMEMLRLSYEDLTSEVQLCFQYCSIFPSHYKFRMEELTEMWVSSGLILQSTKGNSGQEKIAREHFNILLKKSFFSLIPRELHPDPSTDYYVMHDLIYELSCLVSSEEFSTFKVTKCNTADVSERVRHLYIEGINSEAINVISKSKYLRTLIIANEEWPLKAGLADNLKKAMKGITSLRLLKFDGHGWFDINDAIAELKHLRYICMSATNKSNLNKLFKLFHLEVLKLLKIEGEEQASVSDLCNLANLQKLYLPKPALSRVPHIGRLTNLRELNGLSVKKEEGHKISELKDLKNLRKVFVFDVENVSNCSEASLAELSNKNDMELLSLEWSNQHNRINERILDTVVPYKRIRHLRISGYKGVLPPLWIRRKVLTKLVRLKIVGCPKWDDLPSFASLSSLKHVLLEDLPNLKCIGGPDGDGLPPFLVTLVVKECLELLNLPHLPYSLKHLGINKVGISCLPTSSQMALQNVSTVDPQLCSLHVDSCPNLLSFGSCIVEEQHYKALTSLKVIGCSMLEKLPSEEHFRRISTMESIEILQCQSLSTLGGLGALASLKILKIQQCTHLTATSSGIPVAPAMRSSLVLDTLEIDDHLLLLQNPFRNFCLTRRLVSNGSEMLELPQEWLLQNSSQLEHIEINNANLLRSLPSTMDTLHSLRSLVLCNAPLLETLPAMPPNLWALQISGCCTRLKAREYSISPLEEKMVPNSSGLIWQAGVVLTHKKCASIRGWLGLCCSTPMESLPSWWCDARKAIKKRDRRAFDAGIILVTWLIWKQRNARVFEGHTVLPVNLCAAIEDEWKLWQEAGLTSSL

SEQ ID NO: 148707 - protein, 811 aa, Oryza sativa
  Clone ID: PAT_MRT4530_49110C.1.pep
MAQQQAGARGSKLEIVAARGGSGGSSSAGDAEAPPLDVLRQDSLYRDATRPAHGHHGQESWMRTLRLGFQCVGILHADLGTSPLYVYQNTFKYGIKHEDDIIGVLSLIIYSFVLFTMVKIVFIALHANDDGDGGTFALYSLISRYAKVCLIPNQQAEDELVTRYNDHGKPPATLRRAQWMKSQLEKKPAKIAVFFLTIFATALAISDCVLNPSVSVLSAVNGLKLRAPHLTTDEVVWITVGILVVFFAVQRFGTDKIGYTFAPVVVVWLLLISGIGIYDLVKYDVGVLRAFNPKYIIDYFRRNKKDGWVQLGEVLLTFTGTEALFADLGYFSIKSIQLSSTFVLLPSVLCTYIGQAAYLRKHMDQQHIQNAFFNSIPRPLFWPMFVLAIMTSVIGCQAMVSCAFATMSHLQTLNCFPRIKILHTSRRYSGQLYSPEVNFFLCLLSCVITLSFRTTGFIVKAHEICVVLVMVITTILMTIVMLLVWKVNIWWIVLFFVVFMSTETVYLSAVLYKFTKGPYMPLAMSAVLMVIMFVWHYVHVKRYKFELEHTVSPNKVRELLERRDLKRVPGVGLFYTELVQGIPPIFPHLIEKIPTIHSVIVFISMEHLPIPHVDVSERFLFRQVEPKECMVFRCVARYGYRDTLEMADDFVTTLVEYLQYYIRDLNLYNTVEPLKMSCPSIRIDSFSWDRRPSGHGIYAEEMLTPIQSFSELTMHPVGMSSRLAQFQTTKMSLEEMLKIEEDQKLIQREVDNGVVYILGESEVVAKPHSNLLKKVVVNYIFNFLRKNSRKGEKMLSIPRRKLLKVGITYEI

SEQ ID NO: 148708 - protein, 1620 aa, Oryza sativa
  unsure (1)..(1620): unsure at all Xaa locations
  Clone ID: PAT_MRT4530_49111C.1.pep
MANFFPMALKGQAWGWLMNLPPASVHSWKDLCQQFTMNFQGIYPRPGEEADLHAVQRRDDESLHSYIQRFCQVRNTIPCIPAHGVIYAFRGGVRRNRMLEKIASKEPQTTAQLFELADRVAQKEEAWTWNSSDSGVAASAAPGSAARSGRRDRRRKKGSARSDDEGHVLAVEGASRAPRKGRPVSDKKKEAGAPSRERPTGKWCTVHNTSLHDLADCRAVKSLAERTRKWEEEKKQERCEGKTPAAPTGNRRGEAKQKATAEDIDDGDDDLGFQEPEATVATVDGGACAHASRRSLKDMKRELLAAAPTHEATRRARWSEVALTFDQTDHPPCVARGGQIAMVVSPTVCNVKLGRVLIDGGAALNILSPAAFDAIKAPGMVLRPSQPIIGVTPGHTWPLGHIDLPVTFGGSANFRTERVDFDVADLSLPYNAVLGRPALVKFMAAVHYAYLQMKMPGPGGPITVHGDLKVALACMEQRADHLAAASKPAGGDERLSTSVPAAPRQRMVTCDEVPEDALVSFLRANADVFAWRPADMPGVPREVIEHRLAVRPGARPVRQKVRRQAPERQAFIREEVARLLEAGFIREVIHLEWLANPVVVPKANGKLRMCIDYTDLNKACPKDPYPLPRIDQIVDSTAGCDLLCFLDAYSGYHQIRMAREDEEKTAFITPIGTYCYTTMPFGLKNAGPTFQRTTRISLGSQIGSNVEAYVDDLVVKTRNQETLLSDLAETFGSLRSTRIKLNPDKCVFGVPAGKLLGFLVSARGIEANPEKIRAIERMRPPSKLRDVQCVTGCMAALSRFISRLGEKALPLFKLLKRSGPFTWTEEAEQAFTQLKAYLSSPPVLVAPEPDEPLLLYLAATPQVVSAALVVERDEDNPHSAHPHPVSTRPGREQGGEAPEPNGGPRPPTVGAGPPPACPTVPGAPDPQDGPGATAGRLRLSPSDPEVIGTEAECAPRGLSDEERPGDAAPGEEDWPRRKVQRPVYFVSEALRDAKTRYPQAQKMLYAILMASRKLRHYFQAHRVTVVTSYLLGQILHNREGTGRVALADFVAEWTPAPEPVSAPEASSGPSQLPHTAYWVIQFDGSLSLQGAGAGVTLTSPSGDVLRYLVRLDFRATNNMAEYEGLLAGLRVAAGLGIRRLLVLGDSQLVVNQVCKEYQCSDPQMDAYVRQVRHMERHFDGIELRHVPRRDNAVADELSRLASSRAQTPPGAFEERLAQPSARPDPLGETDAPERPPRPVGVQASGPEGSAPSSPRLIAWITEIQAYLADKTLPEDREGSERVRRISKRYVLVEGTLYRRAANGVLLKCIPREQGVELLADVHEGECGAHSASRTLVGKAFRQGFYWPTALNDAVDLIRRCRACQFHARQTHRPAQALQTIPLSWPFAVWGLDILGPFRRAPGGFEYLYVAVDKFTKWPEAYPVIKIDKHSALKFIRGITVRFGVPNRIITDNGTQFTSELFGDYCEDMGIKLCFAYPAHPRSNGQVERANAEILKGLKTKTFNILKKHGDSWIEELPAVLWANRTTPSRATGETPFFLVYGAEVVLPSELTLRSPRVTMYCEADQDQLHRDDLDYLEERRRRAAXRYQQSLRRYHQCHVRARSLCVDDLVLRRVQTRAGL

SEQ ID NO: 148709 - protein, 1751 aa, Oryza sativa
  Clone ID: PAT_MRT4530_49112C.1.pep
MAERAVAHNLSPSASGDDGEQNPRRRARTPPPPSRRSLRREEALEGVERSATSPPTSDGEGRRDGEHRLLVYGDGSTPQGALQAAGALLRHPPVVPDPETPARRWLDDVADLVMTAQQRLGAGGRSSATKASGAATAGSVSSRRRARRAAAVTRRSSAIPSSTPPTQEDVRRGPDARLSIERRRNGRRAAHATEGASSSGAPLRFGRGGQPHVPPVGGVDCRAFVASLRNVRWPSRFRPTITEKYDGSVNPAEFLQVYTTGIEAAGGDDRVMANFFPMALKGQARGWLMNLPPASVHSWEDLCQQFTMNFQGTYPRPGEEADLHARFCQVRNTIPCIPAHAVIYAFRGGVRHNRMLEKIASKEPQTTAELFQLADRVARKEEAWTWNSTGSGVAASAAPGSTARSGRRDRRRKKRSAHSDDEGHVLAVEGASRATRKGRPASDKKKEAGAPSRERPTSKWCTVHNTSLHDLADCRVVKSLTERTRRWEEERRQERREGKAPAAPFGNRRNEAKQKAPAEDIDDGDDDLGFQEPGATIATVDGGACAHASRRSLKAMKRELLAAAPTHEATRRARWSEVALTFDQTDHPPCVARGGQITMVVSPTVCNVKLGRVLIDGGAALNILSPAAFDAIKAPGMVLRPSQPIIGVTPGYTWPLGHIDLPVTFGGSANFRTERVNFDVADLSLPYNAVLGRPALVKFMAAVHYAYLQMKMPGPGGPISVHGDLKVALACMEQRADHLAAASKPEGGNERLSTSVPAAPRQRMITCDEVPEDALVSFLRANADVFAWRPADMPGVPREVIEHHLTVRPGARPVRQKVRRQAPERQAFIREEVARLLEAGFIREVIHPEWLANPVVVPKANGKLRMCIDYTDLNKACPKDPYPLPRIDQIVDSTAGCDLLCFLDAYSGYHQIRMAREDEEKTAFITPIGTYCYTTTPFGLKNAGPTFQRTTRISLGSQIGRNVEAYVDDLVVKTRNQETLLSDLAETFESLHSARIKLNPDKCVFGVPAGKLLGFLVSARGIEANPEKIRAIERMRPPSKLRDVQCVTGCMAALSRFISRLGEKALPLFKLLKRSGPFIWTEEAERAFTHLKAYLSSPPVLVAPEPDEPLLLYLAATPQVVSAALVVERDEDNPHLAHPHPVSTRPGREQGGEAPEPNGGPRPPTAGAGPPPACPTVPSAPDPQDGPGATAGRPRQSPSDPEVVGTEAECAPCGLSDEERPGDAAPSEEDRPRRKVQRPVYFVSEALRDAKTRYPQAQKMLYAILMASRKLRHYFQAHRVTVVTSYPLGQILHNREGTGRVALADFVAKWTPAPEPVSAPEASSGPSQLPHTAYWVMQFDGSLSLQGAGAGVTLTSSSCDVLRYLVRLDFRATNNMAEYEGLLAGLRVAAGLGIRHLLVLGDSQLVVNQVSKEYQCSDPQMDAYVRQVRRMERHFDGIELRHVPRRDNAVADELSRLASSRAQTPPGAFEERLAQPSARPDPLGETDAPERPPRPVGVQASGPEGSVPGSPRLIAWIAEIQAYLVDKTLPEDREGRERVQRISKRYVLMEETLYRRAANGVLLKCIPREQGVELLADIHEGECGAHSASRTLVGKAFRQGFYWPTALNDAVDLVRRCRACQFHAKQTHQPAQAMQTIPLSWPFAVWGLDILGPFRWAPGGFEYLYVAVDKFTKWPEAYPVIKIDKHSTLKFIKGITARFGVPNRIITDNGTQFTSELFGDYCEDMGIKLCFASPAHPRSNGQVERANAEIL

SEQ ID NO: 148710 - protein, 621 aa, Oryza sativa
  Clone ID: PAT_MRT4530_49113C.1.pep
MEVFQGVQFARLRNWWEETYVTADEDGRSVYHYAPDRHRPAHEAIWAVQMVLAGAPPTQYVLLRGAYGRYLGAPDAVVRRWPLSCCWPAPVVGQRDFDQPEVDAIMWRAVRRADHVLCLHDKSGRYLRGKLGTLVLGDRPRLTVGDGRLNDDEKALRWEVLPVLPNPGRPELPISIVPEADLVGRLVKACFLPLQREIQFVEADDDGNIGEGQEVWDSFQYQGRSVQLLRNELEDRVGYAITVCVRAGRHGQHSPLLINLPHSRETLHIVVLRRNSEVSPSSPRHATPRRATPRHAEKPRSSKPLAAARASPAHHPRRAAMQVFHGAQFVRLRNLWEETYITADEDGRSVYHYDPGRRPSHEAIWAVQLAVAGEPPTQYVLLRGAYGRYLGAPDAVERRWPLSCCCPAPVVGQRDFDQPVVDAIMWRAVRRTGHVVCLHDKSGRYLRGKLMSTLVCGGRPSLTVGDGRLSDDEKELRWEVRPVLPSPGRPELPIATEADLAELFVKICFPPRRREIQFVAPDGDGNIVWDSFQYQGRSVQLLRNELENRVGYAITMCVRAGRHGRLTPLLINLPHSRETLHIVALRRNSEAPVLFGHCLTAYFSAMTAADHRLTFPDPDAS

SEQ ID NO: 148711 - protein, 1670 aa, Oryza sativa
  unsure (1)..(1670): unsure at all Xaa locations
  Clone ID: PAT_MRT4530_49114C.1.pep
MPASISSGGATRAAHATEGASSSGAPLRSGHGGRPPVSPVGGAGCRAFVASLRNVRWPQGSGPTITEKYDGSVNPAEFLQIYTTGIEAAGGDDRVMANFFPMALKGQAWGWLMNLPPASVHSWKDLCQQFTMNFQGIYPRPGEEADLHAVQRRDDESLHSYIQRFCQVRNTIPCIPAHGVIYAFRGGVRRNRMLEKIASKEPQTTAQLFELADRVAQKEEAWTWNSSDSGVAASAAPGSAARSGRRDRRRKKGSARSDDEGHVLAVEGASRAPRKGRPVSDKKKEAGAPSRERPTGKWCTVHNTSLHDLADCRAVKSLAERTRKWEEEKKQERCEGKTPAAPTGNRRGEAKQKATAEDIDDGDDDLGFQEPEATVATVDGGACAHASRRSLKDMKRELLAAAPTHEATRRARWSEVALTFDQTDHPPCVARGGQIAMVVSPTVCNVKLGRVLIDGGAALNILSPAAFDAIKAPGMVLRPSQPIIGVTPGHTWPLGHIDLPVTFGGSANFRTERVDFDVADLSLPYNAVLGRPALVKFMAAVHYAYLQMKMPGPGGPITVHGDLKVALACMEQRADHLAAASKPAGGDERLSTSVPAAPRQRMVTCDEVPEDALVSFLRANADVFAWRPADMPGVPREVIEHRLAVRPGARPVRQKVRRQAPERQAFIREEVARLLEAGFIREVIHLEWLANPVVVPKANGKLRMCIDYTDLNKACPKDPYPLPRIDQIVDSTAGCDLLCFLDAYSGYHQIRMAREDEEKTAFITPIGTYCYTTMPFGLKNAGPTFQRTTRISLGSQIGSNVEAYVDDLVVKTRNQETLLSDLAETFGSLRSTRIKLNPDKCVFGVPAGKLLGFLVSARGIEANPEKIRAIERMRPPSKLRDVQCVTGCMAALSRFISRLGEKALPLFKLLKRSGPFTWTEEAEQAFTQLKAYLSSPPVLVAPEPDEPLLLYLAATPQVVSAALVVERDEDNPHSAHPHPVSTRPGREQGGEAPEPNGGPRPPTVGAGPPPACPTVPGAPDPQDGPGATAGRLRLSPSDPEVIGTEAECAPRGLSDEERPGDAAPGEEDWPRRKVQRPVYFVSEALRDAKTRYPQAQKMLYAILMASRKLRHYFQAHRVTVVTSYLLGQILHNREGTGRVGAGAGVTLTSPSGDVLRYLVRLDFRATNNMAEYEGLLAGLRVAAGLGIRRLLVLGDSQLVVNQVCKEYQCSDPQMDAYVRQVRHMERHFDGIELRHVPRRDNAVADELSRLASSRAQTPPGAFEERLAQPSARPDPLGETDAPERPPRPVGVQASGPEGSAPSSPRLIAWITEIQAYLADKTLPEDREGSERVRRISKRYVLVEGTLYRRAANGVLLKCIPREQGVELLADVHEGECGAHSASRTLVGKAFRQGFYWPTALNDAVDLIRRCRACQFHARQTHRPAQALQTIPLSWPFAVWGLDILGPFRRAPGGFEYLYVAVDKFTKWPEAYPVIKIDKHSALKFIRGITVRFGVPNRIITDNGTQFTSELFGDYCEDMGIKLCFAYPAHPRSNGQVERANAEILKGLKTKTFNILKKHGDSWIEELPAVLWANRTTPSRATGETPFFLVYGAEVVLPSELTLRSPRVTMYCEADQDQLHRDDLDYLEERRRRAAXRYQQSLRRYHQCHVRARSLCVDDLVLRRVQTRAGL

SEQ ID NO: 148712 - protein, 125 aa, Oryza sativa
  Clone ID: PAT_MRT4530_49115C.1.pep
NILPNTHLRKHWQCRVTTCFIQPARKLRRLSHRREKAAAGFPRPVDTLRPIVRCCTHKHNKRQRAGRGFTLEELKAAKLGAAFARSVGISVDHRRKNKSVDAFQASVQRLSDYKERLVLFPRKDG

SEQ ID NO: 148713 - protein, 1558 aa, Oryza sativa
  unsure (1)..(1558): unsure at all Xaa locations
  Clone ID: PAT_MRT4530_49116C.1.pep
MAETRPRAGGALEMTKPEEVAAQVGVDRRGGATRLYSAVAAERDGERGGGVPGAGRGNGVGAGVRRGTAMPMAVVAQRGSDGSGGGARLEVTRGSCGSGARWRWCFGGVLWKRSGGRCAAKSGGADRCKRCGAAAATATAACSRSSPESGRAREQRGESGWARGGEIVAGRGRFEAATAGDVGDIVGEVGLDSAPKIGEKRGRRWRRGMAPGPTRERARGGREWWRRGRFSAAMAVAGPGWRLGMTVKSLAERTRKWEKEKRQERREGKAPAAPAGNRRGEAKQKAPAEDIDDGDDDLGFQEPEATVATVDGGACAHASRRSLKAMKRELLAAAPTHEATRRARWSEVALTFDQTDHPPCVARGGQIAMVVSPTVCNVKLGRVLIDGGAALNILSPAAFDAIKAPGMVLRPSQPIIGVTPGHTWPLGHIDLPVTFGGSANFRTERVDFDVADLSLPYNAVLGRPALVKFMAAVHYAYLQMKMPGPGGPITVHGDLKVALACMEQRADHLAAASKPAGGDERLSTSVPAAPRRRMVTCDKVPEDALVSFLRANADVFAWRPADMPGVPREVIEHRLAVRPGARPVQQKVRRQAPERQAFIREEVARLLEAGFIREVIHPEWLANPVVVPKANGKLRMCIDYTDLNKACPKDPYPLPRIDQIVDSTVGCDLLCFLDAYSGYHQIRMAREDEEKTAFITPIGTYCYTTMPFGLKNAGPTFQRTTRISLGSKLGRNVEAYVDDLVVKTRNQETLLSNLAETFESLRSARIKLNPDKCVFGVPAGKLLGFLVSARGIEANPEKIRAIERMRPPSKLKDVQCVTGCMAALGRFISRLGEKALPLFKLLKRSGPFTWMEEAERAFTQLKAYLSSPPVLVAPEPDEPLLLYLAATPQVXEQGGEAPEPNGGPRPPTAGVGPPPACPTVPGAPDPQDGPGATAGRPRLSPXDPEVVGTEAECAPRGLSDEERPGDAAPGEEDRPRRKVQRPVYFVSEALRDVKTRYPQAQKMLYAILMASRKLRHYFQAYRVTVVMSYPLGRILHNREGTGRVVRWAIELSEFDLRFEPRHAIKSQALADFVAEWTPAPEPVPAPEASSGPSQLPHTAYWVMQFDGSLSLQGAGAGVTLTSPSGDVLRYLVRLDFRATNNMAEYEGLLAGLRVAAGLGIRRLLVLGDSQLVVNQVSKEYRCSDPQMDAYVRQVRRMERHFDLIELRHVPRRDNAVADELSRLASSRAQTPPGAFEERLAQPSARPDPLGETDAPERPPRPVGVQASGPEGSAPSSPRLIAWITEIQAYLADMTLPEDREGSERVRRISKRYVLVEGTLYRCAANGVLLKCIPREQGVELLADIHEGECGAHSASRTLVGKAFRQGFYWPTALNDAVDLVRRCRACQFHARQTHQPAQALQTIPLSWPFAVWGLDILGPFRRAPGGFEYLYVAVDKFTKWPEAYPVIKIDKHSALKFIRGITARFGVPNRIITDNGTQFTSELFGDYCEDMSIKLCFASPAHPRSNGQVERANAEILKGLKTKTLNILKKHGDSWIEELPAVNSCACICLVNPEIINS

SEQ ID NO: 148714 - protein, 84 aa, Oryza sativa
  unsure (1)..(84): unsure at all Xaa locations
  Clone ID: PAT_MRT4530_49117C.1.pep
SNAEHLATAAMCVLALEVVDVVGGDVDGIGGSGRLLTTAVARVRDRVAAPHELSGESIRAXNPMTKLQHANVVTWTSNMSSHSS

SEQ ID NO: 148715 - protein, 38 aa, Oryza sativa
  Clone ID: PAT_MRT4530_49118C.1.pep
CQSVDCTFAYRCSLCAPPASFELAPPLSFCSLCVHEEA

SEQ ID NO: 148716 - protein, 36 aa, Oryza sativa
  Clone ID: PAT_MRT4530_49119C.1.pep
MAATFVPGELPTDRFPVGTLVVPLALVHRTTESHVP

SEQ ID NO: 148717 - protein, 1629 aa, Oryza sativa
  Clone ID: PAT_MRT4530_4911C.1.pep
MFKALFLMVDEEEPLQLETEINQETRTKNQTLGRIGRREEKEERLKSEKVASGGDGRRRGERRVVGAPSNPSHVRVKEQPLSEGAKSVAEDAGDDADSGRREDELEAAEGEVVRRATRPVKINLKYYGPDWAVMSQESKLDVLLRTIEENEKKRMEAEARTRDDLADLKKMVEICLPKMEEKVEKLSESVQTLSHKHHTDLSTSLPPMTCPKFDGENPQMWKSNCEQYFDIYGINPMHWVKVATLNFSGNAAFWLQSIRSQIMGITWQTLCDLICARFTRDIQEALIRKWFHAQQNSTVTEYVEQFDSIMHQLMAYDSALTPVYFVTKFIEGLRDDVRGAVMLQRPQDLDSACSIALLQEEILESNKSTTHRRSDNHIAFRPVPKLNNYVPVPPGQRSVAVSAHDDKKGVESAKSREDKFASLKSYRRAKGLCFVCGERWGRDHKCATSVQLHVVQELLEAMRSECNSDDILTAKDPIESVEAIDGGLMAISQQALLRGWVQGTEILMLIDSGSTHSFIDESIGSKLVGLIPLSRSVTVKIADGGTMKCTQQILGCRWWTQGHYFKSDFKLLNLGSYDAILGMDWLEQFSPMQVDWVNKWLEVVIDGQPVRLYVNPRPKGLPPKRICDHHIPLLPGSKPVNLRPYRFNPALKDEIEAQISEMLQSGVIQPSQSAFASPALLVRKKDGTWRLVIDYRQLNAITVKCSYPMPVIDELLDELPGAKWFSKLDLRAGAPATFQGAMNETFKSVLRRFALVFFDDILIYSPDLPSHLDHLKQVLTLLQQHHWQVKLSKCSFAQQQLTYLGHVISAEGVSTDPSKIQEIVNWETPTTKKKLRGFLGLAGYYRKFVKGFGLISKPITQLLRKGVPYKWTLETETAFQQLKQALVSAPVLALPDFSLPFTVEIDASDSGIGAVLSQNKHPIAYISKALGPRNRGLCHARNFYPKFQTLTYGRDRSVHDRLTGEGDDDVGDDVTTGGGGSAARTAHARRRTAALRHERRTPTGSGRHGELTGDQSDGGRGTDGDGDEEEAAANFGLTAATVLRRSSAAAKEWTRTAATWRPRRRSSRATATAGTAAAHGWSDGGDGGARAHGARAFPTTRGEGKGCDRLSTYEKECMAILLAVDHWRSYLQLGEFIILTDHHSLMHLSDQRLHTPWQHKAFTKLLGLNYKICYRKGTSNAAADALSRKFQSDSELSIISSCVPSWLQEVAKGYEHDPYSSDLLSALSVQLDCKPGFQLQSGIIKYKGRIWIVTYSKIKKLFAWQGMKSQVKDFVQQCQTCLQAKPDRSKYPGLLQPLPVPDGSWEVIIMDFIEDRDKIFTSQLWTYLFSASGTKLNLSTSYHPQSDRQTERVNQCLEIYLRCFAHANPSKWVTWLHLAEYWYNTSYHSSLKTSPFEVLYGHSPRHFGINVDTCEIPDLQEWLKERKLMQALVQQHLHRANQQMKHMADKKRSFRSFAVGDWVLRKIGTVAYKLQLPATASVHPVFHVSQLRAAKGYKELSSLQLPKANSALQVPSQILDSRVVKRATDAVLQVLIRWSDSAAEDATWENMEDLRTRFPTALAWGQAKFQGEGIVKEQPLSEGAKSVAKDAGDDADSGRREDELEAAEGEVVRRATRPVKINQKYYGPN

SEQ ID NO: 148718 - protein, 99 aa, Oryza sativa
  unsure (1)..(99): unsure at all Xaa locations
  Clone ID: PAT_MRT4530_49120C.1.pep
TRVQDQKEGGHRAGERRRRGVEHGRALHAGGTATAYATATAIAGHGRIVIGNVATATAISRLGWVVVDDAAGTATAAAWPAQVVVGDVXLPGLAGEMTS

SEQ ID NO: 148719 - protein, 72 aa, Oryza sativa
  Clone ID: PAT_MRT4530_49121C.1.pep
SNYRVTLYPPDSRKHGPRIENIQPGPGFGSESTKKKRSLPLQQPPPSSYLDCIKHISPSKGGLKMARKQLST

SEQ ID NO: 148720 - protein, 559 aa, Oryza sativa
  Clone ID: PAT_MRT4530_49122C.1.pep
MAGVGTQPTSLRKYLGALKDTTTELDIAIVKATNHVERPSKEKYIREIFYSISASRPRADVAYCIHALARRLSKTRNWAVALKTLIVIHRALREVDPTFREELINYGRSRSHMLNLAYFKDDSSAGAWDFSAWIRTYALYLEERLECFRVLKYDVETDPPKTRDLETGDLLDHLPALQQLLFRLLACQPQGASSYNVIIQHALSMVALESVKIYTAISDGTINLVDKFFEMQRSDAVRALDIYKRATNQAERLSEFYEVCKTIHIGRGEKFLKIEQPPASFLVTMEEYVTEAPTVAQKDKVLAIEYKKEAEEEEKPASPPPAPEPEPEQEPEPEPEPVKEEAPKEEPTDLLGLNEPNPAAAEIEEKNALALAIVPIDDVPKVAPAQNGVTGWELALVTTPSSNETAITSSKKLAGGLDLLTLDSLYDDANRRASQPTSYNPWDVNPGVAGAGAAPMMQQPMMHDPFYASSGYAAPHNVQMTAMAQQQQAFMLQQQMMMAAAAAAAAAPPPQVFHHHQQQQQHLQANPANPFGNPFAAAAAAHHPYGAAAAAGNGYTGLI

SEQ ID NO: 148721 - protein, 371 aa, Oryza sativa
  Clone ID: PAT_MRT4530_49123C.1.pep
MPNAESSLFKMPTADANIAALHKEWDDALCPICMDHPHNAVLLLCSSHDKGCRSYICDTSYRHSNCLDRFKKMKVDHNDGSSQQSSSLPRDISSQNVPQRSHFDPTGEIQTGISESHEIFNHRDAIQSSAGLSGQQGENSYNQDLDLTLEAQQRESSSTVESSELTRLNQLACPLCRGTVKGWKIIKEAREYLDEKSRSCSRETCAFSGNYRELRRHARRVHPTTRPADVDPSRRRAWHRLEHQREYGDILSAIRSAMPGAVVFGDYVVEGGDMFSPDQEGGMPNEPSGSLLTTFFLFHMISSSPMRSGDEIRGSSRGLRRQRRRYLWGENLLGLQYEDEDEDDEEENLDEDVQRPRSRRRFVRSRSEERS

SEQ ID NO: 148722 - protein, 112 aa, Oryza sativa
  unsure (1)..(112): unsure at all Xaa locations
  Clone ID: PAT_MRT4530_49124C.1.pep
FGTSFKSSKAKENLEAVLSEISQKTLIRGQNYNSGNTVAYALLDGNKQSAFLSTFDKSAFKSSDKLLLAYKPRRGRXAVYDNEVTMEEAERFVVXVLNGDVHWLSRTKTVLR

SEQ ID NO: 148723 - protein, 53 aa, Oryza sativa
  Clone ID: PAT_MRT4530_49125C.1.pep
MTTGVLPTSGGPTMHGGTSGRHGDIGVTGMEEDADKARALVATRSGSVEHFMW

SEQ ID NO: 148724 - protein, 385 aa, Oryza sativa
  Clone ID: PAT_MRT4530_49126C.1.pep
MEHDIIIWGYMLQMRGGPLMVTSQYGAVIRNSIVRGGFLKHQEGIGKRETWEGEGLALGLHAPPSASLLVVRGGRYHRSPPPLLCRGLPSRRIRWRGGHRLQPSARPPETTRKPQGWRRRGLLLPRSRGVGAHDPGQLLGRRRDSLAAGVEGDEFGGWVDRVVTARRRRRSSAPCQTRSPEPVADVEWTVRRWRPVRQQDTTVEVTEETAVGMEEVQVLAGIRSRRRWIPPPPSPEGGSGAGRARGNGFGGNDAELVVTVATMAGRQRQRVAGQRQQRLMAAVATRCTRGRSGCHGSDSGWTVAIMWLADGSSGYRGCGGRRHGGLGLLAGGVADGHTWLARQRLDGGDNVAGGALVQWSHMSPEDERWWSIGASAVDLYVVSGG

SEQ ID NO: 148725 - protein, 129 aa, Oryza sativa
  Clone ID: PAT_MRT4530_49127C.1.pep
MNANFTLYPNYIVYIASLSGRCNGTCIVFAYAITLCDDDDIRLVSGSLGVVSRLQDIIIWGYMLQMRGGPLMVTSQYGYSSARVYSPKLISWGGYSSVFSPGCMVMKGSHKELDSQGWLLEAPGGHWKE

SEQ ID NO: 148726 - protein, 132 aa, Oryza sativa
  Clone ID: PAT_MRT4530_49128C.1.pep
MGVATVDVASLHPLAKLSPQTFTPSPPQSCPAVSPASTVVPSTPRPPPAQETGVPDLAGRAPDRRRRLAVTTRSTQPPNSSPSTPAARLSRRRPKSWPGSWAPTPRLRGRRRPRRRHPCGFRVVSGGLLGRR

SEQ ID NO: 148727 - protein, 186 aa, Oryza sativa
  Clone ID: PAT_MRT4530_49129C.1.pep
MRCLWRKEETAVGMEEVQVLAGIRSRRRWIPPPPSPEGGSGAGRARGNGFGGNDAELVVTVATMAGRQRQRVAGQRQQRLMAAVATRCTRGRSGCHGSDSGWTVAIMWLADGSSGYRGCGGRRHGGLGLLAGGVADGHTWLARQRLDGGDNVAGGALVQWSHMSPEDERWWSIGASAVDLYVVSGG

SEQ ID NO: 148728 - protein, 449 aa, Oryza sativa
  Clone ID: PAT_MRT4530_4912C.1.pep
MAAELHFLVVPLIAQGHIIPMVEVARLLAARGARATVVTTPVNAARNGAAVEAARRDGLAVDLAEVAFPGPEFGVPEGLENMDQLADADPGMYLSLQRAIWAMAARLERLVRALPRRPDCLVADYCNPWTAPVCDRLGIARVVMHCPSAYFLLATHNLSKHGVYGRLALAAGDGELEPFEVPDFPVRAVVYTATFRRFFQWPGLEEEERDAVEAERTADGFVINTFRDIEGAFVDGYAAALGRRAWAIGPTFGSISHLAAKQVIELARGVEASGRPFVWTIKEAKAAAAAVREWLDGEGYEERVKDRGVLVRGWAPQVSILSHPATGGFLTHCGWNAALEAIARGVPALTWPTILDQFSSERLLVDVLGVGVRSGVTAPPMYLPAEAEGVQVTGAGVEKAVAELMDGGADGVARRARARELAATARAAVEEGGSSHADLTDMIRHVGAQ

SEQ ID NO: 148729 - protein, 157 aa, Oryza sativa
  Clone ID: PAT_MRT4530_49130C.1.pep
PLFFFLSLPSPILEVASGVLVRDGSSRQPGEEGGGARWPGEEGGDAWRPREEGGSARRLDKERRRSAAWLGEAARGGQARREAALGGPARRGDARRSGEEGGVARRPGDEEELRPGYDHRGHRQRWPGEEGGDAYGYRARRGGAVRLGIAGGAADGV

SEQ ID NO: 148730 - protein, 545 aa, Oryza sativa
  Clone ID: PAT_MRT4530_49131C.1.pep
MPALTRSTAFRWVGGGAVVVPALTRRAAFRWVGGVAVVVPASAWIGHSEKLSDTHGSDKEDEVVDSSDDDCDPYFNYLVDSFMTATKAQPKQLYGNIDLVAAAQRQSNEYASSALDYYNKDENNKIQYSLIKALKSSTIREKGEKYGHVNFIASLDSKEELFFAEVCWDPKNYDMVPTCIVSLEEKRRIGGRSFINDEYVVCLDLQNPPIDGKHCYGCSEEIKHPEDGSTFKAGHVAATGAGEIQGGGFPAMVKDTAYYDTLGVSVDASPAEIKKAYYLKAKQVHPDKNPGNPDAAQKFQELGEAYQVLSDPSKREAYDKHGKEGLPQDNMVDPAAVFGMLFGSDYFEDYVGQLALASIASVEVEENLNSQEARGKVQEKIKELQKEREQKLIQSLKDRLQPFVDERKDEFVNWANGEAQRLSHAAFGEAMLTTIGYIYVRQAARELGKSAIALMQLQEGMKKMEESDNKEDQIMKSFEEKKDAMLSYLWKINVVDIESTLTHVCQAVLKDASVPKDVLKLRARALKKLGTIFQHLISSEFDSSA

SEQ ID NO: 148731 - protein, 30 aa, Oryza sativa
  Clone ID: PAT_MRT4530_49132C.1.pep
KKKYKKKKKKKKPPKKKKNQKKKKKKKKKR

SEQ ID NO: 148732 - protein, 592 aa, Oryza sativa
  unsure (1)..(592): unsure at all Xaa locations
  Clone ID: PAT_MRT4530_49133C.1.pep
MPALTRSTAFRWVGGGAVVVPALTRRAAFRWVGGVAVVVPASAWIGHSEKLSDTHGSDKEDEVVDSSDDDCDPYFNYLVDSFMTATKAQPKQLYGNIDLVAAAQRQSNEYASSALDYYNKDENNKIQYSLIKALKSSTIREKGEKYGHVNFIASLDSKEELFFAEVCWDPKNYDMVPTCIVSLEEKRRIGGRSFINDEYVVCLDLQNPPIDGKHCYGCSEEIKHPEDGSTFKAGHGLPGXARGKGSIFFLPQFLPGAHLLLPRDLPEASRTDLGAGEIQGGGFPAMVKDTAYYDTLGVSVDASPAEIKKAYYLKAKQVHPDKNPGNPDAAQKFQELGEAYQVLSDPSKREAYDKHGKEGLPQDNMVDPAAVFGMLFGSDYFEDYVGQLALASIASVEVEENLNSQEARGKVQEKIKELQKEREQKLIQSLKDRLQPFVDERKDEFQRKSDYPIAAFGEARMLTTIGYIYVRQAARELGERVSAIALMQLQEGMKKMEESDNKEDQIMKSFEEKKDAMLSYLWKINVVDIESTLTHVCQAVLKDASVPKDVLKLRARALKKLGTIFQGAKSLYHRENSLQVETSPRQGAATSN

SEQ ID NO: 148733 - protein, 52 aa, Oryza sativa
  Clone ID: PAT_MRT4530_49134C.1.pep
KNVTRFTTNLYQEVKEIRIEIILIKKHHKHEMKKYHVTTSCKVYINLDICQS

SEQ ID NO: 148734 - protein, 42 aa, Oryza sativa
  Clone ID: PAT_MRT4530_49135C.1.pep
KGRADRGGRGNGGGYQRGPYSTCAPSIEDQAQFPTLGGKPRA

SEQ ID NO: 148735 - protein, 342 aa, Oryza sativa
  Clone ID: PAT_MRT4530_49136C.1.pep
MHYEWIREMSEGHTAMTLTSSTRGDGHRQLQRAKSRAEEKACRCATSFSGIGSAALHDDDAAPCSHSPIDLAIELSEGLHISAQPRRFASALNSTKLPCSICLRLEGLVMHRNSERKSMKKDMWATLGRRSLGYGLVAAAEIHAKGRSICLSPHQDWKFRTEISVISTPSDTILFRPKFLNFFMNFGNICSNSTKICPKFRKFRTEILKFRYFGGGRSNRLNLFGLTWSPSRRSETSRSGLSVVRRQRQTATRWGTGMEACTVQCGVLLGDDGGQVVAKLVKHCARHAEGSPEVRRAPAASPAKRPSNLYSYMLFATSSVLLHPVVALNSTAILCTMPPTHT

SEQ ID NO: 148736 - protein, 68 aa, Oryza sativa
  unsure (1)..(68): unsure at all Xaa locations
  Clone ID: PAT_MRT4530_49137C.1.pep
MKLSMKRPLYNRTSRMDFSFPGVPELLSLLETWTPRVHEDLSSWSGYXGSCVGQSRSAGKVYIHCSVS

SEQ ID NO: 148737 - protein, 762 aa, Oryza sativa
  Clone ID: PAT_MRT4530_49138C.1.pep
MGIIVGYNTKGGLEESKDGDNGMQQDRGRGKEHVRIEVARALGWRCCRSPTDFRRAFRMPCAVFDKLCDHLATVVTKEPSSRRQIEQGSLVEFKAEAKRRGCAEMWRPSESSIARSIGECEHGAASSSWRAALPMPEKEVAQRLVRRAAAGRRRRRHPDVARRPCQGPLSFLLPCLLLCSALGPLKLPMAVPPSRASVCMSKKRREGGGGGNGGCDPPAVTDALSMDGGLREVSLSVVFSVWCLLFLLRSQFLHSQTDPSDFYDDVEDGMRENYCKVMPLEAYIFPTEYNASAAAPTCQPSLHPPDQPQQETDHRSLEPFNNTTGGKSSAEAAALDELDEFRSRILQGKAENGRVPDGATPAAHRLEPSGAEYNYAAASKGAKVLAHNREAKGAANILGGDKDRYLRNPCSADDKFVDVELSEETLVRTIGLANLEHYSSNFRDFELYGSPSYPAPAEEWELLGRFTADNAKHAQRFVLPDPRWTRYLRLRLATHYGSGFYCILSYLEVYGIDAVEQMLQEIISGSGADTDASAAAKAEEGGDGGTLRNDTAQVNARLDGVGGGGGSAAGRNDSAGDGAGAKNNGSRMTVAGDGKPAAAGRFHGDAVLKIMMQKMRSLELGLSTLEDYTKALNHRYGAKLPDLHTGLSQTTMALDRMKADVRDLVEWKGNVAKDLGELKEWRSNVEEMRSIQETMQNKELAVLSISLFFACLALFKLACDRVLFLFTRKGAAAAERMCGASKGWILVLASSSFTTFLVLLYN

SEQ ID NO: 148738 - protein, 88 aa, Oryza sativa
  Clone ID: PAT_MRT4530_49139C.1.pep
KGRAPWDLKTFQGNSQNSNGGPHGGNPQGGPKTGNRGRNFKRFWAFKKKMGLQNQGFRGGGRANFFLGAGNPSPWGAPTVLPWGGGPP

SEQ ID NO: 148739 - protein, 73 aa, Oryza sativa
  unsure (1)..(73): unsure at all Xaa locations
  Clone ID: PAT_MRT4530_4913C.1.pep
KKNKKKKKKKKKKKEKKKKKKKKKKKKKKKKKKKKKKKKKKKKKKKKKKKKKKKKGGGVLKKKXVKXGGNGKK

SEQ ID NO: 148740 - protein, 30 aa, Oryza sativa
  Clone ID: PAT_MRT4530_49140C.1.pep
KHVSPEAFALQNNPKPPSPPPPPPPPPPPP

SEQ ID NO: 148741 - protein, 72 aa, Oryza sativa
  Clone ID: PAT_MRT4530_49141C.1.pep
FNITTITIIMSHHILYYGMVRMIDDKFLPQVPNLSAHPTLSRHTLHNHHYQLTHFPIWNTGNTSVHFRSPVV

SEQ ID NO: 148742 - protein, 96 aa, Oryza sativa
  Clone ID: PAT_MRT4530_49142C.1.pep
GLLIGGAVEKIKAHQPTFGHLRTKQRFGGCPYTTGVKTDRNPTGIVESSMTSSSCKGSNFSYQLTHNRCTETSRRAQCLMNRTKEPHESIRPLLEA

SEQ ID NO: 148743 - protein, 67 aa, Oryza sativa
  Clone ID: PAT_MRT4530_49143C.1.pep
MVSSHRISLLLPSPPQLKPVRLRRSAKDVNKLRASPLDAGQRLRQQGGGVDLGQKQQPAAAPRHLPH

SEQ ID NO: 148744 - protein, 72 aa, Oryza sativa
  Clone ID: PAT_MRT4530_49144C.1.pep
WRRRRREAPRRWWWLSKASRLIQNDHLGYIIEEPKLQVASTVDMEATPYLLLVTVPILVHTRALAFSPALSD

SEQ ID NO: 148745 - protein, 392 aa, Oryza sativa
  Clone ID: PAT_MRT4530_49145C.1.pep
MAVDPRQVVAGFLTLSMFVMLGNMIKHDHFTPVGAGQEELGLEATGIESNEIKIADTTEMTKVNKAGVDLPKETAEEIRPCWSKPRSNVQESKGFVTFSLTMGPEYHISQITDAVVIARYLGATLVLPEIRGNELGKRRKFEDMYDVDKFMTSLDGVVKVVHSLPNAVSSKKPAVVRVPNRVTEEFITGTIEPIFQRNNYLRLATIFSSVSLKQKESGNKDLDSTACLAMFSGLQLKPEFSAVAKHMLDKLKEISEKSDGMVIAIDLQTELLEKKICKTNGGARRRGCYYPQEVVHFLKKDDIMPAANKGEFLKSGDSYLARALDLKICSESDVFVPAIPGLFYGHVAGKRIAAGLTNIIVPAPVSSSSALASEFVSTYVSKKSHLAYSCYC

SEQ ID NO: 148746 - protein, 48 aa, Oryza sativa
  Clone ID: PAT_MRT4530_49146C.1.pep
PFPRSFERSSNVRCRWFHDQRSLTEAAMFMHNTQLITHSISDLQPGIH

SEQ ID NO: 148747 - protein, 132 aa, Oryza sativa
  Clone ID: PAT_MRT4530_49147C.1.pep
FEKSDGMVIAGDLQTELLEKKICKTNGGARRRGCYYPQEVVHFLKKVGFSADTTIYLTETWWHKSLDTLKEAFPNTYTKDDIMPAANKGEFLKSGDSYLARALDLKICSESDVFVPAIPGLFYGHVAGKRIA

SEQ ID NO: 148748 - protein, 66 aa, Oryza sativa
  Clone ID: PAT_MRT4530_49148C.1.pep
KHHSSCSSVQQFSSGFQKFGLHNTCPRRAILPTHVTASTVLISSASASASISSTEVSCLAKLWVHM

SEQ ID NO: 148749 - protein, 59 aa, Oryza sativa
  Clone ID: PAT_MRT4530_49149C.1.pep
QNGGSLDQEKNGRLGLFSRGQKKKGFYPLDASFQLFKLGGPGVSPNIRLLYKNRVKKSI

SEQ ID NO: 148750 - protein, 62 aa, Oryza sativa
  Clone ID: PAT_MRT4530_4914C.1.pep
GTSRKGQSAKRPKGRKGKSFNRSNLGNPRAMARQKGGTRRPLRGPQEAEKKMERGASTAKKN

SEQ ID NO: 148751 - protein, 102 aa, Oryza sativa
  Clone ID: PAT_MRT4530_49150C.1.pep
GETNQRTVARCEALRSPREFLGAIPQPMPSKINTCLVGGLLAVLPSCLSPCFLPCIQSCRQKVKERRREKRNGEIMEEVMQTEGRTLYKGRVSLWVRPGRVA

SEQ ID NO: 148752 - protein, 235 aa, Oryza sativa
  unsure (1)..(235): unsure at all Xaa locations
  Clone ID: PAT_MRT4530_49151C.1.pep
WIEENQDHLPPSTPPNGAAILEIGIIFSNSGRRAPSSISPSPXIEPSLFIQGEAPLPRHFASHRRRPSLADLIRAPGCRRASSPSAVNPCDATLPRRGRAIPARASRRREEEWGKEKKRERKNMPTSKYTIFGCLIAKEVRLRKHNSQNIHQIIEACVRSSMSGLQSEKFKHRAQHQIISLFVTTTDFPVKSLYLERENTDIYGNGRAGGLYSPPTIASGHLTWAARVAPVFGLF

SEQ ID NO: 148753 - protein, 119 aa, Oryza sativa
  Clone ID: PAT_MRT4530_49152C.1.pep
MAAALMTTLTREDETTTGGKVGSPIGLLVPRRRNWARKALPMHTAHRGLRACDCEIRECTGAQPPQMVALAAAGRAKMEAHEEPVDPRDLVAAQCARYVHVAIPKLDVAKNFLHKRIRH

SEQ ID NO: 148754 - protein, 196 aa, Oryza sativa
  unsure (1)..(196): unsure at all Xaa locations
  Clone ID: PAT_MRT4530_49153C.1.pep
QHTKHQNTHPIWLHTAHXHTHHGPVPSRSTGVYHPSPSPQVHHSGAFSHIGATLTTHSTHLPIIQIXXRGVRRRETHPRPRRGSTVWPHLSHXPVPHHTPSQXIFTSLHXDNQVFHGHPNHTAQQWTXTHTCGASVGRCETXGYSPVXXHQTWCXHLXVICICGXCHREATHNXDHKRGWAFKGLIHGRGHGLKWS

SEQ ID NO: 148755 - protein, 119 aa, Oryza sativa
  Clone ID: PAT_MRT4530_49154C.1.pep
MVMPRAAHEAAAAPVQPLRAGGSGRGGSRAAAARWPGGSREAEKKTVESTNVPLGSVLPLGCLPAQLHTEQQRDGFRGSVLQPNFDSSGSPHHSAFAGGYSRHRGLLDWLEHEHHCVSP

SEQ ID NO: 148756 - protein, 70 aa, Oryza sativa
  Clone ID: PAT_MRT4530_49155C.1.pep
MQDEDATEATSVGDHGLMAVADLIYPEELFRNITINLFKTILPYVQLIFTHSKSQEKDNEDNDTTRYDMH

SEQ ID NO: 148757 - protein, 164 aa, Oryza sativa
  Clone ID: PAT_MRT4530_49156C.1.pep
QCIFRLDVAMFNAMLRESDDEIPTDPLSDPITDPKVLPIPSGKFSFGAGVQLKNAIGSWSRCLTDLFGMDMDDYQELDNEGGENGFGESVKPFYHLNALSDLLMLPKDVLMDTSSRKELCPTFSSSIIKNILDVFLPDEFCPDPIQGSLLQALELEDHLEVNRG

SEQ ID NO: 148758 - protein, 86 aa, Oryza sativa
  unsure (1)..(86): unsure at all Xaa locations
  Clone ID: PAT_MRT4530_49157C.1.pep
XKSGGGDTGGEFQHKFTCYTHTLHPCIIIHRVCGVHTYPSRAHAPSIGQSGVHTYGHTYTDTRGHTYIIKNSELIKYVGDGMSNGT

SEQ ID NO: 148759 - protein, 69 aa, Oryza sativa
  Clone ID: PAT_MRT4530_49158C.1.pep
QWQRGLSSPSSSPWRAPTRRSPPPSPPAPWRTPARRRRRAAAARTLPRSACRPCMPRRGAPAPTRAASP

SEQ ID NO: 148760 - protein, 352 aa, Oryza sativa
  Clone ID: PAT_MRT4530_49159C.1.pep
MGEAVKGPVVVTGASGFVGSWLVMKLLQAGYTVRATERLTLWKADLGEEGSFDAAIRGCTGVFHVATPMDFESEDPENEVVKPTVEGMLSIMRACRDAGTVKRIVFTSSAGTVNIEERQRPSYDHDDWSDIDFCRRVKMTGWMYFVSKSLAEKAAMEYAREHGLDLISVIPTLVVGPFISNGMPPSHVTALALLTGNEAHYSILKQVQFVHLDDLCDAEIFLFESPEARGRYVCSSHDATIHGLATMLADMFPEYDVPRSFPGIDADHLQPVHFSSWKLLAHGFRFRYTLEDMFEAAVRTCREKGLLPPLPPPPTTAVAGGDGSAGVAGEKEPILGRGTGTAVGAETEALVK

SEQ ID NO: 148761 - protein, 172 aa, Oryza sativa
  unsure (1)..(172): unsure at all Xaa locations
  Clone ID: PAT_MRT4530_4915C.1.pep
SPSGNGAIRRRRRACRGRTRRARGAPRRWRPWPPSCTPAAPPPPRRAPPPWRAARRSGSAPPPPSAGGSTAPAPPAXSPPPHRRSXTPGTPAAGPWAPRPAPARTHPPRARRRRSTPRRPQPPRRRRRPPPPSAPPAPPPPTTPRACCSSTPLSPSGREIDEQCRVRARTRG

SEQ ID NO: 148762 - protein, 79 aa, Oryza sativa
  Clone ID: PAT_MRT4530_49160C.1.pep
MLGRKKGSSSRLSDPINTTVTTDNGQEMAASHFISQQASQLDEAARKRLQRMNERLKLLEMQMETLEAGVAKASNDSYE

SEQ ID NO: 148763 - protein, 372 aa, Oryza sativa
  Clone ID: PAT_MRT4530_49161C.1.pep
MGEAVKGPVVVTGASGFVGSWLVMKLLQAGYTVRATVRDPSNVGKTKPLLELAGSKERLTLWKADLGEEGSFDAAIRGCTGVFHVATPMDFESEDPENEVVKPTVEGMLSIMRACRDAGTVKRIVFTSSAGTVNIEERQRPSYDHDDWSDIDFCRRVKMTGWMYFVSKSLAEKAAMEYAREHGLDLISVIPTLVVGPFISNGMPPSHVTALALLTGNEAHYSILKQVQFVHLDDLCDAEIFLFESPEARGRYVCSSHDATIHGLATMLADMFPEYDVPRSFPGIDADHLQPVHFSSWKLLAHGFRFRYTLEDMFEAAVRTCREKGLLPPLPPPPTTAVAGGDGSAGVAGEKEPILGRGTGTAVGAETEALVK

SEQ ID NO: 148764 - protein, 343 aa, Oryza sativa
  Clone ID: PAT_MRT4530_49162C.1.pep
MATTPSPPPSATTMRAVQYDGYGGGAEGLKHVEVPIPSPKKGEVLIKMEAASINPIDWKIQKGMLRPFLPWKFPSIPACDLAGKVAAVGGGVRRFELGDKVIAINFPLSSVFECDLSEQSGGGFAEYAVAQASLTVERPPEVSAAEGACLPLAAVTALQALRAAGAGLDDAPPPKNVLVTAASGGVGHFAVQLARLGGHRVTATCGARNLALVAGELGADEALDYATPDGAALRSPSGRRYDAVVHCAPHLPWQVFDRVLAEGDTGGVVVDITPSPAALATALLHRVTFSKKRLTPFMFSPSKADMELLVAMARQGKLKPAVDSCHPLSDATGKVVVKIGEEE

SEQ ID NO: 148765 - protein, 233 aa, Oryza sativa
  Clone ID: PAT_MRT4530_49163C.1.pep
MATAIAASAFLSSAFARDRPLPRQRRAARPATRRAAAGGLSVRCEQSEKQKRQPLSALVPREQRFMFEGDELCGPDIWNTTWYPKAADHVTTEKTWYVVDATDKILGRLASTIAVHIRGKNEATYTPSVDMGAFVVVVNAEKVAVSGKKRSQKLYRRHSGRPGGMKEETFDQLQKRIPERIIEHAVRGMLPKGRLGRRLFTHLKVYKGAEHPHEAQKPVPLPIKDKRIQKSEK

SEQ ID NO: 148766 - protein, 957 aa, Oryza sativa
  Clone ID: PAT_MRT4530_49164C.1.pep
MEHPVSNTMEPDLRAKDHRACSASATDTSSRIIAQWAARRRQLACDDQVIDRRDRDSELLALARLHAVSMLDASFLRAHDDAGGGGGRRARSPERALVRRIAREWTASSRTSPRGGGAGGEELLGETERQRVRAVRERVRMASQGQGHGGAHTPRLMRGRGRHGQDVVTRMAMERQRELQGLSDHRAVSAFAHRARIQSFLRGRSFHSGSPMHDERPLSMAARELGQLRQSHPVSRFREEVRSRTEVTTNGPATNHTGPMDTIVDLHLHENDHRQENATHNEIQTHQSMENESVDIQRSITTSNDDVVQSDFGQEQLHRYEDYPDSGSSEEASEQSDSSSPSDNSNQQEEETYEQQTNLLWSRETSSSEDGDHEWNVMNSQEAEAQWRSGPSFSSNRNINRFSPPDDDVYGVELRELLSRRSVSNLLRSGFRESLDQLIQSYVRRQEEHDDPLDWDYQRQGTATGLHSDDQGEDRIDEATNQTVSDTRDHQPSILPQQRHWQMELPHHHHNWSQQAMRHSELDWDAIHVLRDDLTGLQRGMTSMQQMLEACMEMQMELQRSIKQEVSAALNRSLAVPAGEEGMLEDGSEWKLARKGTCCICCDRQIDSLLYRCGHMCTCSKCASELLHGVGKCPLCRAPIVEGLLTWASPSRFRLLDAPGLLAAVEEMELQGSLFCLCGLGVYSFGCNSVQRYSATKTDKNKSSDLIIQPQINDVTEESNQRPTDSSEINPTVGVFGEHYLFWTQHICQLSSHRDGTIYNNQLYWKNNYDIDVTNREETRDHVDSMLNYVFNRSRDDPIAVNQGSLIEMTGPKRGIALIPECLFEFDMRIKTGEKEEDDLQLIDGMIELDEMRMPETPYTTRINGDSGSVDLCLANVSNGVEATVEVVISELMVNGFDLSISCVVSSSRYEYDESKEFQIFGGSIGEACGLRRFVLAVYLDTDAAEVEVLVACSLYP

SEQ ID NO: 148767 - protein, 82 aa, Oryza sativa
  Clone ID: PAT_MRT4530_49165C.1.pep
STMEVAETLSRNHRIHEAKKVLSEYRGKKEWSVSVVFRMFSSPFFSFLSFSHLLVDSSIKQHEKKKMPLALMEEKVAAYEVL

SEQ ID NO: 148768 - protein, 107 aa, Oryza sativa
  unsure (1)..(107): unsure at all Xaa locations
  Clone ID: PAT_MRT4530_49166C.1.pep
PPPRLGGRRRIRDYRGRCPILPFLRLWQKWTEPGQGGGGVVRAIGKGTAGQESEFAVRKSRRMTPAHGGLVHNDNYNRREYGVQVLIEGIPGMTRLNAXVNIMQDAS

SEQ ID NO: 148769 - protein, 130 aa, Oryza sativa
  Clone ID: PAT_MRT4530_49167C.1.pep
MARPHLHVAIDTFHRDVGVIVIGFFVRRGSAPCRCHLFFRPSSSTPPSIQTSSPHGVLLHYPHIEPSLLPPMVLHQAAKASSSPLPHRFGQGLVARGEGVDCAHWVASVTNGSLHLPVALPRLPMLGGSR

SEQ ID NO: 148770 - protein, 217 aa, Oryza sativa
  Clone ID: PAT_MRT4530_49168C.1.pep
MVTTRSMAVREKMMKRKRLSPLQGHARGGQGARRRETCALERLDNMKWVENERYLVAADNPDTCFIIGVTLVFAQQDMAQGLFLLDKAATAGHKTAAYVLGLLLYKSDEARATGKKYISQVEGDGDEAATTDAGNKRTNQECRRCRKIAEDAVQEVMWKVVRRRGQLLVLPEDNHQCTTIGCGLELGWEGYEGFCSDSCRIKHEYSKFFTEVMNYLP

SEQ ID NO: 148771 - protein, 273 aa, Oryza sativa
  Clone ID: PAT_MRT4530_49169C.1.pep
MASGISRTPATGVTAGGGDDEEAAWLHALELISGFTVSMTLKAAIQLGLIDALTAAADGRALTAGELVAQLPAVDDAEAATSVDRMLRLLASFNVVRCSTEAGPGGDPLRRYSPAPVCRWFTAGDNHQGSLAPRLMLDVDEDNLSTWHQMAAAVVSGGPSAFERAHGMPLFEYMGTNHRFNMLFNQAMSQQSMMVMNKLLDRFHGFDGISVLVDVGGGTGVTLKMIISRYKHITGVNFDLPHVISQAPSLPGWVQGRWEEFPVQYAPVAVAKR

SEQ ID NO: 148772 - protein, 64 aa, Oryza sativa
  unsure (1)..(64): unsure at all Xaa locations
  Clone ID: PAT_MRT4530_4916C.1.pep
NRGDIDIHEGGANAFVQHYKSRIACFYHKPLVRRKRSGYVSDYKSGVTVTLRRLFRHLLXTNYN

SEQ ID NO: 148773 - protein, 1100 aa, Oryza sativa
  Clone ID: PAT_MRT4530_49170C.1.pep
MRMRVSLLLLAAAAVAAAAEAAQPSTLAGPTRPVTVPPRDRGHAVDLPDTDPRVQRRVKGWAPEQIAVALSAAPSSAWVSWVTGDFQMGAAVEPLDPTAVASVVRYGLAADSLVRRATGDALVYSQLYPFDGLLNYTSAIIHHVRLQGLEPGTEYFYQCGDPAIPAAMSDIHAFRTMPAVGPRSYPGKIAIVGDLGLTYNTTSTVEHMVSNQPDLVLLLGDVSYANLYLTNGTGTDCYSCSFANSTPIHETYQPRWDYWGRYMEPVTSRIPMMVVEGNHEIEEQIDNKTFASYSSRFSFPSTESGSFSPFYYSFDAGGIHFIMLAAYADYSKSGKQYKWLEKDLAKVDRSVTPWVIAGWHAPWYSTFKAHYREAECMRVAMEELLYSYAVDVVFTGHVHAYERSNRVFNYTLDPCGPVHISVGDGGNREKMATSYADEPGRCPDPLSTPDPFMGGGFCGFNFTSGPAAGSFCWDRQPDYSAYRESSFGHGILEVKNETHALWRWHRNQDLYGSVGDEIYIVREPDNLQPVQLGGGGGGRRRGGGGAGMVSLAAYSPCSTVAGVPKNKGNGAASSTHKESIMRHVVVQCATSWDTPRTSTTNGSHAEPSAVVKAGTAPLIQALKSTANQDVSCFHFPGHNRGKASPPSLSELIGSRTFLHDLPELPELDDLFSPKGVILDAQKRAAELFGSFKTWFLVNGSTCGIQASVMATCSPGDYLIIPRNCHISVISALVLSGAVPKYIVPEYNSGWDIAGGITPSQVDKVVKELEEDRKKVGAVLVTSPTYHGICSNIQGIVNVCHLQGIPVIVDEAHGAHFRFHRNFPSSATEQGADLVVQSTHKVLCSLTQSSMLHMAGDLVDADKVSQCLQLLQSSSPSYLLLSSLDAARAQLSENAESFDEPVSMALETKHQLRIIPGISVLDLSSFLSDFPAIDPLRITLSASDLQLSGYEADDFLAEEHQIVSELVGTQAVTFAVNLGTRRHDVQRLVHSVKHLSEKYFSENGSSSRKENPASSPLDKFSIKLTPREAFFLKKRRVSIEDSLGEICGELICPYPPGIPVLIPGEIVTQDSLSYLMDVRDNGIAISGAADGELKSIMVCNV

SEQ ID NO: 148774 - protein, 121 aa, Oryza sativa
  Clone ID: PAT_MRT4530_49171C.1.pep
DRCYFIFPARRISHWQNASCSNATLSRTKCMGIPANARTTRGPTCPYYTEHAATGSNHRRHRLRRRMVSRSLLERLCCANTGAPAAMLVDQLGGNESILIRVGCSPTRLRWNSTYSTLRCF

SEQ ID NO: 148775 - protein, 200 aa, Oryza sativa
  Clone ID: PAT_MRT4530_49172C.1.pep
MSKRQANQEKRRVKRTSYLAFCFRFLPAGSGTAKITGGAAGGAASGSARRNPQFADVFDLRLAGAAHPGELVHRRGDEVDHQLLVLLLHGRHDGAHICHRVVRGYLLWHDGWRDEVAAAYGRRLLGEGDGTAMVTGMEGNGRVVVELDLNPTIKYDQRRGLLSTANRKHWSGALSSFVSIHVQFRNDFLNLKFYLLKFKK

SEQ ID NO: 148776 - protein, 50 aa, Oryza sativa
  Clone ID: PAT_MRT4530_49173C.1.pep
HPELKQTRGSMQIPKKKHREKSTFFSCSQLLRVTTTFCGFFFTLFYSFEP

SEQ ID NO: 148777 - protein, 96 aa, Oryza sativa
  Clone ID: PAT_MRT4530_49174C.1.pep
ALYIISGVACILLYLEYKHIARLRLRHLTCAMPNPSHFTVLVRGIPKETKESCSNAIDDFFTKYHGSSYLFHQVVYKVGKVQKIMVKSALEGMCCI

SEQ ID NO: 148778 - protein, 133 aa, Oryza sativa
  unsure (1)..(133): unsure at all Xaa locations
  Clone ID: PAT_MRT4530_49175C.1.pep
WSRPPPPLTPTPAAAPGSQPTTPAPSPRRPRRSRAVSASRLAGRGGRGGRRAAGDGRRATQRQRRXSCSSVLYEDSASGASDEAPAPRCSLLPFDLNLPASSPKEPPPHQRGGQSKRSGGVGGQARWPRSGGG

SEQ ID NO: 148779 - protein, 110 aa, Oryza sativa
  Clone ID: PAT_MRT4530_49176C.1.pep
NDHIYTLKRICGGGTSTFSAGTDLVWQSARVARPMAMCSQTLVRFHENITASMKPPLPDRCLSNALVVVLDAPSVKDIESRSLDIIDGQINGASCLLYDTKMLATWICYN

SEQ ID NO: 148780 - protein, 263 aa, Oryza sativa
  unsure (1)..(263): unsure at all Xaa locations
  Clone ID: PAT_MRT4530_49177C.1.pep
MAAASSSVDADAGDRLKGSATSGVTGLRVAADEAATAAATREQAAMPGSQPTTPAPSPRRPRRSRAVSASRLAERGRRGGGRAAGDGRRATQRQRRHGSRRAAPHAATAAADGAGDRCATMAAASSLSRRAPYRCRPPPPRPPAPALPLRRPPSPLHLLPWRTTAASLLSPSXSSCSSVLYEDSTSGADDEAPVSRCSLLPFDLNLPASSPKEPPPHQKGGQSKRSGGVGGRAQWRSSGFGGRVWLRRSSVGGRARWLRGSGG

SEQ ID NO: 148781 - protein, 171 aa, Oryza sativa
  Clone ID: PAT_MRT4530_49178C.1.pep
MATASSSVDADAGDRLKGSATSGVTGLRVAADEAATAAATREQAASPGSQPTTPAPSPRRPRRSRAVSANWPAGRGGRGGWAAGDGRRATQRQQRHGSRRAAPHAATAAADGAGDRCATMAAASSLSRRAPYRRRPPPPRPPAPALPLRRPPSPLHLLSWMTTAASSLSPS

SEQ ID NO: 148782 - protein, 85 aa, Oryza sativa
  Clone ID: PAT_MRT4530_49179C.1.pep
MVYPQSQVHTASSKQAGPYMLHYYSHNPQENQNKLFATKISTSLTSLLVEVENNLRPRNNCGDSDVCRFCWWSMDFCREWGTRGS

SEQ ID NO: 148783 - protein, 493 aa, Oryza sativa
  Clone ID: PAT_MRT4530_4917C.1.pep
MAPTPPSRPRLPLRPLLLSLPLLSLLLLLLIHRPHPSPPPPLLATATATRRDDEPAPRRAASSLAPKATTTTTLAHVVFGIASSRRTLPLRLPLLRLWLRPPARAFLFLDGPAPAAAAASEPLPPNLRFCVSSTDASRFPYTHPRGLPSAVRVARIAKELLQLDDHHHATPPPPRWLVLADDDTAFVLPNLLHTLSRYDWREPWYLGARSESAAQNAWHGFAMAYGGGGIAVSWPLAARLARVLDSCLLRYPHLYGSDARIHACLAELGVELTHEPGFHQIDLHGDISGLLRAHPLTPLVSLHHLDHVYPLYPGMDRATAVKHFFRAANADPARILQQTVCYDHSKAITVSIAASYSVQVYKGNVLLPDLLAVQKTFVPWKRGRNATDVFMFDTKHYPRDECKRAALFFLKSISSGEGKIKSDYTRQLPRKCSPNLIPLRNLHQIKVASEPLHLVPGKALRRHCCDVVSSSSETNMDVNIRKCKEDELIAMHS

SEQ ID NO: 148784 - protein, 111 aa, Oryza sativa
  Clone ID: PAT_MRT4530_49180C.1.pep
FTYGARKIPALGTWLPLRSLCWWERKRFSYKGGVNKNAKKEPDCLGPFPFPKDLARFFKKWELGCATCPKRAGTLGSFGTFQPQKGGKMGPLMGHLIPSNFFRFYWGFQPP

SEQ ID NO: 148785 - protein, 251 aa, Oryza sativa
  unsure (1)..(251): unsure at all Xaa locations
  Clone ID: PAT_MRT4530_49181C.1.pep
LAELTKDDSGSHDPHHHRRDSPTPPHXSPRRRENPDQSGGSALSPLLDGGRARRAGVHRRLXGALQVVEALLWHPXANPEPETPVQRWLDDVANLVTAAQRQLAAGSRPAATGTSRTTTALSSSARRRARRSAMMSRRSTAQTSSRPSGSREQHDSXYTMSSYFSVRLGRNSTSGPLLLYGDGLSRAAVWRGRRLGPRNLPLPFRVGGRAFSHPMARARRPXSCRHRRNRRPDCHLLPNSYLQVVGKVVFA

SEQ ID NO: 148786 - protein, 96 aa, Oryza sativa
  Clone ID: PAT_MRT4530_49182C.1.pep
FFFFLLKSKICTTYSVNAQKFYLVTCLIFYLRPLHSTSHPSFPLDTPRQQAGGGTRPTVPGGLEAPVYHPSAQEAENSTLCGVPPKARTRNSEGGI

SEQ ID NO: 148787 - protein, 769 aa, Oryza sativa
  unsure (1)..(769): unsure at all Xaa locations
  Clone ID: PAT_MRT4530_49183C.1.pep
QRLVVAHEPLSWFAPANGPTTTTTDASSDRTVARLAGCGGGGERRALLRSIKPLFVGGEFGYGDAWNESTDCCGWEGVVCGGGGGGHHVVSLSLVQAGIAGAVDGAAFAAFTALQELDLSWNRISAFSLPSAGGMCVAALVINRTTLSELYLGGNQLLTTSWISNLTSLRVVDLSQNFLHGYNGICNLHQLEYLHLGVNMLHGTINSCLGKLQQLKYLNMERNFLMGEIAPNLLINLTKLETIHLGVNNLTGTFMLSWLANSSNLVDVVLSHNYNLKIETELVRWTPLFQLVYLNLSNCVINRRSNGVVPTFLSTQLSLSGIDLSHCSLQGRIPPWLFYNLSDFVLLNGNRMDVIDMDGLGGNXTSPVQVLDLSENKISMSIPTNFGSIFQFLDYCDMSSNRLYGGIPSLAEATSLEVLDLSSNNLNEEILPTLIGNLSILTSLLLSNNDLTGPMPPFHWNLGSLKHLSLENNRFSGWLSPLLSNSSNLKTLNVRNNHLSGIIPDGLLSFQQLGVILLGGNDFHGPIPLDLCFNNYLHFVDLSNNQFSDLPMYFNDDPFSGNITERMSVDFTTKGENLTYMGEPLVLMTGIDLSMNQLSGAIPPPLGFLRQLKSLNLSHNQLVGPIPETFMYMQDMESLDLSYNHLNGSLPMQLANLSFLCSFNVAYNNLSGEIPFQQQLGTFDESAFEGNDNLCGEIINKNCSSVLHQNQGVFDAIDTSLVFWSYVFGCFALGFWGTVALLIWDEVCRRRLCDLMDALMFKLGWEFVP

SEQ ID NO: 148788 - protein, 172 aa, Oryza sativa
  Clone ID: PAT_MRT4530_49184C.1.pep
MAARLWAAAVAPATLNPPLLTLSASSSPSSSRLRRSVLGRLRSRAPRPADFVCRRAKNAAYDDYKFPDPIPEFAAQETSKFKEHMMWRLEQKKDDYFGEHVEEIVDVCTEILGTFLEHDYCGPGTLLVHPFLDMKGEIKERGLPGAPQAARAAIAWAEKNIDKDWKAWTGEY

SEQ ID NO: 148789 - protein, 147 aa, Oryza sativa
  unsure (1)..(147): unsure at all Xaa locations
  Clone ID: PAT_MRT4530_49185C.1.pep
METTRTTRIVSIXVFLILLGQGNTYGYKLKTPXGGEGTLNNRSSQKIHRQANIRKTRRQISTSDIGMASPLRCLWLXIRIDIALSLISPDADSRRKATLLSNTSQYYISPNRPQLDRPPPILYCIAYILAPTIPILCKYRNRNIKRR

SEQ ID NO: 148790 - protein, 76 aa, Oryza sativa
  Clone ID: PAT_MRT4530_49186C.1.pep
MKPCGGSHKPDRPLAACDAHQGAATPAAAGTAAPGVTLNSGHPQPSLGLGTEGGPPAADHADTNPHPGRLPYTHLD

SEQ ID NO: 148791 - protein, 100 aa, Oryza sativa
  unsure (1)..(100): unsure at all Xaa locations
  Clone ID: PAT_MRT4530_49187C.1.pep
LSLHRVKWRXSATTNLTLXAXGTVPSLTRHXEHLAYKHIFPFRSDLPXSTQLLHTIPQYLQPEGKPIVKNATLEHIXSFQQIARPGETLDVSGPGCLDDV

SEQ ID NO: 148792 - protein, 134 aa, Oryza sativa
  Clone ID: PAT_MRT4530_49188C.1.pep
YSFLLSSLSHRLEVGSGREWRPRQRRARQPLWRVAGTATVCGGGSGWAVLGRAASIYAGPSSGRLCDTQAAEGSRIQGPEVVWRARRSPRRLGMRLRTHRRRRSRLLCAVRGGYFTLCKVITYFFYKNLTFTLT

SEQ ID NO: 148793 - protein, 1392 aa, Oryza sativa
  Clone ID: PAT_MRT4530_49189C.1.pep
MWLVGSVVDAAIGCLVQSILGSFFTEQMEAWTHEIGLAEDIEKLEFEMKAVERVLAAAEGRSIDNKLLAQSLGSLRDLLYDAEDVMDELDYHRLKHWIEKGEGSSAAADNNPGTNYAASSISSSAYQLICSARQKITSWISSGRKRKREEEEPTDSTMLPHDIKRDISKRINRIVNNLQKTGNSVSGVLQLEIPCRGLTSNQRHRMARNTRLTTSVPIEPKVYGRDADKDRIIEMLINEGSSDLLVIPIVGIGGIGKTTLARFVYRDQRIIDHFDLQIWICVSTNFNEDSSGWDKLLAPLKCNQVTGCAVLATTRRSSVAQMIGTVNAFQISGLDKKEFWLFFKACAFGNEAYEGQPSLQSIGQKIAKTLKGCPLAARSVGALLNRDVSYEHWRTVQDKWKSLQVKDDDIIPILKLSYDYLPFHLQCCFSYCSLFPEDHWFNEETLVQAWISQNFVQYEDTGAGLEETGLQYLANLVDFGFFQKIGSHYAMHDLMHELAEQVSSNECAKINGIQLNVIPPNIRHLSIITTSHENDAPEDFLIEKFEEILQKIRPFQKLRSLMFFGQSSTKLLNPTLTFCKEAKCLRLLRVYVSNAGINSLQNSLNPYHLRYLEFIGAYGDVVLPQALTSFYHLQVLNVGIHGSHDVPTSMNNLVNLRHLIAHDKVHRAIAGVGNMSSLQELNFKVQNVGGFEIRQLQSMNKLVTLEISHLENVKTKDEASGARLIDKEYLKKLSLSWNGGSVSLEPDRSKDVLEGLRPHHNLKTLSITGYSDPNSPTWLSSNLSVTSLQTIHLENCREWKILRSPKILPLLRKLKLVKMFNLVELSIPSLEELVLIEMPKLEKVLTIKDCPQLNEFTPFGAEQWFPSLRELTIGCCPHISKWEILPLREMHALKSLELIDLHAVRQLEVPSLQKLVLINMLILECCSGLTASTVQMSTSQGDKECLSGLRELTIHDCPCLVLSYPLPPSALTSHFSIKGIPTYPTMEKEYGQLSITSDELIMLDDKILAFHNLRGIESLFIKDCPNLVSISSEGLNQLIDLEGLYVTGCPNFTMTSGLVLPSVRFLSLQSCAISGSWLTEMLSHVRSLKTLKLHDCPQIKFLSFSEPAAMEGASSLGSAATHSDRDEQLLKIPSNIIHSLRDLFISNCPDLEFGGEEGALRGYTSLESIKVQSCPKLIPLLVSGKMEVGSLPPSLRSLDIDMDPELSTVWDLKLQELEQGVNQLQSRLLSFLPTITTLVISASPELTSLQLGYSKALEELIIVDCESLASVEGFGSLTNLSDPLQTAHSLASISFWPARSKRGATMMGLTEEQERALQLLTSLEYLIFWHLPNLLSLPANLASLTSLKWLHIGDCPRITRLPEMGLPLSLTQLYNKHTWILQTMVPRRNHLS

SEQ ID NO: 148794 - protein, 358 aa, Oryza sativa
  Clone ID: PAT_MRT4530_4918C.1.pep
MPSGEAKRRRSPAVEPDYLAALPPEIVDNIISRLGVRDVVRTSVLSHAWRRRWRSVRGLDLDFRSSDPAAAISSVLKRSAAPVRTVTLRVPRRWFHRAVRWLRLLPRKRVQSLHLYFEMISIIEGKHNLDPSIFSCLELSSLSLAGCTFPPPQPPSFVGFLKLTKLSLSEVELPPHGERQLEAMIAASPLLLELSLDNVHSFHHSEVWFVRGPNIRSLRIWAVDQDFGCRIGELPRLEDAVIFLDSEVTTQVLCKTLEGIAHVESLDFNALMHQFSDNPPERFSFTFQNLRSLDLHACLDQISSTSLVFSILRCAPNLEKLEIEVGCYDDLVDDGTVEGFANAQTSDDIFPRLRCLVT

SEQ ID NO: 148795 - protein, 375 aa, Oryza sativa
  Clone ID: PAT_MRT4530_49190C.1.pep
MKVAKLSQSPRHRSLRAALCVLPLSMRLTPSPLALKQLLKIPSNIIHSLRELVISNCPDLEFGGEEGALRGYTSLKSIKVQGCPKLIPLLVSGKMEVGLLPPSLECLCIDMGPELSTVWDLKLQELEQGSNQVPPPPPSLDTFLITNLTDKVQSRLLSFLPTITNLVISESPELTSLQLGYSKALKELEIVDCKSLASVEGFGSLTNLRFLTVYESPSMPQCFEILSQQHGASEILSRLENLQISDGFILTVSLCKQLTSLRDLFFWPERSKPDATMMGLTEEQERALQLLTSLERLNFWGLPNLLSLPANLASLTSLEWLDISDCPRMARLPEMGLPPSLRRLSLCRCSDDLSMQCRMVATEKLQVEIDDETID

SEQ ID NO: 148796 - protein, 52 aa, Oryza sativa
  Clone ID: PAT_MRT4530_49191C.1.pep
PSQCLLQALLVHAITRVASGHLCAEASVHVSVSSSIVVVAFLADQASQCCTW

SEQ ID NO: 148797 - protein, 461 aa, Oryza sativa
  unsure (1)..(461): unsure at all Xaa locations
  Clone ID: PAT_MRT4530_49192C.1.pep
MAKALLSSSLLPSLQPRAAAARLPMLTLPSLRRHGGRRASACRVRASLHGLDSIAGLDLHAALERAEAALYTLADAAVVAADAAAGGGGGGGGGGGEAAASVAQKNGGWFGFISEALEVVLKVLKDGLSAVHVPYSYGFAIILLTVIVKAATLPLTKQQVESTLAMQNLQPQIKAIQQRYAGNQERIQLETARLYKQAGVNPLAGCFPTLATIPVWIGLYQALSNVANEGLLTEGFFWIPSLGGPTTIAARQSGAGISWLLPFVDGHPPLGWHDTICYLVLPVLLVASQFVSMEIMKPPQTDDPSQKNTLLVLKFLPFMIGWFSLSVPSGLSIYWFTNNILSTAQQVWLRKLGGAKPVVNQGGSGIITAGRAKRTSAQPAXQPGXRFKQLKEEESKRKGNKALAAGDSDLSASTSEDEESDDETTEEQGGPEERYNSSSNKKLPNYSGKKGKRSKRKRMVQ

SEQ ID NO: 148798 - protein, 135 aa, Oryza sativa
  Clone ID: PAT_MRT4530_49193C.1.pep
MAGTPGKRLRYTASRRVGSTLSDLPEGVLHHIMSFLDSRQAVQMCVLLQRWRNLWRSMPRINIDCKESSHQHRLQRVRALQAPPEVLHLCSQAWDANNRKFCHIIGITNIPSSYFGRALLLHDSERLPDLYHCTQ

SEQ ID NO: 148799 - protein, 266 aa, Oryza sativa
  Clone ID: PAT_MRT4530_49194C.1.pep
MCGRGGGVGGGVGAGCGVGARGGAEKAGVVGRWGRRWLELGSNRLEGVTGRLGHGGAAVEMTKLAEMWYLNLSSNNLSGEVTPLLGKIRSLTMLDLSGNPSLCGNDIAGLNSCSSNTITGDGNSGKTRLVLTVTLSVVAALLVSMVTVVCAMSRKARRAADVVVEKAETSAIGGSSTAAAAAASFVIFPPPPRSGRPRRRPAVAEPSRLGPAVVAPLICCKEKKGKKRYREEEQCPGAFCKFCPASHVSHGDKEIDLLLEKKRNSR

SEQ ID NO: 148800 - protein, 48 aa, Oryza sativa
  Clone ID: PAT_MRT4530_49195C.1.pep
GNYNERGGLLWNGDSMMIQTTDLMYHQDTQYVMREIAWYRHLGSCMLS

SEQ ID NO: 148801 - protein, 146 aa, Oryza sativa
  Clone ID: PAT_MRT4530_49196C.1.pep
MAASKVAPVLALSLLLLAVAAHGCEPHCSGGGAPAVVIPTPTVVVPLPSFGGAHGGYGGYGHGRCPIDALKLRVCANVLNGALGVNVGHGPYDCCPLLAGLADADAAVCLCTAVKANVLGVNLNVPVELKLILNKCGKTCPSDFTC

SEQ ID NO: 148802 - protein, 84 aa, Oryza sativa
  Clone ID: PAT_MRT4530_49197C.1.pep
MEDTHDNQHTPTRSHNIQAYIRQDTPLDIDFRDRHGYSPTVSPDTVRRDESTISDLAGHGFEEEGYPVVDYESDLQTDMSTTVR

SEQ ID NO: 148803 - protein, 97 aa, Oryza sativa
  Clone ID: PAT_MRT4530_49198C.1.pep
DRFQWLVLALPELQLNKEAFACTHMHPVASDSHDQEAEEARTRLMLIMHAEAISLMLSAAKLHPARLAVRSSRACTALSETASSLPCDHPPPQLPES

SEQ ID NO: 148804 - protein, 45 aa, Oryza sativa
  unsure (1)..(45): unsure at all Xaa locations
  Clone ID: PAT_MRT4530_49199C.1.pep
SCLEKSXCRLYIDAASDGSIELLSSAASVTYKGNRLITEWFKVKY

SEQ ID NO: 148805 - protein, 164 aa, Oryza sativa
  unsure (1)..(164): unsure at all Xaa locations
  Clone ID: PAT_MRT4530_4919C.1.pep
TRAPARAPTPPPAARPRTAGSARPPCASLRRSRRRRFXSPSLPSAAAAASMNRAPLRRRRVPKHQPPPNRGGRRRRRRPAPRSRRGGGGGTGTRGTTSPQRRPRRRTGPAAAASAPSPSPLVDPQRCCSSTASYVGASPSERKAGGARDCLASLGDERRERLVV

SEQ ID NO: 148806 - protein, 1130 aa, Oryza sativa
  unsure (1)..(1130): unsure at all Xaa locations
  Clone ID: PAT_MRT4530_491C.1.pep
MPPKKVVKEKVTRRKESDAGADMAAEEGAEPSAPVAEDGGAPSASAPALSLPPLAPATSVQNSSKRTRRSKVASAPILQYSAGYVPPQVYPQVPTQPLLPXVVQAPMYFAGQPSTAAVHPAPHVQLQAQPVAAQVHPXPPGQVPQTMAEGASALQAQLQAFLQQLSQPHNISSTTPSARPEGNTSQGAPRWLPSNQLGLGTSPWSQGPQFDSINAAXAPTVRPQAPTPGFGANQAPNQVVMTWSQPTFDPFMAVQQASPIGXGQPNAMAQPHAQAVISPFATPYPQQGAMNRAGGEKGLPLSGGIKTRPIPPQFNFPPVPRYSGETDPKEFLSIYESAIEAAHGDENTKAKRPGESIREYMCRFSQARCQVQDITEASVINAASAGLLEGELTRKIANKEPQTLEHLFRIIDEFARGEENSKRRQAIQAEYDKASVAAAQAQQQVQVAEPPPLVVRQPQPAIQAQPPRQGFGGEAVQVLGQAQLIVAFGTGENRREEQVLFDVVDIPYNYNAIFGRATLNKFEAISHHNYLKLKMPGPAGVIVVKGLQPSAASKGDLAIINTAVHNVEAEPHDRAKHTPKPAPHGKIIKMQIDDADPIKLVSLGGDMGEEEAKNILEVLEKNIDIFAWGPDEVGGVSADLIMYHLAVKPDAKPRKQKLRKMSADRQEAAKAKVQKLLKAGVIQEIDHPEWLANPVLVRKSNGKWRMCVDFTDLNKACPKDDFPLPRIDQLVDSTAGCELMSFLDAYSSYHQICMNPTDSPKTAFITPFGTFCHLKMPFDHASDLQETFDNLRATSRLRPGDGSRKLKHYFQAHKVIVPSQYPLGEILRGKEVTGRLSKWATELSPFDLHFVAHTTVKSQVLADFVAEWTPAFAPEPELVEQPWVMYSDGSWSHKGAGVAAVLTSPNGVPIWYAARLQFDTTNNAVEYEAILLGLRKAKALGIRRLLIRTDSKLVAGHVDKSFEAKEEGMKRYLDAVRSMEKCFTGITIEHLPRGQNEEADALAKSAACGGPHSPGILFEVLYAPSEPTDSLEVLAIDQVKLGEDPYDWRTPFVKHLETSWLQEDEAEAKRLQFRVTKYKMVSGQLYRYGILQPLXLRCISFAEGEEMAKEIHQGLCGAHXTARTVASKVF

SEQ ID NO: 148807 - protein, 745 aa, Oryza sativa
  Clone ID: PAT_MRT4530_49200C.1.pep
GVSDGPGSSYIVMLQMENFSFVPLSRMFPSNIYSVQELSPQEEWLVSFHLGGMLWFISLMKMRMRMRMNLLIWNDHFYLIHNSLQLMRNLFPPRASRPTTSPARRAPGDEDPAAAAAAAEMYMAYGWPQSIPLDPGDSDRVVLLRVLGRYLLAVCPASLHLWSAAHHKVRLARLDRSPESLAAHGDNAHSVWSPDAKTVAVLTSSFYLYIYKLQFSGKPLIIGGKPQPGLCLASISQIIVEKVPLANDAFITSNFVCDSKSMLLGLSNGHLQVISWNAEFSDSFKLGCSACSSNRTPTVGDALVFDPPSLRENSDASPAPCCTGNSTIIHVELSVKLRLLVALYSGCQIGLCAVGKKGLKQTSSIRVERWLNTDDAMCTSVASDQQILAVGCSRGVVDLYDLAENARHIRTISLYDWGHPIFHRIGQFFMLLQAMMLSTVRELSIMSPKSPPVSMRFIPEPTDEGKPKHDTNGSSDLSQQPSRCLILRMNGELSVLDMDDGHEQSLTNSVELFWVTCSQYEEKGNLIKEVSWLDYGHKGMQVWYPSHGENPFKQEDFLQLDPELEFDREVYPLGLLPNVGVVVGISQRMSFSTAEFPCFEPSPQAQTILHCLLRHLLQVIAKLEGPAVSQYCALRLLQATLDESLYELAGELVRFLLRSGRDFENASTDSEKLSPRFLSYFQLRSPFKRQSSDLRSNSMKELSPHIASVMNILENHASYLMSGKELSKLVAFVKGTQFDLVGLLD

SEQ ID NO: 148808 - protein, 61 aa, Oryza sativa
  Clone ID: PAT_MRT4530_49201C.1.pep
KLVCTGRVLFVYHHCKILVLHFIFLSEEEKKNYISFERYTIYSVSKKKTTPLGQLISRKQP

SEQ ID NO: 148809 - protein, 111 aa, Oryza sativa
  Clone ID: PAT_MRT4530_49202C.1.pep
ILCSLKHFATCLSMKDSLVFSFYFFSFTHSLILHHSFFSPSMAFFPLWHFALQHSSGMPVQTHSNIAHSALTHFQSQSISFSCSIPSINHHIRHRPLQRCWVRHKKPNTDT

SEQ ID NO: 148810 - protein, 74 aa, Oryza sativa
  Clone ID: PAT_MRT4530_49203C.1.pep
MEESERETLVTDRPGAVARAGASYPRKKVRRMGGDWRGWGDGRGRTRQAVGARDGLDIEILSMEAVVVGEEGKF

SEQ ID NO: 148811 - protein, 259 aa, Oryza sativa
  unsure (1)..(259): unsure at all Xaa locations
  Clone ID: PAT_MRT4530_49204C.1.pep
DSDLNSNKKSLAAWDXVCKPKLKGGLGVINLSIQNQALLFKLLEKFYNRRDLPWVNLIWSSYYGNRIPHLLFSFALSPNSSVEKSLSVPSEDNFNVPLSQEALQEFQTLQIXLQQHNLDHEKDIWAFIWGTLRYSYKKFYALNFCALQPPQQFIWLWNSKVTSKVKVFGWLLLMNRLNTKYMLHHKHFAPPNCDLCCVLCPSQLVEDLQHLFFLCPFLINCWNSLGIVWDSSLPFDQIFLQARSTLQICCFMEIFFVGA

SEQ ID NO: 148812 - protein, 92 aa, Oryza sativa
  Clone ID: PAT_MRT4530_49205C.1.pep
MGLMEGWWLFPPLSIEPLKRQLDGGGGFVCGREQGVGEVGAGAVPRPGQPAPATARHGEEQRGEAERRRRRMQDRLNMDGDGARVGDDSRGD

SEQ ID NO: 148813 - protein, 264 aa, Oryza sativa
  Clone ID: PAT_MRT4530_49206C.1.pep
MQELQLLLVLAALVLLSFLSPATSCTEQEKSSLLQFLRELSPDSSSKFSRSWQSGTSCCTWEGIACGSNGTVTELSLPSMALEGPISVSIANLTGLRRLDLSYNSLSGELPPELISSASVAFLDVSFNRLNGELQESSPSLPHHPLQVLNISHNFFAGEFPSTIWEKKSDLVAINASHNTFSGALPSSFCISSPSFAVLDLSYNLFSGSIPAEIGKCSSLRVLKASNNEINGSLSDELFDASMLEHLSFLKNGLEGELDGKCSL

SEQ ID NO: 148814 - protein, 37 aa, Oryza sativa
  Clone ID: PAT_MRT4530_49207C.1.pep
LGNLPLASSLVRVVLFLELLGKMHFPSWTVFFLLEFA

SEQ ID NO: 148815 - protein, 44 aa, Oryza sativa
  Clone ID: PAT_MRT4530_49208C.1.pep
CVNFLNPSAEGSLNTMKPFDLTVCGSHSGAGRDGAVLEGPCADF

SEQ ID NO: 148816 - protein, 110 aa, Oryza sativa
  Clone ID: PAT_MRT4530_49209C.1.pep
MGLESSELPYGPMKFWAAHRVTNNDHEEEDACEDPVDPLEWDSYDFQRQAGVASGGGGGKARRRQQRELALLEQGEATAVEEEASDGRVRLRRRAATGCGGGGERRGGRW

SEQ ID NO: 148817 - protein, 61 aa, Oryza sativa
  unsure (1)..(61): unsure at all Xaa locations
  Clone ID: PAT_MRT4530_4920C.1.pep
LCLCPRPRAXAHSRAPPPAPELAAAFAAHSVEGERAVNAICMTITIVTFCSTTMYMTEVMA

SEQ ID NO: 148818 - protein, 148 aa, Oryza sativa
  Clone ID: PAT_MRT4530_49210C.1.pep
MAGRGKAIGSSAAKKATSRSSKAGLQFPVGRIARFLKAGKYAERVGAGAPVYLAAVLEYLAAEVLELAGNAARDNKKTRIVPRHIQLAVRNDEELRGLVGAPSIVKRVRRAEYGGAVPCASRPCLGLLARLVAPWLCIKRTMAVPPRE

SEQ ID NO: 148819 - protein, 118 aa, Oryza sativa
  Clone ID: PAT_MRT4530_49211C.1.pep
MPVGGEALERPPSKAAQNATTHTTLHSRREGPRRRRREEEKEKERERERMILVAIVAELLEEYTAAVARAMELLLSRAPPRIFPRRVRFLVLRSLPFASPPPSPLSPPPPFTVAAGTR

SEQ ID NO: 148820 - protein, 85 aa, Oryza sativa
  Clone ID: PAT_MRT4530_49212C.1.pep
GHPSIGGRRRMPSLSLPPRVRGRRSRRLPFSRVGHRRPPPPQHRSPSHPPRARARRSHRLTFSRVGRPAAGRPPSLSPRARGFGL

SEQ ID NO: 148821 - protein, 62 aa, Oryza sativa
  Clone ID: PAT_MRT4530_49213C.1.pep
IVSIMYSFVLTENGKQTFPLFVYLKKSLYTPIGNKAAYTLSKETCSIYDFCTALNITKAKYC

SEQ ID NO: 148822 - protein, 110 aa, Oryza sativa
  unsure (1)..(110): unsure at all Xaa locations
  Clone ID: PAT_MRT4530_49214C.1.pep
EKQVGNERFNXFSGCTSGQTTCIVLRGGADQFIEEAERSLHGAIIIVSRAVKNPTVVPGGGAMDMEVSKYLRRHARTIVVKSQFFVHSFAKALEVIPRQLHGSAGFTVSP

SEQ ID NO: 148823 - protein, 123 aa, Oryza sativa
  unsure (1)..(123): unsure at all Xaa locations
  Clone ID: PAT_MRT4530_49215C.1.pep
FWSIAHNHGHSYLNSFSLARGAQLYSQDTIHRHVNAXAGHVTMLSDCDETLHITPSDQAHHTSGFTPTPQQAMSSPXSWLGESASRIGHRKAHLNSITLTLAWMRQPEESYTTDQAVTHSRLW

SEQ ID NO: 148824 - protein, 142 aa, Oryza sativa
  Clone ID: PAT_MRT4530_49216C.1.pep
MEKMRRRRQAVRRPATGCEEDGTRRRVVKKPRVGGGPRRGGRRTLLVERSRTAVAARKDSRPTNAAVAAASVGKETGSKGMRRKGGVEPWLVHRLGYGEEASSLGVRSGAGSRPPPFPSRPPPFLSSFHCHEPPPPFPSSSH

SEQ ID NO: 148825 - protein, 190 aa, Oryza sativa
  unsure (1)..(190): unsure at all Xaa locations
  Clone ID: PAT_MRT4530_49217C.1.pep
GVDEADLGRANPTTVAAWCGGGPSGCXGGRSSGDGGCGWAHGAGAVESSGAADGKRKNEEENAGMVYMGSGGTDEAGRRPDFSPTWGSGERELGGFKIRIRPXVGARRGREGEGGVATMWGGAWGTEWVREERGKRRRRGGFGGDCHRRLEVEEGADRWAPPVGDPERGGREWASPARRKGAGGSGPTAQ

SEQ ID NO: 148826 - protein, 83 aa, Oryza sativa
  Clone ID: PAT_MRT4530_49218C.1.pep
HLQVLVRSLISGLVKKIPSLCPIRSRLCPARHPSGWALAEWAEWILSVKTMFRSLLNLILGGRSFPTRPSFFSYRPNAYQLAV

SEQ ID NO: 148827 - protein, 85 aa, Oryza sativa
  Clone ID: PAT_MRT4530_49219C.1.pep
MALELGHVHTSAGGATSSIEWDSCAGPIPTLSTRRDLRNSRRIEISWSFGCTRSATLTAAPRRRAVVQLPVRDGEAQGLRASGCI

SEQ ID NO: 148828 - protein, 53 aa, Oryza sativa
  Clone ID: PAT_MRT4530_4921C.1.pep
RGSLKISFFLDFFFFSRGTFFFFPFLFFPGVWCPYGGLTCSYFSWFPRLKMLL

SEQ ID NO: 148829 - protein, 135 aa, Oryza sativa
  unsure (1)..(135): unsure at all Xaa locations
  Clone ID: PAT_MRT4530_49220C.1.pep
RSSGTAWGVDGGGRGRQRRAPAWPPASSSRRGMAVDGGGRXPSSGDELRRGAARGQRRTWPPATSLAWGVAAADATASNKPAKDEATGDELRRGAWTTQDAAAGDDLRHEAWTTKDAAAGDDPRHRAWRVGPLAM

SEQ ID NO: 148830 - protein, 295 aa, Oryza sativa
  unsure (1)..(295): unsure at all Xaa locations
  Clone ID: PAT_MRT4530_49222C.1.pep
LFLKRKRELLRQWARLTVDRVHGDGLRNGRPRSILSKTDGRDQLGLPWSTADGVDDVSGDVITGGGSALHARRRTTAQRRKRRTPTGSGRRGEPYRETNGGGGDDRLDDDGDAPAILGGNGGVDEDGDDLAITTAXSRATTTTGATATHGWTNGGDGGARSHAEAALQTAAGXGEGGGGGXEAATEAHSDRRRXGKVRVRXRETNPNRAQIHRFPNDFIRSFYRGKDRGDQGDYFPSNDLAGAGKDRWAPPVSERERARERRLGWWANLGRGEREXLLGRLSAQNKKGDFKTFFN

SEQ ID NO: 148831 - protein, 613 aa, Oryza sativa
  Clone ID: PAT_MRT4530_49223C.1.pep
MAAPAAESAVVGVGVDSATSAAVRDGFAELERQQQLLATCTRLYQQLTEHFGSLERRLAARSETLRTKRRFLDVRTSRRLEALRRREASIDGSVSLALSRLDSLAKGDAGTTGSASADAAGIAEGLRSLCASMDSAGFFTFVVARRKEVDALRAELPDALKRCVDPARFAMDAVSEVFPIDKRAVRSPTDLAWACVLILEAVVPSLADPDPEIGAARPMVPQAARERARGMAREWKDAAEKKGGVEGAKPPDAHAFLQHVATFAVAEKEDKELYRRIVVSFSWRRQMPRLAITLGLEDEMDVDAEPRIVLIALDLAYSSHCKAHKICSGLHGIADQSCSADCCGTASGAWVIAGSVIRVCIVTLNIIEELITKGQQLDAVNFAYEAGLQEKFPPAPLLKAYLEDSKKIPSNSDNLSTSTGQSGSNANKKEQSALRAVIKCVEDHKLEAEFPLEDLRERLEELEKAKTEKKKAASSSSSGGSSGPANKRIRASTGGPMPPAKAGRLTDYTGTPSSPATTTTNATFIRSPSHASYGTASPYSYDRPAAHPLYCGQNTLAMREPYAYHHPSEVSSVGLGMSYPSPPMTYPAYAGYSNGIGYSNAMAPAFHHQAYYR

SEQ ID NO: 148832 - protein, 130 aa, Oryza sativa
  unsure (1)..(130): unsure at all Xaa locations
  Clone ID: PAT_MRT4530_49224C.1.pep
TQSAAPMAPPTTPSRAAALRLSSSRLRLGGYMGKKRGGXHAMGSQAPPRAGNQAVSLREESSGKTRADXYFMQRERTLARDAAWAGGEARXGPLGALVGRRLIGPPKVAVIAYTGGFLQWLYFQDSWTTG

SEQ ID NO: 148833 - protein, 109 aa, Oryza sativa
  Clone ID: PAT_MRT4530_49225C.1.pep
NLAKHFSKSVASIPTRSVPFVLRSLRRRTTSFSTVCSLNRPDSVCCRLLVGLPSLHPVAAGSRTDGHLLGHAYLSISVLASTPWSSWSLGSCGRNGTPGFLTLHSFRSQ

SEQ ID NO: 148834 - protein, 514 aa, Oryza sativa
  Clone ID: PAT_MRT4530_49226C.1.pep
MIGAAVARWTGAATNDVGGKWVVLAGYARGHGCRWRDGKRVDGGLPCPSVMVAVDAIMGIKLEYGIKKNWTGDPCFPAQLAWDGIKCSSVSGNNTARIIYFFGSDGDMCNKTINPPPSRKKVKGGAIIAIAVVVPVSAIVLILAYLIWRQKRKPKILSYNLYFLEPVSTDDPPREPELDIAPASRNNHGGTLLKVENRQFTYKELEKFTNNFERFIGQGGFGPVFYGCLEDGIEVAVKIRSESSSHGLDQFFAEVQSLTKVHHRNLVSLVGYCWEKGHLALVYEYMARGSLCDHLRGNNGVSDSLNWRTRVRVVVEAAQGLDYLHKGCSLPIIHGDVKTSNILLSQNLQAKIADFGLSKSYVSETQTHISVTPAGSAGYMDPEYFHTGRLTESSDVYSFGIVLLEIATGESPILPGLGHIVQRVKNKVASGNISLVVDARLGDAYDVSSMWKVVDTALLCTTDIGAQRPTMAAVVAQLKESLALEQTCEYSALSGTTGTSDTTVSLANVGPLAR

SEQ ID NO: 148835 - protein, 76 aa, Oryza sativa
  unsure (1)..(76): unsure at all Xaa locations
  Clone ID: PAT_MRT4530_49227C.1.pep
HSGCFLGWLPLDPDLTYLSPMDYSAMPSPSPSSSDAAAAASGLRVLPQQAEEGVRXLRYRRRLRRRVDGLRAAHLR

SEQ ID NO: 148836 - protein, 65 aa, Oryza sativa
  Clone ID: PAT_MRT4530_49228C.1.pep
MIKLGSLCICDDCNNAMFTGVFIGALNRIYCDNCYPLWYERATFYEEDVPFENKATNRLINQVNS

SEQ ID NO: 148837 - protein, 54 aa, Oryza sativa
  Clone ID: PAT_MRT4530_49229C.1.pep
SILTFLTLHFLQNSVFPFYLYFIFFQQTLNNPIFTPINSIPLPKTLPYFSSNNI

SEQ ID NO: 148838 - protein, 65 aa, Oryza sativa
  Clone ID: PAT_MRT4530_4922C.1.pep
NYSYKWNHRVKCDHADSMFRLCLLQPLLTSALLLPLKYSAFDSTIVLSSNFRLEFPNVNGRIMFY

SEQ ID NO: 148839 - protein, 146 aa, Oryza sativa
  Clone ID: PAT_MRT4530_49230C.1.pep
MGGCAFGPRAESYYAMTGPWVQPVGRPNLARRVVECGDNEQVVEVIKAYVRLGITTEVVARAKTWCAAYATYDGVQHGAFAVPGAGRIKSWCTPCIGTGRVSLARCALQLPPQRPTRRYFPRHAVPADLTALLAHELTRGMHEPRR

SEQ ID NO: 148840 - protein, 57 aa, Oryza sativa
  Clone ID: PAT_MRT4530_49231C.1.pep
SDWIRINILSSCLTYHPYHPPLFLAMPLFPNRSSKKQGTPLNTRHKMDKAKEGSTEE

SEQ ID NO: 148841 - protein, 1039 aa, Oryza sativa
  Clone ID: PAT_MRT4530_49232C.1.pep
MAANPSSPSAGGGGDVSASSPTLPPVRLAAAQAASAAAIHPTSPRYFFSSLAGTNASPHRRIAIAVDLSDESAYAVRWAVQNYLRPGDAVVLLHVRPTSVLYGADWGSIPVSVSDDADGEVAPAASAEELQKKREEDFDAFTSTKAEDLAQPLVDAQIPFKIHVVKDHDMKERLCLEAERLGLSAMIMGSRGFGASRKGGKGRLGSVSDYCVHHCVCPVVVVRYPDDAAGADGEAAGPTDELHTVPEDEPVYHDAPDVQKGQNSNRRRARELRREGVGPAMDEGLVSVDKFSGGSQAYFLTHLHQDHTRGLGAAGGWRHGPLYCSPVTARLLPTRFPGVDASLLRPLAPGASASLSLSSPSTGRAVSVVVTAIPALHCPGSLMYLFRGDLGCMLYTGDFRWELRCKRARAAKKALLDALAGDTVDVLYLDNTYCHPSLSFPPRPIVAEQEIFTTQTSLTRIRAVPRYSLTIESLDALNTVCPTIGIMPSGIPWLWKNSKGKAKSGVKSPAKSIRCKGLDEGAIEMDYDPLSPPKLFEKDSYNNVYSDKTPEKNKVNKSPQVSTHERVKEAFQIASGSWNLDLLVCKCKGVGRTSPGIYAAGPPPALLLNADSIPTSESRTFTLCLVLPTEKREKRVSGADLARPGRCLRGTGYVGFAEKKTNRKTNQIHQVIESESGTNPPRRQRPRVRAEGCDVSTEPRTLAHTHTQQVEAAAGDDARRRPSRGPTSSARLALTIIGVAHALGIFPSPSSATPTPTTSSSSSLELSAERTHADREGIPPLLASARGSETSRERSNTKPEHPPALLDLSGAARSERFAFGQAQDSMKNNLVKNNMLKEFYIPTYIFVPESPVEKVSQIPSCPVIVFINTKSGGQLGHDLIVTYRKLLNNSQVFDLLEEAPDKVLHKLYGNMERLMRDGDTVAAEIHRRLRLIAHRVQFKFHKGATDHAYMRLDGEPWNQPLPKDDGKVLVEISHAGQVKMLATKNCIAKGIHEALSMSTVHPESSSSSDDTDDDDDFAEERKNFGAALSFRYMDDVTKE

SEQ ID NO: 148842 - protein, 163 aa, Oryza sativa
  Clone ID: PAT_MRT4530_49233C.1.pep
VLEYHPRVRSERKQRKRDLVMPPLVDDGLLEIVGFKDAWHGLVLLSPKGHGTRLAQAHRVQFKFHKGATDHAYMRLDGEPWNQPLPKDDGKVLVEISHAGQVKMLATKNCIAKGIHEALSMSTVHPESSSSSDDTDDDDDFAEERKNFGAALSFRYMDDVTKE

SEQ ID NO: 148843 - protein, 197 aa, Oryza sativa
  Clone ID: PAT_MRT4530_49234C.1.pep
MAANPSSPSAGGGGDVSASSPTLPPVRLAAAQAASAAAIHPTSPRYFFSSLAGTNASPHRRIAIAVDLSDESAYAVRWAVQNYLRPGDAVVLLHVRPTSVLYGADWGSIPVSVSDDADGEVAPAASAEELQKKREEDFDAFTSTKAEDLAQPLVDAQIPFKIHVVKDHDMKERLCLEAERLGLSAMIMGSRGFGEQR

SEQ ID NO: 148844 - protein, 181 aa, Oryza sativa
  unsure (1)..(181): unsure at all Xaa locations
  Clone ID: PAT_MRT4530_49235C.1.pep
LGDDARRRPSRGPTSSARLALTIIGVAHALGIFPSPSSATPTPTTSSSSSLELSAERTHADREGIPPLLASARGSETSRERSNTKPEHPPALLDLSGAARSERFAFGQAQDSMKNNLVKNNMLKEFYIPTYIFVPESPVEKVSQIPSCPVIVXINTKSGGQLGHDLIVTYRKLLNNSQVVD

SEQ ID NO: 148845 - protein, 76 aa, Oryza sativa
  Clone ID: PAT_MRT4530_49236C.1.pep
MSMSNLLVRLVAVVGAHEEEGAMDADREQRRKGSLSSEHAAVGYRGAFARWLSHRGIEVSHGVGLRCHVTPPFSSR

SEQ ID NO: 148846 - protein, 854 aa, Oryza sativa
  Clone ID: PAT_MRT4530_49237C.1.pep
MELVVGASTATMDSLLGKLGNLLAQEYDLIRGVRGDIQYISDELASMKAFLLDLAREDPDNRKKHWMKQIRDMAYDCEDCIDDFAHRLPNDSLDAKCCPWIVTLVYDLWTFGPRREIASSIAELKVRAQLIADRRIRYGVENPNTQKGKGPPDATSYDIAEDQLASHELGMNEPVGMEKAMKDLEEWVDGTACQEPAVVSIVGFGGVGKTTIAMALYKKVMYQFDCRAWVTVSQNYDLDAVLNDILKQIDPDYRQQCSSKTGTSENIKTLARFGSKLKRDVQRTGSLRQSSPRSIEETSNLKRTETTDNKLESQIKKLLDKKSLHGLVSLGGSYPPPPQQWGRDEPTAPSWGPPATPSLHLRQRPLHPASSTTTVGSGRPQAPVVRAAPDLAAWSADGMRVGWRVGAAAPDLAALEHRCGGGVPDLPAPSADGKGVGRRGGAAVPDLAADERRGGTEGRSSGAGSGHPRAPVAGGKEREEEVASGLPTLSLPVEEVEKEYLSLRGTDITHVPPTIVKLEYLETLDIRETRVKELPKEVEQLKLISRILGGSKNKNPRKGLRLPQEKSKKQQHKSMLTQDKEKEGMKALRILSGIKIDETTAVAGLHQLTGLKKLTIYKLKLNPEEPGTRKILTELRSSIEYLCSCGLQTLAINEEGQSNFINSLGNMSAPPRYLVALELSGMLKKPPGWIKTLRTLSKLTLSLTVLRTDTLEHLRALPLFSLTFSFSFGEMEKDQDKKMKDIIEDNKSLSDGEIFVPGEGFKSLKLLRFFAPLVPKLGFCHNAMPALEMIEMQFQAFEGLFGIDTLGNLKGVRLREAKPREEDKQTAQINDLLVRDLKDSTEGLKVIIDHTFTS

SEQ ID NO: 148847 - protein, 786 aa, Oryza sativa
  Clone ID: PAT_MRT4530_49238C.1.pep
MAVNISTGVMNSLLVKLEEVCRYDLKEIQFSTEFDFKNNIWHLKEELSCMNALLQKLPNMEALNIQKRELRNKVRELAYFVEDRIDRFMHSFGTVADKATLLTDTMDLMLPILFEKIHEIKDYVVEEVRRVESIYNLDESISSNPRQIEIDDISPVLCGKANRLVGINVPCEVITQLLMEDMEGESVQHPKVVSIVGFGGLGKTTLASQVYKKIHSRFECAVFVFASRNRSTSMILNDILSQLRYDGSADGIKSLINATREKLSCKRFLVVIDDIASIETWNSISGAFVETWNSGSRIITTTRRKDVANACCSSFHGIVYKMKPLGWTDSRSLFFRRIYGSDNYSPELEELIIAIDILKKCGGVPLAVVVIASLLASQEEVNKLDNWLKIKYSMGFELERNPNSKWMKHILKLSYNNLSSDLKTCFLYLHMYPENYDIMKKDSMRQWIAEGFITQKDNRDLEDIAESYFSDLINRSLIKPAQFKHGEVVSCRVVHNLFLDLIVEKSTEENFVTVIRTDQDCLRRHNFLIRRLSYQSNRGNLIQASESLHQVRSVIYFGDRLHQRGESLPRLQMFEALRVLHLRMEGYFPFRATYDLSPVCNLFQLRYLKLEGNRFQFPDTSGELRYLQVVDIKCSGDLVLIGGFLSDACLPSLRHLRTPWNAELGRGINRLTSIRTLEEINFCNCSVENIRHLGMLTNLRTLGVIYNRRRGNDEDDQTDMVKFAALATSLRELGSCNVRCLDFNVALMEHRQPPIGFLYSWFPPPQFLQKFHPHMIFFFRVPYWIQ

SEQ ID NO: 148848 - protein, 139 aa, Oryza sativa
  unsure (1)..(139): unsure at all Xaa locations
  Clone ID: PAT_MRT4530_49239C.1.pep
QRDSYSLLGGRSYNSNADSIRDYFSQIGEVSSARVVTDKETGKPRGFGYVEFPRXDTAKKAYKELNGGELDGRSIRLDSASQRDRPQGNFGGQGGFGGGFGGNRGGSRNPGNSTVVLSQDDKNAKKGSIGTFAGKKMAL

SEQ ID NO: 148849 - protein, 74 aa, Oryza sativa
  Clone ID: PAT_MRT4530_4923C.1.pep
PGGSGPSGAFFTGVRSLNSAAGPPADPRPACKCPKNVAGSIRGLNAGNAPSLPPQWGVGIPYPLSPSLGWSRVD

SEQ ID NO: 148850 - protein, 662 aa, Oryza sativa
  Clone ID: PAT_MRT4530_49240C.1.pep
MVMGCTHQQLADPWAWAAREEGGRVAGSSLPRRPTPTTAIGRVAAGRRPPAPATGPPQGTPAMSLAPPPPKASPSAARLQKPAASCHGGQPKASPWAGSPPGAATHLQQPSRMKLSPSPAPGAQHLPPAKPSPLAGSPPGAATHLQQPAARMLASSPAKRVLSVFSPSAAGSLRRERNHLPPLASCFCLRRLMSTGLPQIPSPPATLMRPWCNEDEQVPQLTPFKISHGVSDTMMKQYEEDYKYLVEEGLDLEEMKKLYHELVRPVLVASCLILEHHIVSPETKALDQKFKDKFGKPPIYLSALDIMKTLIAMEPSRWSYLMDFLREKRILVTENWEVSLGSIECIMHDDSISFMMNGRVVFKGQSDGRYNHGTGTADLCTAITGEATDIVDCAIYREVPCNSPTHAELLGMYVLERRAISLKILLFDVKTDNAFVSETVRDMFPITPNTTEKDLCQVLRSMKVYFEHFNCRCEPREKLELVDSLMKMKDNEMTMESIKDKWAHYLLRLPVFRAHQPTKTIRKDYINKAPTVGTVAFHGQYKIVAKGDTAKTEAVVNLVLSLQPMVASVFVGNHISAISVKEEIEKFVKGYLLDIKEAKGAYVVVMKFIETPNAGGKILDVLFNTEVGEVYKQTANSVCVKLLDKNDGTTPELSPACLLIFG

SEQ ID NO: 148851 - protein, 113 aa, Oryza sativa
  unsure (1)..(113): unsure at all Xaa locations
  Clone ID: PAT_MRT4530_49241C.1.pep
FLRNDFPEEYMSIGINSFTELKGYLVLVYHQHYXEPWIKEYXIQSGSFIPVIEXGYKANKPLLALDDGRIFFCLGWTGLLSIPDETFCTFPRTSXFAEVEMRHLAGNSTQQNR

SEQ ID NO: 148852 - protein, 143 aa, Oryza sativa
  Clone ID: PAT_MRT4530_49242C.1.pep
MRRGRWWTAVSRGGHGGRWPEPRRTVEATGGAEEDTGGGGRQRSRGGRRPVGHAEEDGGGNSGDDWLEEDARSTTGLRLCPLSPRHARPQPPPSPTARFATGRQTPGELPSPPPTARSHWLPTAQASSATGRSASAVYACCAR

SEQ ID NO: 148853 - protein, 231 aa, Oryza sativa
  Clone ID: PAT_MRT4530_49243C.1.pep
MEPSTKQLLPMPQQDPNSPSSSTSSSSSSSTSPSHPHHRAPLPPSPRPVPRTIETTPFPTTFVQADTASFKQVVQMLTGAEQPSKNAATAATAAAGNSSAAGIGGGQGANGPCRPKKPAFKLYERRSSLKNLKMIAPLAMGALPSPTGRKVGTPEILSPSVLDFPSLKLSPVTPLTGEPFNRSPASSSEDAERAAISERGFFLHPSPRGAEPPRLLPLFPVTSPRMAAPSE

SEQ ID NO: 148854 - protein, 63 aa, Oryza sativa
  Clone ID: PAT_MRT4530_49244C.1.pep
DTEGKIAMMYDKNIRVSIGLQLMPDRQGRRTDIWYATSCPAISHALLARQHQRVIFQPYFRTT

SEQ ID NO: 148855 - protein, 64 aa, Oryza sativa
  Clone ID: PAT_MRT4530_49245C.1.pep
MRADLSTIQQTLTPEAAAALARAMDEAGRRRHGQTTPLHVAAALLAAPAGLLRQACARAASAAG

SEQ ID NO: 148856 - protein, 458 aa, Oryza sativa
  Clone ID: PAT_MRT4530_49246C.1.pep
MAQYHLSAQLRGHEDDVRGICICGDAGIATSSRDRTVRFWTQHPEKKHEYVLSKTLVGHSSFVGPLAWIPPSDRFPEGGLVSGGMDTLVLLWDLHKGEVVETMKGHTSQVTGLAVDNNGDIISSSMDCTIKVWALTGQPLLEMIGHTSLVYSVDAHSSGVIVSGSEDRSAKIWKDGICVQSIEHPGCIWGAKFLENGDIVTACSDGIVRIWTTDNNRFCSDEELAAFTDLISQYILSRKTVGGLKLSDLPGIEALQVPGNSDGQTLIVREGDNGVAYSWNSKELKWDKIGEVVDGPGDAAAAPGQFHDGVRYDFVFNVDIGDGEPMRKLPYNRSDDPYAVADKWLLKENLPLTYRQQVVEFILQNSGQNNFVPDPSFRDPYTGANAYVPGQSASSTVSAPKPTFKHIPKNGMLTFETAQFEGILKKLSEFNATLSSNLEQKELSLSEIELSRLAAIAK

SEQ ID NO: 148857 - protein, 187 aa, Oryza sativa
  Clone ID: PAT_MRT4530_49247C.1.pep
MTWTSARTARHDGMGPMSRPDVVTSLTNIPQGKMNFIPTSKNARALQRVISLAEASIWSWHLREARPTVVYLSDLKRAVETAEIIEKACDVSNIVLTEAPRERHMGYLQGVFKGFANFEVKNGLDFDGRNQELPLLSYQLRTLNLEDVLLMRVIVVGYGAAILELKYFYTDRGALLYLQVFITVNLI

SEQ ID NO: 148858 - protein, 87 aa, Oryza sativa
  Clone ID: PAT_MRT4530_49248C.1.pep
WRSDGCRRPPMVSLAAGSSGSSSLRWRRKRRRRRRSRKATRHAYDASSHGDLVLVVSLDSITKIGLPRETSTRPMDTPRAPPSIFSP

SEQ ID NO: 148859 - protein, 105 aa, Oryza sativa
  Clone ID: PAT_MRT4530_49249C.1.pep
SVDLELASQVAHRLAREARPTVVYLSDLKRAVETAEIIEKACDVSNIVLTESLRERHMGYLQGLTWDDTVNKSPGVFKGFANFEVKNGLYFDGRNQELPQSRSTL

SEQ ID NO: 148860 - protein, 84 aa, Oryza sativa
  Clone ID: PAT_MRT4530_4924C.1.pep
HTTCMQNDRGGRKESAKLAADDAEDDGDDYDERQQRQRYHQHQLHDKLIKDDRYEIDLLNLLQQISLAAPTPILSRTTRRNTQP

SEQ ID NO: 148861 - protein, 66 aa, Oryza sativa
  Clone ID: PAT_MRT4530_49250C.1.pep
FVSRVGCLKPGYFKVVLDSHAGLFGGFGRVHPTAEPFGADCFHDPRPYLFSVYSPSGSCVVYAPAE

SEQ ID NO: 148862 - protein, 99 aa, Oryza sativa
  Clone ID: PAT_MRT4530_49251C.1.pep
MARGWRVRGFGCRGRDELASIYARGYGCGGSHGSTWKLGVHAWAGQNWALFLGSKWALFVGWLYLDNGKYVVELGLGNERRVRIKWKKENKWLKFKDVF

SEQ ID NO: 148863 - protein, 75 aa, Oryza sativa
  Clone ID: PAT_MRT4530_49252C.1.pep
CRSHDHPLLPGVPLPMSSTWCLISTLRASCVCAYAPMRICVSVCMVLPLFDASCVLSMSVLLAVRTFCDRINQLS

SEQ ID NO: 148864 - protein, 175 aa, Oryza sativa
  unsure (1)..(175): unsure at all Xaa locations
  Clone ID: PAT_MRT4530_49253C.1.pep
ITEILAEAGFSDVXKNFLAVLXDNGRLKHIDXIAERFVDLXMAHKGEVKXLVRTVIPLPEKEEKALKETFQDILGKNXNLSLIXQKIDXTAXSGGLVXHFGQKLFHMXITTRARNSRSSLRQPLPISLPLRIARCTCFAPGGPSMSPTSSNGFDTIFVYKRATLCFILFCVPEAC

SEQ ID NO: 148865 - protein, 89 aa, Oryza sativa
  Clone ID: PAT_MRT4530_49254C.1.pep
MSYYGQQPPVGVPPQQGYPGKDGYPPPGYPPAGYPPAQGYPPAGYPPQQGYPPPYAQPPPQQQQHSSGPSFMEGCLAALCCCCLLDACF

SEQ ID NO: 148866 - protein, 88 aa, Oryza sativa
  Clone ID: PAT_MRT4530_49255C.1.pep
MEKSEKDGDKKTQADQNPDLFRINYLRGNLRSTEERSFSATNLFKKKKMEMEKSDKVAVNVKYDYNVKYLPIVLKPKTTQFVQIPKCQ

SEQ ID NO: 148867 - protein, 299 aa, Oryza sativa
  Clone ID: PAT_MRT4530_49256C.1.pep
MAFSEPPKPASQPSPPSSPMSERPPSGRSRRRAQEPGRFLGVRRRPWGRYAAEIRDPTTKERHWLGTFDTAQEAALAYDRAALSMKGAQARTNFVYTHAAYNYPPFLAPFHAPQYAAAAAAPSSVQYGGGVGAAPHIGSYGHHHHHHHHHGHGAASGASSVGECSTMPVMVPVDPHRSSMSSSLLDMDRNGHDFLFSGADDNSGYLSSVVPESCLRPRGGGAAADHQDMRRYSDADAYGMMGLREDVDDLAQMVAGFWGGGDAADQLGACGFPASGGAADMVASSQGSDSYSPFSFLSH

SEQ ID NO: 148868 - protein, 80 aa, Oryza sativa
  Clone ID: PAT_MRT4530_49257C.1.pep
LIITGRVYTGAGKPGFPPYACILPFCSGFAIGVRRLPQLLPDGMGPLWGPSAGCGGRAGAAPCQRLCPSLLFSFFFLFFF

SEQ ID NO: 148869 - protein, 284 aa, Oryza sativa
  Clone ID: PAT_MRT4530_49258C.1.pep
MSVVEHGTSAMVLPVPYMSVSGTSAAPEEEKDDPCSAGGRRGSLLTRQKEMRYDVRRIEPTESLKDTAARGAKPHGRAIRFLGSARRDYSLFVNIYFIFTNMSNTGDKEKETPVNTNGGNTASNSSGGPFLGLFDRRIPEEEEEEEKMSYYGQQPPVGVPPQQGYPGKDGYPPPGYPPAGYPPAQGYPPAGYPPQQGYPPPYAQPPPQQQQHSSGPSFMEGCNYRTLVSDLSTPTGAVAGASAAAAAAAAAHLGCPLLLLSPGRLLLRIEATGARELKRFVSWS

SEQ ID NO: 148870 - protein, 75 aa, Oryza sativa
  Clone ID: PAT_MRT4530_49259C.1.pep
MSYYGQQPPVGVPPQQGYPGKDGYPPPGYPPAGYPPAQGYPPAGYPPQQGYPPPYAQPPPQQQQHSSGPSFMEGW

SEQ ID NO: 148871 - protein, 95 aa, Oryza sativa
  Clone ID: PAT_MRT4530_4925C.1.pep
MAMEGHGGGGGGNNTMTTPASPGLPAAKWKGGRGDLHGAVACLGPDGLCQEMMTPKRRRRSYGEVNKERDRDNGERGLTTNGNASFSAADDEEEF

SEQ ID NO: 148872 - protein, 530 aa, Oryza sativa
  Clone ID: PAT_MRT4530_49260C.1.pep
MAGGVVVNNGGGKDYPGKLTMFVLFACIVAATGGLIFGYDIGISGGVTSMNPFLIKFFPSVYRKEQAAEKNQSNQYCKFDSPLLTMFTSSLYLAALVASFFASTVTRVAGRKWSMFGGGVTFLVGAALNGAAKNVLMLILGRVLLGVGVGFANQSVPLYLSEMAPARLRGMLNIGFQLMITIGILCANLINYGTAKIKGGWGWRVSLALAAVPAAIIAVGALFLPDTPNSLIDRGHTDAAKRMLRRVRGTDDIEEEYNDLVAASEESKLVAHPWRNILQRRYRPQLTMAIAIPLFQQLTGINVIMFYAPVLFKTLGFADDASLMSAVITGLVNVFATFVSIVTVDRLGRRKLFLQGGTQMLACQIVVGSLIGAKFGFSGVADIPKAYAAFVVLFICAYVAGFAWSWGPLGWLVPSEIFPLEIRSAGQSINVSVNMLFTFIIAQAFLPMLCRFKFILFFFFGAWVVIMTLFVAFFLPETKNVPIEEMVLVWKSHWYWGRFIRDEDVHVGADVEMPAAGNRNGKVDPAKLAN

SEQ ID NO: 148873 - protein, 211 aa, Oryza sativa
  Clone ID: PAT_MRT4530_49261C.1.pep
LLLLPLAWIGLDWWLAGDEDGGGEGAVLGAFHPGGAGRPLLRLPRPRGGGGGGGGGDHNHHQRRRLPEGAASQGGGGGGDADDVDGGGRGGGGDGRSRGRAAGRRRRGGGGGGEADGHADDAGLPELRRQQPPRSEEPALRFVQGSYLSTVDSWGGDAYAYLYNTTHAANACVEFITQLINFAHSISSTACITSSITCNTRIHIKLNIILM

SEQ ID NO: 148874 - protein, 323 aa, Oryza sativa
  Clone ID: PAT_MRT4530_49262C.1.pep
LLSTWRYEVLTRSRRQGSLPPRIRIQRDQRQRYVSPDSIRRHRRGLAMLISEVDIRRLVLVHNSIYLSLSGTPSIPEGCFRIKHAWIGLDWWLAGDEDGGGEGAVLGAFHPGGAGRPLLRLPRPRFVRLDRALRLAGTLAGGHAPHLCPVFSPPCSGGGGGGGGGDHNHHQRRRLPEGAASQGGGGGGDADDVDGGGRGGGGDGRSRGRAAGRRRRGGGGGGEADGHADDAGLPELRRQQPPRSEEPALRFVQGSYLSTVDSWGGDAYAYLYNTTHAANAPYAVYIFLSWQQERLPTMELACPPPPRASALDTTRGAPALSLR

SEQ ID NO: 148875 - protein, 372 aa, Oryza sativa
  Clone ID: PAT_MRT4530_49263C.1.pep
MASSISVMASAGRNRGVGFAKLQGEDFEYFMQTYSIILGRDSKREKVDLDISGGDLTISRHHAHIFYDFECKRFSLLVLGKCGCTVEGVLHLPGGSPIKLDSQDLLQIGHKKFYFLLPTRSIFGTSSNQHGPSASAAFQPANNGTAADEHNLTASAAAQPAHIGTAAPPPHIGTAQPGQIGIVTLPPAHIQNNAENENIAGIETQEEFMNQNKMPFGELDTCSSHHITIEPTLAPGGQPVNNLAIRPADNNKDQQEVLLKEEEYVLASIGIVISDLCGLKKMIPIEKLHSELVACYSATWPQRQVQMHLAPEAGSSAAGTECKPWLKLMYLLRKYPERFTVMNSSCDEEGRQHRCVCTLYGDGTVCVFLKRT

SEQ ID NO: 148876 - protein, 1009 aa, Oryza sativa
  Clone ID: PAT_MRT4530_49264C.1.pep
MASMEERVMEVLKELLVKVNTIEDIGKRLHLIDNKLAQQGERSAGADDVGACTQGDRSCGSGVFSANSTSTSAAAVADPDCYFWCVYVGNTTTSWWDEVERNRSWLLETPQLKAMELQEEAIVLTDELLDAVTGLELSEDSANLSLHALAGTSHTNIVQLRALSSNQGSLIKLQGIQSSSDLTTPQEATPEQVVKWTKGNDVWAIAVLEQSGGNPEDPTKEDDENEHKNAQAANAILSAFSGSEFNRVDGIESAKVIWDTLRNLHEGTDSASESKVEILKGQFERFVMLDGESPSDMYDRLSKIVNEIKRLGSKDMTDEVVVKKMVQAITPRNSTLVTIIRERPDYKTLTPHDLHGCILAHDMLEQESKEVIQYINQTSTTSIKKEDLALKAKEEEEESCKSKSKAEIDDEEMALFVKKFGKFMKQSGFAKGSSSKYSSNKSSGRHSARVCYVCKKPGHFIADCPHIKDCPHLKEDKKKLEKKEKHKHSKHDRYGQAHLGMIFGFDSESSSSDEEGVATFTVKPSSPPRLFNYSSDEDAPICLMAKETKVPSPLKSFNVDLVSDEEDDVEDEVMDEELFKSITKESLPHLSELLGRIEDQYATLERQEALLIREKERSHELKGSKALKEYLGYQRDNFNHEGLGACQAGKQIGAHHPVKNVMATTRPLELLHMELFGPIAYLSVGGNKYGLVIVDDFSRFTWVFFLHDKSETQALFKKFARRAQNEFDLKIKNIRSDYGKEFKNTCIESFLDEEGIKHEFSSPYSPQQNLKELMGLQYPRNKMRGEYNPFNCTSSRKYWRDNWFYLHDADTSPCLVVPEEQPPHSWCWTAKPVLTPTLKGFIDKIHNLREHGLTGYEVVCDFTCSWIRPLQACAHPTFEYTRAEDTTRIMRFGLSRTAVAKCVVQVVVDPPSAVDNIPTTVCDLLQTEKDAVVNINYVQHEVGRDQEGTAVEEAKSWPHSSGPGQSTRAREDAVSSANDLVVAFEAQLKKEHADNARLSEVVAGNDAQR

SEQ ID NO: 148877 - protein, 377 aa, Oryza sativa
  Clone ID: PAT_MRT4530_49265C.1.pep
MADGEDIQPLVCDNGTGMVKAGFAGDDAPRAVFPSIVGRPRHTGVMVGMGQKDAYVGDEAQSKRGILTLKYPIEHGIVSNWDDMEKIWHHTFYNELRVAPEEHPVLLTEAPLNPKANREKMTQIMFETFNVPAMYVAIQAVLSLYASGRTTGIVLDSGDGVSHTVPIYEGYALPHAILRLDLAGRDLTDSLMKILTERGYSFTTSAEREIVRDIKEKLAYVALDYEQELETAKNSSSIEKSYELPDGQVITIGSERFRCPEVLFQPSMIGMESAGIHETTYNSIMKCDVDIRKDLYGNVVLSGGTTMFPGIADRMSKEITALAPSSMKIKVVAPPERKYSVWIGGSILASLSTFQQMWISKDEYDESGPAIVHRKCF

SEQ ID NO: 148878 - protein, 244 aa, Oryza sativa
  Clone ID: PAT_MRT4530_49266C.1.pep
MAATTFSSSPSKVTTAKLGGGVTRSSSPYTQLTFCSRHHFQKAATTAAAFHHKPPPAELSLLLSPARSKHARTCPAADNDRAAPAAQEATNTPPPPAAPSANGSPPQEPPKRAPLTARERLRAARVLGKYAEPGGSSPKGKASAASAAAGAAGKKPEFGSRVLDALRETDGKAGKKRSSRLPEAPSNMFDDSKRGLPKEGWTFEALPFGTDVIVIAASFTLITVVMFGTTYLVWKLGAIHFNEF

SEQ ID NO: 148879 - protein, 105 aa, Oryza sativa
  Clone ID: PAT_MRT4530_49267C.1.pep
LNFGSFARNSIGIYALVCVRAPCLVLLVSTELAPVFCPGLVSLVVEFLLLIRAGWARPFLLTCSGGCSVILERPDIINECIKLKKEKQILEIKKKSVTPKAFKNQ

SEQ ID NO: 148880 - protein, 82 aa, Oryza sativa
  Clone ID: PAT_MRT4530_49268C.1.pep
NIVQAIAQQFQLQQFGDLDFDANLAQAQALLAFNAPSRYGIHPRSDGAASTMATLGECLVMSFCSIVVRKLQISSYIIICCM

SEQ ID NO: 148881 - protein, 448 aa, Oryza sativa
  Clone ID: PAT_MRT4530_49269C.1.pep
MEMTTTTEKCISSSSSVHGGNNRREEYPKEGADDDVEAGVLGRDGEAAATTTRQRLVSLDVFRGITVALMILVDDVGGIVPAISHSPWDGVTLADFVFPFFLFIVGVSLAFAYKKVPDKMLATKKAMLRAVKLFIVGLILQGGFFHGIHELTYGVDIRKIRLMGVLQRIAIAYLVVALCEIWLRRVSSGGNIGSGSMLITRYHHQMFVGLVLVVTYLVILYGLHVPDWEYEVTSPDSTVKHFLVKCGVKGDTGPGCNAVGMIDRSVLGIQHLYAHPVYLKTEQCSMASPRNGPLPPNAPSWCEAPFDPEGLLSSLMAIVTCLIGLQIGHVIVHFKKHNERIKRWSILSLCLLTLGFSLHLFGLHMNKSLYSLSYTCVTTGTAGLFFVAIYLLVDVKGYKRPVLPMEWMGKHALMIFVLVACNVIPVLVQGFYWKEPSNNLLKLIGIGG

SEQ ID NO: 148882 - protein, 175 aa, Oryza sativa
  unsure (1)..(175): unsure at all Xaa locations
  Clone ID: PAT_MRT4530_4926C.1.pep
PKAKPPGKKPEKKKGNPGRGEKTPLGPKIPGKTPQAQKGPPPPPEKTPPPRSSPHPPPKKGGANFPLTRGGTPRSPGTPPQPNGAGPLTPAKKKGPPPMGRPTLDPLTKKTGKPPPQENPPGNPNPNPPKRGLEWGPLAGGPPQNPKXPGAPNGGPHSPPKLGGPFPTPKRAWGG

SEQ ID NO: 148883 - protein, 80 aa, Oryza sativa
  Clone ID: PAT_MRT4530_49270C.1.pep
MNKKGEYPCANKKIETRKESSNPLKSSQKGLVTRKSSNEEGEQQSSLGRMNKDEQKGRIPMREEDIDKEAIQSLVTVWGG

SEQ ID NO: 148884 - protein, 131 aa, Oryza sativa
  unsure (1)..(131): unsure at all Xaa locations
  Clone ID: PAT_MRT4530_49271C.1.pep
KIHRFRQGDVIAXPDDIVNWCYNDGXEPADAIYVTDLNSGANQLDPRQRDFLVAGNKRSPQAYRREVEERTQIIFSGFSSELLSEALGVSSQVGRLLPCQIDQRGEIVRVEHXGISLLQPYASFQEQEQXQ

SEQ ID NO: 148885 - protein, 782 aa, Oryza sativa
  Clone ID: PAT_MRT4530_49272C.1.pep
MVFLKVDMSWNVLISPSELSPKGLLLRKAVIVSLLEEIANRKASKDHGYYIAVSELKAISEGKVRELTGDVLFPVTFTCITQKPTKGEILVGSVDKILKHGVFLKSGPIESIFLSEKTLSDYKYIGGENPMFMNDHSKLEKDTAVRFKFDVMMMMIRPVAVMLAVDLTLEGEASIDRNRLGLTSRLNIGGFGHAFYKYPLNFRKNSNSPNDPSFATTFVFTITTWRDQPQEAGSDGIAFVLSSTNKLINHSLGGQYLGLFNASNTSQNILAIELDTFMNPDLNDMDDNHVGIDVNSLISINSHTAGFYTSDGGFQLLRLANGRSPILQLWVDYDGKAHQLNVTLGLPYSPKPEYPLLSSIVNLSSLLPSSSYIGFSASVNSPKTRHFILGWSFKENGRVPPLPSVPVTDPETYGWGGNFFAPPPPPQLNTHQVHKHSLQILLPIVMTSVILLLLVAFLGWRKKAGPQEDWEMKCRPPSFIYKDLYNATSGFSDKMLLGKGGFGKVYRGFLPASKRNVAIKRISPESKQGMKEFMSEVAILGNVRHRSLSVTWLSQEQARAPLGWSQRFRTIKGVACGLAYLHEEWERVIIHRDIKSSNVLLDEEMNGRLGDFGLARLHDHRVDAYTTHVAGTYGYIAPELARLGKSTKGTDVFAFGVFMMEAARGNRPIEVNSCGEPQALADHVLNAWQRSSIINSIDPSLEDHVAEEVVLVLKLGLLCSHSSPKVRPSMRLVMQYLEREATLQDFAFSFFSINEANNEVYGQHVVSNPSVATTITTLSGGR

SEQ ID NO: 148886 - protein, 175 aa, Oryza sativa
  Clone ID: PAT_MRT4530_49273C.1.pep
MVFLKVEMSLNVLISPSQLSPQGLLLRKAVIVRLLEDIANRKASKDHGYYIAVSELKAISEGKVRELTGDVLFPVTFTCITQKPMKGEVLVGSVDKILKHGIFLKSGPIESIFLSEKTMSDFKYIGGENAVFMNEHSKLEKDTVVRFKVMGFRWMEADRQFQLLATLAGDYLGPL

SEQ ID NO: 148887 - protein, 98 aa, Oryza sativa
  unsure (1)..(98): unsure at all Xaa locations
  Clone ID: PAT_MRT4530_49274C.1.pep
MAYCPACLRTTMPSEQVEAAFKAIELDGESDVSKLKPALAACTVQRTVTDVFINGKHIGDWNDTSPXHTDGNLVPVVTEAGAISSPAMTTVTAQVPEG

SEQ ID NO: 148888 - protein, 59 aa, Oryza sativa
  unsure (1)..(59): unsure at all Xaa locations
  Clone ID: PAT_MRT4530_49275C.1.pep
LISYLYHYIQRLTHAKIINHKFSYKFIKSTMXKKPYIFRFKHLNYTATLLTHETHLFFL

SEQ ID NO: 148889 - protein, 56 aa, Oryza sativa
  Clone ID: PAT_MRT4530_49276C.1.pep
VVTVLLVQSSYRCLTYKSVLCWLEYTPSFHDDPDVFPCIIGCSRFIYLCTCRMQPV

SEQ ID NO: 148890 - protein, 122 aa, Oryza sativa
  Clone ID: PAT_MRT4530_49277C.1.pep
MDVDSDPAAAGKPTQMDLEDQTDAKGKGKSEELADSIGSLSIGPERTNFKKKPVIIIVIGMAGTGKTTFMHRLVCHTQASNMRGYVLNLDPAVMTLPFGANIDIRDTVRYKEVMKEYGLAPM

SEQ ID NO: 148891 - protein, 96 aa, Oryza sativa
  Clone ID: PAT_MRT4530_49278C.1.pep
KFLKEAKAGNSPELPQDVLMEIFALLEVPDLVRAGSVCSSWRASYISLCKLGGYRQAQTPCLLYTSESAGENVACLYSLAEKRAYKLTMPDPPIRS

SEQ ID NO: 148892 - protein, 411 aa, Oryza sativa
  Clone ID: PAT_MRT4530_49279C.1.pep
MGQLKSTDAKGKGKSEELADSIGSLSIGPERTNFKKKPVIIIVIGMAVATNLSYNELLLSNFGIGSSGLKGLGLCDVGTGKTTFMHRLVCHTQASNMRGYVLNLDPAVMTLPFGANIDIRDTVRYKEVMKEYGLGPNGGILTSLNLFSTKFDEVISVIERRADQLDYVLVDTPGQIEIFTWSASGAIITEAFASTFPTVVAYVVDTPRSTSPVTFMSNMLYACSILYKTRLPMILTFNKVDVAKHEFALEWMEDFEAFQTALDSDSSYSSTFTRSLSLVLDEFYKNLRSVGVSAVSGAGVNSFFEAIEASAKEYMENYRADLDKRIAEKERLEAERRKENMERLQRDMENSKGQTVVLSTGLKDKNRATDMMDDADEEEEEAALEDFRISEDDEDEDEDEGEDEEVEHFGL

SEQ ID NO: 148893 - protein, 397 aa, Oryza sativa
  Clone ID: PAT_MRT4530_4927C.1.pep
MDALWRDLVGDVPRLVHKRLPCLVDRRRMARVCHDWRVAVAPQPQPPPGTRPLPSILVPRADDGHCFACALAGCATHAFGHPLPADALAARYFGAYDGGWVFVAFGQILDYALLSLRNGTRFHFPDTGTDMVAATLSSPPGDERCVAAAISHSCMMNNPRIHAFGILRHRGVEEATHDPAEFFTGHALEDVVHHKKAFHFLTREENLHVFSVPDFHEDDDGNLVIPPMEVRRFSRGGRDYGGCFAVRYLVESGKSLLMVVRLLPHPPLFPPTTWAFKVFEMVETPINNDGAPYDWKELESLGGRVLFVARGCSRSYDAGDYPGDEFNEGIYFLDDGRLYDEAFQILNPFAQYREYPCRDHGKWLPPVAPPAAVTGRVDKFLPEQGPSHYTPPVWILP

SEQ ID NO: 148894 - protein, 64 aa, Oryza sativa
  unsure (1)..(64): unsure at all Xaa locations
  Clone ID: PAT_MRT4530_49280C.1.pep
SVVLXRNFSLPLCSEYNMLSNLCSEFDTMEIQYVLSFIYDALKFDLLNSYLNLVAVRIDIGTNI

SEQ ID NO: 148895 - protein, 123 aa, Oryza sativa
  Clone ID: PAT_MRT4530_49281C.1.pep
FALNSFLDFLTPLKKKKKPLVVEQFIIHGVSEQQDRSCILRLLPPRHRRRRRRRVLRRREQHVQRQLRDRRRRLRGVVQGRGVHRRVLLHRGRQPWLPRLHLHPRLLLAGAVDEEDDGAQLIS

SEQ ID NO: 148896 - protein, 42 aa, Oryza sativa
  Clone ID: PAT_MRT4530_49282C.1.pep
MWRSSVGSLSAPRSPPGFLSAPRLPAFDPVARRAATLDAVMG

SEQ ID NO: 148897 - protein, 201 aa, Oryza sativa
  Clone ID: PAT_MRT4530_49283C.1.pep
MENLRPSILSSWAAATPDMEVRLDLVGSAVLGLPAPRLNLCLPAPAAEARDGEKELKICSPWAVGVIVGRSRIERVANGQTLNPSMLTSLKALSNNRWVRDLRGALSNEAIAQFFQLWDEIQEVVLNREDDTIRWKFSADGQLSASSAYELFYMARKICPFSELIWHIKAPSWVDIFDGVFALTCWFLWKERNARVFEQKF

SEQ ID NO: 148898 - protein, 189 aa, Oryza sativa
  Clone ID: PAT_MRT4530_49284C.1.pep
MPTPGSRPVDHSDLSPPKNSPPGDRDTPTPGSRPVDRSDLSPPKNSSLGDRDTSTPGSRPVDHSDLSPPKNSSSGDRDTPTPGSRPVDRSDLSPPENSSSGDRDTPTPGSQPVDRSDLSPPQNSSSGDRDTPTPGSRPVDRSDLSPPKNSSPGKSDIRAVKLDFQGFVADFAPSRLSENGCWSSTRNME

SEQ ID NO: 148899 - protein, 89 aa, Oryza sativa
  unsure (1)..(89): unsure at all Xaa locations
  Clone ID: PAT_MRT4530_49285C.1.pep
YTTXXXXXXXKXXXSTXHLANGXVQXLFSRVVRKXLYXSXLPQXGHRXLLSRSQXLDXXXXGXLXPXYXCXPXXNXXYLYXYHXHRFXG

SEQ ID NO: 148900 - protein, 122 aa, Oryza sativa
  Clone ID: PAT_MRT4530_49286C.1.pep
TPNGQMSSTLGVLPRGPFPSGGRLVPWLWCPLLKKCLAVNRPQLQSAQGMVSASTPSSLCGGALRCGSSSLSGSRWRRCAPLRVLARCHRPSPAALWGGSSSLSVASVSMDLLCLWIVVPPM

SEQ ID NO: 148901 - protein, 542 aa, Oryza sativa
  Clone ID: PAT_MRT4530_49287C.1.pep
MGRVVDPLALFKRPSPSAGEFCKWVDWELPCYLTSFLTVVILGIRLNAKPNFTLQTRPHQKERQQATATEQQELVSMEAQTERSARLSRHLQDCHNVPIPVAEVVPGINSSRTTCSRASSPAASRCVCKAWRAVIDTRRLLRADLLPLSLAGIYINFHEMHRSVFLSRPSSTRPAISGMFTDYTPNDNLVEDHCNGLLLLKSGVANPATRQWVPSPPAPPQPVWMKDFYRFDSYLVFDPTISTHYEIFKIPRVPSIGFRVLDPMLKSLQRPPSLCVLLCVLQVFSSRTRQWGERLFVRDGAAACTVTDMALAFPYDHHNAVYWHGTLYVHCQGDFIMISLSNNKHQVLELPMNTKVCQYINHFVGRSMRGVHYALIDIEHRLRVWFLNELYGQMTWELKHDNDLSFLLRCQESCIQNDGPWTLHYHNYFGYPSQNDMDNKDVVVRVNKFEWDSDNDDILDTANPNEGGCHGYLSILGFHPYKEVIFLNQNRETGLAYHYHFNSSKVQNLGSTFPKPYDDLYIQGMCASFIYTPCWMENYESM

SEQ ID NO: 148902 - protein, 492 aa, Oryza sativa
  Clone ID: PAT_MRT4530_49288C.1.pep
MDERGVGDEPVLMGEVQQVGESNPTLSEASQRTGFTFNSVGHHAMGESSNCNLEGHNVVFRSDREKSEQVTQSNIKATNQNAPCEQVPKVGMTFQSEDDAYNFYNSYARRVGFSVRKCHVNYRADGTLSSKYMVCSNEGGDENVPFLQMDCNNFIGRERKKYLETQDAQTLLEYLDNKQAEDPSFFYSVQLDKEDGRICNFFWTDGQAIADYACFGDVLSIDTTFQTNKSEMPFTPIIGANHHRQTIIFGAALLFDESADSFVWLFRNFLKAMSGKQPETIFTDQCAAMAKAIMIVFLNSSHCLCLWHIYQNAAKHLSHVISNNPNFLHDFKRCVYEERSVAHFNFNWQKLISDYHLEDNSWIQNLYDLREKWATIQKVVTVDHSKDETRVTFNSVDMNISCSCRKYTCLGEETTQPSNINIAGASQPTVQEPLDSNIVMPFGDISRMFVPPIRGEFTNLLFQAHHETTAAASASWRLEFENQDPNSSTSYD

SEQ ID NO: 148903 - protein, 61 aa, Oryza sativa
  Clone ID: PAT_MRT4530_49289C.1.pep
CFTYLLLIFIPNFAALFTTVYSMRPVPTGAVFRQYPGKGKVFYDDPKRPNPDLLARKTCKA

SEQ ID NO: 148904 - protein, 126 aa, Oryza sativa
  Clone ID: PAT_MRT4530_4928C.1.pep
DQKIQAPGLFLSIINVLSGFLGDFFQWNLHDGNTAIEHSFTTGVNQAGKGRTNTSHGSKTLFSTVNSFQSYSYLCMSMATFSGDSAHYHVPAKNTMMLLLSSIKDHGRENTVLFVCLASYTSNMII

SEQ ID NO: 148905 - protein, 623 aa, Oryza sativa
  Clone ID: PAT_MRT4530_49290C.1.pep
MSSDDEECFYDYEEEEEEEEEPGWDDGGGGDTMLVEEEAALPERPVDCWVSKAIPTILTSLKNPIHADVMHKNIHRPLQKSLFRLHSLQLVLQQLVLVTNYIVFLDMLDLPALYVCTQQQDLSMVMNLLYIKQHQARALLIHHRWKMESILDHFDRKGRDRMLRETGVVIQQQAEEKNGGGMAMAASPSPPPRPRSSVTCYVCFEDVSSDAVSTMDCGHCFCNDCWTEHFFACVNGGQKQIRCMAVGCAAVCDEDVAQRLLGGRYPGAARRLRGALLASYVEDNAAARWCPSAPHCGRAVRVDGGGGRWCCEVSCPCGASFCFGCAAPAHSPCPCAMWERWEAKCRGESMNVDWILANTKSCPKCSKPIEKNGGCNHVRCKCGQCLCWLCGAATGLAHNWTSIDGHSCNRYDDAAEKRKVDGARRKVLRYAHYYERYKAHGDSRRAEAEKLGPAIEARARRLREDPDPATAPASGDAAEALAAAHRALLASRDVLSRSYAFAYHMFGGEERTLKAAAPESEVATAQALFEDHQEMAERHVEKLSGLLAADAPPAPATAGDAALRRAKQDAVALTAVVEKHCGEMHKCIQDELLPMLVEPMSIAAYRRDGPIKAKDFPTCGGAS

SEQ ID NO: 148906 - protein, 83 aa, Oryza sativa
  Clone ID: PAT_MRT4530_49291C.1.pep
FTPLPSPSRLVAARGFALHDLPSALAQPASAYPACCRLAKSLRHHCFPDVAFVSIASPTFDFICLAFVRQINVVNGYFLGIYG

SEQ ID NO: 148907 - protein, 58 aa, Oryza sativa
  Clone ID: PAT_MRT4530_49292C.1.pep
MAVMGDVIATPLLPHGSLAGLSVVRVWEGIQTTARWSGWLTVGAKRQRGSGDRPLGAA

SEQ ID NO: 148908 - protein, 781 aa, Oryza sativa
  Clone ID: PAT_MRT4530_49293C.1.pep
MSSTTTTTLSLQALQQHGGDPENDADDGGVALPGGGHEVLRPVIAAACTRVARSRPSWRRSACAGWVWRASGAPRGGVGRWRRVMRRRRRRGGEASQVRFLCAGCVDGGRGRGMSPTTRNSGPGSITPSTRPRDPPERRRRRPTAAQSRGANATSSAETRSRRQSSYMLDCVTAARLGGWHRDTPSDSEWWRGWVVVSGCSDEIGDGDVLLLAAAGGRRRAEVEPDLGSYSIIAVDEAHERTLSTDLNDDAVPEIFALGVLNSRGGGSGELREGAGVVGPTSISSHPPPPSGAVGAVSRDAGSAFPAAAGSVSHVTTASLSLGAAPSTTRRGRERSLDPGVGGGGDGATPTEVWRQWSSPNTGIPPNTLPPPLSDSPMAMAHRIVSLAGLEEVVRTRAGRQGVAVDVVDSVRNAPRMLSVLMALEVDYEWVVYENNIHRLRAVATLCRVLEALDIFVFPRLRLEPTNARGISNLRYRANRIRKMAVKAGGSLRAPAITLGNHLRNFTTQLRSEARTAEWVEARLPRLRQHVQNVAALPADFTAPPDPDIECMPPTTDEVPAGFESEDFVVIVDGVGGLILSLPALLIGACAAAAVAAAGDGCRAGCSLAIAAYYFSEGSNLTFIATIFAIGGGGYQALLPYNPAITNPDYVVTGDRVFVFPCSCLGLPAAPASTFLAGAIPYPLPLPRGVGGDTYDAVAVNFANLTTAARLEATRAGSPAMDGSMSPSAALAAWGGRYNPGMGGVSGKGIVLIPVKDPNGSYHPLQSGVGIILLFCELLCI

SEQ ID NO: 148909 - protein, 593 aa, Oryza sativa
  Clone ID: PAT_MRT4530_49294C.1.pep
MFSLPALLIGACAFAAAAVAASGDGCRAGCSLAIAAYYFSEGSNLTFIATIFAIGGGGYQALLPYNPAITNPDYVVTGDRVLVPFPCSCLGLPAAPASTFLAGAIPYPLPLPRGGGDTYDAVAANYADLTTAAWLEATNAYPPGRIPGGDGRVNVTINCSCGDERVSPRYGLFLTYPLWDGETLESVAAQYGFSSPAEMELIRRYNPGMGGVSGKGIVFIPVKDPNGSYHPLKSGVGIVLLFCELLCIYAKVAKVQEGHIASISRRNQPPCCYYLCDDASQAEGIKVERSIEFSYEEIFNATQGFSMEHKIGQGGFGSVYYAELRGEKTAIKKMGMQATQEFLAELKVLTHVHHLNLVRLIGYCVENCLFLVYEFIDNGNLSQHLQRTGYAPLSWATRVQIALDSARGLEYLHEHVVPVYVHRDIKSANILLDKDFRAKIADFGLAKLTEVGSMSQSLSTRVAGTFGYMPPEARYGEVSPNVGVYAFGVVLYELLSAKQAIVRSSESVSESKGLVFLFEEALSAPNPTEALDELIDPSLQGDYPVDSALKIASLAKSCTHEEPGMRPTMRSVVVALMALTANTDLRDMDYHPF

SEQ ID NO: 148910 - protein, 649 aa, Oryza sativa
  Clone ID: PAT_MRT4530_49295C.1.pep
MESATPSKRAKTAAGVATPQKMGKAAAAAALADQFLTPEKPTPKVAAAAAAAEQIWTPEKPKQPSAAERRARSSGGVAFSVKGVRRAALELRRRSERGAASPAAAAAAAEDELEAVERQLGVGPAPVRSPVKRTAKLPESYEMLCEFFNCFESSTRLLRMKGSKASFPNICASIQHLSERRFTYSHLAQLKYIMPEVIVINKILLRDETTCCMKPDLQVNLLVDAVEGVAKQKGETGYSALRRIFRQRLVDYFRDHPEGHDIPEHELPHPFGPTRSSAPQAIQEDIPKTVSALPLSSATDRQPVAMSHMPNSFKRMKSLLGSPVSGSVSLVRESEGQEKSVEGVAFQSGYDTPPLKMAKRSARTKLFMTPTKDASSMDEKKQSTSASTLDGDDELLSFLPKSLLQSVKDKENRALVEKQTGFADHIKREKLIASLPSIFDIIFLIYQSRQRTVMTKQELIHKIIASNPKIVDRGEVEDQLKLLEEIIPDWISEKTARTVPILCVPGLVCRPIVPGQPSVPVGRPRHGPVVGPGQHGPNTSRAVPCLGGAKKLCRWRRRSTGSAAACGLAAARGLGGGVRGRQRGGWPTVRGLGGDAGAGRRAAAQGLAGSARPGGGAGAGRRRAGSAAARGLGGDAGAGRLAAARGLAG

SEQ ID NO: 148911 - protein, 602 aa, Oryza sativa
  Clone ID: PAT_MRT4530_49296C.1.pep
MQDALLGRRCQRRAGAGSQRRWDSGRARIGSPLRARDFETAAGSGDGGERRRRGRGAAALERWRCWEWQQPDSLAAAASALDELDVSSKTLLGLTSPCTTGGLTTEWRIGVLYMLPMINIALMSSSSCHPHNPTTLPLPEPDSSKSPEPTSVLYNRSSPSTSLGSCSSKPPEDPPPPIAADDDCDWDAVVDMHMHMLAPAPAPDSSFLRWIMDTGYADADTFPDHPSFDSDLLQLPMPMPSDHPPQPLVDDLLDAARLLDAGDSTSAREILARLNHRLPSLPSPPGHAHPPLLRAAALLRDALLPPTALPVSSTPLDVPLKLAAHKALADASPTVQFTTFTSTQAFLDALGSARRLHLLDFDVGFGAHWPPLMQELAHHWRRAAGPPPNLKVTALVSPGSSHPLELHLTNESLTRFAAELGIPFEFTALVFDPLSSASPPLGLSAAPDEAVAVHLTAGSGAFSPAPAHLRVVKELRPAVVVCVDHGCERGALNLLQSCAALLESLDAAGASPDVVSKVEQFVLRPRVERLAVGGGDKLPPPLQSMLASAGFAALQVSNAAEAQAECLLRRTASHGFHVEKRQAALALWWQRSELVSVSAWRC

SEQ ID NO: 148912 - protein, 125 aa, Oryza sativa
  Clone ID: PAT_MRT4530_49297C.1.pep
MEEEAEAAAPTSWVVKAGATLLTVNSGIAIYRSGARGDAGAVAFVVASYAALLLLFACLRAYERAAPGAPARAPLRRAVWAATALLTTMFAWKVAALMPWPVAAVVWGLSAATVVGGFVALFVRA

SEQ ID NO: 148913 - protein, 159 aa, Oryza sativa
  unsure (1)..(159): unsure at all Xaa locations
  Clone ID: PAT_MRT4530_49298C.1.pep
APRPPRRPATSSSRRCRRSRRRRRRRRLRGRRRQRPRRRRPTKRGRLXRRRRRRSRRRRRRRRAGCVRRPCARRRRGSRRGRRRGSRRRLRRRRRRRRRWCSSPCSATSPPCSGRCRPRSGSAPADDDLYPPTHRRRRRSSTFGRKLWGSMVRSIHFLG

SEQ ID NO: 148914 - protein, 141 aa, Oryza sativa
  Clone ID: PAT_MRT4530_49299C.1.pep
MPYTDIDFSYVSCAAYCAPFPTKILDPNASTSFAAPSKSKGLAAVARGGFLGRRSLPINKSSIAKTNSIREPSSVDVLLTTETLTLLSIPAPLALGNLVQSVLLTPIAPLEPTPEDIAVTAARAMAEWGCASTSSWSEADS

SEQ ID NO: 148915 - protein, 92 aa, Oryza sativa
  Clone ID: PAT_MRT4530_4929C.1.pep
LTPMQPYFILCAEFCSQSDSHIQIENRKPCAHCTHLMQNQTFYKWIPDPQQKPKKQTFSLVIMKSLQEWSEREKKIKSRPESYAGKLVNQTW

SEQ ID NO: 148916 - protein, 91 aa, Oryza sativa
  Clone ID: PAT_MRT4530_492C.1.pep
MATTNWIFKNGSEAKNGLAFTATTRFSRGSTLVINGEDRCHHVRNYSPAISALGSAISIGWSKHNPSAQCLRTWPPSSSCSGATHHRLFLE

SEQ ID NO: 148917 - protein, 257 aa, Oryza sativa
  Clone ID: PAT_MRT4530_49300C.1.pep
MAGGGDDLKMLGVYVSPFPLRVKLALSFKGLSFEYVEEDLHNKSDLLVSSNPVHKRTPVVIHNGKPISESMVIVQYLDEAFPGAGAALLPSDPLDRAVARFWASYVDDKVIRMITVHQFSHASFSDDFGADRMMQLFSAWKMVFKGKTEEEKVEGRKQTFAVAETLEGALRECSKGKPFFGGDAVGYVDVALGGFVPWVHAMEELFGLKQFDAAKTPLLAAWLERVGELEAYKAVMPDAGMMIEFKKKQAQEAAAEA

SEQ ID NO: 148918 - protein, 68 aa, Oryza sativa
  unsure (1)..(68): unsure at all Xaa locations
  Clone ID: PAT_MRT4530_49301C.1.pep
ACSPGSSXXTTXVXSSXXTRSXHXTRXXLPPXARHXXGVKLAPSSSSSPSAXRSWCSASGLLCFCVSP

SEQ ID NO: 148919 - protein, 140 aa, Oryza sativa
  unsure (1)..(140): unsure at all Xaa locations
  Clone ID: PAT_MRT4530_49302C.1.pep
MEKFEDDVNQVDGLRLSKNDQTYHGPIMHSHAKKIQLEVNSLFAQLNPNFNENFILPKYSTFVLLRFTSEDIITTPRRMGYVEDDKSYTEQELAHALPAAVYANKKLVYATKAQHPRLVRPSQSSYGLHXAYMVGKRGMS

SEQ ID NO: 148920 - protein, 67 aa, Oryza sativa
  Clone ID: PAT_MRT4530_49303C.1.pep
MTIVMVGMVGNTLQPSLGANPHRPEETLHPAAMREVRSNPLVGPNLGPAQPAHGLAGGLLCYSSPDF

SEQ ID NO: 148921 - protein, 179 aa, Oryza sativa
  unsure (1)..(179): unsure at all Xaa locations
  Clone ID: PAT_MRT4530_49304C.1.pep
MTSSTVAGXDGDLAGARVVGCEFGGYVHVEDDETNPAVLTTTSTDDRRRPATRGWRRRLGLRGGGGLRRPAAKERWQPGFSTSWKSQRRRRQATATAEAAARCGWRMASGGGELGGGTAALGVTREDGRGGKRKRRTRGSYLXPWIEEIGLLPQGIDPGNQKLGFEDKLENEFDSGKIL

SEQ ID NO: 148922 - protein, 62 aa, Oryza sativa
  unsure (1)..(62): unsure at all Xaa locations
  Clone ID: PAT_MRT4530_49305C.1.pep
MSDKCGNWDXADKSQCVKKGTSYGVRIAEAEKSHFEEVAAGEENGGCKCGTSCSCTDCTCGQ

SEQ ID NO: 148923 - protein, 80 aa, Oryza sativa
  Clone ID: PAT_MRT4530_49306C.1.pep
AKNKKKRFVRKIKLKCKLNAYFWFFDQIIICFASAADVNNVIIIIKRHFWELDHVCCFLLVRLSITLYSNLQRLETLHII

SEQ ID NO: 148924 - protein, 59 aa, Oryza sativa
  Clone ID: PAT_MRT4530_49307C.1.pep
NLGGDRPEREVARVQPAADKLGELGFRYKYGMEEILDGSVGCAARLGYIDAAKLRPQEG

SEQ ID NO: 148925 - protein, 152 aa, Oryza sativa
  Clone ID: PAT_MRT4530_49308C.1.pep
MSTPARKRLMRDFKRLQQDPPAGISGAPHDNNIMLWNAVIFGPDDTPWDGGTFKLTLQFTEDYPNKPPTVRFVSRMFHPNIYADGSICLDILQNQWSPIYDVAAILTSIQSLLCDPNPNSPANSEAARLFSENKREYNRKVREIVEQSWTAD

SEQ ID NO: 148926 - protein, 176 aa, Oryza sativa
  Clone ID: PAT_MRT4530_49309C.1.pep
MSTPARKRLMRDFKRLQQDPPAGISGAPHDNNIMLWNAVIFGPDDTPWDGGFSLPVCQHGNLRSRLTVNSYVSVGTFKLTLQFTEDYPNKPPTVRFVSRMFHPNIYADGSICLDILQNQWSPIYDVAAILTSIQSLLCDPNPNSPANSEAARLFSENKREYNRKVREIVEQSWTAD

SEQ ID NO: 148927 - protein, 75 aa, Oryza sativa
  Clone ID: PAT_MRT4530_4930C.1.pep
MQSLARHSLRALLNLLLLLLLTVVVLAASMYIPLQLPWQLIDLNEQDVYLYIPDRNGACVVAWQQPPLQTLFGSP

SEQ ID NO: 148928 - protein, 161 aa, Oryza sativa
  Clone ID: PAT_MRT4530_49310C.1.pep
IHPEGKRSMLKLARRMTDNFCAGVSTSSTREWSKLVGLTGNIGEDVHVMARKSVDEPGTPPGVVLSAATSVWMPVMPERLFNFLHNKGLRAEWDILSNGGPMQEVTSIAKGQQNGNTVCLLKASPTKDKQNSMLILQETCADASGSMVVYAPVDIPAMHLV

SEQ ID NO: 148929 - protein, 190 aa, Oryza sativa
  Clone ID: PAT_MRT4530_49311C.1.pep
MDFSGGGGGGGGATLSEMYQSARRLLLSARDGVARVERLASAPTSSSYSSAPLVGGGGGAGDSAAAEEVRREVAQIQGLCAQMDRLWRSIPAKGQRDLWKRQVEQLSEEVDSLKETLDRHSLRQKKRVLEAKERAELFERANGESSHVLRIFDDEAQAMQSARSSSRMLDEAYETGVAILHKYADQRDRL

SEQ ID NO: 148930 - protein, 851 aa, Oryza sativa
  Clone ID: PAT_MRT4530_49312C.1.pep
MQFPFSGAGPGVFTSSPALSLALADAVAGRNSGGGGKMVTAAHGGVGGGGGGGRAKARDALEVENEMSRSGSDHLDVVSCGDAGGGGGDDDDDEDAEHGNPPKRKKRYHRHTPQQIQELEAMFKECPHPDEKQRAELSKRLGLEPRQVKFWFQNRRTQMKMQLERHENSLLKQENDKLRSENLSIREATSNAVCVGCGGPAMLGEVSLEEHHLRVENARLKDELSRVCALAAKFLGKSISVMAPPQMHQPHPVPGSSLELAVGGIGSMPSATMPISTITDFAGAMSSSMGTVITPMKSEAEPSAMAGIDKSLFLELAMSAMDELVKMAQMGDPLWIPGASVPSSPAKESLNFEEYLNTFPPCIGVKPEGYVSEASRESGIVIIDDGAALVETLMDEFEFLRQRRWSDMFSCMIAKASTTEEISTGVAGSRNGALLLMQAELQVLSPLVPIREVKFLRFSKQLADGVWAVVDVSADELMRDQGITSASSTANMNCRRLPSGCVLQDTPNGFVKYLVQISVFSEVYNLSIDQFLDLPPAFMVTWVEHTEYDEASVHPLYRPLLRSGLALGAGRWIATLQRQCECLALLMSSIALPENDSSAIHPEGKRSMLKLARRMTDNFCAGVSTSSTREWSKLVGLTGNIGEDVHVMARKSVDEPGTPPGVVLSAATSVWMPVMPERLFNFLHNKGLRAEWDILSNGGPMQEVTSIAKGQQNGNTVCLLKASSSVPLTKNFTVQPTKDKQNSMLILQETCADASGSMVVYAPVDIPAMHLVMSGGDSSCVALLPSGFAILPAGPSIGADHKMGGSLLTVAFQILANSQPSAKLTVESVETVSNLISCTIKKIKTALHCDV

SEQ ID NO: 148931 - protein, 204 aa, Oryza sativa
  Clone ID: PAT_MRT4530_49313C.1.pep
GAAAAGAAGVVDHRAPEAPRLAGSPRRRGERRPPRVGPRRRAPLPPRPPPPRPPPRRHLPVRPRTAGEEPARLQDLPLPQEQAGALPLHLAPQEAAAAGARHRRLSAMAEPSNNGVAGSWRKEMAGEDDGDGGAVPRRRARRRDGFHRGGSSHEWVWERILRTGWSQQVMEILGCEEDCQVVGVGASPLRVAHEDQLEPAPQLV

SEQ ID NO: 148932 - protein, 113 aa, Oryza sativa
  Clone ID: PAT_MRT4530_49314C.1.pep
HAPVTLTKATILLSNSLALPQVEDLALPGAEASSVLSLFGDPLGARSDPQAIPSPARSPPTAMSSSASPSAAPSAEYAHLRVRPVPSRQRAFPLSCRGESGSRSNRHPGQPNS

SEQ ID NO: 148933 - protein, 75 aa, Oryza sativa
  Clone ID: PAT_MRT4530_49315C.1.pep
RWLMSECLITRSPTPLFCWMRQAHVTRVHRSILCSEYFIRCSYKRDVPVLVSLLLVLCHHVYRWRNSIRVSVNSA

SEQ ID NO: 148934 - protein, 105 aa, Oryza sativa
  Clone ID: PAT_MRT4530_49316C.1.pep
SAAGASLAAVSLTSAFLASPLPHLQSSIPLLVACSIMDPPFGYAPPPPHHGPLCMRLYPLPHWNPLPQPQLPPHPHVFFHDRVNHPLHHIRYTDTLFPSHILCVT

SEQ ID NO: 148935 - protein, 66 aa, Oryza sativa
  unsure (1)..(66): unsure at all Xaa locations
  Clone ID: PAT_MRT4530_49317C.1.pep
ALSLPDHFIMXYMHERRLVTHIIKAPAVKTPAYVLHGSFFIQKVTLQILNVTVIPGPFCFADKTYY

SEQ ID NO: 148936 - protein, 57 aa, Oryza sativa
  Clone ID: PAT_MRT4530_49318C.1.pep
KKKKKKKKKKKKKKKKKKKKKREEKKKKKKKKKTKNKNQRGAAFLRDPCLLPRPSPA

SEQ ID NO: 148937 - protein, 144 aa, Oryza sativa
  Clone ID: PAT_MRT4530_49319C.1.pep
MDALTRLHRALAGGDDDEEQPEDSILGDTEGICSLSPVQRVYGFAACLVAGLALMILSLVVFVRPIKFAVMFTFGNILAVGSTAFLIGPSQQLRMMLDPVRVYATAIYGGFVFLALIFALWIHSKVLTLIAIICEICALFWCSY

SEQ ID NO: 148938 - protein, 65 aa, Oryza sativa
  Clone ID: PAT_MRT4530_4931C.1.pep
FSVCNILAPHHVFRHMPVHPFCILSIRHFLSLELLDRAFRIFPDFSHFLHFFLLSFLLILCLMIL

SEQ ID NO: 148939 - protein, 99 aa, Oryza sativa
  Clone ID: PAT_MRT4530_49320C.1.pep
RAAGIRHEAHTIGETLSLPLRAEADLRRWPSLPRRRVGTHCRRVSNIPSTLPGSLHRRWLPGGEVQHAKSSLHFLVASAPGHCCSTSYAIKMMKRSLRF

SEQ ID NO: 148940 - protein, 143 aa, Oryza sativa
  unsure (1)..(143): unsure at all Xaa locations
  Clone ID: PAT_MRT4530_49321C.1.pep
VATATTACSRSSPESGGERPRAGSTGEGARSSGRRGKRKRRARGWFLXARGGEIVAGRGGFEAATAGDVGDIVGEVGARFGAKNLGKVGDLVEEVEGNRFYVVWARGREREDRNRRRRGRQRAAWRLRAVAGQDGGWLGMDLT

SEQ ID NO: 148941 - protein, 148 aa, Oryza sativa
  unsure (1)..(148): unsure at all Xaa locations
  Clone ID: PAT_MRT4530_49322C.1.pep
LGASPPSLLRFYLSRRNLAPNAGLHRFSISGVLRTIILACFLTANKGFIGVLADEVSRGCIGLQGLLPIDLYWIILLXILYYHQSIDFISLFTQXIRIYIRHIADSSKYYRNRLDQTDWNVRISSTFGPALELSRSPRPVCVFRVKKC

SEQ ID NO: 148942 - protein, 177 aa, Oryza sativa
  Clone ID: PAT_MRT4530_49323C.1.pep
MDHNDRHSSLLTKVGFGALTCNSIFAIYRSQGDLASVAFVVAAYAALLLLFYFLGKFERARPEERGKVKAAVWSLTTLLTAMFASRVAPLMPPLVAAGVWIMAAATVVAFGGKLARTGKEKLARGGEPIRLGPSTAKDPSSRAEALSYAVRCPLVAVGLAMSNPGRASVLPLTNPED

SEQ ID NO: 148943 - protein, 123 aa, Oryza sativa
  unsure (1)..(123): unsure at all Xaa locations
  Clone ID: PAT_MRT4530_49324C.1.pep
PPLGKNPYNLKGLLAEYNSKFGAFCFYIXFFATFHKIKKGCLWXGSYLFFSVREKLYCPEISLKKIFFFFXKCIKKIRLRLVVAPQNFKIKIFNKKGFRKNARGENPHSPPEIATSKAPPEKA

SEQ ID NO: 148944 - protein, 237 aa, Oryza sativa
  unsure (1)..(237): unsure at all Xaa locations
  Clone ID: PAT_MRT4530_49325C.1.pep
MTAPPMWLPFGGAELRETAVVERXPRDVDGDEFDLRPPPRRVHELEEVPGEFRAVSFVCAWRDGGVSFGTCLRRRASLLSLELAAEVVPHMYASLDPLMAPSFLARRHANTTDSRSSGPPRKIAAIWVPTFWSPWFLAAVVSSLVDILVGSWKLAPPLQNGRSVKMPTVHRASSSTLRLSSRQWCSRAPRRTRRAPVSCRRRRWRRAAAPAIGFVAGDNLTVPLRFALPPRCRRSQS

SEQ ID NO: 148945 - protein, 365 aa, Oryza sativa
  Clone ID: PAT_MRT4530_49326C.1.pep
MTAPPMWLPFGWAELRETAVAELEPHVRRLPGQLAQPRTRRATPSPPPRDDDGDEFDLRPPPSRVHELEEVPGEFRHVGDAVVRDDVNSTRQMTVSLMAPSFLAWRHANSTDSRSSGPPRKTAVIWVPIFWSSWFLAAVVSSLVDILVGSWKLAPTVHGASSSTLRLSSRQWCSRAPRRIRRAPASEKKQSNPMREIKVQKLVLNISVGESGDRLTRASKVLEQLSGQSPVFSKARYTVRSFGIRRNEKIACYVTVRGEKAMQLLESGLKVKEYELLRRNFSETGCFGFGIQEHIDLGIKYDPSTGIYGMDFYVVLERAGYRVARRRRCKSRVGIQHRVTKEDAMKWFQVKYEGVILNKAQANTS

SEQ ID NO: 148946 - protein, 147 aa, Oryza sativa
  Clone ID: PAT_MRT4530_49327C.1.pep
MAFASEAFRKVLIPGYRFLPTKNRMSWGMDREIKRGLVRLIGRRSGGDSGEEDETTTELKDKQDNGFNTRAIVLLAVHPDWQDRTRGSLQGGAVGGFRPLGRHSRCRCGVPARVPPRRGLRSGNAAAIPARVTPRRLRSEGGALARV

SEQ ID NO: 148947 - protein, 217 aa, Oryza sativa
  Clone ID: PAT_MRT4530_49328C.1.pep
MSATEILQNGIYAIVATFFVTAVSFFLHFSPFVLLATAHQRDGAGGEVDAAAKHDSLRVISSLLTRGSSVEAYHHGRTILPYHGAGVRARASGGGGGAQVHGLDSSNADATASANLATTAARPLGSTALAKVAFLAVALWTVVPCSPWRTRFAVAPAVFSGRRSHIGTTAALETWWWSSPSPSKEVRRGKKTKEGREKTKRKEMDGKHDGSVMVLIL

SEQ ID NO: 148948 - protein, 394 aa, Oryza sativa
  Clone ID: PAT_MRT4530_49329C.1.pep
MGNSIGGRRKGAKVMQLDGTAFRVKPPAFAGTVLRDHPGFQLLESEEVKLLGVRARPLAHDAPLRPGRLYFLVALPRPTAPPRRAWSGALHVGARERLESLMLTRRSTSDLSLPASAAVGTAPPSPMSTASEPGGGPVRLRMRLPKAQVEKLMGESRDSAEAAAKIMQLCAAANANGGASGAATPERGILRTPERSPRFIPTPDWGVAGGFARTPEVSPRFAATPEWGTGFMMPTPERSGLLRTPERWPTLPRTPEYSSRDVKAARKEPEPEPEKTGAAEPDLLRVHLLRLLLRRAPLRRVGARDGGSRRAPAGPALLRAARLSAPPAALRPGAQDKAAPAVKAIAALGASATAAGGGGSSSVSSRGKNASPAGKQRQQTTARVAPIRRGSTEI

SEQ ID NO: 148949 - protein, 102 aa, Oryza sativa
  unsure (1)..(102): unsure at all Xaa locations
  Clone ID: PAT_MRT4530_4932C.1.pep
QGXKQQLLLXYLASHXTFCPLLTACMDLXYGKXFLGLAKHYLFESLLVLLPLLGKVGILGLVLEACHALLQVLSICLHVKLLLXLHSHHAGXICASHTKHLV

SEQ ID NO: 148950 - protein, 58 aa, Oryza sativa
  unsure (1)..(58): unsure at all Xaa locations
  Clone ID: PAT_MRT4530_49330C.1.pep
LSTVLFLTEAKICGHGFXXTIXVNNIRGTLTYKDHLLALSLILTLSLYLLFMFQXDVP

SEQ ID NO: 148951 - protein, 613 aa, Oryza sativa
  Clone ID: PAT_MRT4530_49331C.1.pep
MTSHGELKDMFVKILHFSQKVISNDKILKAMTSNGKLKDMFAKILHSLPANYGKEKHNNVENGITLVGASREILIDVVWKKVIFNDKILEAMTSNGKLKDMFAKILHSLPANYGKVKMKSTIMWRMKSLIIVTIQGSKYKYLEPLSLIMDQLSTMFYWAEDRLHPRQGDRVSGHEKDDLQSSGVWRSSSLLNMLSIAQTLKIARDRSSLTHHASTIKHCKTFRMLHPSPESHPTFRMTDNCNTFSTIVAEAVSGSHVIKIAGYSRIKVLLRNGESLTSIPFSVAGHSWTIRFYPNGDSAESQDYLSFYLILDSANSYDVKVIFSFELLGKNGRSVSSYSFTTDLRTFSYKGSLWGYNKFIHQTVLEESSAHLRDDSFSIRCDIKVFKEIYSQETKGVHSKFVEVPPSNLHQHLGNLLDSMDGSDVVFEVGEERFSAHRCVLAARSSVFKAELLGTMKEKADGAIQVDDMEPGVFKSLLHFIYTDSLDTMAQEDQSRDEASEEEDLVMAQHLLVAADRYNVERLKLICEEKLCESIDSSMVATSLALAEQHNCNGLKEACFEFLASPSNLLEMMASDGYDHLKTSCPAVLKELTTRFLPPETKASEEITIGLYN

SEQ ID NO: 148952 - protein, 194 aa, Oryza sativa
  Clone ID: PAT_MRT4530_49332C.1.pep
AAAAVVSLASPRRPEGCRRCHGGRDWVVVGAPVWTPLQADLAGAARGHHGCRTVEGRPEAAAAGGVGGASCLGFRCQRRGGAAGERLGRLTVVALETSSGGWIWRCRSGPSAHRRSGCAKRAGGGASSSSLPPFFLAAAQTSSSSADSSGECLTPPRHRTNNILTFVSLTIAIASCLVPLISTGVSPPARRTPG

SEQ ID NO: 148953 - protein, 49 aa, Oryza sativa
  Clone ID: PAT_MRT4530_49333C.1.pep
MPKRRLQEEKRRKTAAAVRRGSKKLRLGFHPANTLKGVRQHDNALRRGN

SEQ ID NO: 148954 - protein, 950 aa, Oryza sativa
  Clone ID: PAT_MRT4530_49334C.1.pep
MTTPEYFAKMKALGNEMSMVGGRPLDEELIQYIITGLGEGYSKVVSAVLNFEARQALYRGTQETSVNLANHGNNYNTGGRGDGNNGGHGSPRGRGRGNGGSGRGHGRAPRGADKRPTCQVCFKRGYMATDCWYRYDEDYVPDPKYIAAAATSSYGVDANWYIDTGATDHIIGELDKLTVKEKYNGGERIHTASGTESSNESVCNACQQAKSHQLPFPVSTSVSKHPLELIFSDVWGPALESVGRKKYYVSFIDDFSKFTWIYLLQHKSQVLEKFKEFQVMNGSAEKKHRHIVEVALSLLSHATMPLKFWNEAVQAATYLINRVPSRVIQNMSPLEKLYHQKPDYSSLRVFGCACWPNLIPYNKHKLEFRSKHCVFLGFSNMHKGFKCLEVSTGRVYISRDVVFDETIFPFSEPHANAGARLRAEINLLPSDLFSPMRSQGDEPVLNHMINPLPTNLTVENELQDNTTAEPDAENPSGAENHSDLAPGSTSDDAQHGSGGHAPADHSLGDTCPPSPSDAARSRLVVDTRQPATGASSPDAHRLSVQGADVTSPKTTAAQVTAAQAIAAQVVAAQPMMAVVATAQRRQVSCRSKIGRAQGRKAVFARKRYTLMRGKNIIGCKWVYKIKSKADGTLDRYKARLVAKGFKQRYDIDYEDTFSPVVKAATIRVILSLAVSREEEVYMHQPPGFEDPTKPHFVCKLDKALYGLKQAPRAWFSKLSKKLIDLGFIGSKADTSLFFLNKGGITMFVLVYVDDIIVASSSERATAALLQDLRGEFALKDLGELHYFLGIEDKYATDLLRKSGMLDCKPTNTPMSYLTLTRPDIAFSVNKVCQFLHAPTTVHWIAVKRILRYLKQCTQLGLKIHKSDSTLVSGFSNTDWAGSLDDRRSTGGFAVYLGSDLVSWSTRKQATISRSSTESEYKAIANATTEIMWVQTLLAELGIKTPRAARI

SEQ ID NO: 148955 - protein, 77 aa, Oryza sativa
  unsure (1)..(77): unsure at all Xaa locations
  Clone ID: PAT_MRT4530_49335C.1.pep
EQLCIGTQTGASFLVAXFIVGLLVGSNTGDAYSIASSPRGAMGGEKGAVVNWEDKRAEASRAGKSVFSRPASRXPNR

SEQ ID NO: 148956 - protein, 167 aa, Oryza sativa
  Clone ID: PAT_MRT4530_49336C.1.pep
MGALVEEVECERGGGAAAAEDGVEEARAIKVFGSASTRDCSWHCILFVKVFFLYITISSASTTVRCRGEFSSEAHVNVGDRGLPSFSISIIDLADAASRGADPLPLNSGGAGLPRLSFSIVHPAAAASRGPDPPPAPLGASYASSQAGDGGSRGNEFGCDGDNDDGK

SEQ ID NO: 148957 - protein, 64 aa, Oryza sativa
  Clone ID: PAT_MRT4530_49337C.1.pep
LLLVLASFICIRLHQVGGTQAWTTVGHTFCKHLESCLTRSLHTIKMNSAPDFAAETTSVMSPSR

SEQ ID NO: 148958 - protein, 108 aa, Oryza sativa
  Clone ID: PAT_MRT4530_49338C.1.pep
MEKERRGRPAPPEFNGSGSAPLEAASARSMMEMEKLGRPAAHLRLVEAYLTLLSPVTVDPSRPMVTPVTNINMCLTAELTSTSHCRRRRASAEREIEEAEVREISWMA

SEQ ID NO: 148959 - protein, 49 aa, Oryza sativa
  Clone ID: PAT_MRT4530_49339C.1.pep
MTMITPSSNTTHYRESWYACRYRSGIPGSTHASGTLNFFIYLMPEIIKL

SEQ ID NO: 148960 - protein, 382 aa, Oryza sativa
  unsure (1)..(382): unsure at all Xaa locations
  Clone ID: PAT_MRT4530_4933C.1.pep
MSRVSTSWGFVXSRVNKPRGRGARTGSTGVGPTRQPHGPRWTGRTRLAPAGAVGPTCQPHPRARAADGRAPRGSHSARTRAATPARSAGGGAPAPRWSPPATTSAAERRPREGREGGKEATVHGSPRGDSGDGGGGQSGGRRRRGSGRRGRRCSGGRRPKRRGGRGRRGCGEAEGGGAEVGGGPGXRRRRTGARRRRRRERATVRARFRRGGRAARGGNGRRRCGEGLNRVGRGRGRPEGKETGAAFSGSINGAGXLGEGFQTNPRERGREKWGERERGSRGIFPPALLHAGTTGGGGIRGGGGARARARWRERREEGDDGWAPPVSEGGGRARPSAALARGEAGWAAGRXRERGGRRDGPGRPKGGKGDFLGFFFLFIKPF

SEQ ID NO: 148961 - protein, 169 aa, Oryza sativa
  unsure (1)..(169): unsure at all Xaa locations
  Clone ID: PAT_MRT4530_49340C.1.pep
EEEAENNTTIVSLPCSSLNATTIDVVRRRHRQHAPPQRTPHPATDAARRRMPPLTLHALASNAMRHSAPSLRVPAPPSPPSLRAPAPPSQPPPPTLCACANVAPTSLRVLVGAVEPFLHTPTPTPPPPPSARXASAAVLSLCAPAAPLPPLPRCARAGVAAPSLRHRSP

SEQ ID NO: 148962 - protein, 1073 aa, Oryza sativa
  unsure (1)..(1073): unsure at all Xaa locations
  Clone ID: PAT_MRT4530_49341C.1.pep
MVTPRAPELLQQDQDEEMLVPDQDVVVEGPQPMEDSGSTVENEQVPETSTSRFTWTIEDFSNHRKLYSDVFVVGGHKWRVLVFPTGNSVQSLSMYLDIADANEQPHGWSKYAQFSLAVINQLDSKYSLRKGDQYDSSKGYIVNDSCTDVPDFFEYNQNRLVIYEGIIENRXLMTSLWGFQGVSRMLMLLSKLLINLESIVLTKXLTEHLPSSRLDKADYFKHNGVHELSDMLRKRNQMSDKLYYEKRTIQLPVESNHIKLRVAIYLAKNSKGKXNFYSFHRVSVHIGGFKGGHPSVFNHTALPDIGYMSXYKNSIHKVYQASVKISVNEFNGLLCVEEVPEEEKNAGVRDRLVHVCHFIIEKQQIDYXEQPFLFLIRVRKLYTLLSVLIHSDVVLGGHHYAFMQFAYIAHKSPGWXTFNDSDIXRALEEQYGGEEELPHTNPGLNTTPLRFTKHSNAYMLVYIRESDREKIICNLDENXVMYPRALTCRSTSXNEIIKSTLIYSSPRRSSLSSSRHXSHYLGLXKKALHDVWCGRYIQSLRAPKHLTRVDSESCILGSGLIIPVVFVSPVGFCGITVDAHIIXIEIYFRFKSKGESVFVCXRFTIGQPKFIDLGLLVDNLTQIMTCVQENHPISVPPKTKDDILIFFKLYDPEKEELRYVGKLLVKASGKPADIVQKLQEMAGFQSDEDIELYEEVMFEPSVMCEPININDSFLSSQLEDGDIICYQKRCSPEKLDHYRCADVPSFFEYIQNRQVVHFRLLENPKDDDFTLELSKRFTYDDVVEKVANQLGLDDPSKLRLTQHLPYSQMPKSHYIKYRGLDHLSDMLRNGNQMSDILYYEILDIPLPVLQDLITLRVAFYHATNNEVSSHFIRLPKGSTMSDLIEDMKSKVELSYSDAEFRLFEVYKNKIRKVYQPSEKISVNEFNGLLCVEEVPEEEKNAGVRDRLVHVCHFIIEKQHIDYYGEPFFFLIRDGETLSDIKVRIQKKLLVSDEQFAKWKFAYIAHNRLAGEYFQDSDIVLSRFQKDVYGPWEQCLGLEHSDVTPKRSCLSNQVYAYDSYXNRNSFDKAVKIFN

SEQ ID NO: 148963 - protein, 88 aa, Oryza sativa
  Clone ID: PAT_MRT4530_49342C.1.pep
MRWAARRALMREANGEVAASAVAQGVGASSCTDFTATGTTTTRPTPYVGNDGAMAAAAVAGLPASSRLTITDVWGGNGVSPLLWPMAG

SEQ ID NO: 148964 - protein, 129 aa, Oryza sativa
  Clone ID: PAT_MRT4530_49343C.1.pep
MGAPGRAGARAWRGPAAARLCDRVIRENHRMRSRHRVTSAWVEIVFVCLADHFNLCENCCEPGSRGFNGLWKLMNIQMKDLVIDDFMNLNVWVSLVFFPSCMPTTLQVIATSRPLCRLQHASRCEGISG

SEQ ID NO: 148965 - protein, 78 aa, Oryza sativa
  Clone ID: PAT_MRT4530_49344C.1.pep
VNPAGKVYHSLGKYHLQHYYLQAKDLRKVLHAVHYEAPLLEGSLVKSILVIRPVYPQDACNLIEIGVDLSLAKKRDLS

SEQ ID NO: 148966 - protein, 78 aa, Oryza sativa
  Clone ID: PAT_MRT4530_49345C.1.pep
PSASPPASLSLSSGIIFTNTFPRRSMAQAPSVHPKPDDLALRPKPKDREKGLNSTDVRTICSSSPSPHSEIKNSDSGL

SEQ ID NO: 148967 - protein, 108 aa, Oryza sativa
  Clone ID: PAT_MRT4530_49346C.1.pep
TRLINSYRARHVFLHTGKSCHGKSQQLGEITQIPPHISFIGIKTHIAYKSFIIGLWHPLGNGHTPFWDKVLGRLDLGCTANTNFCSTMVTREILVQLELTQIASLVSY

SEQ ID NO: 148968 - protein, 143 aa, Oryza sativa
  unsure (1)..(143): unsure at all Xaa locations
  Clone ID: PAT_MRT4530_49347C.1.pep
MEKLERLLRYRGPPVSILSFSSFLLLPSFLSSVSFSRVNTKREGEGATAFRRPEGGDAGGGWCSRAPRTWGGRCLAEREREETGTPAARAWXRPIGSWRWWLNSRWKGWGNRVKWVLLVEANVMEQGLGRRGXAEGDRPVTWW

SEQ ID NO: 148969 - protein, 56 aa, Oryza sativa
  Clone ID: PAT_MRT4530_49348C.1.pep
MEEAYVPPRLYDNSDLDLVGDRELQSLLHTEKPNVCSHLSIRLDLLKMIGINRGTQ

SEQ ID NO: 148970 - protein, 433 aa, Oryza sativa
  Clone ID: PAT_MRT4530_49349C.1.pep
SSKVSGARALTAADRASMAAAANNGGEGGDGFDVIVVGAGIMGSCAAYAASTRGGARVLLLERFDLLHHRGSSHGESRTIRATYPQAHYPPMVRLAARLWDDAQRDAGYRVLTPTPHLDMGPRADPALRASIVNGAATEVASDAAAPWPWSGVFRLPEGWTAATSEIGGVMKATKAVAMFQSLAAKNGAVVRDRTEVVGIAKQGDGSIVVKTSSGEEFHGAKCIITVGAWASKLVRSVAGVDLPVQPLHTLICYWRARPGREHELTPESGFPTFASYGDPYIYSTPSMEFPGLIKVAAHGGPPCDPDRRDWLAGAGAGLVEPVARWIDEVMPGHVDTAGGPVIRQPCMYSMTPDEDFIIDFVGGELGKDVVVGAGFSGHGFKMGPAVGRILAEMALDGEARTAAEAGVELRHFRIGRFEDNPEGNLAENKVKN

SEQ ID NO: 148971 - protein, 219 aa, Oryza sativa
  Clone ID: PAT_MRT4530_4934C.1.pep
MHPNPTENSREGAPEGSLAGTADGRRTRPRPDGHRRRPPARRSGARESGEEREAKGRSSAHPGSTATTGTAAEAEEGVGAVRDGEGDGAPAVGERSGGVAEVDGDAAKPMEVTPSGEEVRSDDGGEPELGGDGGEKVESSFHLTRTRVEPLADFDWVAALEDGASVPELRIVHIFGVNLIQVTRFMSCVEISSSLLRYHACHLLLTRHQLPHISFPGLR

SEQ ID NO: 148972 - protein, 220 aa, Oryza sativa
  Clone ID: PAT_MRT4530_49350C.1.pep
MVKYLSSVNICAGRNERKGYNNENVTFTILARLAQSVERKALNLVVVGSSPTVNIPIQTPNSQRHACSSDSVPLLLPTFKQSEKERRGEELPATAMGREAEARRRWTLVLVNLASVLEKADEVLLPAVYREVGAELGVSPTALGSLTLCRAIVQAASYPLAAYASARHDRARVIAVGAFLWAAATLLVAVSGSFLQVTSSPLADCGTHSTFPVLHAPTPI

SEQ ID NO: 148973 - protein, 48 aa, Oryza sativa
  Clone ID: PAT_MRT4530_49351C.1.pep
RSPTLYPPPCARRGPTPVPLAAGLAGKTEDSSSRSGEGREDMLAINGG

SEQ ID NO: 148974 - protein, 107 aa, Oryza sativa
  unsure (1)..(107): unsure at all Xaa locations
  Clone ID: PAT_MRT4530_49352C.1.pep
DSFFLVRQGLVSTHXINMYTQGLCNLSISRSMXLFSAHRHPLXEIFTLSTGGIWHLTLGCIGFRSLAKGXVLRSAGPGEFIGYVGVIQGCIDSISWIALVWLIYLPT

SEQ ID NO: 148975 - protein, 157 aa, Oryza sativa
  Clone ID: PAT_MRT4530_49353C.1.pep
ITDFIEELSMYPIHSNGLLDPPKVLCDVVESLIGAIYCDSNFNQEIVWQVFQKLADPLISLETLGKHPVSELFEFCQKTRRGVKIVKDEWDKNLTVEVLIDGEMVGRATYAQKKEIAQNRAAKAALDKLKETLGQSQTEPMSAEVSEQFNKIDLTGS

SEQ ID NO: 148976 - protein, 131 aa, Oryza sativa
  Clone ID: PAT_MRT4530_49354C.1.pep
PGVVPPPGKGQRPPQVKGGQLGSRKLPPFCQLPPHVAPPRPRGGGPHPPGGAPPPLCLGPRPRARRVPQVPPPPRVKRQGLIPNFKNRLGPKGELIKFPGRVNPQPVNFFFGFRKPRQPLCERIKFGRFFC

SEQ ID NO: 148977 - protein, 196 aa, Oryza sativa
  unsure (1)..(196): unsure at all Xaa locations
  Clone ID: PAT_MRT4530_49355C.1.pep
DGALIISISSHINMEVSRMFTMKRLNTFGAPTQHSMPQXRFTQASFNLNHTQVPLPHIKXHTTSSQAINTISSPHTVGQSLPSIIHSWFTGAQHTTHLFHFPAPHHCQVILPAQPAKPQXSQQXSQSLSHGTHMHQQHHPRRQLPLSTPIPFSRTSTAPAAWGLSQHSCLPCMHSIGSRGFXHEEKAWVLSQTFEP

SEQ ID NO: 148978 - protein, 69 aa, Oryza sativa
  unsure (1)..(69): unsure at all Xaa locations
  Clone ID: PAT_MRT4530_49356C.1.pep
XVTDGXXEVWVTLGYAIRWYIYSSQRYSFFXPYPPFXRGFYTSGPCLWSRYMRLCNNTLDIVINVDIVY

SEQ ID NO: 148979 - protein, 107 aa, Oryza sativa
  Clone ID: PAT_MRT4530_49357C.1.pep
MEYETVTVKRDEPARAALIDSETAEEALVPPWGSVQAIDQRQWDGRLQFGGRIDHNRRLMSKSSPKQCRLANGRISGISHTGSTSVRRPVSWSWSNICSGQIKQRNP

SEQ ID NO: 148980 - protein, 695 aa, Oryza sativa
  Clone ID: PAT_MRT4530_49358C.1.pep
MFRGTVVVLRAWQHVMVLCLVAPGMKWLVLGFGDWVCQPGMVVQLWLGLCNGTAKTLRNEAQIDCTRGVSREQRAINRRNKLDSSLLSSRGDDKKDKPSRGLKNMRKYQEIRKAVANYYNNLCAIEEERFDKDLRDREVSSIAFEEKSFGHVVNPGQQTYRISANVDVDLSTIVVSLALFDGDKMLFACSGIPLPDGTTREHLTRFVTSAALVRVFDEKRNRDDKLRVAVRLPNNRITDGFLGLYDHDIAIVTCFGLIEVRPISFKACPDGIQALVAGRAFESGNLMAMDGFVRCNNTWVPDSQDISKAVLGGPLLGKDKGFIGMNFSICHDDDGTLTYAFLPTKLLRKRLEHFGILNPKHLHFRGYSLPKGVSSIIPSGFMKTIYRLKSYGYPMPPPLVLELNGELLNHFEERFGELLAWKGYPYGDPAKSCRNRVWYQLPKEVVTNISRRVVSLASFNGFVRFFACTGLIIKWHGSKATRTVILTSASLVNRCNDDKIDSNLTIEVFLPPNQRCCGTLEFYNLNYNIAIVSLKKNFNAVRLEDIFSKTVQEPSEKVVAIGRDTRLGPLMATIGNVKRGKKGCKLDCKDLKLSTCKIKKAGIGGPLINFDGSFVGMNFYDGSEATPFLPRHKIVEVLSRVNDLPSESGCNNPMPIDIGEGTKKNRWPVPEPYWYHGSLDVDRSYVPKCIGRRLQ

SEQ ID NO: 148981 - protein, 142 aa, Oryza sativa
  Clone ID: PAT_MRT4530_49359C.1.pep
FFLFFFFFFFFFFFFFFFFFFFIGNTGVKPRGLMGWAAQCPIGRPGETTRYWGGKPQTIGGVYPYKPRGGGGNRGGQNGKPGGLGKGHAPGWFVFKKEQPPILAKNTNLGGEPKTPSEKWNKNPGGVWKPPPFLRGGGGPPL

SEQ ID NO: 148982 - protein, 134 aa, Oryza sativa
  Clone ID: PAT_MRT4530_4935C.1.pep
MHGGARPAAAATVASRAGWGSGGVQGGQGSGSDDGVLQVERGQRHPPGRVGEVTAATAPSRAGRGTDSGGSGYGSGLPRFAYPFSSFSLTFSFLEARAPRCGSWHRGGSPVSSGVTVFVGGRGVGAVRRCLGVQ

SEQ ID NO: 148983 - protein, 762 aa, Oryza sativa
  Clone ID: PAT_MRT4530_49360C.1.pep
MSYLLPHLHSGWAVDQAILAEEERLVIIRFGHDWDETCMQGMMDEVLAAVAETIKNFAVIYLVDITEVPDFNTMYELYDPSTVMFFFRNKHIMIDLGTGNNNKINWALKDKQEFIDIVETVYRGARKGRGLFLAYSVSGPHFLHLTLSSRALRRAPPLWMTTHQKDRGDVRGHGGSVAHGEDAVEVISAAPTGTQLPVSFGARAGEERHDSRWEWSGRFERAHERGHCHLRNPHYLAGARRAKVGRGVHLDERTGREGGGGGGDQGRRGGDDLTANFFADADVMQCRTSPRCPYLRQASPFSLLAPFHRLSGVTPGERRWEGDEGRWGERRKKTAREREEGTANAEESAPAAAANHGNSRLPRSSYVPPHLRGQAAPAAPAQAGALPSAAAAAQPSVGQPGVVGGPRWAGIVNGGGGGGGGSVGGSRQGFGAGGRGGGGGGGGGAWNSRPGGWDRRDREPDPFANSEAAEVDFEGENTGINFEAYEDIPVETSGHDVPPPANTFAEIDLGDALNENIRRCKYVKPTPVQRYAIPISIAGRDLMACAQTGSGKTAAFCFPIISGIMRSRPPPRSRGSRTAYPLALILSPTRELSVQIHEEARKFAYQTGVKVVVAYGGAPITQQLRELERGVEILVATPGRLMDLLERARVSLQMIKYLALDEADRMLDMGFEPQIRKIVEQMDMPPRGERQTMLFSATFPKEIQRMASDFLADYIFLAVGRVGSSTDLIVQRVEFVLDADKRSYLMDLLHAQRANGTHGKQA

SEQ ID NO: 148984 - protein, 598 aa, Oryza sativa
  Clone ID: PAT_MRT4530_49361C.1.pep
MDPGPMLADPTLMVRADQRGPPHMVLVDRYVALVDDIQEVIDEIGGVSFDVSLKAALDALPKCSDGQEWDEQQQSAIRAEITRHRAEVLEPAFAIFRDRKACRPAAPGTMRKEPMASRCNSGSYYREVLDGIDPRFSHLTGGAIVNSLTIGVSWPPSHDLWNHPLSASISSCHDCLLVLYFGNYRPGISSPGCYFVLNTWANSVAIVPPLRATCVITMSHCGIGTGVAILRHNDYYDYVLVELFPHQDSRTHLASNKATLFLWWSPSSSPLADGQWIRKEVLLPIPATSNQDKDDATRPPTYSFRENMVTGILVCDIDKLNTSTDDEDDRLLFRFIPLPEECVMKPGLLSRERPAEEHRTMICMDPETILFVSMDSYIQGLPIGDTVLMTWTLKFPLTNHWTWEKHSAPSLCVGDLLNDLPVLKESKNDGKTQHIANCPVSSIDRQNHLITSLTITKYERKHENGQWGVVELYEVSIDMDRRTVLELSSLESRHSNIFAADFSCCLQQHQGDLHIVDRINSLIFPFFPLLFLILPELFLFYEFSFFETMSWESLQRSRSTLKSPNEEEVVDKDDEYWEWVFPDEVGEDEYQHGPDLSC

SEQ ID NO: 148985 - protein, 208 aa, Oryza sativa
  Clone ID: PAT_MRT4530_49362C.1.pep
LINLARESIVNGDSVMLVQSANWLDVLLVVVQNKLTPSTSSRGDATVRHLARLKSKGSRKIISSATSTNGTMLAYSDCVKPCLFALRHKGGKKFTLDKLELPKGLLNSQCMLFSIDSSSLILAGRDGKIYVVDIATREISNVFQPMRKMDGASKEPPVTKMFLSADGQWLAAVNCSGDIYIFNLEVQRQHWFIPRMNDGSVTSGGFCP

SEQ ID NO: 148986 - protein, 185 aa, Oryza sativa
  Clone ID: PAT_MRT4530_49363C.1.pep
MANDSLATGRVIGDVLDPFISTVDLTVMYGDDGMPVISGVELRAPAVAEKPVVEVGGDDLRVAYTLVMVDPDAPNPSNPTLREYLHWMVTDIPASTDATYGREVVCYESPNPTTGIHRMVLVLFRQLGRETVYAPAVRHNFTTRAFARRYNLGAPVAAVYFNCQRQAGSGGRRFTGPYTSRRRQA

SEQ ID NO: 148987 - protein, 608 aa, Oryza sativa
  Clone ID: PAT_MRT4530_49364C.1.pep
MAPRGDGKKGKGSGKPDQLRPKSKQFKKHSRKEEVAGEGEQQERPAAPDSAAVLAAAAADDGDFPRGGRSLLSRDEVAEARAEADADFEREERRGKRKRKGASSSGAGGDDDLGSLFGGATTGKLPRFANRVTLKNISPNMKLWGVVIEVNQKDIVVSLPGGMRGFVRSEEVHDITSQETRKDSEGSICADVVHVGQLVPCIVLRVDDDNKEGKVNKRVWLSLRLSRIYKGLSLDAIQDGMVLTAQVKSIEDHGYILHFGVSSFSGFMPKADRESAKIESGQLIQCVVKAIDKAREIVHLSSDEDLLSKSIIKDLKGLSIDHLIPGMMVNARVHSVLENGVMLSFLTYFTGTADIFNLSNSFPSGSWKDDYIKNKKVNARILFVDPSTRAVGLTLNQQLLRLKVPSINVKAGEIYDKARVLRMDKRAGLFLEIPSPTPSPGFVSIHDVSDKDVKNVEKKFKEGSMARVRVLGVRHLEGVAIGTLKESAFEGSVFTHADVKPGMVFSSGVKALCPLPHMSELEHVVKPPKKFKVGVELTFRVLGCKSKRITVTFKKSLVKSKLDVLASYADAKIGLLTHGWITKIEKHGCFVKFYNGVQGFVSRLISNL

SEQ ID NO: 148988 - protein, 84 aa, Oryza sativa
  unsure (1)..(84): unsure at all Xaa locations
  Clone ID: PAT_MRT4530_49365C.1.pep
MEYECRVQFASLDXKNNPLGLPKWSEHSKYGCRGRCQVNPRMCGFTLXIDNVNPTYHGEKITESNKTXVDYQLLKEHRNAIRIE

SEQ ID NO: 148989 - protein, 124 aa, Oryza sativa
  Clone ID: PAT_MRT4530_49366C.1.pep
PGIRQNALISGFVDTYLTLNQAEETIFKEAIAEFSPLEQEDVMQLTTSWMLQGIEQGIERGQKSLLLKQIRHRFGELNAVNLSRIDILTVPQLEQLGEVLLDCSDFAELEQWLAAQSETPERKI

SEQ ID NO: 148990 - protein, 49 aa, Oryza sativa
  Clone ID: PAT_MRT4530_49367C.1.pep
MFSLVRIASGPTLSHAGPTPSPRYSSPGLDLPRPLRRRPSAPPSPPLAP

SEQ ID NO: 148991 - protein, 403 aa, Oryza sativa
  Clone ID: PAT_MRT4530_49368C.1.pep
MVTSTVKLEEVRRMQRAEGMAAVLAIGTATPANCVYQTDYPDYYFRVTNSEHLTNLKERFQRMCESSQIRKRYTHLTEEILQENPSMCVFTAPSLDARQDMVVAEVPKLGKAAAEEAIKEWGQPMSRITHLVFCTTNGVDMPGADYQVAKMLGLPTSVKRLMMYQQGCFAGGTVLRVAKDLAENNRGARVLVVCSEIMAMAFRGPSESHLDSLVGHALFGDGAAAVIVGSDPDEAADERPLFQIVSASQTILPGTEDAIVGHLREVGLTFHLPKDVPEFISDSVEGALTDAFMPLGVHDWNSIFWVVHPGGPAILDQVEEKVALHKARMRASRNVLSEYGNMASATVLFVLDEMRKLSADDGHATTGEGMDWGVLFGFGPGLTVETIVLHSVPITAAAPLIMQ

SEQ ID NO: 148992 - protein, 39 aa, Oryza sativa
  Clone ID: PAT_MRT4530_49369C.1.pep
GDKRLQKRILDRCYTIFMFDTDTLILNYGTAKCDTLCPP

SEQ ID NO: 148993 - protein, 89 aa, Oryza sativa
  Clone ID: PAT_MRT4530_4936C.1.pep
AACNLDRYRSHASTQSTCICFSPWQYYALISASLAAGCTASSLLTSVEKWNRICRALLVDRIVDSYHVALCMHLAVRSINLRRFLSHVF

SEQ ID NO: 148994 - protein, 108 aa, Oryza sativa
  unsure (1)..(108): unsure at all Xaa locations
  Clone ID: PAT_MRT4530_49370C.1.pep
LYGWLVTPSLLGVYVFTDRLAFVAADWCHRLHGWPIMPPLLGIYDFTAGRLAFVAADXCLRLHGWPIMPPLLGIYDFTAGRLAFVAADWCFRMGVYVFTDRLAFTAAD

SEQ ID NO: 148995 - protein, 157 aa, Oryza sativa
  Clone ID: PAT_MRT4530_49371C.1.pep
MATAATATARAHNPLRRMEGVGFKSALRASPRASALAAAALLVPLGAALLVSAGAVLLATLAGLALAAPPLVLFSPVLAPAAAAAVMAAAGLLAAGALGVAGVSALAWTVGYIRRGGARGSGGGGVAGDDRAAARRREEARRGRGGVCRASSPGRRR

SEQ ID NO: 148996 - protein, 67 aa, Oryza sativa
  Clone ID: PAT_MRT4530_49372C.1.pep
MKVAAAVAELKLTRVARVAGPTPTESELALARRLRQRWQRPKLTRVAGEAGQSSRRSGGHNWGDCGN

SEQ ID NO: 148997 - protein, 437 aa, Oryza sativa
  Clone ID: PAT_MRT4530_49373C.1.pep
MVARCHLLSQPFFPPAVEGGGGRGRAPPHAVAPPAGRERGEKRRVGGEEEMSGVGKREVGGEERAEEEISYLITEEVASSKRHPAPPPACALTSSHTQPLRLLPVVAAPSSAYRLQQRPAAPPLLDAAKDGEARQREDEEAQWLTGGDDKASSCNGSKPLMLLEGRIRRPLPLPHGSRHLSALLSCGSAIGGDGRGGSSDLFPSRMDPSSLRPHAHTGPWIWSLKDLIGSATSGDEKEEGPAVAVAVAVAARGDTGAEHNKGMSHGNMVARGGGGGGGDGLYTRWHEALGGSDHTTTAPRGRSSKTTTLSGEPLDPRADVAPEDQGRRILAPPSLLLHLRPLEHRPMHRRGNLIHGSGVKKRGSNMQQRGLAMVAASILIHGPPRLTLPSSAARPSAQREVKGRNDRVNNVWFQIQGGNSIDRDSSGGAIASSISLQ

SEQ ID NO: 148998 - protein, 81 aa, Oryza sativa
  unsure (1)..(81): unsure at all Xaa locations
  Clone ID: PAT_MRT4530_49374C.1.pep
MGNHDMAVNKDIMEVTAAPQPPPPLPQXPPPPPSIPTPPQPPCPCRRPPRPLPSPLLMPPLPPCHCLAAAPMPPPPMPPPP

SEQ ID NO: 148999 - protein, 251 aa, Oryza sativa
  Clone ID: PAT_MRT4530_49375C.1.pep
METAASASTSTPEGDSGQHAAAAPPRMTTVSKHYFGGASSAHNHDLRVDIIENIEEDYGMFVWPCSVILAEYVWQQRSRFTASTVVELGAGTSLPGLVAAKVGADVTLTDIAHNTEVLNNIRQVCGLNNVNCTLNKSTTLMQVLGLTWGEWDEPTFDLHPDVILGADVLYDSARIVLPFSLCVNYLIPVCSGHHLIEFLMVKWGLKCLKLRDGFSFLPSCKAASLQGNIQLVEIALDKEKPNCSSADENNL

SEQ ID NO: 149000 - protein, 69 aa, Oryza sativa
  Clone ID: PAT_MRT4530_49376C.1.pep
MRRKKINVLLKKEGFSRLELTSAYSVVGAPEGLAEEDIAEGRDLVERGIAGESPLRRRSRRRRKGIGFA

SEQ ID NO: 149001 - protein, 65 aa, Oryza sativa
  Clone ID: PAT_MRT4530_49377C.1.pep
MEKTAAAPASAAAAAGGAGGGYRGIYVTVSPRKLEDHIQMIIACVRDAHACVCVCCGVSVENLAG

SEQ ID NO: 149002 - protein, 63 aa, Oryza sativa
  Clone ID: PAT_MRT4530_49378C.1.pep
MTPFVFVLVLRHAEQAMFSEKQCELDGVAENGDDADEVNDDGRGSTKDGRPAGNALNGGPAAP

SEQ ID NO: 149003 - protein, 59 aa, Oryza sativa
  Clone ID: PAT_MRT4530_49379C.1.pep
FSLSRHDRCIYLLSILSPWFVLIFDFLIDFRYMWIVFRHSTVFPRVYNRFFFFLLLLFF

SEQ ID NO: 149004 - protein, 196 aa, Oryza sativa
  Clone ID: PAT_MRT4530_4937C.1.pep
MPEVVVPRLTGKQARRNGRPEDSGEAGRGVGGDTAASGRNRGVDEVEGYVTVPREGTAAPADAWAWRKGQPEEMPPRRKEKPARATVFRRNSGEEEEMPGMRAASRSRGRWWRRRPALRQGDRGGWRRPTRMKGKGDGGNAAPGVSAGNGGQAGEGEAAAMLEEATARPDDAPARRERRLEAAGGTGERGGRRGEG

SEQ ID NO: 149005 - protein, 125 aa, Oryza sativa
  unsure (1)..(125): unsure at all Xaa locations
  Clone ID: PAT_MRT4530_49380C.1.pep
PRVRVFVVFFVGGRVVHNETGSFDIAFRLGTCLFHVGYWVSLVSPDEVAPDQXALDGQGREVKETXMMGEWAPPEKPIPSYEYEGXSFXRKVKEMGADLDLDVVVHPCPKXGPTFRAKVIKMGDK

SEQ ID NO: 149006 - protein, 154 aa, Oryza sativa
  unsure (1)..(154): unsure at all Xaa locations
  Clone ID: PAT_MRT4530_49381C.1.pep
QYLQGGNGTHRRRYHQPRIALGKRRHRPSPSPVTPARLGSRAXRIWRRRRPSSKPWRAPPPRRRRHXSPTAAPSLSPRPHRPAAIVTTPAPGRDXAEEDGPAAAIPARRPALPATSSGGGEARRRQEEGRRRLGFRPLGWPRLFTAFPCSSGLP

SEQ ID NO: 149007 - protein, 42 aa, Oryza sativa
  Clone ID: PAT_MRT4530_49382C.1.pep
HDGLGGGEREEHEWKKIFLEAGVGDYKIKPILGFISVIEVYP

SEQ ID NO: 149008 - protein, 42 aa, Oryza sativa
  unsure (1)..(42): unsure at all Xaa locations
  Clone ID: PAT_MRT4530_49383C.1.pep
AAYYYYRQQSTXXMLDLSLIAXRLLXTWGLFCDXTFXLPLPD

SEQ ID NO: 149009 - protein, 153 aa, Oryza sativa
  Clone ID: PAT_MRT4530_49384C.1.pep
MSEKAATHGRLAQEKAHVRCVWPQVEHELANRHREVGQEEAFCSRTLRRKVWTYRSCYDGEAMYLHVACVKEMVQEILAAGHGGGGGDGGGRSIISVSILEKTMKKRKRSRTGKAVKCFLNFAISVIVSVLFGDPTGLAVPLVGAFISNVVYG

SEQ ID NO: 149010 - protein, 462 aa, Oryza sativa
  unsure (1)..(462): unsure at all Xaa locations
  Clone ID: PAT_MRT4530_49385C.1.pep
MAARVPGGGGAAAAAEAEVVPTFSSLEPIYGDGSPLDEARLRLARLADKFHAVYAARPALFARSPGRVNLIGEHIDYEGYSVLPMAIRQDMIVXIRRAXGKEEIDIKNHKWGHYFMCGYKGVYEYCRSKGIDMGGPVGLDVVVDGTVPTGSGLSSSAAFVCSATIAIMGVLEKNFPKAISIMAKPGFAELIDFNPIHATDVQLPPGGTFVIAHCLAESKKAETAATNYNNRVVECRLAAIVLAIKLGMETKKAVSSVTTLSDVEGLCVSFAGKEGSSDPGVAVKKLLHEESYTTEEIEKITGQSLTSIFQSSQTSLDVLRAAKHFKLFQRAFHVYSEARRVYAFRDTVLSKLSAEDMLQKLGDLMNESHYSCSVLYECSCPELEELVKVCRDNGALGARLTGAGWGGCAVALVKEGIVPQFILNLKETYYKSRIDRGVINQKDLGLYVFASKPSSGAAIFKL

SEQ ID NO: 149011 - protein, 506 aa, Oryza sativa
  Clone ID: PAT_MRT4530_49386C.1.pep
MAARVPGGGGAAAAAEAEVVPTFSSLEPIYGDGSPLDEARLRLARLADKFHAVYAARPALFARSPGRVNLIGEHIDYEGYSVLPMAIRQDMIVAIRRAEGKEVRVANVDDKYPICVYPADPDKEIDIKNHKWGHYFMCGYKGVYEYCRSKGIDMGGPVGLDVVVDGTVPTGSGLSSSAAFVCSATIAIMGVLEKNFPKKEVAQFTCQSERHIGTQSGGMDQAISIMAKPGFAELIDFNPIHATDVQLPPGGTFVIAHCLAESKKAETAATNYNNRVVECRLAAIVLAIKLGMETKKAVSSVTTLSDVEGLCVSFAGKEGSSDPGVAVKKLLHEESYTTEEIEKITGQSLTSIFQSSQTSLDVLRAAKHFKLFQRAFHVYSEARRVYAFRDTVLSKLSAEDMLQKLGDLMNESHYSCSVLYECSCPELEELVKVCRDNGALGARLTGAGWGGCAVALVKEGIVPQFILNLKETYYKSRIDRGVINQKDLGLYVFASKPSSGAAIFKL

SEQ ID NO: 149012 - protein, 103 aa, Oryza sativa
  unsure (1)..(103): unsure at all Xaa locations
  Clone ID: PAT_MRT4530_49387C.1.pep
YSTSIRITNLXAENNHKVEENRHQTKXSINRTISRIRLMYEWAKNLEMTRRIGPKFTSLQSRAKEEATCRKWAREAQPMVRPNPLRCRWMPDFFWTVCIASLL

SEQ ID NO: 149013 - protein, 165 aa, Oryza sativa
  unsure (1)..(165): unsure at all Xaa locations
  Clone ID: PAT_MRT4530_49388C.1.pep
PNTTSHPATPTQRTRSLTHSTPAEPTNRPPAGRKQPPPRPRRGQPTATSRRPPTAPTTAQPRAPPTGTQAGPGCPTRTPPTAPPHRTPXPQRRQRLPPPQKGPGAEPPPPRPVEHTPRRATARGRASRATSHSTACLSCPGRSISCTVPSEASKKPLTQLSLHGS

SEQ ID NO: 149014 - protein, 235 aa, Oryza sativa
  unsure (1)..(235): unsure at all Xaa locations
  Clone ID: PAT_MRT4530_49389C.1.pep
MASAKAMAQDEHHFVLKSGHAIPAVGLGTWRAGSDTAHSVQTAITEAGYRHVDTAAQYGIEQEVGKGLKAAMEAGINRKDLFVTSKIWCTNLAPERVRPALKDMHPGWKNNKIFEACKKHGIXHVTAYYPHWVLPEKNLAHDPVVEKIANKLNKTPGQVLIKWALQRGTSVIPKSTKDERIKENMQVFGWEIPEEDFQVLCGIKDEKRVLTGEELFVNKTHGPYKSASEVWDNED

SEQ ID NO: 149015 - protein, 189 aa, Oryza sativa
  unsure (1)..(189): unsure at all Xaa locations
  Clone ID: PAT_MRT4530_4938C.1.pep
WRPSRPICTWRWRSPPATTTSTSTAAPASPSPSPPPPAGSSRRAPSCATSSAASPATRTSTAPPSSPSHGSSSPATGPWXSPSRSGSCRRCCSRRGWRSTRPPAPSSASPTGAAMTSRSPTPAARAASGAPVAGSSWSGRAPRESPAPPAPPPSTSSTRCSRTSSSASPTSSPSSRSRSPRPRSASSCV

SEQ ID NO: 149016 - protein, 236 aa, Oryza sativa
  Clone ID: PAT_MRT4530_49390C.1.pep
MVEVLEEEVVVHTPIPSGSEDASGSRGPRHRRRNWRTPPRRDPPRREDPTRSGGSALSPPPGGGRPRRVGARRRLTYGDGDSPRGALQAAGALLRHPPVNAEHPQVGDVANLVTTAQRQLTAGGRSTATGTSRTPTTLSSSARRRARRSATALRRSTAPTSSGASGSRRHHDDLYEEQDARINIEQHRDERRAARMGEGASSSGVPRSSSRGGPPPTFTPGGTACRAFVVSLRNVR

SEQ ID NO: 149017 - protein, 36 aa, Oryza sativa
  Clone ID: PAT_MRT4530_49391C.1.pep
QSLVNCPMRQGFIRPSRPSLPSGWTHRTNGTTPSAA

SEQ ID NO: 149018 - protein, 129 aa, Oryza sativa
  unsure (1)..(129): unsure at all Xaa locations
  Clone ID: PAT_MRT4530_49392C.1.pep
ARGATIGSLYSFVVFLFDLFQTEHEYDVPYVKVIHVLVGVLLFFLSLTIGSLLCWHIYLLCHNMTTIEYREATRAKWLAQKSGQXYRHRFDLGTRKNIQMIMGPNILCWLCPTATGHLKDGTEFQITNN

SEQ ID NO: 149019 - protein, 412 aa, Oryza sativa
  Clone ID: PAT_MRT4530_49393C.1.pep
MALPLPPKGALLAAVTTASVLSILCVLSFTDSLSYLGFQVRGVDKRESSRSYLYWGAAIDCPGKHCASCAGLGHQESSLRCALEEALFLDRIFVMPSRLCLNSVHNTRGIINQSDATSNKSGRWETSSCAMESLYDIDLISRTVPVVLDNPQSWYAIVSRSTKLGEEGDVAHAQGVSRQELKENTLYSKAFLINRTASPLAWFMECKDRTKRSSVMLPYNFLPSMPARKLRDAANKIKVILGDYDAIHVRRGDLLKNRKDRFGVERSLHPHLDRDTHPENIKRRIAKWIPRGRTLFIASNERTPGFFSPLSDRCDFSDSCSHGFTTAHGLSSSVINYFLRFTIYKLAYSSNFSSILEPVIDNNYQLFMVERLIMQGARKFVKTMKEFDNDLSLCDDPKKNTKVWEEAVYTDG

SEQ ID NO: 149020 - protein, 93 aa, Oryza sativa
  Clone ID: PAT_MRT4530_49394C.1.pep
PLETDYSGNFRLPTNKTYYLYTCKPTFPSYYTFPQPKHVAILPPTINNTHMIHYLTINKNALLDTIYRYSRPTRIPLAVHNPKNPTLYANQET

SEQ ID NO: 149021 - protein, 48 aa, Oryza sativa
  Clone ID: PAT_MRT4530_49395C.1.pep
CWNGLWSRGPFPGESFRGLWQEVQAWAHCVPSPVRPPPLWLEPYNSDL

SEQ ID NO: 149022 - protein, 339 aa, Oryza sativa
  unsure (1)..(339): unsure at all Xaa locations
  Clone ID: PAT_MRT4530_49396C.1.pep
AHRPPPHRRRPADVILFTTCLDPYCKWQIHARKSVANRWRITSAGEDXNMLSAELSGKYLQLTSRFIGNRLQTFVQAEPILCPVGIVEAVEQICHYRHTYNKAWRVXQVAMKVVWGDWDEAYECHERKXKNPNMHFRVEAHHEKSRIVEGVHSCVFGRAXMIFGQLVEAFKHLRSVLAIDGTFLTGKFRGVLLTKIGTXCLISHNREVCIISDKHPGILNSINNEILGHQPIHHRWCTRHLCTNFYITRATQDQMNDLERICQINKKVVFLCAVKCPMGLVGKXSKKWLEDNMPLKVKWARSFDTDGRLYNFMASNMVESFYNVLRGIQKFFLCQKENV

SEQ ID NO: 149023 - protein, 590 aa, Oryza sativa
  Clone ID: PAT_MRT4530_49397C.1.pep
MGIYVGYLSPSIIRYLEPLTGDLLTARYADCIFNEEHFPALGGEFKYHIECPEINWDALDTLKEDPRTTESELQVKRIIDLQPSTGVHEISVNYVESGESFNRKTTIVHIYFASSVADTIQNDPDPKSIVECKKRSDWNKWKEAIEAELASLNKREVFSQVIPTPPKTFPVGFKWVFIRKRNENNEVVRYKARLVAQGFTQRLGIDFNETYSPVMSGISFRYLISLAIQKRLSMQLMDVVTAYLYGSLDSDIYMKIPDGISIPNGSANRKMYCVKLKRSLYGLKQSGRMWILHRILHRILNIIGNTQDIDEARRHLKAEFEMKDLGKTRFCLGLQIEHLHSGILVHQSAYVQKLLEKFNMDKAHPNKTPMVVRSLDKEKYIFRPREEGEGILGPEYPYLSLIGALMYPANSTRPDIAVAVNLLARHSAAPTKRHWTGGKQILRYLNGTKYLGLFFQKTADPSLVEYTDASYMSDPHNARSQTGFVFLHGGTAISWKSSKQTLVATSTNHSEIIALFEASRECVWLRRMINHIEQSCGIGSSESPTIIYEDNAACITQMQTGYIKSNITKQIAPKLFYPHELQQSGEINIL

SEQ ID NO: 149024 - protein, 471 aa, Oryza sativa
  unsure (1)..(471): unsure at all Xaa locations
  Clone ID: PAT_MRT4530_49398C.1.pep
MRTRKQRIESSDTVNETQPQVERHQVDSSDSLPTSTVHSIFDDGTLERPNAVILGNTEPSTGVHEISVNYVESGESFNRRTTIVGIYFASSVADTIQNDPDPKSKKGYSNKDDCPCIFIKRSSTGFCIISVYVDDLNIIGNTQDIDEARHHLKAEFEMKDLGKTRFCLGLQIEHLHSIILVHQSAYVQKLLEKFNMDKAHPNKTPMVVRSLDKEKDIFRPREEGEGILGPEYPYLSLIGALMYLANSTRPDIAFAVNLLARHSAAPTKRHWTGGKQILRYLNGTKDLGLFFQKTADPSLVGYTDASYMSDPHNARSQTGFVFLHGGTAISWKSSKQTLVATSTNHSEIIALFEASRECVWLRRMINHIEQSCGIGSSESPTIIYEDNAAYITQMQTGYIKSNITKHIAPKLFYPHELQQSGEINILQTKSCDNLADLFTKSLPTSSFERXLRGIGMRLLRDLQASGGDSLN

SEQ ID NO: 149025 - protein, 909 aa, Oryza sativa
  unsure (1)..(909): unsure at all Xaa locations
  Clone ID: PAT_MRT4530_49399C.1.pep
KIDMNSIGHGMSDRXFPESSDFVCTSCATRKLILRPSYLKIKAEPLKFLERIQGDICGPIQPLSGPFRLDNAAEFSSKAFNDYCMALGIEVQHFVPYVHTQNGLAKSLIKRIKLITRPLLQNCNLPTSCWSHAVLHTGDLIQLRPTAYHTTFPLQLVRGDPPNISHLRKFGCVVYVPISPPKHTSMGPHRKTGIYVGYLSPSIIKYLEPLTGDLLTARYADCIFDEDHFXQALGGEFKYHTECPEINWDALDTLKEDPHTTDXDLQVAANNLPYSFSVSKRVTKSYIPARNVPEKIEVPNKTIQLPSSKESGRITANPRMCTRKQRIESYDTVNETQPQVERHQVDSSDPLPTSTVHSISDDGILERPNTIIXGNTESSTGVHEIFVNYVESGESFNRKTTIVDIYFASSVADTIQNDPDPKSMXKRSAWNKWKEAIEAELASLNKREVFSQVIPTPPKTFPVGFKWVFIRKRNENNEVVRYKARLVAQGFTQRPVINSNETYSPVISGILFRYLISLAIQKRLSMQLMDVVTAYLYVSLDSDIYMKVHDVISIPNGSSNRKIYCVKLKRSLYGLKQSGRMWYNRLSEYLLQKGYSNNDDCPCIFIKRSSTXFCIISVYVDDLNIIGNTQDINEARHHLKAEFEMKDLGKTRFCLGLQIEHLHLGILVHQSAYVQKLLEKFNMDKAHPNKTPMVVRSLDKEKNIFRPREEGEGILGPEYPYLSLIGALMYLANSTRPDIAFAVNLLARHSAAPTKRHWTGGKEILKYLNGTKDLGLFFXKTADPSLVRYTDAGYMSDPHNARSQIGFVFLHGGMAISWKSSKQTLVATSTNHSEIIVLFEASRECVWLRRMINHIEQSCGIGSSESPTIIYEDNAACITXMQTGYIKSNITKHIAPKLFYPHELQQSGE

SEQ ID NO: 149026 - protein, 277 aa, Oryza sativa
  unsure (1)..(277): unsure at all Xaa locations
  Clone ID: PAT_MRT4530_4939C.1.pep
MVAGGGHRHGGATAERGEGKGEKKRRSRAHPRSTATTKKAAGAEKGGGAARVDGVLAVGERNGGVDEVGEYAANPKEAAPRWEVVRGDDGGGPELDSDGGERERRRELDSGEEEGRREAKPXAVGAGRVXNRAGSGEGAREXRNRARKVRPPSMAPARYAGANPPVXTREREGKMGLKGEGITGSDFPLFIARGXAGGGGIRGGGGARARARQREEGDDGWAPPISEGGGRARPSAARARGXGRMGRGDRRGRGREMGRAGPRGRGRERGLFRVFLF

SEQ ID NO: 149027 - protein, 1195 aa, Oryza sativa
  unsure (1)..(1195): unsure at all Xaa locations
  Clone ID: PAT_MRT4530_493C.1.pep
MAKTMEQGRREAKDRAGTLPSRRPLGGRMXGEEYMPKGDDFAKASLPPRGPKKPFXPIKPRGHWADDRLTAHQESMNLYYTMYLCKCPFHKGNHLSFRQQLASTVGTSEQNHXEQTPPKNVVKEKVTRRKESDAGVDMAAEEGAEPSALIAEDGGAPSASAPAPSLPPSAPATYVXMAKAAAAARALQTRAEILSTSQLLVPQAAPSQPAAAQTALAAVQAQVYPDPETQTEADMEAVRQNMTRLQDMLRQMQEXQQAYEAARRSKVASAPILQYSAGYVPPQVYLQVPTQPLPPQVAQAPMYFAGQPSTAAAHPAPHVQLQAQPIAAQVHPQQPGQVPQTMAEGASALXAQLQAFLQQLSQPHNISSTAPSARPEGNTSQGAPSCLPSNQPGLGASPWSQGPQFDSINXPGFGANQAPNQVTMTWSQPTFDPFMAAQQASPIGAEQPNAMAQPHAQAVISPFATPYPQQGVVNSAGGEKGLPLSGGIKTRPIPPQFKFPPVPRYLGETDPKEFLSIYESAIEAAHGDENTKAKVIHLALDGIARSWYFNLPANSIYTWEQLRDVFVLNFRGTYEEPKTQQHQLDIRQRPGESIREYMRRFSQARCQVQDITEAXVINAASAGLLXGELTRKIANKEPQTLEHLLRIIDGFARGEEDSKRRQAIQAEYDKASVATAQAQQQVQVAKPSPLVVRQPQPEIQAQPPRQGQAPMTXRKFRTDRAGKAVMAVEEVQALRKEFNDQQASNHQQPVRKKYLNQQIFFGPEDAAGVMFPHQEPLVISAEIAGFEVRRILVDGGSSADVIFAEAYAKMGLTTQALTPAPTSLRGFGGEAVHVLGQAQLIVAFGTGENRREEQVLFDVVDIPYNYNAIFGRATLNKFKAISHHNYLKLKMPGPAGVIVVKGLQPSAASKGDLAIINRAVHNVEAEPHDRAKHAPKPAPHDKIVKMQIDDADPTKLVSLGGDMGEEEAKNILEVLKKNIDIFAWGPDEVGGVSADLIMHHLAVKPDAKPRKQKLRKMSVDRQEAAKAEVQKLLKARVIQEIDHLEWLANLVLVRKSNGKWRIFVDFTYLNKACPKDDFPLPRINQLVDSTAGCELMSFLDAYSGYHRIRMNPADIPKTAFITPFGTFCHLRMPFGLRNAGATFARLMYKVLYKQLGRNVEAYVDDIVVKSRKAFDHTSDLQETFDNLRATGQQRN

SEQ ID NO: 149028 - protein, 664 aa, Oryza sativa
  unsure (1)..(664): unsure at all Xaa locations
  Clone ID: PAT_MRT4530_49400C.1.pep
MEEEMCLVDSCTTNTILREVKIFQTLTKREGQVLTIAGRDAMIVGSGRATIILPMGTQINIEEALLYPDSTRTLLSYRDIRNNGIHVETYEENNEEFLLLTKDTGYGKQTIEKVPSLPSGLYYTYIKLVPHVAYKVIFHNVDAFKTWHDRLGHPGIGMMRKIMSNSHGHGMSDRKFPKSSDFVCTSCATGKLILRPSYLKIKAEPLKFLERIQGDICGPIQPLSGPFRLDNAAEFSSKAFNDYCMALGIEVQHSVPYVHTQNGLAKSLIKRIKLIARPLLQNCNLPTSCWGHAVLHAGDLIQLRPTAYHTTFPLQLVRGDPPNISHLRKFGCAVYVLISPPKRTSMGPHRKMGIYVGYLSPSIIRYLEPLTGDLLTARYADCIFNEEHFPALGGEFKYHIECPEINWDALDTLKEDPRTTESELQVKRIIDLQVAANNLPVSFTXSKSVTKSYIPARNVPERIEVPNKTIQFPSSKESGRSTANPRKRTRKHRKESSDTVNETQPQVERHQVDSSDPLPTSTVHXIYNDGTLERPDAVILGNTEPSTGVHEISVNYVESGESFNRKTTIVHIYFASSVADTIQNDPDPKSIVECKKRSDWNKWKEAIEAELASLNKREVFSQVIPTPPKTFPVGFKWVFIRKRNENNEVVRYKARLVAQGFTQR

SEQ ID NO: 149029 - protein, 88 aa, Oryza sativa
  unsure (1)..(88): unsure at all Xaa locations
  Clone ID: PAT_MRT4530_49401C.1.pep
IPDLPKDSDSQXFERSRDTNRSGFLNEHALEPRNRSTTSPLVITHIETLQRPKYGDAAPEQIQDVNLFGRFSLTRKXFGRGTKTIGNV

SEQ ID NO: 149030 - protein, 89 aa, Oryza sativa
  unsure (1)..(89): unsure at all Xaa locations
  Clone ID: PAT_MRT4530_49402C.1.pep
CYFVVGRPTLLLGELPVCSFKHVLLREHGYGGVYNQHASISDVVLSVDSTSLSIARXCGWQHLGAYVNLGSFYLVGIPVALLLGFGFKM

SEQ ID NO: 149031 - protein, 111 aa, Oryza sativa
  Clone ID: PAT_MRT4530_49403C.1.pep
MDMHAADARRPAHEAALRAVQKPPAKPWRASPSAAPGPAPPKVYRVEPREFRDLVQRLTGAPAPPPPRQPVAPAQPVPVRPAVDEAQLYAPWFGFPMPMAASLDAAHGALI

SEQ ID NO: 149032 - protein, 191 aa, Oryza sativa
  unsure (1)..(191): unsure at all Xaa locations
  Clone ID: PAT_MRT4530_49404C.1.pep
SSRPTPRPFHRPSPPPRPQRCRLLLPRRFGLTDHGRLTSSSPYLRPAAVDLVLAAASTSSTPLPPXGAAQDPASPTATASLHAVPEPGATQDCCPRARCLPPXVPEPSAAQDRRSXAHVNLLTEPATARRGAAAAVRRARLPAFAASAAASPRIAAAALVSPRSPPPPPSRLASPRSLPPPSPPSNPFPKL

SEQ ID NO: 149033 - protein, 562 aa, Oryza sativa
  Clone ID: PAT_MRT4530_49405C.1.pep
MLFARRPLATAASHLAPFSPPLLLFFASASSSCSSAASPSSASGPRGCSAVRMETGAVEPASTGAIWSTPSVEPRTISVGKEIFCNRSLNMRNITAVGFDMDYTLAQYKPETFEALAYHGTIEKLVKDLGYPEELLTWQFDWKYMVRGLVLDKKRGNILKMDRHKYVKVAYHGFREMSKEEKVSAYGSTLIRDSFDEPDYALIDTLFSLGEAYLFAQLVDFMDNNPGKVPSGTDYPLMYRDVRSAVDLCHRDGTLKRMVAKDPSRYINEDLAIVPMLEMIRKSGRSTFLVTNSLWDYTDVVMNYLCRPYTSDVSSSHNHKWLGYFDVVITGSAKPGFFHDGNRAGLFEVEPDSGKLLNADLHVSNMILLEAPDQGGNVGHLHRLLSVASSSQILYVGDHIYGDILRSKKVLGWRTMLVIPELEQEVKLLSESKSTRKELRHLRMERDSIEDKIHRLEWSLKFENLTEDEKEKLFSEHDILLQKKEHVRRLHQEAQRQHHHKFHKVWGQLMKTGYQNSRFAHQVERFACLYSSQVTNFALYSPNKYYRPSEDYMPHEFDVLGL

SEQ ID NO: 149034 - protein, 95 aa, Oryza sativa
  unsure (1)..(95): unsure at all Xaa locations
  Clone ID: PAT_MRT4530_49406C.1.pep
MNTDGYALHLKAITEAYLRPQQDQGLLYLKVSMDGXAPYLRNIDLKTYTNYKDLSTGLDKMFRGLSTGTDGLSDYRKDGEYVXLTYDDIDADCML

SEQ ID NO: 149035 - protein, 342 aa, Oryza sativa
  Clone ID: PAT_MRT4530_49407C.1.pep
MEAEAETSTVTVTTGGEGEEAAEPRQGLKPPALTHALPSSLIFVKIEDGADALLRNILAFRSHQIFHGIKITKVSPGPSLNFCPYPLCESAFGQEGFGLRLGAYIEHLLVSNFLCLLGPRALKLKEYFSNFGEVNRAIVVTDLNTKMPRGFGLIQFASEESTARALKKDRHFLCGQWVEVVVPTSVLLSPRGKDVGPKPPTFASEESAARALKKDRHFLYGQWVEVSLAMPKQQNATSGTSKLPVQAHPFYPTTSSNFTAAANYPNVVNIVHVVTPMNCVVGSTFNPHIGFEVPGMKLSDGVINVVTANYSYQYPYLGGGEVPPQNSAMYLQAAHYYSGAMM

SEQ ID NO: 149036 - protein, 126 aa, Oryza sativa
  Clone ID: PAT_MRT4530_49408C.1.pep
GRTHMSSLVRGVTLARATTSDPRRWQVQCLPPRHPHVLPSCCRYCVGTGEVSIFSPSCITLPCRCSHGCLRYGSGEYRTEEEEDARMWWQQEHATGRRRRRRKNHGMKRAKNTSKRRAVCSMAPRA

SEQ ID NO: 149037 - protein, 136 aa, Oryza sativa
  Clone ID: PAT_MRT4530_49409C.1.pep
MVAAKKTKKSTDNINNKLQLVMKSGKYTLGYKTVLRTLRNSKAKLVIISNNCPPLRKSEIEYYAMLAKVTVHHFHGNNVDLGTACGKYFRVCCLSIIDPGDSDIIKTTAFTSQPKFRGNIVLGLENFVPGPNHVFN

SEQ ID NO: 149038 - protein, 87 aa, Oryza sativa
  unsure (1)..(87): unsure at all Xaa locations
  Clone ID: PAT_MRT4530_4940C.1.pep
SDPSDAPVYFEIVAEVPPAAEQGKSCLSLEHLSSSRRIQXKGGRDGAGRALRRPLSLPDSPRHERGLPVARWGREARVCVRWRVLRG

SEQ ID NO: 149039 - protein, 524 aa, Oryza sativa
  Clone ID: PAT_MRT4530_49410C.1.pep
MDSTTASYYTTLLCGALLLAAVVFKLKTAAAFSRHNAGVNLPPGPWALPVIGSIHCLLGSLPHHAMRELSRRYGPVMLLRLGHVRTLVLSSPEAAREVMKTHDVAFANRAVTPTASIDIVFAPFGKHLRELRKLCALELLSPRRVRSFRHVREEEAARLARSVAAAASASSAVNVSELVKIMTNDVTMRAIIGDRCPQREEYLEALDKTMDLLAGFNLVDLFPGSPLARVLGGRSLRTTKRVHEKLHQITEAIIQGHGIKDTVGDEHHECEDILDVLLRFQRDGGLGITLTKEIVSAVLFDLFAGGSETTSTTILWAMSELMRSPHVMEQAKYEIRQVLQGKAMVSEADIEGRLHYLQLVIKETLRLHPPVPIVIPRLCSKPNSKIMGYDIPQGTSVLVNVSAIGRDEKIWKDVNEFRPERFKDDIVDFSGTDFRFIPGGSGRRMRPGLTFGVSNIEIALVTLLYHFDWKLPSETDTHELDMRETYGLTTRRRSDLLLKATPSYARLGWSTNMQIYSVKCLVYE

SEQ ID NO: 149040 - protein, 106 aa, Oryza sativa
  Clone ID: PAT_MRT4530_49411C.1.pep
MVAAKKTKKSTDNINNKLQLVMKSGKYTLGYKTVLRTLRNSKAKLVIISNNCPPLRKSEIEYYAMLAKVTVHHFHGNNVDLGTACGKYFRVCCLSIIDPGNFHTST

SEQ ID NO: 149041 - protein, 421 aa, Oryza sativa
  Clone ID: PAT_MRT4530_49412C.1.pep
MTPADAFLILDFLAGNRLIPHSVFTTLLASLPSVSPHTSPRLRAGLALRALDSALSISESSEMDAPTLLRKARAVLADPDLAPFFPQHLAAPASADDAPAAAVAHLNRLLDVEWASLPPSSLEIAAERIVGSQALHSWANADHAQRSKLRLLAEKYSTSLYQFYSPLAVSAVGESTALEILDTLQRPDASTNHPGTLPQVDNAPETNGASHCAQQNDGAKSGLVKQNAEADRPQQDSTRHQQDSVQGASNSQLKESSVTMESIRGTGPDITGFMEEATPRVAGQFAPDNIKNHQVTGSKRSLMERNPTASTYEGEHLCNIMVVSHRIFEVQWDGSDSEGKRPAAKRRLPIFERTAKPSPTAAHKTRKKWSEKQEKTLLEGVEKYGKGNWKDIKMAYPDVFEDRSTVDLKDKFRNLERHLCA

SEQ ID NO: 149042 - protein, 111 aa, Oryza sativa
  Clone ID: PAT_MRT4530_49413C.1.pep
MVAAKKTKKSTDNINNKLQLVMKSGKYTLGYKTVLRTLRNSKAKLVIISNNCPPLRKSEIEYYAMLAKVTVHHFHGNNVDLGTACGKYFRVCCLSIIDPGDSDIIKTTGEQ

SEQ ID NO: 149043 - protein, 53 aa, Oryza sativa
  Clone ID: PAT_MRT4530_49414C.1.pep
KHQVHHIMLLLKRELVKCVQPEQIIRSNADLATLHLSVHPEQVMAYYTVLQLK

SEQ ID NO: 149044 - protein, 486 aa, Oryza sativa
  Clone ID: PAT_MRT4530_49415C.1.pep
MLGGKNKPPHPPSVLPDPAATPCLPPRSKTMVLGGNSTHSRHPSVLPDEAAAMEMLGTSQLILLRVSRLGLGGPGLGEEEDMDLSTSRAWNIMRNNRFANQLGIRKLAQIFQSSVAKKKAVGKKSKALLLGEDVAITGDCVTTGTGRASKRVLALENLEETMRCTRQRAMKQVSTTSLIEATEVGLEPDLSANQNQGDTNNTGQGKWLPYCYFIVNMCGTLTSSIQVETRGKSMGKEIDSISKGLGTMIPIIVKEGKKRPEAPMQTAKLASESGIIIRQHIPIYPSWTDYKNDSSQLDNLKGKLKGKFSIDIHSDPVIAAMEDILRCGTRHMRYRLKKKYFDGVPANQVRTTSPLKCMTDEQWTKLVDMWSSPEHKKQEKYKDSEPTAIDLFKELHCSKTKGFSEPVKKAIEDMHTWEALTSPSVEDGQQAKTSIEAVSKVLPKSNTFLRNVGIQQPAAKTTNVMKEIQAELDAKKLESAVLSGGA

SEQ ID NO: 149045 - protein, 172 aa, Oryza sativa
  Clone ID: PAT_MRT4530_49416C.1.pep
MAWRAWRQRKAMVTDATCANTLAAAQHGKELPGAARSTMAAAHSDVSVRHGNGKFPVGDYTTRPASADENFPHHHLPVLQRGNIFHHHLLRAASGSLAWMTAALGPAEAARRPCADDGGGWTWRRSGPARARARRHGDLLRWRRTLAAQRPCADDGSVGTCCGGPAWALARR

SEQ ID NO: 149046 - protein, 53 aa, Oryza sativa
  Clone ID: PAT_MRT4530_49417C.1.pep
FITLLNPNSIFNPYKTPLGHRQKTITYSDTKSCSKEYSKKTIEPRPIKALNFS

SEQ ID NO: 149047 - protein, 60 aa, Oryza sativa
  Clone ID: PAT_MRT4530_49418C.1.pep
MGHMVERPGFILPPGPGLPRPGGKHGYRAVTAEVTAVTGGKVNPGDGGDCWVLGLHNPKD

SEQ ID NO: 149048 - protein, 152 aa, Oryza sativa
  unsure (1)..(152): unsure at all Xaa locations
  Clone ID: PAT_MRT4530_49419C.1.pep
GQFNAVFSPNINXGTRNRXXQXVEENVGXGSFXXXMXXSXXRAFMRXQXCXQQQGRMXXCHWGTXCXMMQSMQQXIXXGXGQQQMXKMGXQMPNXXNXXPXNFQFFSXGXCSNVGNMFSNKVLHILCKKEPWNKSIFAKKKKKNWRGGEPNP

SEQ ID NO: 149049 - protein, 1673 aa, Oryza sativa
  unsure (1)..(1673): unsure at all Xaa locations
  Clone ID: PAT_MRT4530_4941C.1.pep
ICTAGYGCSERLGLYNRMPRYKPEYLFGVEGFVQELRTMSFAIGFGTALFYAQIPHDRHEEKCRVKVTLNSNSEDIPSVMFEAGGRNYIHACQEVARIAIGELRNRYSDRLADTEYHYHPRQPQGSDRGSYLETEGIENDATTRHLVEMLWAXDETRAETVLAAQDREDRNRGKICKLEDKVDRLEKELAMLKGEAPPQKARVRFTARKRALFVPRYQLAPKMVLTRSNGNGPNNNNNNNNGENPTLAQVLAQQAQLMNMMMQQLQNQQNQGNNHAPPQNKLAEFLRVRPPTFSSTTNPVEAGDWLHAIEKKLDLLQCTDQEKVSFASHQLHGPASEWWDHFRLNRTTAEPITWLEFTAAFRKTHIPSGVVSLKKKEFRSLTQGSRSVTEYLHEFNRLARYAPEDVRTDEERQEKFLEGLNDELSYPLMTGEQKKCRIAHFKAQQGNSQRPRLTLGPXTMPQGGSSSVVRPQRQFFNNNAGNNIRNQAPRPIAASTPQQPAKREQGSKPGVCFNCGDPGHYADKCPKPRRVKVVPDQSNSTVPASKARVNHVVAAEAQDAPDVILGTFLVNLVPATVLFDSGATHSFLSMSFARNHGMEVEDLRRPLMVSTPSNQALSLQRSPSVRIEIQGVPFLANLILLESKDLDVILGMDWLARHKGVIDCANRKVTLTSNDGRVVTVHALSSESLRSKLNQITLEEIPIVREYPVVFPDDLPGMPPKRDIEFRIDLVPGTTPIHKRPYRMAANELAKVKRQVDDLLQKGYIRPSSSPWGAPVIFVEKKDHTQRMCVDYRALNDVTIKNKYPLPRIDDLFDQLKGATVFSKIDLRSGYHQLRIKEEDIPKTAFTTRYGLFECTVMSFGLTNAPAFFMNLMNKVFMEYLDNFVVVFIDDILIYSRTKEEHEEHLRLALEKLREHQLYAKFSKCEFWLSEVKFLGHVISAGGVAVDPSNVESVTNWKQPKTVSEIRRFLGLAGYYRRFIENFSKIAKPMTRLLQKDVKYKWSEECEQSFQELKNRLISAPILILPDPKKGFQVYCDASKLGLGCVLMQDGKVVAYASRQLRPHEKNYPTHDLELAAVVHALKIXRHYLFGTRTEVYTDHKSLKYIFTQPDLNMRQRRWLELIKDYDMGIHYHPGKANAVADALSRKGYCNATKGRQLPLELCKDFERLNLGIVSRGFVAALEAKPTLIDQVREAQINDPDIQETKKNMRRGKAIGFLEDEQGTVWLGERICIPNNKDLKDVILKEAHDTLYSIHPGSTKMYQDLKERFWWASMKREITEYVAVCDVCQRVKAEHQKPAGLLQPLKIPEWKWEEIGTDFITGLPRRSSGHDSIWVIVDRLTKVAHFIPVKTTYSGSRLAELYMARIVCLHGVPKKIVSDRGSQFTSNFWKKLQEEMGSKLNFSTAYHPQTDGQTERVNQILEDMLRACALDFGGSWDKNLPYAEFSYNNSYQASLQMAPYEALYGRKCRTPLLRDQTGERQVFGTDILREAKEKVKIIQERLRVAQSRHKSYADNRRRDLSFDEGDYVYLRVTPLREVHRFHTKGKLAPRFVGPYKIVSRRGEVAYQLELPQFLAGVHNVFHVSQLKKCLSVPTEEANLEQIEVQEDLTYVEKPIRILEIDERRTRNRVIRFCKVQWSNHSEEESTWEREDELKSAHPHLFASSSESRGRDSV

SEQ ID NO: 149050 - protein, 56 aa, Oryza sativa
  Clone ID: PAT_MRT4530_49420C.1.pep
MAATDTPTGRRAAEHQSGRANREQQAGGSVEPREHGDSSAPPPFQKQQQQPPPLSP

SEQ ID NO: 149051 - protein, 258 aa, Oryza sativa
  unsure (1)..(258): unsure at all Xaa locations
  Clone ID: PAT_MRT4530_49421C.1.pep
TRPGEASPWSLLGGAVAALLLVWAAQMLEWAWLAPRRMERALRAQGLRGTQYRFLHGDLTEDLRLVTAARSKPVPMDRPHDFIPRVAPLLHRALEEHGRVSFTWFGPMPRVTITDPDLVREVLSNKFGHFEKTKLATRLSKLLVGGLVILHGEKWVKHRRIMNPAFHAEKLKRMLPAFSASCSELIGRWENAVAASVGKAELDIWPDFQNLSGDVISRAAFGVRHHEGRQIFLLQAEQAERLXQSFRSNYIPSLSLLP

SEQ ID NO: 149052 - protein, 200 aa, Oryza sativa
  Clone ID: PAT_MRT4530_49422C.1.pep
MPSFTTGTAVLLLTAWLYVPEKRDPLAAIGNGRHVSGRRFFLPHGEVEGLGMGVNAKMPMRIIKSPTVGFLEDSVKETYLEETEFKEDFLLINRRNLAPDAGLRQFSSISGEGGAYEVVSVALVHQPLGLRAGCSREVHPLISYFLRSTILMSYASLMSYEESGQSSETVPADPFLLAAGLCRNALERWKQSSVLALMDW

SEQ ID NO: 149053 - protein, 61 aa, Oryza sativa
  Clone ID: PAT_MRT4530_49423C.1.pep
MEALGVGDRPPQVREKRTRAKEMQRVLCGGLRLRRVNRRREGRSVISHNMFCRAHKIGISR

SEQ ID NO: 149054 - protein, 68 aa, Oryza sativa
  Clone ID: PAT_MRT4530_49424C.1.pep
PSWRRLRLCRRPPDSATPNKRHASLVAPVFADGGGLTATHAPRGDLRTSACCTQSSSSAFVSCPSNQS

SEQ ID NO: 149055 - protein, 105 aa, Oryza sativa
  Clone ID: PAT_MRT4530_49425C.1.pep
NPLVFFPPQRAPNYLCFFFGANFFPPPGFPNPNGGDGLGPPFFPNPGDPSPGPVCPFQSPPFGGFFPFKIFPPPFFFWAPFDSQGGPKKFLCFQNPPFLFSKPGP

SEQ ID NO: 149056 - protein, 86 aa, Oryza sativa
  unsure (1)..(86): unsure at all Xaa locations
  Clone ID: PAT_MRT4530_49426C.1.pep
ARVCALVRAIVSIGEHQQVYSCCKQWAPQICYWTYSLDQCYTFYRNKCNARSAVSSGDKQLWNDSXPYIHSVHNCYCRSGAIDHML

SEQ ID NO: 149057 - protein, 235 aa, Oryza sativa
  Clone ID: PAT_MRT4530_49427C.1.pep
VRIPGRPTRPIMAGFSFTCPVHWCFHCKGLEDRTQEPLQFAVCRRCPRSYHRKCLPREISFEDINTQGIITRAWELSKRILIYCLDHEIDLDIGTPPRDHIKFPHVEKSAYSAKKKVKELAEKKRRICDDSYVSEPLQKRAKLNEKFNAKGDKSKKAGVKSEFEEVLESEKKKTRSLKKRTQPEEPLVECAAAAAANNANRPVKEREKELGTSSLDMGKIPLSSFPIVDSETEKR

SEQ ID NO: 149058 - protein, 62 aa, Oryza sativa
  Clone ID: PAT_MRT4530_49428C.1.pep
LGNPLLTQGFYSMSDSNVSLIILHHRIWVLFVVSQTQSFRQVCIIVVFLTFYRKDGHPTSFY

SEQ ID NO: 149059 - protein, 114 aa, Oryza sativa
  Clone ID: PAT_MRT4530_49429C.1.pep
MGAVSMHQRMRGGFTNIMDATEDNGTRWRAAGGRRGGSNAQRPARRAGREDAGRPAMAERCGWGLDGDERRERCTADGGQRERERRPPSAATCHHHRARQRPPTGARRTTAGNG

SEQ ID NO: 149060 - protein, 111 aa, Oryza sativa
  unsure (1)..(111): unsure at all Xaa locations
  Clone ID: PAT_MRT4530_4942C.1.pep
KKIRLNLILGYMKRCNASWPKXSSNEYVKHAKKLGLWAVQLEMVYVRQRPFIASAMIGSLAKVQLKDNIDAFTRANERLAPKVFDDIRLPYPSKPVTHTFVGEDKEKRSHS

SEQ ID NO: 149061 - protein, 397 aa, Oryza sativa
  Clone ID: PAT_MRT4530_49430C.1.pep
RMRFFLLSAIKSLRVLVTHLFSMFITFNAYHDKKRSDQVFVPVVHLIASVMTLINLAPGGCVIGTPLLCVMGAVTLQYCWQMVIIKELKLANTNLSMAFGSEHSRAYRVHRVTEKAAYPFSLSDGGGWSPMLPRRRDEMMVAGGGLQVSVFRELPLPASLRAQRGKCVCVMAALVVGRARGGWGFGHERVGGGSPDDARWDARKKERAAEEGVRSPDLRKKEGWDFGQRRVGGGSPDDDRWDLRKRTRGSPDDARWDLQKKRREEEERNGGGSPEPELGKKNDEEEKKKVVVVVARGEEVEEEEVKRGKKWCAGMRVPWVEEGPHMLYAGPSFLAGAAPDPSSLPIPSFGPPRRRTSSSGGGVAVRVALIFLAGLVLRLRQLERVRVSRLALLCLSQ

SEQ ID NO: 149062 - protein, 492 aa, Oryza sativa
  Clone ID: PAT_MRT4530_49431C.1.pep
MAIAVGHCRELSPPGGGVRGRHCRLRSVTQLDCPVFDDHDLDLDRRERNGHAGLSPRRSLSSPCFSTVVPPAADRAEPARDDGEKMMPRVEIVAGGHARGVHELIAEAAGAIATGTRLVPAQGGIGGALLLEDGRSVDHVAVIKPLLDDASSPSHGGGGGYASKAVLREVAAFLLDHDGFARVEPTALIKISRPAMPTTTASIQRFAAHECDAGELGPSRFSVASVHRIGSLDVRLLNIDRHAGNILVKKSPESECASGGSTLTPLDLVPIDHGLCLPEQLDDPYFEWLHWPQSSLPFSGAELEYVASLDPFRDAAMLRAELPSLTEAAIRILTLCTIFLQRAAAAGLCLADIGDMMTREFSAMEEGLSALESLCKNAYDSSTTTAGSSPRKHHHSDDSDDESTQFGMDDVPAGLPPHLFLLGGGGIAKSVSFSAAEQGAAGRGAARKRMSFKALSGDEWAAFLDRFEQLLPAALDAKKRAGLKLTRLGTSF

SEQ ID NO: 149063 - protein, 77 aa, Oryza sativa
  Clone ID: PAT_MRT4530_49432C.1.pep
MAEIEIKTAPADFRFPTTNQTRHCFTRYIEYHRCVNAKGEATADCEKFAKYYRSLCPAEWVEKWNEQRENGTFAGPL

SEQ ID NO: 149064 - protein, 210 aa, Oryza sativa
  Clone ID: PAT_MRT4530_49433C.1.pep
MATAAPPAASGARRLGRPRAGLRVGAVAAAEGPSCLYVGPIETASQEMLEALYHQARDSYYSGQPLIVDDMFDKVELKLRVYGSPSVVKYPRCSLKRQSTVNDMVLIGLGYLIGYPISSASVGALQGLLTNNLVALKGSCPNCGEQVFAFVKTDNSIKAPHRAECHVCSCPLEYRTKVEKSLSGTRRTWVYGRVYLVKQGHPRKRKWLKD

SEQ ID NO: 149065 - protein, 247 aa, Oryza sativa
  Clone ID: PAT_MRT4530_49434C.1.pep
MPGAAAGDEAAAAAGGRRPTASERRRMYRDLAQSLRCGLRDASAGFSFLRLRGLRALLRALRSAAAADADARLFRHSQALRDLQVVPVLFEHSLRRAQGDAVVTVGQVLGISPAVKLSNPATDSEVALALRVLEGCCLLCRDCAAAAHRYDAVKVLLNILMTRGTLEQKACLDTLLALMVDSSENLMDFKEHEGLDKIGDLVKDTQRDDNVRCSCDLYVLKYIERFNGSGLAKKSLSTTSMFSSDNY

SEQ ID NO: 149066 - protein, 56 aa, Oryza sativa
  Clone ID: PAT_MRT4530_49435C.1.pep
PLTLSSPFAPCPPPPSSVTTGTATIGTLLSGDGGGITAEDDINLLLSCCVLAILPR

SEQ ID NO: 149067 - protein, 330 aa, Oryza sativa
  unsure (1)..(330): unsure at all Xaa locations
  Clone ID: PAT_MRT4530_49436C.1.pep
HVSNGVHARHQVKARISFVPCHSVSSVRSAVVFSVRCRRRQSATARAGVRPSPASSILVGVHRHRLRRGVAAERGSPPPPAPTPVLAAPVSVLRHQYHRRPSPALAPMSAAAPSVRCRRHHCRPSPAPVSATASSVRRRRYRHPPSLAQRVLRLEHAGEGALSSSSSSSSPPPPPPPRTPPARYPSPIYNGLLPHPFPATAAXKDGRCWRQTDAGAGGGGLTTAAPGGEDDGAVEQPRGLGPDEEDDEHDHEHAGHEGEQRVARQAIEEDPGRRHRRQRPAGHLLPPPQHHIRHGAAAEEAVQRSLGAEQPATLVRGIHCLAGWMNGSRP

SEQ ID NO: 149068 - protein, 316 aa, Oryza sativa
  Clone ID: PAT_MRT4530_49437C.1.pep
MMDANMYLKWESTRRTRLLAAALGLVGRATPTIRPGGHIVGSAEQHPSRDRTNENAVVFSVRCRRRQSATARAGVRPSPASSILVGVHRHRLRRGVAAERGSPPPPAPTPVLAAPVSVLRHQYHRRPSPALAPMSAAAPSVRCRRHHCRPSPAPVSATASSVRRRRYRHPPSLAQRVLRLEHAGEGALSSSSSSSSPPPPPPPRTPPARYPSPIYNGLLPHPFPATAAAASTRGHTRPAASPRVALASLRAHATPWTTTTMTMDADKDGRCWRQTDAGAGGGGLTTAAPGGEDDGASDGRDGVARNEGNSYSDGVF

SEQ ID NO: 149069 - protein, 156 aa, Oryza sativa
  Clone ID: PAT_MRT4530_49438C.1.pep
PHSCWIFSSRSPLFCSVRTCWVRARCTGGAEEAIDRWIIGGGRGGGRSRRPSTSRGSRAGASGRPSPSTRPASTPPSTCTTRRRRLRRAGAAARTASRPPRTAPAAGTRSGTRRCGSTSPPPPRRRRRRRATTRTRFSCGSSSSRRWPCSGTCCPR

SEQ ID NO: 149070 - protein, 246 aa, Oryza sativa
  unsure (1)..(246): unsure at all Xaa locations
  Clone ID: PAT_MRT4530_49439C.1.pep
GCPWPTMPGIRTKWGNKWXSTWFYHQIPADLLTDKECPXFTFSCKTTKVVAEPSAGLTADFLAIHSRGEELVSKFSARGLVEEFVCLGIQPLTAGWNISLGQMLSEATSTLPPFEVDLNIVIPANIVRPCQTYLGPYTKDEHAKYQTLQNGSRMNRVMSALGLEIPARVHPEIVLDSGKKKKKKKKATRKSSSDEDDVEVEENKENTDNEGNDGNEEXRENEENEGNESGEDSSSSDVSNKLKIYY

SEQ ID NO: 149071 - protein, 1490 aa, Oryza sativa
  Clone ID: PAT_MRT4530_4943C.1.pep
MAEQGKAHDLSPSVSGDDGEPNPRRRARTPPPPPRQSPKQGEALERVDKSVASPAAGDAGKRRDGERRLLVYGDGSTPQGALQAAGALLRHPPVVHDPESPAQRWLEDVANLVMTAQQRLGAGGRSATTRTSGAATTGSVSSRRRARRAAAAARHSAATPSSTPSTREDQHGEPDARLNIERRRNSRRTPRATEGASSSRVSPRHGREDQPSVPPAGGVGCRAFVASLRNVRWPPRFRPTITEKYDGSVNPTEFLQVYTTGIEAAGGDDRVMANFFPMALKGQARGWLMNLPPASVHSWEDLCQQFTMNFQGTYPRPGEEADLHAVQRGDDESLRSYIQRFCQVRNTIPCIPAHAVIYAFRGGVRHNRMLEKIASKEPQTTAELFQLADRVARKEEAWTWNSSGSGVAAPAAPGSAAQTGRRDRRRKKRSDRSGDEGHVLAVEGASRATRKGRPASDKKKEAGTPSRERPAGRWCSVHNTSLHDLADCRAVKNLAERTRKWEEDRRQERREGKSPAVPSGKWRSEAKQKAPAVDIGDGDDDLGFQEPGATIATVDGGACAHVSRRSFKAMKRELLAMAPTHEAMRRARWSEVALTFDQTDHPPCIARGGQVAMVVSPTICNVKLGRVLIDGGAALNILSPAAFDAIKAPGMVLQPSQPIIGVTPGHTWPLGHIDLPVTFGGPANFRTERVSFDVADLSLPYNAVLGRPALVKFMAAVHYAYLQMKMPGPGGPISVHGDLKVALACMEQRADRLAAASKPEGGDERLGPSAPTAPRQRMATCDEVPEDALIYFLRANADVFAWRPADMPGVPREVIEHRLAVRPGARPVRQKVRRQAPERQAFIREEVARLLEAGFIREVIHPEWLANPVVVPKANGKLRMCIDYTDLNKACPKDPYPLPRIDQIVDSTAGQIGRNVEAYVDDLVVKTRNQETLLSDLAETFENLRSAHIKLNPDKCVFGVPAGKLLGFLVSARGIEANPEKIRAIERMRPPSKLRDVQCVAGCMAALSRFISRLGEKALPLFKLLKRSGPFTWTEEAENALAQLKAYLSSPPVLVAPEPNESLLLYLAATPQVVSAALVVERDEDNPHSAHPHSVPTWPGSRQGGEAPESNGGLRPPTTGVGPLPACQTVPGAPDPQEGPEATAGRPHLSPFGPEANPVLTRPGREQGEEAPEPKGGLRPLTTGAGPLPACPMTPGAPDPQDGPEATVGRPLLSSSDPEVIGTEDECVLRGHLDEERPGGTAPSEEDRPRRKVQRPVYFVSEALRDAKTRYPQAQKMLYAILMASRKLRHYFQAHRVTVVTSYPLGQILHNREGTGRVVKWAIELSEFDLHFEPRHAIKSQALADFVAEWTPAPETVSMPEASTNPSQLPQTAHWVMQFDGSLSLQGAGAGVTLTSPNGDVLRYLVRLDFRATNNMAEYEGLLAGLRVAAGLGIRRLLVLGDSQLVVNQVCKEYRCSDPQMDAYVRQIRLYLRTAKGVNAYNAFPNAMCW

SEQ ID NO: 149072 - protein, 106 aa, Oryza sativa
  Clone ID: PAT_MRT4530_49440C.1.pep
MKPPSVLLNFVVRIELKLLRYNDELHVSVEVTEGDYRFVKQSARQRRPKVAIVAALPQLLVDFRKINKRRRRLHSTGSLTRATPNPPHHQHHCRTLPLMNDCKVSI

SEQ ID NO: 149073 - protein, 93 aa, Oryza sativa
  Clone ID: PAT_MRT4530_49441C.1.pep
SVQALLALVQANPQILQPMLQELGKQNPQILRLIQENQAEFLRLVNESPDSGAAGGNILGQLAAAMPQALTVTPEEREAIQRVCLLYMLFWIF

SEQ ID NO: 149074 - protein, 659 aa, Oryza sativa
  unsure (1)..(659): unsure at all Xaa locations
  Clone ID: PAT_MRT4530_49442C.1.pep
RSCRFLIQVLQNNMVVVRYSAEALSAYQHVITQTFGSKEEIVDFYNNYARGKGFSTRKCYLERIKGTKQVCLRKLVCSRQGFREGKHMKRTGRKGRARNLTXCGCEAKLVIGLNQETGRWFVKDFMDEHNHCLAHVDQVCFLRSHRKISDAQKADILEMEIAGVRKHQNMNIMEKQFGGYGNVGFVSRDIYKQETIVDGDAQTVLSHLRAXQERDHDFFFMYEIDKQGHLKHLFWSDSQSRLDYDAFGEVVVFDSTYRTNKYNLPFXPFVGLNHHRSTAIFGCGIVSDESGEAYDWLLTTFFTCMAQKYPISVITDGDLAMQRAFRKLLYDYCSAHEFESKWIHFREKHEITSGXYLLHQMYEMRMLRATTYQEGLCYLGLKSNQRSESLSSTLHTHLDGQMTXFRMMHHYKECLSNLRRNEAKLDSEASQSVPFTELDASNIEKDAAHVYTPTVFALVKEEICGARKLTINEILDRGDLTIYVICLRERRERKFHVDCSFSETSLERISCSCCKLQCXATPCSHIFYVSQGLXCIAKRWTMSAKSAFPSIRKSSMYDWXKSLERYRDLRNLSNSACFKASESKDLYDKMKHALRKVITESSASNVKRKSNRHGPIIPQSLQAEPFMEAKVQDPVKIAPRCAPRNHTRGSRIKAFPAKS

SEQ ID NO: 149075 - protein, 104 aa, Oryza sativa
  Clone ID: PAT_MRT4530_49443C.1.pep
MRNATAAAPRLPHQLPVVAPPACHVPSCDAASPPAASASCDAVSPAASASASNDHYHSPAASASYDVASPPDPVLIVPILPLACPIHRRHSPAANASTSRTPRC

SEQ ID NO: 149076 - protein, 1213 aa, Oryza sativa
  Clone ID: PAT_MRT4530_49444C.1.pep
MAGEEEGGLTEASTVAAFLGVPWDSHRRPPDSVFAPVNRRRAPRKTCIVLFAYFFVTSRSLITLQTPILTSNRALVSMEIMISAVAGDLISRFISSVAQNYRNHIRKEDDRRRLERILLRMHCVVEEAEGRHITNQGMLLQLKGFIEGFYLGYYVLDKIKFQPPEEESIEDEVSHEIQSFALSACNSRKRFRFADAIRKHTPIAFGSRSRTNLKDVVDGLETKIADMREFVILLGSHPRLPRQPYSTYLYIENCMFGSRIEKEQVINFLLCNDPHDPYVSILPIIGPPRIGKKTLVQHACLDERVRNCFSHIFFFKEDDLKTGELSLNSKASQGKYLFVIEFIWDVDEAAWTKFQSYLQNMPGIGIKVVVIGTTEDIAKFGTTQPIRVKRPSEEEFWYYFKALAFGSMDPDEHPKLASLVMQLATEVNGSFLSATIYGELLRANPNTQFWKRILLFVRELARKHLTSSGLHPDDLFERNIPVDMSRIAVVDGQVQGCLLYDVRVAGPADGELPKLTSRDMLLGCDIPVEDKFDVLVWRSRIPPYCNYIVTYEKRKPRRMVPDRNAVLLWMMSVLKIHHHHKLRNVFPVQGAYGREKGRSSAVMHYRRKIAKTKCGYKAHYMLRRLPNRCCVEISENWFILQKRGQTKKYFHGALATRTNYSRSLGHFANSHFDHLLPSRALVSMEILISAVATDLISRFISSVTQNYRNHIHKEDDRRRLERILLRMHSVVEEAGGRHITNQGMILQLKGLVEGFYLGYYMLDKIKFQPPEYEVSHEIQSFALSACNSAKRFRFADAISKRTPVAFGSRSRTNLKDVVDGLETKIADMREFVILLGSHPRLPRQPYSTYLYIDNCMFGRRIEKEQVINFLLCNDPHDPYVSILPIIGPQRIGKKTLVQHACLDERVRDCFSHIFFFKEDDLKTGELSLNSKASQGKYLFVIEFIWDVDEAAWTKFQSYLQNMPATGIKVVVIGTTEDIAKFGTTQPIRVKRLSEEEFWYYFKALAFGSMDPDEHPKLASLAMQLSTEMNGSFLGATMFGELLRANPNTQFWKRILLFLRELARKHLTSSGLHPEDLFERNIPVDLSRIAVVDGQVQDFMVYDVRVAGPAEGELPKLTSRDILLGGDIPVEDKFDVLVWRSRIPPYCNYIVTYEKQKPRRMVGKGIASHRCTFILLDKVVKMKTSHMHAGRMSNNKSLVGDDGGRRLWWKMMMD

SEQ ID NO: 149077 - protein, 325 aa, Oryza sativa
  Clone ID: PAT_MRT4530_49445C.1.pep
MRIRGDGGVSDVVPVACRAAADAGIDRCASPISGEEELGIKDDVKVVIFNFGDRENWIWHCGCTYPPDTAVGKKYISGKINARISTTRAPGRDVGIPDWYSVSEKKSVFVQHQHIMRLMECRVFIRTVGNDPRSPEKQSRERVVLLFSLIGRRKYMLQEHLTFRCHGWHRRLFRKSCLQVSFGSELSNRDQPLIWTCLILWMMGCICCWNNLVLMTELGVVFTDSMSFWSKYPSTDLAILCQKPAEVKELVSIPTHFDFGVLTLGYDIGFMTLAKFRYEAVYARDIPEIITGEHFWRNSEEIQSCYRVLPIVFEGSSPGAGKFGY

SEQ ID NO: 149078 - protein, 448 aa, Oryza sativa
  Clone ID: PAT_MRT4530_49447C.1.pep
MRIRGDGGGDEEEAAMAVVSAPPQHLVFAYYITGHGFGHATRALEVVRHLIAAGHDVHVVTGAPEFVFTTEISSPNLHIRKVLLDCGAVQADALTVDRLASLEKYHQTAVMPRESILRTEVEWLNTIKADLVVSDVVPVACRAAADAGIRSVCVTNFSWDFIYAEYVVVAGHHHRSIVWQIAEDYSHCEFLLRLPGYCPMPAFRDVIDVPLVVRRLHKSRSEVRKELGIKDDVKVVIFNFGGQPAGWKLKKEWLPDGWLCLVCGASETQELPPNFIKLAKDAYTPDLMAASDCMLGKIGYGTVSEALAYKLPFVFVRRDYFNEEPFLRNMLEHYQCGVEMVRRDLLTGHWKPYLQRAMTLHPCYDGPINGGEVAAHILQDTAVGKKYISGKIKLSGARRLRDAIVLGYQLQRAPGRDVGIPDWYSVSEKEIGVRPAPTYHEVNGSAES

SEQ ID NO: 149079 - protein, 122 aa, Oryza sativa
  Clone ID: PAT_MRT4530_49448C.1.pep
HSRVSAAPTDGEGNGSLALPREASEAGSSGRPAGARRPPPLPLRAGVASLADDNDEEEDEEEAAWRGAAGPACTCPAPTDEEEEEAAGRGAAGPARTHTSRINTVPAAADRRRQQPGAAPLA

SEQ ID NO: 149080 - protein, 405 aa, Oryza sativa
  Clone ID: PAT_MRT4530_49449C.1.pep
MAAARRLSELLQEQQEPFLIEAAKIRRLRRGGGRGGGGGGACCPVAACRRLLRLCNHGFKKRRGCGGVGGGGGVGGGGVRGLRSALSKALCGKAVRRVLRWDSLGCFPGGVDREFRRLRRSTGDSGECDPRAMDFSGHSNDERPPGRWKAPGIGMDMDVDESSRQLSPVSVLDLHSDDGDSPVHCRCKFSDLYREDAKPSTSGSSPPSEGFIGATSPCFTYNIHGKIIPMEVEEDEEEGDEEEEEMARAGKSIEQQISSWERIAEDISNIPRMVEMDFSQSIQQWGELKLEAAMEIGTRIETLIFDEIRRETVCDMLASHCKEYNMKNTNLGELSGIRAGARAAGHGGRRVAAGGGLRRWPGGRHEGGAARGEAVAAGGSLRLGPGGRREGSAARGEAVAAGGGL

SEQ ID NO: 149081 - protein, 380 aa, Oryza sativa
  unsure (1)..(380): unsure at all Xaa locations
  Clone ID: PAT_MRT4530_4944C.1.pep
KENPKRSSFPPPFSLLGRHGPFPPSLSLFPPGPSASPRARVAYRRARPPLSLTGGTHLSSPSSRRARRRARALAPPPPRIAPHPAVPARIKERGITPRDSLSRFPRFPLSLSLGFVRIVPAFVAGAINGGRDLRGRFPSSPAAFSPFRRYKIVARAPLFRFRRSPLALAVGIVLAPCSALSAVAAELRPAAAAAPDFLLTRRPLHPLRRVAADPVRRSASPADRRSAVAIVIPSRAAVFFRSVRHSRRRRCPGVSRGPXPLRFPLPSSLSGATPPRRWSPAATIGARXARRSRRPRRRGRPRARPRGCQVGPAVSRPRPWVRLTRGTHGADRRQPRAPGPPWTERLTRGPHFPWTRSARPLPRLVHPRLNKTSTSGHSTH

SEQ ID NO: 149082 - protein, 75 aa, Oryza sativa
  unsure (1)..(75): unsure at all Xaa locations
  Clone ID: PAT_MRT4530_49450C.1.pep
SSKALCFRKLLTLPVSTDVSIDGSTDAPAQGFKLYIRCTCRINCRLRKGLRPVWYHQRXRQSGHPHWCCSRISRC

SEQ ID NO: 149083 - protein, 443 aa, Oryza sativa
  Clone ID: PAT_MRT4530_49451C.1.pep
MSGYLHGFTQNSGLWLVKRHGTRNSGRLVERKPGSIVERANCMLIMAHGEDLDLQAAEAAAPYHALQGDLREHDEASGRRCSQACLLWTLGLLGLTMFLSTFAFFSTTTRPAATPTLGGRYYHDHDAFSVSIAGYEGIDPGSAGAAVSPAFRVTLGTANGACVDRAAVTVLYSGVALGWAHAEPRDCAAGRRERDVEVVARGQGVGLSERLRGRMASEWRSSGALVLDIDVKAFDEVTSPAYAARHVSSTCHPWAPASLKMRIAAAIAWTAIRIYNALSRVYGYKTPDFWVKVPGIEGLERGPSALAAPVFNVTLRVDNEATRRPFCTSRASAAVSYAGVQLGHVDLPGGFCVPGQVVSSVPIVATSDGLGIPSELYERMESQRRRHERVSLEVQVRLDDCCGQLPVMLWRTAVVHGQPQGPFLCKVSPMLKDGEPRPPRLYY

SEQ ID NO: 149084 - protein, 107 aa, Oryza sativa
  unsure (1)..(107): unsure at all Xaa locations
  Clone ID: PAT_MRT4530_49452C.1.pep
GEGAPGAGQKPKGKGRGEDTDKPGRKQAAAPARGARAXDLXDGAGCRANAGHNKAEVAQRYGVGWQRGVGANFGWFFTHTRGTFIYFSLEGLSFLLFKGAAAAAIAA

SEQ ID NO: 149085 - protein, 369 aa, Oryza sativa
  Clone ID: PAT_MRT4530_49453C.1.pep
MEKGDETLAAKKTCLMCGAAGAGGDVTAATADGHPAKPYAAVNPTNSDTANADQIEGLRTTIRDLEEKLAAANTMIEDLKRSSSADTMEQTKQPLSCARSWSTCGKSSKQRGRNNSSVTPVFSLAARSGPNAWCGVAQAPVGGGCRQGECPNFFSHSDKGKFDPYHCKCVYSDNMPEFFAADATGNPREAPEEGHGQRAPPHLVRLHVPQSHPSDAQCLTAQPPDPHRRNVVAAAFAGGSSSPAPLQVPVFQQESTGKGKHSNQLQQQFCCTGGRCPDLLQRLCRVDSQAGVGGDGTSYVWWYPVAGCSPAEAVLWALLNQGPPPPSMRNHINLLPTALPPQVGMAMDKGKAPLIELPYGIPMDDFLVG

SEQ ID NO: 149086 - protein, 115 aa, Oryza sativa
  unsure (1)..(115): unsure at all Xaa locations
  Clone ID: PAT_MRT4530_49454C.1.pep
GGEQDGEDAPVEGGGGATAVPVPLLHLNPASSIRGGAPARPPPXAPSAGAASPCAELAAHPNAELVARGRGWGWVXEDVIAGGGRGGKEGGARATLFAFGEGITAPNRDAQRFAT

SEQ ID NO: 149087 - protein, 62 aa, Oryza sativa
  Clone ID: PAT_MRT4530_49455C.1.pep
FRAASRATITDPHHLFGSHPGEQLGVREPHLVARHTSARIAHISVGDLEFSVTQDGADGEKG

SEQ ID NO: 149088 - protein, 95 aa, Oryza sativa
  Clone ID: PAT_MRT4530_49456C.1.pep
MSPPSAGTPEPRHIVFVAVVVDAARSHDLELQIWKGRGGRGDNDGALERGRMRRRRYPRKVKACHRVQLEDGGRRRRRDGGGAAATQGPIPYMPM

SEQ ID NO: 149089 - protein, 41 aa, Oryza sativa
  Clone ID: PAT_MRT4530_49457C.1.pep
MVAAPHDTVAASASSGAFFSDIVFLCSEGLAHFSRLLFVGI

SEQ ID NO: 149090 - protein, 876 aa, Oryza sativa
  Clone ID: PAT_MRT4530_49458C.1.pep
MATITLKPPATAAAAGGEVSEVELSEAGSPDVGSQSSGSGGSGRSTAGSSGWVYHLGVNSIGHEYRHLRFLVIRGKTVAMYKRDPSKNPGIVGDASIDATAIENAASIGLDDDNRVIYSKKLIVSAFGAVLGCRFSLVLLELYVLRFYNRLDQTKKGEIACGDPGEARKWVEAFEQAKQQSQKILSGAKLLRHIIIYTWRLNLDGHRPRVRRYAQGLGKLVRIGKGPEKLLRQSSNLQSHEIINTNFGGDSGDAFEAHEWRYVRTFNGIRIFEDIANTKGGKGVLLKSVGVVGANPDTVFAVVLSSDKHKRYEWDMLTADLELVETIDGYYDVLLSMETVFRWKTKKDFVFSRQWFRGQDGAYRQLAVKCVNSTYSSRLPRYTLCYGSNELVMCSFSPLGAAILQIPACHKNKPPRHGYERTKINSSTWELRRLNPPGSSTPKCLVTHMLEMSPSFWDRWKRRHNENFDRSIAFALLSQVAGLREYFAANPALTSDLPSTVVKPKQSDSLIIQSELEDSELNDEFYDALARGESFEDEDSDDDDDMIPKAGKVKFKNISWAIAGLAMKPTKGHNRKHKRHFNSSSTGRHHFGYLKENIGDKNVVHRRARKLSFLTMILLLICSPAASVEKSELVTNSTPVTIDSNHFHGTLRRAKSENDPNSWSEPGGEKFMIRGKTYLTDYTKVVGGDPLLKLIAVDWFKADERFDSVALHPKSLVQSEAAKKIPFILVINLQVPAKPNYNLVMYYAAERPVNKDSLLGRFIDGTDAFRDARFKLIPSIVEGYWMVKRAVGTKACLLGKAVTCNYLRQDNFLEIDVDIGSSSVARSIIGLVLGYVTGLVVDLAILIEAKEEKELPEYILGTVRLNRANPDSAVPI

SEQ ID NO: 149091 - protein, 52 aa, Oryza sativa
  unsure (1)..(52): unsure at all Xaa locations
  Clone ID: PAT_MRT4530_49459C.1.pep
ALSASPITIXDVPSLCFYHHDHPLVQIHLEITKGPXTHKSLGTINCFLTPFQ

SEQ ID NO: 149092 - protein, 728 aa, Oryza sativa
  unsure (1)..(728): unsure at all Xaa locations
  Clone ID: PAT_MRT4530_4945C.1.pep
LRSLNRGSAFSHSLVAPPPPRIPPLPSAPRAIKRXGINPRVPLPRFPLFPLSLSLGFVRIKPVIVAGAINGAESXRAIPPSPAALSFPRRYLNPPRAPLFRFRRSPLTLAVGIVLAPXHLLSAVAAVLRLAAAAAPLLLPTRRHLPRHRRIAVDLVRASVSLADRRSTVVIVIPSRAAVSLRSGRRSRRRRCPGVSRGPPFAFPLPSSLSGAAPPRRWSPAVTIGARARRSRRPRRRGRPRARPRGCQVGPAVSRPRPRVRLTRGTHGADRRQPRAPGPPWTVGLTRGPHSPWTRANEGYTSCGPMADNEKGNKVRSQDIGTSSSRVNEAQDTSCAAVVQHLINQNKLLIEILQQHRMPILNPSQMQPQVQLEAVQALTPQVSAPPTSQKAPHAMPHVDPKEASIICFMCDEQGHYARNCPQQKRKAPMRTEGEVRKMIITSTEWPPPGMTRRQRRNTFRGAPQLTEHLLANGGRVSDSEDSDQVSSEDEDKMERKACSRCGEIGHVASSCASTCVHCEEDHPPDRCPTSRITCFFCEGTDHVPKDCQFSFLLTKKMANQPAGFNGEKHQGNTNPRQDYSFSLTPVPGQRNQNEKRKCRVREDICCFNCQGMGHFADKCPKPRNIAAGTSVHATPCNQKLAPQRMVIHASRSSPIARVATAPIPMSALPQGVNAQFQPQQRIVVDGRSCVSPRPTPGRAKGNQPPEGDTKQKTVIRCNQQSEGSFSCE

SEQ ID NO: 149093 - protein, 65 aa, Oryza sativa
  Clone ID: PAT_MRT4530_49460C.1.pep
LLSMREDFLALSLCISSLLMWLRWYQTRATPFCQAVISLPPWLPIIKAKNHYSLISWLSTTDLDM

SEQ ID NO: 149094 - protein, 57 aa, Oryza sativa
  Clone ID: PAT_MRT4530_49461C.1.pep
HCLFYNHPPHFFTPPKKFTPPFFQNKKNPPLTNPNFFHKNKGSFSKNLPLFPPFFKV

SEQ ID NO: 149095 - protein, 82 aa, Oryza sativa
  Clone ID: PAT_MRT4530_49462C.1.pep
MQGRKMKSAREMAREEKNHHHHHHQQQQQQQSSSKGQAWFCTTGLPSDVVIEVGDMTFHLHKFPVMSRSKKLHDLITNRESR

SEQ ID NO: 149096 - protein, 80 aa, Oryza sativa
  unsure (1)..(80): unsure at all Xaa locations
  Clone ID: PAT_MRT4530_49463C.1.pep
MAFASASNGAVRFTEEQEALVLKSWAIMKDDSANIGHRFFLKIXEVAPSARHLFSFLRNSDVPLEKNPNLKKHAMAVFVM

SEQ ID NO: 149097 - protein, 632 aa, Oryza sativa
  Clone ID: PAT_MRT4530_49464C.1.pep
MGQCYARNVPVDGEGGGGVVTTTTTTTISVSASAAGEEVEVGRGGGGGGGRRSGRPSPAGTPRRRGATPARSSVAGSPWAGSPLPEGIAPSPAPSATTPRRFFRRPFPPPSPAKHIKASLARRLGQRSPATAQAQQAAKPPAEVPIPEHGGGGGAAAGEVERELDKSFGYDRHFAAKYELGKEVGRGHFGHTCLARARKGDMRGQLLAVKVISKAKMTTAISIEDVRREVKILKALSGHSNLVKFYDACEDALNVYIIMELCEGGELLDRILSRGGRYTEEDAKVIVEQILNVVSFCHLQGVVHRDLKPENFLFSTRDDHSPMKIIDFGLSDFIRPDERLNDIVGSAYYVAPEVLHRSYSTEADMWSIGVITYILLCGSRPFWARTESGIFRSVLRADPNFDDAPWSSISPEAKDFVKRLLNKDYRKRMTAAQALSHPWLRDECRPIPLDMLVFKLIKGPLRSTPFKRAALKALSRAITEDELIYIRAQYNLLEPSSTDGRLCIENFRMALLQNSTDAMKESRALDILNALEPLAYRRMDFEEFRAATISPYQLEALSRWEEIAGTAFEYFEQEGNRPITIEELAQVPTVSPKKQPQMRAEVRKCRSVLYFCRTMVRRHFIVLRTINKCFHH

SEQ ID NO: 149098 - protein, 188 aa, Oryza sativa
  Clone ID: PAT_MRT4530_49465C.1.pep
LPRTEINRLPSPPYARASSCIRSSASATDCVASTRSLHLHLQNNEMHLPQPPPPPYSSRIRPTVPSSVLDPPPQKPLPPVIGAPAGRTPWRKALTASAFSPGDRLATQHDGRRETDASSGPIHPSIHPSRSTDTGTRRDGSTTTDGAGKKGIYGVAASREHPRGETIACKNAKQTFACCAACACVCGS

SEQ ID NO: 149099 - protein, 849 aa, Oryza sativa
  Clone ID: PAT_MRT4530_49466C.1.pep
MAPAPAPAGSADQFRGQARLPRFAAPRRYELRLRPDLDACVFTGDASVVVDVSAPTRFLVLNAADLAVDRASIRFQGLAPTEVSLFEDDEILVLEFDGELPLGEGVLAMDFNGTLNDQMRGFYRSKYEYKGETKNMAVTQFEAVDARRCFPCWDEPAFKAKFKLTLEVPSELVALSNMPVACETIAGPIKTIHYEESPLMSTYLVAIVVGLFDYVEGVTSEGNKVRVYTQVGKSSQGKFALDIGVKSLNFYKDYFDTPYPLPKLDMVAIPDFAAGAMENYGLVTYREVSLLFDEQSSSASFKQNMSHLSVDSFFPQWNIWTQFLDSTTSALKLDSQAESHPIEVEIHHASEVDEIFDAISYDKGASVIRMLQSYLGAERFQKALTSYIKKYAYSNAKTEDLWAVLEEVSGEPVKDLMTTWTKQQGYPVISVKLKGHDLELEQDQFLLNGTSGAGIWIVPITLGCCSHDKQKRLLLKHKHDNIKAIVSQCDSRQKGGNFWIKLNIDETGFYRVKYDDELTAALRNALQAKKLSLMDEIGIVDDAHALSIACKQTLSSLLHLLYAFRDEADYSVLSHINSVTSSVAKISIDATPDLAGDIKQLFIKLLLPPAKKLGWDPKDGESHLNAMLRPMLLVALVQLGHDKTINEGFRRFQIFFDDRNTSLLTPDTRKAAYLSVMHNVSSTNRSGYDALLKVYRKSAEGEEKLPEGSVSLSVGTLSSCQDKDIVLESLNLIFTDEVRNQDAYRVLGGVIIEARETAWSWLKENWDRISEAFSGSSLISDFIRSIVTLFTSKEKEAEISQFFATRTKPGFKRALKQSLENVRISARWVDGIRGEAELAQTVHDLLIKL

SEQ ID NO: 149100 - protein, 60 aa, Oryza sativa
  Clone ID: PAT_MRT4530_49467C.1.pep
QFKKKGLIISLQAILHIQTCKCKCVCKETGLNNLTRRCVLNPILNLTRDFALRRELATSS

SEQ ID NO: 149101 - protein, 84 aa, Oryza sativa
  unsure (1)..(84): unsure at all Xaa locations
  Clone ID: PAT_MRT4530_49468C.1.pep
VQRLKLENAVLHTQIDAAKLSAIETERPCQSLGCKATKDRSLLETLLRARRKLHEDTADCMTSTTXVDMWLAEFDKALRPMEMT

SEQ ID NO: 149102 - protein, 868 aa, Oryza sativa
  unsure (1)..(868): unsure at all Xaa locations
  Clone ID: PAT_MRT4530_49469C.1.pep
MAPAPAPAGSADQFRGQARLPRFAAPRRYELRLRPDLDACVFTGDASVVVDVSAPTRFLVLNAADLAVDRASIRFQGLAPTEVSLFEDDEILVLEFDGELPLGEGVLAMDFNGTLNDQMRGFYRSKYEYKGETKNMAVTQFEAVDARRCFPCWDEPAFKAKFKLTLEVPSELVALSNMPVACETIAGPIKTIHYEESPLMSTYLVAIVVGLFDYVEGVTSEGNKVRVYTQVGKSSQGKFALDIGVKSLNFYKDYFDTPYPLPKLDMVAIPDFAAGAMENYGLVTYREVSLLFDEQSSSASFKQNMSHLSVDSFFPQWNIWTQFLDSTTSALKLDSQAESHPIEVEIHHASEVDEIFDAISYDKGASVIRMLQSYLGAERFQKALTSYIKKYAYSNAKTEDLWAVLEEVSGEPSIDLMNKWTKQQSYPILSLKLRACGLVLEQDQFLLDGTSDAGMWIVPITLGCSSHDKQKRLLLKHKYNNIKAIVSXVIADRRVETFRLKRTLLKHDFVDIKXDDLLIASLRDALQVXKLSQNDEISIVDGEQSLSIXASKRXSTLLHLLYAFRDEADYSVLSHINSDIQLFVGNDLYISFTLACQVTSSVAKISIDATPDLAGDIKQLFIKLLLPPAKKLGWDPKDGESHLNAMLRPMLLVALVQLGHDKTINEGFRRFQIFFDDRNTSLLTPDTRKAAYLSVMHNVSSTNRSGYDALLKVYRKSAEGEEKLPEGSVSLSVGTLSSCQDKDIVLESLNLIFTDEVRNQDAYRVLGGVIIEARETAWSWLKENWDRISEAFSGSSLISDFIRSIVTLFTSKEKEAEISQFFATRTKPGYERTLKQSLERVLINARWIEGIRGEAKLAQTVHELLHKP

SEQ ID NO: 149103 - protein, 382 aa, Oryza sativa
  unsure (1)..(382): unsure at all Xaa locations
  Clone ID: PAT_MRT4530_4946C.1.pep
MSRVSTSWGFVCSRVNKPGEGARGPGPREVGPTRQPLGPRWTGSTRLAAVGAVGPARQPRPRARAADGRAHLAAARARPKAASPARPTGGGTTAPRWSPPSTTGAAERRPRERRGEGSERTVFGSPRDYNDDGNGGRSGGRRRRGSGRRXRRRSGDRRAKRRGGRGRRKRGEADGGGAETGGSPERRRRRTGAWRXRWRERRTARARIRRRERAASGGNGRAKHGGRFYSAERGKARPEKEESAAEIXGSIEEAGETRGXSNRTNPREREREKRGKRERESRGVISPSLMRAGMAGCGGIRGGGGARARARRRARREEGDDRWAPPVSESGGRARLSAARARGRPMGRGGREREREGXGPSRPKKEGGERRLFRIFLFIKPF

SEQ ID NO: 149104 - protein, 434 aa, Oryza sativa
  Clone ID: PAT_MRT4530_49470C.1.pep
MLQSLISRLSEDQFLLDGSSDSGMWIVPITLGCNSHDMQKRFLLKHKFSDIKGINSQYDDQDRQNSGNFWIKLNIDETGFYRVKYDDELTTALRNALQMKKLSLMDKIGRHKHNMAQLVSITIYSDLVTSSVAKISIDATPELAGEIKQLFIKLLLPTAEKLGWDPKNSESHLDAMLRPVLLVGLVQLGHDKTISEGVRRFQIFFDDRNTSLPPDTRKAAYLSVMHNVSSTNRSGYDALLKIYRESTEVEERLTKNDILGFFPEGFVSLFIGILSSCQDKDIVLESLNFIFTDEVRNQDAYLVLRSVIIDARETAWSWLKENWDRITKTFAASAILSDYVKSIVTLVSYICTFLFPNSVYVILIGPLLILVSWQFTSKEKEAEISQFFATRTKPGFKRALKQSLENVRISARWVDGIRGEAELAQTVHDLLIKL

SEQ ID NO: 149105 - protein, 201 aa, Oryza sativa
  Clone ID: PAT_MRT4530_49471C.1.pep
MAAAPGRGGGEAFRLSADAGAGALKLQKGDITLWSVDGATDAIVNAANERMLGGGGVDGAIHRTAGPELVEACRKVPEVKSGVRCPTGEARITPAFKLPVSRVIHTVGPIYDMDKQPEVSLNNAYTNSLKLAKQNGIQYIALPAISCGVYRYPPKEASKIAVSTAQRFSNDIKEVHFVLFSDELYDIWRETAKEFLSQFEK

SEQ ID NO: 149106 - protein, 156 aa, Oryza sativa
  unsure (1)..(156): unsure at all Xaa locations
  Clone ID: PAT_MRT4530_49472C.1.pep
MSSKLVTSPLKSMEQGHLEQPLRDPQAPAEQHDMGLSPLTLLGFAFLTFNSGMAVYRSDRDLATIFFVVFSYVDLVSLFYFLRLFEKTPPESPRRHXSRRAVWLLTTMLTAVFSYKVAAIMPFPVQVLVWAMAAATVLGGFYAFFLHSDEKKPIEG

SEQ ID NO: 149107 - protein, 48 aa, Oryza sativa
  unsure (1)..(48): unsure at all Xaa locations
  Clone ID: PAT_MRT4530_49473C.1.pep
MGAGVSGLFGLGGDEGETSAAVGGAAAAGLGXLPELCAAEVLLRLDAP

SEQ ID NO: 149108 - protein, 317 aa, Oryza sativa
  Clone ID: PAT_MRT4530_49474C.1.pep
MEAGKREPTSMRDGGGGFLLIGREEGKEEGEKWEECLWGSGDRLGDRSPIRPPVVESDVYFQLRRLPDGTGVARASLILRLVPASCFGGGGYLLPAKWTWKFSWPFFTQIVRIHYILSIWPASAVYENDHPIRHFQIYLRSVTAPIKKGSNPPRRTNLNVLMSSKLVTSPLKSMEQGHLEQPLRDPQAPAEQHDMGLSPLTLLGFAFLTFNSGMAVYRSDRDLATIFFVVFSYVDLVSLFYFLRLFEKTPPESPRRHHIKTAVWLLTTMLTAVFSYKVAAIMPFPVQVLVWAMAAATVLGGFYAFFLHSDEKKPIEG

SEQ ID NO: 149109 - protein, 72 aa, Oryza sativa
  Clone ID: PAT_MRT4530_49475C.1.pep
ANAHSISSLCTLISSLDDLQFKLPCSRFCRYIGHLSCGSLINPGLLFNCAGIGKILDRAFWLFGICQTPCVW

SEQ ID NO: 149110 - protein, 121 aa, Oryza sativa
  Clone ID: PAT_MRT4530_49476C.1.pep
TSSCRFGTSDHGIYLRERLLIPISNPEILQGSTCYIEMDYNARREVAVFYPQGRPSGKAESSTNTAAAERRSRRILESVKRSLHTDDRTAAYYLSVTDGDPRAAMMEYSEDLRWERQQTGH

SEQ ID NO: 149111 - protein, 94 aa, Oryza sativa
  Clone ID: PAT_MRT4530_49477C.1.pep
TRAISAPNEDEEEEKEEEEEDDLVDIDRPKGKIVELLSPSQGEEQQLRVISIVGCRGVGKTALARAVYRDYSASEEFDCVAWVLASRCNNKRAL

SEQ ID NO: 149112 - protein, 839 aa, Oryza sativa
  Clone ID: PAT_MRT4530_49478C.1.pep
MYWLPPGDALNNGMRLLVDDQSCLEMVKIVGTTGAVDIYTEIVKLDMGCSSTLVEAHSDEAVFDLFRDNNSMFPDSLVIAKGGTNTQCDNPNSSIANIQTEGLDSDSGSDATGFTEDEDDEADEIRINYKQFKKKMKRREEIPLDTPVELDLPQSVDANTITQVNDEGDGIAYFDSEDDASYDDDSGDSAERRKCRFPIFDNHAELPQNAVDMCFRGKMQLKDAITRYALKKKIVTYNGNHSCCPDLKNKRLSTSRICDKYESVIKANPSWKARELKETVQEEMGVDVSMTMVKRAKSRVIKKVMDAHSGEYSRLFDYALELMRSNPGSSVHVALDPDENEHVFQRFYVCLDACRRGFLDGCRRVIGFDGCFLKGVVKGELLSAVGRDANNQIYPIAWAVVEYENASSWNWFLGHLQKDLNIPYGGDGWVFLTDQQKGLLSVIEHLFPKAEHRMCARHIYANWRKRHRLQEYQKRFWKIARSSNAVLFNHYKSKLANKTPMGWEDLEKTNPIHWCRAWFKLGSNCDSVENNICESFNNWIIEARFKPIITMLEDIRMKVTRRIQENKTNSERWTMGICPNILKKINKIRHATQFCHVLWNGSSGFEVREKKWRFTVDLSANTCSCRYWQISGIPCQHACAAYFKMAEEPNNHVNMCFSIDQYRNTYQDVLQPVEHESVWPLSTNPRPLPPRVKKMPGSPKRARRKDPTEAAGSSTKSSKRGGSVKCGFCHEKGHNSRGCKKKMEHSSSHYPSHPDQAAPSGEANDSSVAHRRGKTLLSQSQGSAVQLAIGATRSRQSRGKQPAISSNSKTTKKGKMPEGYGLYYSERTGSTFLQRCTLL

SEQ ID NO: 149113 - protein, 50 aa, Oryza sativa
  Clone ID: PAT_MRT4530_49479C.1.pep
ISIKIIHKASSLQKKISSELWVYILYRNLHRFYRNITDHIILEFNCYVYS

SEQ ID NO: 149114 - protein, 1172 aa, Oryza sativa
  Clone ID: PAT_MRT4530_4947C.1.pep
MAKRGGAAGEPIPLSRFGALVAQLESVVASARQKPPDALLCFDLLSELSSALDEAPKETIQLWQRKCEDALQSLLFLGARRPVRRLASSAMGRIIERGDAISVYSRASTLQGWLVDGKRTDPMAYAGVAQCLGEIYRLFGHKITAGLIETSNIVAKLMKYHEDFVRQDALLLLENALEGSGGGGSGAAYLEAFRIIMRGGVSDKSFIVRVAAARCLKAFANIGGPGLGMAEIDTSMSCCVKGLEDNVSAVRDSFAEALGSLLALAVNPDAQVKKGVKKQSTSGKKFDDGLQKHLILPFVRANGANAKKLRIGLALSWVFFLQLTCSHSKLVRFYTHMHHYSYLLWVLWYLPGTITLCLFLSWSQLLATPVELSSAAQVHSSPTPGGDYSGYLAMIHMKYGTPDSELQNYAVQVTEILQGNASPDPHALACVLYVLRVGVADQMTEPTQREFLVFLGRKLESSNYTALMRVATLRILSYLLRSLGEVPSEFKDILDNTVVAALSHSSAHVIIIFGDTTKIRRHGGIGYHFSLVRVEAALTLRALAEVDPTCVGGLVSYGITTLHALTETLSFDKGKIMNLELDSLHGQASVLAALVAISPKLLLGYPARLPKSVLEVSKKMLNGFSRNPVAASAEREAGWLLLASLLASMPKEELEDQVFDVLLLWAGPFTGNPESYLRHVQDWASELRVLSVAIEALTAFIRSFVSPIMTNANGGILLNPVLAYLGGALSLISSLSSKKLPNVNSALNLFTTRTLMAYQSLSNPMVYKSEHQQMLQLCSSPFSDPSGWEESSCLKFLLDKRDNSLGPWIPGRDSFEDELRAFDGGVDGFLPCVWDVEMSNFPQPESVSKMLVNQMLLCYGSIFACQDNTVKIRLLNNLDQCLKSGKKQSWFMTVVTNSCVALLSGLKEFLTLRGAQSLSTDILSMVQSTFKGILLESEISTAQRRAACEGLGLLARIGNDAFTARMARSLLGELITPIDLSYTASVTLSLGCIHRAAGGMALCTLVTPTLWSLHALLLTIEAAGLSYVSQVQGTLFLAMEILLLEENGYVDLRQEIGHLINAIVAVIGPELAPEISSSSETATLIESVRFAQQLVLFAPQAVPVHSHVQSLIPTLYSRQPSLRHLAVSTLRHLIERDPKPEAVKPGFSRFSEVDYQPAIFQNLKLPQTALEE

SEQ ID NO: 149115 - protein, 93 aa, Oryza sativa
  Clone ID: PAT_MRT4530_49480C.1.pep
RCCRPYGTPAYSRPGCSRCQPPPRPLSTPLRQAVVPPPHARQTPCSMQRCSSSSGYDGPSLAQEFIRSRSNTATSPSRSLWRTMVWFRAVEKR

SEQ ID NO: 149116 - protein, 99 aa, Oryza sativa
  unsure (1)..(99): unsure at all Xaa locations
  Clone ID: PAT_MRT4530_49481C.1.pep
GYMDNHNMEGDDYVASVIASLKEIAENDDEILVLDSAXINGSTFVLGRTIIKMGTRHNCLKRFXINNLYRFLQKNFRSNMSSLKINPGKTLQVGMLYEI

SEQ ID NO: 149117 - protein, 628 aa, Oryza sativa
  Clone ID: PAT_MRT4530_49482C.1.pep
MTMFHNRLTGSLPREFENLTGIPDLWLDNNQFSGHLPAYVCMGGRLKTFMVSVNTFDGPIPRSLKTCTSLVRIAVHKNQLTGDISEHFGVYPHLKTVSLAYNRFSGQITPNWVASPQLEEMYFQGNMITGVLPPALSKLSNLGVLRLDLNNISGEIPAEFGNLKSLYKLNLSFNQLSGSLPAQLGKLSNLGYLDVSRNNLSGPIPDELGDCIRLESLKINNNNIHGNLPGTIGNLKGLQIILDASNNKLDGLLPQQLGTLQMLEILNLSHNQFRGSLPSSIASMLSLTVLDVSYNNLEGPLPAGHLLQNASISWFIHNKVIASGHHKPKLLSLLLPIVLVVNFDGRLAFEDIIRATENFNDKHIVGIGGSGKVYKARLQDGNVVIVEKLHPVEEESNVKLYGFCFHPNYNFLVYDYIQRGSLYMTLKNEELAKELDWSKRVTLVKDVAQALSYLHHDCSPPIIHRDITSNNILLDTAFKAYVSDFGTARILKPDSSNWSALAGTYGYIAPELSFTCVVTEKCDVYSFGVVVLEVVMGKHPMELLQTLLSSEQQHTLVKEILDERPTAPTTAEEESIEILIKVAISCLEASPHARPTMMEAYQTLIQQHSSSSCPIRFNEVTLEQLRNT

SEQ ID NO: 149118 - protein, 180 aa, Oryza sativa
  Clone ID: PAT_MRT4530_49483C.1.pep
MARLLAQTLTLARPAAAAAAPLLPLRGLATKVEVIEIDLAEDDDSSASTSGPASSPASVEVVGVRRLEEAIHGVMVRRAAPDWLPFVPGGSFWVPPMRRPHGVADLVGRIAAAASGADAEVVAGGLAYEPEVYAPMTEEEALSFSTARGWPSASYFVEGKFPHTKKKSRKRATRTDEEES

SEQ ID NO: 149119 - protein, 130 aa, Oryza sativa
  Clone ID: PAT_MRT4530_49484C.1.pep
FTFPWLSHCYWFLQSKHKQHAGQGKLKPHQSSTILSNAHTQQHNNHSIILGFSQHTSHPHFCTLIPMAWHCVGVLHLWHISLCTWLHLARLSPSFIPLIRLQSVIQAAMWLSIHWSIRLVFPLCCKHLFN

SEQ ID NO: 149120 - protein, 114 aa, Oryza sativa
  Clone ID: PAT_MRT4530_49485C.1.pep
HILGSAQHAGCRCQNNGTSTGSCTNKNSAYLHYSIDRPGVWIHQSVGQRTSNMYNNMMHWHVILNFHAYCRVETTITDCYYRVDYTLRNLVAEDTTSDNITKMIIFNYKALTQY

SEQ ID NO: 149121 - protein, 177 aa, Oryza sativa
  Clone ID: PAT_MRT4530_49486C.1.pep
MGAWAVGGVWHGAAAGGGGVGGGRLGQGPSNEASLRLAASCDDGSSPACLNDTWCRLGKCGADGGSDPSGCGGTARGDAGTDWGSAVPTAAAALAAGGGGGGDTVKGDAGAGWGSAAATRCGRGSRIRGSSGGGAKERCDADKPPMRRFRKLSWHQMSPIEVRMEYTSSSAKLSKLN

SEQ ID NO: 149122 - protein, 123 aa, Oryza sativa
  unsure (1)..(123): unsure at all Xaa locations
  Clone ID: PAT_MRT4530_49487C.1.pep
SPTVEQGWNKPDPNRNSLIKEALISKRSDGWKFECELILLPLDSFPSFARXARLWQGGGRATPDPRXCCPPPRFGFLIDGDGFVWRWRGQGRGVRRLGWRRALPRAPGSXXAPIXRRHRRCSR

SEQ ID NO: 149123 - protein, 70 aa, Oryza sativa
  Clone ID: PAT_MRT4530_49488C.1.pep
FKDGIGTWLLLLMSSHTKGSDPIPGLLTDKVSSQNFLTIPNSVILYLYILETQLKLLKYYSEEPSDMTSY

SEQ ID NO: 149124 - protein, 49 aa, Oryza sativa
  Clone ID: PAT_MRT4530_49489C.1.pep
SRVNVMRLQSESLSKLLGPIITTTLDPHLRGTRRGDTKNSEARTGNSTL

SEQ ID NO: 149125 - protein, 45 aa, Oryza sativa
  Clone ID: PAT_MRT4530_4948C.1.pep
VSHDFRLINQVAQKIWVCEKQAVTRWEGDIMEFKEHLRSKAGVDD

SEQ ID NO: 149126 - protein, 542 aa, Oryza sativa
  Clone ID: PAT_MRT4530_49490C.1.pep
PEILLQLAIHLGGWLLMWAPASSPTILVAFGLLGLVLAWQAGLQLHRLWWRPRRLEKALRARGLRGSSYRFLTGDLAEESRRRKEAWARPLPLRCHDIAPRIEPFLHDAVVRPEQHYGKPCITWLGPTPEVHVTDPELAKVVMSNKFGHFEKIRFQALSKLLPQGLSYHEGEKWAKHRRILNPAFQLEKLKLMLPVFSACCEELISRWMGAIGSDGSYEVDCWPELKSLTGDVISRTAFGSSYLEGRRIFELQGELFERVMKSVEKIFIPGYMYLPTENNRKMHQINKEIESILRSMIGKRMQAMKEGESTKDDLLGILLESNMRHTEENSQSSQGLTIKDIMEECKLFYFAGADTTSVLLTWTILLLSMHPEWQDRARKEILGLFGKNKPEYDGLNNLKIVTMILYEVLRLYPPFIELKRRTYKEMKIGGVTYPAGVIINLPVLFIHHDLKIWGSDVHEFKPERFSEGISKASKDPGAFLPFGWGPRICIGQNFALLEAKMALCLILQRLEFELAPTYTHAPHTMVTLHPMHGAQIKVRAI

SEQ ID NO: 149127 - protein, 552 aa, Oryza sativa
  Clone ID: PAT_MRT4530_49491C.1.pep
MWAPASSPTILAAFGLVGLVLAWQAGLQLHRLWWRPRRLEKALRARGLRGSRYRFLTGDLAEEGRRRKEAWARPLPLRCHDIAPRVEPFLHGAVGVGAAHGKPRITWFGPTPEVHVADPELARVVLSNKFGHFEKVSFPELSKLIPQGLSAHEGEKWAKHRRILNPVFQLEKLKSILFLYLIIEMSSENVQLMLPVFSACCEELISRWMGSIGSDGSYEVDCWPEFKSLTGDVISRTAFGSSYLEGRRIFELQGELFERVIKSIQKMFIPGYMYLPTENNRKMHQMNKEIESILRGMIGKRMQAMKEGESTKDDLLGILLESNTRHMEVNGQSNQGLTIKDIMEECKLFYFAGADTTSVLLTWTMLLLSMHPEWQDRAREEILGLFGKNKPDYDGLSRLKIVTMILYEVLRLYPPFIELTRKTYKEMEIGGITYPAGVIINLPVMFIHHDPEIWGSDVHEFKPERFSEGISKASKDPGAFLPFGWGPRICIGQNFALLEAKMALCLILQRLEFELATSYTHVPHTIISLHPMHGAQIKVKSYMTISDYSVFY

SEQ ID NO: 149128 - protein, 343 aa, Oryza sativa
  unsure (1)..(343): unsure at all Xaa locations
  Clone ID: PAT_MRT4530_49492C.1.pep
VEVIRGCSILAAVGLRMASTPGVSAILFDALAKANINVRAIAQGCSEYNITVVLKQEDCVRALRAVHXRFFLSKTTLAVGIIGPGLIGGTLLDQLKDQAAVLKENMNIDLRVIGISGSRTMHLSDIGVDLNQWKELLRKEAEPADLDSFVRHLSENHVFPNKVLVDCTADTYVACHYYDWLKKGIHVITPNKKANSGPLDRYLKLRTLQRASYTHYFYEATVGAGLPIISTLRGLLETGDKILRIEGIFSGTLSYIFNNFEGTRTFSNVVAEAKEAGYTEPDPRDDLSGTDVARKVDTASRSRGTSPGIGWSPRRSSIVRYRSCSPSWYASMRSPSWESGVAN

SEQ ID NO: 149129 - protein, 81 aa, Oryza sativa
  Clone ID: PAT_MRT4530_49493C.1.pep
MDLSQNNLSGDIPVYFGTFESLCTLNLSLNNLEGPVPEGGVFANSSDVFIQGNKEVCEDDTIVDNELKMNQIATMRIPALQ

SEQ ID NO: 149130 - protein, 78 aa, Oryza sativa
  Clone ID: PAT_MRT4530_49494C.1.pep
LMTTGYCFIFKFNHSYLSYKSINFFKNTYIVKVCCTLNNMIILKLLMVKIKNYSSVTSTGKWSSMTRIVGAHASAHAS

SEQ ID NO: 149131 - protein, 71 aa, Oryza sativa
  Clone ID: PAT_MRT4530_49495C.1.pep
YAFGSFPLVFLFLGVPSFRHPSRHALRPVSKVAQVCLSGLRIRINSPCGCPSPLYFLIALGTTRISPQSNS

SEQ ID NO: 149132 - protein, 57 aa, Oryza sativa
  Clone ID: PAT_MRT4530_49496C.1.pep
FFFFFFDLQKCFYMIHFHDSKYNRVSPLMLETEQNNCSALKQKCSFSSLLCTDRSLF

SEQ ID NO: 149133 - protein, 409 aa, Oryza sativa
  Clone ID: PAT_MRT4530_49497C.1.pep
MEMKLTIKRVPTVVSNYQEDAAATAGERPRAGCGRDCLGDCCLPDSKLPLYAFKASPKKPSSQEDASNDEFFVNLLLGLWEDRMARGLFRYDVTACETKVIPGNLGFVAQLNEGRHLKKRPTEFRVDRVLQPFDAAKFNFTKVGQEEATFALVSPIEYGHVLLIPRVLDRLPQRIDQESFLLALHMAAEAASPYFRLGYNSLGAFATINHLHFQAYYLTVPFPVEKAATKRIFLAEGTMNSGVKVSKLMNYPVRGLVFEGGNSLSDLANVVSSACIWLQDNNVPYNVLISDCGKKIFLFPQCYAEKQALGEVSQELLDTQVNPAVWEISGHIVLKRRSDYEEASEASAWRLLAEVSLSEERFEEVKAYIFDAAGLVQSDEEEVSEDEDATYTPVSIAPPAVAEGCLVLQ

SEQ ID NO: 149134 - protein, 73 aa, Oryza sativa
  Clone ID: PAT_MRT4530_49498C.1.pep
HSMQVCHRDLKLENTLLDGRTGPRLKRCDFGYSKSSVLHSQPKSTVGTPAYIAPEVLLKKEYDGKVLSIPFVL

SEQ ID NO: 149135 - protein, 1028 aa, Oryza sativa
  Clone ID: PAT_MRT4530_49499C.1.pep
GTRTGGRCRCPSSRGGRWWCTSTPPTRAPGCTKQACAFRDSYEKFKKAGAEVIGISGDDAASHKEFKKKYKPGCSVPEVSHPRSWSSLRVMTTEQRLELQQRIMNASENGKLPFRDCRIIARELNLSVQQVLCVSSSQNRQLHGQPTVPAARKRRKVNSGSTSKKRKRSADEITLKFIKRNVETIESTEPRPAQSIPHEEVDEDTISSPRISRSTILRGSCMREKRFVWTYDSDRKLLMIYTRSRATLGAVSHRVDWNSLSDLPAPPAACRRRIAYLRKKTNIRPAVSRVCDLLGIRYARYLEKEKRWKLRGLPSEISNSSHDNCVDPDSEQFFWDNFEDPEIKSALDEVLEFIRVEKMEQTKRVGSKNERNNDDNDATKEVPNGQKQPVLGARATCASTAIQESGLREHAKSYRLSNAIHASKNMDIPFRSHEKAINHNKDDIAKRDVCRSLAVANALELLKLAFLSTSSGPEVQASLAATLQLYSETEIFTAFSFLREKNFMVTGDGTKPYTLSGKFFFNASNSPFPFGSGKKASEFSQWVGQQKNTMDDGVCLYPDLQCGEIVQLFSLVLSGESFISPSLPSEGVGEADEPNSSSLFVDDNSELDESSHKRKADMVKLKSSKTKKHKPLPKIESDFCYRREKGFPGLQVALNQERIKTSNLTQELHDKECLIFTSAWEMGSKDVDSQVESHNMSSLYLNNSSSCRRLLSESHLENSYSGWPWDAIKTYAEQSPSLCCNKNEPDILSSDLFRNAFCVVHKAGEQGVNLREMSQALDPLGIQFVDLIVHTLKRFQLVIKVNAYDGVQIVDSIHKSKYHITTLADSSHCSCLRASAFEMAETGDTENLLREKHAMSSDVQGSVKMLGDGHTVTVLNVQSKSSSPQIRYQSPVGQKRSFTPAQDNRGSDCCHACERHIYHPILPWINGDGSMNNTVYEGLSRRIIGYTMQYPGVVEEDIIHRMDVLNPQTCRTLLEKLMFDKHLYARVFDERAPSAPTLLQSILKQDRCKEPSKCNKRYFANPMSTFLL

SEQ ID NO: 149136 - protein, 119 aa, Oryza sativa
  Clone ID: PAT_MRT4530_4949C.1.pep
SNANVPSCTVVVLFRPAIAEGGRPQNLGGGLKPNPLGNGVGKKLGPPPLVSKPRGPTNPLGPRGLWVTKTFFSPEAWGWASRPRFEQPFRNGGVVPFFKKKKKKKKKKKKKKKKKKKTT

SEQ ID NO: 149137 - protein, 383 aa, Oryza sativa
  Clone ID: PAT_MRT4530_494C.1.pep
MGSKNQFDLLVDVDNDDPSHLIAAAEKKAAAAAASPKLASSPAPAPAKGPTKPAPPAQAVREARNYGAPRDGAGRGGPGRGRGGGRGGRGGPRRDFGEGDANGFEGGYGGGGGFGDGGLARGEDGEGRQAERGRGPRQPYRGGGRRGGYSDGQSGDDYGRPRRAYERHSGTGRGYELKREGSGRGNWGTVTDEGLAQEVAEAVNTEEAPATAEDEKKPEDVPQSEVDKDKESPENEEEEKEPEDKEMTLEEYEKVLEEKRKALLALKAEERKVEVDKELQAMQQLSVKKANEEVFIKLGSDKDLKKKEKDEKDERTKKSLSINEFLKPAEGERYYNPGRGRGRGRGRGDRGGFYGGYNGNGGRRQAAAPVIEDQAQFPSLGGK

SEQ ID NO: 149138 - protein, 253 aa, Oryza sativa
  unsure (1)..(253): unsure at all Xaa locations
  Clone ID: PAT_MRT4530_49500C.1.pep
MSYKTKSSLSAARGSKACHVSTKPPLLLPHPDIPKPPTKHTHPNPTNSRSCRPRILAVNLPPRSGDGIRGLHRLQAVPAPAPAPALVAAAAAAAPLHALHRRLPPRRPQRDNNANAGARSTAVDDGEEQDRLRQGDDDEQLPLLLSQSQEHVSKGSAAPNFTLRDQDGRAVSLSKFKGRPVVVYFYPADETPGCTKQACAFRDSYEKFKKAGAEVIGXWGVPADLFGTLPGRQTYVLDKNGVVQYIYNNQFQP

SEQ ID NO: 149139 - protein, 438 aa, Oryza sativa
  Clone ID: PAT_MRT4530_49501C.1.pep
MEMKLTIKRVPTVVSNYQEDAAATAGERPRAGCGRDCLGDCCLPDSKLPLYAFKASPKKPSSQEDASNDEFFVNLLLGLWEDRMARGLFRYDVTACETKVIPGNLGFVAQLNEGRHLKKRPTEFRVDRVLQPFDAAKFNFTKVGQEEVLFQFENGGGDDSFFVESSPISVADRAPNVVAINVSPIEYGHVLLIPRVLDRLPQRIDQESFLLALHMAAEAASPYFRLGYNSLGAFATINHLHFQAYYLTVPFPVEKAATKRIFLAEGTMNSGVKVSKLMNYPVRGLVFEGGNSLSDLANVVSSACIWLQDNNVPYNVLISDCGKKIFLFPQCYAEKQALGEVSQELLDTQVNPAVWEISGHIVLKRRSDYEEASEASAWRLLAEVSLSEERFEEVKAYIFDAAGLVQSDEEEVSEDEDATYTPVSIAPPAVAEGCLVLQ

SEQ ID NO: 149140 - protein, 78 aa, Oryza sativa
  Clone ID: PAT_MRT4530_49502C.1.pep
CYLIDHFIQLLYYLCGSLSRSGFEILVCLELPAPSEIQIPDQKYIYILPCTSSYHPKSSKFEFWSEFITFCLYFFTTL

SEQ ID NO: 149141 - protein, 125 aa, Oryza sativa
  unsure (1)..(125): unsure at all Xaa locations
  Clone ID: PAT_MRT4530_49503C.1.pep
MMHAAAWLLLQQLSPAAARVARAVDDDSSVQVSKGSAAPNFTLRDQDGRAVSLSKFKGRPVVVYFYPADETPGCTKQACAFRDSYEKFKKAGAEVIGISGDDAVXQKEFKKKYKLPFTLLSDEGN

SEQ ID NO: 149142 - protein, 85 aa, Oryza sativa
  unsure (1)..(85): unsure at all Xaa locations
  Clone ID: PAT_MRT4530_49504C.1.pep
KKKKKKKKKKKKKKKKKKKKKKKKKKKKKKKKKXKXKKKKKKKKKKKXRGGPHKKNKSYCPGGGRENFFFGAPKKNFRGGVLKRG

SEQ ID NO: 149143 - protein, 82 aa, Oryza sativa
  Clone ID: PAT_MRT4530_49505C.1.pep
MKLSMKRPPYNRTSRMDFSFPGAPELLSLLETWTPRVHEDLSSWSRYCQCEVIEKLCRGSSRVDLQACKLQSYLSYRVFISL

SEQ ID NO: 149144 - protein, 73 aa, Oryza sativa
  Clone ID: PAT_MRT4530_49506C.1.pep
MLSRSECGQNQARKTYIYSHLCICIMGGQQNPYYFLEDNLQATLVLHPESPKGRKSTMLGHCFKKIMPPTIFL

SEQ ID NO: 149145 - protein, 109 aa, Oryza sativa
  Clone ID: PAT_MRT4530_49507C.1.pep
MTTTRQLADPSMQAEDTRTNLNLAQLQCSSCFSSGSLELHIQIQCPCLLTLVQCQEAASWLLVGQSDISINRSTGNCNLTQWKALPAKGRRRRLVAGRVDVLRTYGRHP

SEQ ID NO: 149146 - protein, 98 aa, Oryza sativa
  Clone ID: PAT_MRT4530_49508C.1.pep
MAITAFGGQSISSRLIYRRDKTTIDLRRQFGWRCLPPSSSTGPSSASHAAADSSAPLGRSFRLAATARACPTACEAGPRYAMLTVSPPFVRRDAAFLR

SEQ ID NO: 149147 - protein, 470 aa, Oryza sativa
  Clone ID: PAT_MRT4530_49509C.1.pep
SIFFGSSVIRFLLSFCQHSRDHLLIPTFWNSTYFFLGPMGDPDPTEFINAETERIPFKQTKPDLAQWKSTFRSWPSKLKGYKSWYKRMVAAKRSNWEKVGIAQCLALSIADIKKDEPLLSAVGCFWSDTLNAFILRQGPMTPTLLDVKMLTGLDILSSTNPFDLDIKCSYQLNTKKKNNCWSGFIVDHRKTGLVSDEEHAAFLSLWLERFVFYGSTCAPTANFLHFAEALVRKEKIPLGRYLLGATYQMLHVSSAGILLNKPVSYGGPWWFIQLWLTIHTNTVANRPSLLESADLSNMFSFDVKEFLNEGEGNSPEGAQITDIQDRIPDDLSNKIASAAFLEQYEKQCHRATKRIADPHEAQALDATIDTCQKQIIEDKAILDQLAIALSPMEHELATLQVKEAALVEELQQCRADILSVEGKIKNLPHATEEQRSKLKASLKHLANLVKSSKEIPGTTEQDQEDLDEID

SEQ ID NO: 149148 - protein, 52 aa, Oryza sativa
  Clone ID: PAT_MRT4530_4950C.1.pep
FLYFFFWEGPRNRRHSDDPVPSAAAAEISRDKPWVKHSVGTVDHRQPSESWS

SEQ ID NO: 149149 - protein, 71 aa, Oryza sativa
  Clone ID: PAT_MRT4530_49510C.1.pep
MAPTVESVEVEEEHQAVGLGDRDFFGHLSPFAISRKSTGDDHVAIKILGRGNCHSGLHCNKNDWKHCIYPL

SEQ ID NO: 149150 - protein, 330 aa, Oryza sativa
  Clone ID: PAT_MRT4530_49511C.1.pep
MKKPLECKFQVSADIGDFTLYQFKHVTFDSWWSDWSKHLFSAPSFYYLTKIDNRIKISKPLAPKRSLSDRPIFYAQVKASSLIDPSAPSAQEPSPSAQAAPSVQAVTEEITSTSSKAKDLSNMFSFDVKEFLNEGEGNSPEGAQITDEVRALLVEIADRLNASLDTLEIQDRIPDDLSNKIASAAFLEQYEKQCHRATKRIADPHEAQALDATIDTCQKQIIEDKAILDQLAIALSPMEHELATLQVKEAALVEELQQCRADILSVEGKIKNLPHATEEQRSKLKASLKHLANLVKSSKEIPGTTEQDQEDLDEIDQIRLRVINAIVDGC

SEQ ID NO: 149151 - protein, 328 aa, Oryza sativa
  Clone ID: PAT_MRT4530_49512C.1.pep
MGDPDPTEFINAETERIPFKQTKPDLAQWKSTFRSWPSKLKGYKSWYKRMVAAKRSNWEKVGIAQCLALSIADIKKDEPLLSAVGCFWSDTLNAFILRQGPMTPTLLDVKMLTGLDILSSTNPFDLDIKCSYQLNTKKKNNCWSGFIVDHRKTGLVSDEEHAAFLSLWLERFVFYGSTCAPTANFLHFAEALVRKEKIPLGRYLLGATYQMLHVSSAGILLNKPVSYGGPWWFIQLWLTIHTNTVANRPSLLESAFPKYDSNEDQSESRSCKSYREAASVYHGVKPSVEGFKTWFDIFYNNNATDVLFAYDAYTEFNLPMDLDLSQKC

SEQ ID NO: 149152 - protein, 81 aa, Oryza sativa
  Clone ID: PAT_MRT4530_49513C.1.pep
MPRKPKVSSARFVHGGAMHAAARKLPTSYSGRLRCNLARSQAATVTLHAPSASRIISINLYQKFNNVKCKLPTLPRPRSSK

SEQ ID NO: 149153 - protein, 663 aa, Oryza sativa
  Clone ID: PAT_MRT4530_49514C.1.pep
MTSEYEGYRGMKSLPTSSVMISGPTTASNVPIPLCEKGKADREATIIVSVFENSFTSAFLDRTETSCVQALPLTDVIGPLVDHQAAASLKEGIAKEASDIAAAAAATMSGSNIPKRGRKFSSVLGNRRKAPTPLPAFMEITEILHRTARAKAVQDGSGGNSSASPAAASTDVVVVPRSREATPSGPAGSLVPTCGPPADVLTWGEFQIEMERILQADAHGIGREIEEVKAAAAASSANERADKLTRDLAEVREDLQKMRELVAGNERQRQGLEHHMSELENNLSEIRGSLRVTYTGLYQLAGQCGVTTTIPVNPNEFSLMSSLAELATAMEEIGNVISGGGSGAQARRDGEGADEDGDATATTMATFPSDGDGWSDGEARLERRRRRRHEEIPSKHAARIGEETSNGIYTEVCHDLTCVRLVHPELDLQRILDQGAANYAPSLDVDVEDVQQRGQPESPVVVSALALEPYVLQDYVDQNLSMEASMATTSLDLESALADRDRRIQYWRTKFEVAELERTMVEVKKDRAVEALRGREVWFNSYLRSYCTAMAGVCRELRVPRGHPEESAAGYISWLNGACAQLEGIGKRIDEALKQECRRSSQYAGGHVLACIQYHHPQLHLEFLHEGFSPSRRTPAEIDNLAKSIAPLAEKVFQSMDWRWPSW

SEQ ID NO: 149154 - protein, 320 aa, Oryza sativa
  Clone ID: PAT_MRT4530_49515C.1.pep
MAASRYYLNLDFDVSDMKPLPDYCFSEAWEVWEAHADQSDYEREQAVLRFYEEKEKEIKAAYSEALSDEDDEEKDGEICQLLGYEEEHGQVSAGMEDIPENHVKKGCTYASPEYLAELTQKILLEINVNEDLGNVLCHEMKHARNEGGQVFEGELEHKKARMAESSQNKGEDEETLLPKKFMLLSVENGSGFCWGGKANSYIRGSGPHFYLKGEKVYFDSLKKPLILVNTAVLVGVMGNKGRGLLGGFLPRPVFPISLLRQEVWLRRLRRRRGGCNRVRAGIVSSPSEGSSASASHILYRVGPFDYELAVACKSRTKAAR

SEQ ID NO: 149155 - protein, 640 aa, Oryza sativa
  Clone ID: PAT_MRT4530_49516C.1.pep
MDLDKSTSTSASLKKLQEDGALPGRGTMEREPGGIEPEPVLGLMVAVEDYILCGFLPPPSEFLLLVLNFYGLSLLHLNPNSIAFLSIFSYLCEAYIGVELFFYLFRFYYELCWMEPKKVSGCVGFRLRDGLKSRYIPFQCPSSRSKWRARWFYLQIENLDPVFVVLEEQPDKILEWTAKPALTPSLQSFTDIIDDLRVRGFLGYEVAADFIGLNSETVERRVGQVMISGLTTVSNVPVPLCEKGKADREAAINALPLTDVIGPLADHQSAAASLKEGVAKIKSTGTLAYPKASFGPALELSRSPRPRVFHINTKEASDIATAAAATSGSNVPKRGRKFSSVLGTRRKAPTPSLDFMKITEILHRAARAKAAQDGSGAVFSVSPAAASTDVVVVPRDREATPSGSAGGLVPARGPPADVLTWGELQAEMERILQAGARGIGCEIEVAKAAAASSANERADKLARDLAKVREDLQKMRELVAGNERDVDVEDVQQRGQPELPVVVPALALEPYVPQDDADQDLSVEMGTATTSLDLESALADRDRRIQYWRTKFEVVELERTMVEVKKDQAVEALQGREVWFNSYLRSCCTAMAGVCRELRVPHGNPEELAAAYISWLNGACAQLEGIGRHIDRADMLEGTC

SEQ ID NO: 149156 - protein, 557 aa, Oryza sativa
  Clone ID: PAT_MRT4530_49517C.1.pep
MEKITDEGIEGKYHSRRKVPQYWKPQTTKRIAELDDTDETVVELARLDHPGDLVPKDSDFVGYGGCVGDVGVVVILDWSISPPSFPRLLRSRKKKTLAWSSWSLLRRSPAATDLDKSTSTSSSLKKLQEDGALLGRGTMEREPGGTEPKPVLGRMVAVEDYILYGFLPPPSEFLLLVLNFYGLSLLHLNPNSIAFLSIFSYLCEAYIGVEPFLDLFRFYYELRWMEPKKVSGCVGFRLRDGMKSRYIPFQCPSSRSKWRGRWFYLQIENSDPVFIVPEEQPDKIPEWTTKPALTPSLQSFIDVIDDLRVRGLLGYEVTADFIGLNSETVKRRVGQVMISGTTTASKVPVPLCEKGKVDREAAINVLPLTDVIGPLVDHQVVASLKEGVAQEASDVPAAATTSGGNIPKRGRKFSSVLGNRRKAPTTSPVFMAITEILHRAARAKAVQDGSGGNSNLESALADRDRRIQYWRTKFEVAELERTMVEVKKDRAVEALRGREVWFNSYLRSCCTAMAGVCRELRVPCGDPEESAAGYISWLNGACAQLEGVGKRIDEALK

SEQ ID NO: 149157 - protein, 157 aa, Oryza sativa
  Clone ID: PAT_MRT4530_49518C.1.pep
FRVLCCRCRDVDVEDVQQRGQPELPVVVPALALEPYVPQDDADQDLESALADRDRRIQYWRTKFEVVELERTMVEVKKDQAVEALQGREVWFNSYLRSCCTAMAGVCRELRVPHGNPEELAAAYISWLNGAFSEDSRRDRWSGEVDGAACRESLPVH

SEQ ID NO: 149158 - protein, 67 aa, Oryza sativa
  Clone ID: PAT_MRT4530_49519C.1.pep
YIPPSYKTLLKPPLDAPFKKNLLYIKNGEINPVLLLYKMPLKKKGNFLFGAQIKKIFCVPNQKPFPG

SEQ ID NO: 149159 - protein, 65 aa, Oryza sativa
  unsure (1)..(65): unsure at all Xaa locations
  Clone ID: PAT_MRT4530_4951C.1.pep
CTRSYHLLVSPDSSSPRLIISSLLPCCRPSRPPVXRATARKATAGLRRDLRWTGESAEVVGRLVP

SEQ ID NO: 149160 - protein, 725 aa, Oryza sativa
  unsure (1)..(725): unsure at all Xaa locations
  Clone ID: PAT_MRT4530_49520C.1.pep
MNFLIRNPNSDLDKSTSTSASMKKLQEDGALPCRGTMEREPGGIEPEPVLGRMVAVEDYILCGFLPPPSEFLLLVLNIYGLSLLHLNPNSIAFLSIFSHLCEAYIGVEPFLDLFRFYYELRWMEPKKIENSDLVFVVPEEQPDKISEWAAKPALTPSLQSFIDVIDDLRVRGLSGYEVAADFIGRWIQPLXARAHLAFDYSGPEDATWVSPRGLNSKTVEHRVGXVMISGPTTASNVPIPLCEKGKADREATIIVSVFENSFTSAFLDRTETSCVQALPLTDVIGPLVDHQAAASLKEGIAKEASDIAAAAAATMSGSNIPKRGRKFSSVLGNRRKAPTPLPAFMEITEILHRTARAKAVQDGSGGNSSASPAAASTDVVVVPRSREATPSGPAGSLVPTCGPPADVLTWGEFQIEMERILQADAHGIGREIEEVKAAAAASSANERADKLTRDLAEVREDLQKMRELVAGNERQRQGLEHHMSELENNLSEIRGSLRVTYTGLYQLAGQCGVTTTIPVNPNEFSLMSSLAELATAMEEIPSKHAARIGEETSNGIYTEVCHDLTCVRLVHPELDLQRILDQGAANYARKGVMEEHVDFEYFVVVVEMSTSRMSSSADLESALADRDRRIQYWRTKFEVAELERTMVEVKKDRAVEALRGREVWFNSYLRSYCTAMAGVCRELRVPRGHPEESAAGYISWLNGACAQLEGIGKRIDEALKQECRR

SEQ ID NO: 149161 - protein, 126 aa, Oryza sativa
  unsure (1)..(126): unsure at all Xaa locations
  Clone ID: PAT_MRT4530_49521C.1.pep
SLVVIPALALELESALADRDRRIQYWRTKFEVAELERTMVEVKKDRAVEALRGREVWFNSYLRSCCTAMAGVCRELRVPCGDPEESAAGYISWLNGACAQLEGVGKRIDEALKXECRRSSRYVGGH

SEQ ID NO: 149162 - protein, 268 aa, Oryza sativa
  Clone ID: PAT_MRT4530_49522C.1.pep
MTATATEGPALREKRADQIKHVLVLQSKRELRSPDRMQGHDQVKFKTVDGGEHGLREVYDVTARKDPISLGKTTVVESRGRNYRDSGSLLLRNKKTQVFFRYSINKKGASKEFILTNSQSQLVYEAFGDMVIFDSICCVNWYNIPFVPFVEANHHCNTIIFGCGILSNETISSYVWLWQTLLEAMHQKHRKSLITDGDASTAKAIMKVMPNTDNRLCSWHIEENMKRHLRWQKLAYFKKFLYDNIDADEFDRSWIEYKDKYRFTENDL

SEQ ID NO: 149163 - protein, 85 aa, Oryza sativa
  Clone ID: PAT_MRT4530_49523C.1.pep
MRDRYRFQSSLVAQLHRSIDQLLPMDGRMDTSIYLCQCHRAATASISYSCRHFPGLIRSIRCTFTVEYSIDPGVFDLDCEPPTMT

SEQ ID NO: 149164 - protein, 415 aa, Oryza sativa
  Clone ID: PAT_MRT4530_49524C.1.pep
MSRYQDNPQAAAEPPPDGPGSGILVVEDEAAVERATRWWGLWLDRQVYGLPFPQSRKLKVEYATARMDGGGRAGTTHRTHTHTDRDDVVFVPVVGQPLSSGRYYAVRATGRHAGKVSACSREEDVVTCCGLWSFANDASPRPFVRGDVYQQVEVVQLSRRGGFRAVAVAPDGVPPGYLRRKGWKVHTSASTSCNLTDTAHGTDWPLRRRMPDLESFDVGVGGSTPVVVGRWYCPFMFIKDGGEQWLKDQVKRCMFYKMTLEQSWEEIYSCDNTHRGSISSRLDEVEVSVTVRRSTALLGGAGAVQGGAPQVFDGVMWFLPAASPAAAAGGGGGLGLDMVVWEKMEWELEKGGWVAGNGDDVERIKRVERHDGLGGHWDKFGCYLLVERFVLTRMDGSVALTYEFRHTDKITTKWE

SEQ ID NO: 149165 - protein, 377 aa, Oryza sativa
  unsure (1)..(377): unsure at all Xaa locations
  Clone ID: PAT_MRT4530_49525C.1.pep
MAGSKFGSFKSEKGSSAGAAAGAGAAAQRRDPYEVLGVGRNATEQEIKSAFRRMALKYHPDKNADDPVASDKFQEATFSYNILSHPDNGTQYDYXGIEAIEADSQELEMDQLSLKNINPRATAWWSPEVKETLRTTSKGVIVQHPFQSRQENPLVRKILLGRHYSHGIESKGIAPGVNILFLVNHSMGIXMVRNLGLALRKRPSQIIFSDVXCSIVFPDKLGASAVSEMMXILHKVFIETXRCVAVKVLAEPSKLTKVESEYREVLAKFTEMTSRYAQEMQTIDELLKERNAIHASYTNNTTLQRSSSSNKGKTSXSKESKSDDDQTVKKEKKSKSKSMEGSRSDDDGPRKEKKPKERLRRKKWFNIHLKVDKRRPC

SEQ ID NO: 149166 - protein, 40 aa, Oryza sativa
  unsure (1)..(40): unsure at all Xaa locations
  Clone ID: PAT_MRT4530_49526C.1.pep
VMAFQISLLVVLFTKWSRTXGHHRSHDVYHXRGIVVQVPL

SEQ ID NO: 149167 - protein, 94 aa, Oryza sativa
  unsure (1)..(94): unsure at all Xaa locations
  Clone ID: PAT_MRT4530_49527C.1.pep
KKKKPPPLLKKKKTHQIVSGHTLKHLAAAMVPVFLALXMLAKRTVEPERVSLFHRWKVKLVAVREIQFHKYRKTMAPPKTRFPKPGNHRCIGLF

SEQ ID NO: 149168 - protein, 48 aa, Oryza sativa
  Clone ID: PAT_MRT4530_49528C.1.pep
PNSTKNEIKNQTHVQSYTSTESCCSHKITVKVYLELESKPLSPDNQIL

SEQ ID NO: 149169 - protein, 309 aa, Oryza sativa
  Clone ID: PAT_MRT4530_49529C.1.pep
MHRHISHAARDLSPGTISHVPHVADGVGTSGPTSLTYHVLENICTLKFSLGFIFQLIQCRYLKRKNNRTPQDHPGIGEVITMYAFFKPSWTPNTTVTCDQEYQALAYPWSAKETPAYSSMMLPNVKDYKGRTWLLPLAAYLYNPWSTQQTKPAVRSDFNNYPPHSSNHHWMEVSYLEPCTTDFRTTISVATWKLSARGAKLLLPNPGRAPHVAFCLGHCLVGSHDGAWWLASNMLILLWFVGLPIRVLASDWPDMSGGFHPKFTCIQIFTKTCGNGIEGRIWYLRTVNIVLGCVPSAQICITMMHLMQY

SEQ ID NO: 149170 - protein, 81 aa, Oryza sativa
  Clone ID: PAT_MRT4530_4952C.1.pep
GNLRHSRGGASAYEPPPSDPPSPCRGLVVDVLRCRSSLSHPPSASSAAPTTSRRNAAADGSPLPATAPISRPPPLPPAPGA

SEQ ID NO: 149171 - protein, 186 aa, Oryza sativa
  Clone ID: PAT_MRT4530_49530C.1.pep
MCLPFLCGGDDPVKNSEVRPPARHPREGPNDGDGGHKPSPPPHAGGAVNGNGGAAPPAPATSPDTEVRAPTYGDKQISPPKEGAAGKPPMVVPAANHPQAPTGEEAKKAHGGGGAVGRRNGISSTVLTAPPPVGPMAAPATTVKDAPPAAAAAAANDVHGDADEQHPGYGDHGEVDDRKPRRRSWL

SEQ ID NO: 149172 - protein, 55 aa, Oryza sativa
  Clone ID: PAT_MRT4530_49531C.1.pep
MVPCLQQKPEAGFISIVELCHGQNPAEARLQDMINKRVRQRPEDDFISVLCFITS

SEQ ID NO: 149173 - protein, 222 aa, Oryza sativa
  Clone ID: PAT_MRT4530_49532C.1.pep
MDISRPNEGYTGCGSVVEMSWHRAGWVKGLCHILYDGFHGRGMLSKDVSCGHLEQHHPGLQGAGLTVHVPSVRLALCSGQTAVVAPVRPAKARRSDRHNVAGLTAPGHAEPSERGQSYGSPSKSMGGTTATVVQEVKGRVRRQENSLWRWFPSGNSRSTWVRRFQRSLPVWSAWRGEEASDINEMAHQRRCKEGAAGRRYGDGRRGGSAPWQPSASFLAATD

SEQ ID NO: 149174 - protein, 51 aa, Oryza sativa
  Clone ID: PAT_MRT4530_49533C.1.pep
DESTSQRGTKITLHLYEHQTFDVKLTTCKSRKTLETLEGLSIVNQQGRLDA

SEQ ID NO: 149175 - protein, 133 aa, Oryza sativa
  Clone ID: PAT_MRT4530_49534C.1.pep
STRWVLLRKNGCQFDSVNRTECQPNPFHVFSQKLKFPKFETLIFSFHKSRTLIFANPKSKPQISTNPKNLGGITHRIGARLPEWAAPDWGSPRCRPAARRRLQLRRSHAWHQPATHGYVAPPTSTEAPPPSPL

SEQ ID NO: 149176 - protein, 239 aa, Oryza sativa
  Clone ID: PAT_MRT4530_49535C.1.pep
MSKLCQSACKAAKSLLSATAAASSPRTSLLAEGRNAALATLTNLGRKTLPTAYAYSYHHNSSAAAAGWLAAIPAAVYMLQDQEAHAAEMERTFIAIKPDGVQRGLISEILSRFERKGFKLVAIKLVVPSKEFAQKHYHDLKDRPFFNGLCDFLSSGPVLAMVWEGEGVIKYGRKLIGATDPQKSEPGTIRGDLAVVVGRNIIHGSDGPETAKAEIGLWFEPRELVSYTSNEEKWIYGVN

SEQ ID NO: 149177 - protein, 968 aa, Oryza sativa
  Clone ID: PAT_MRT4530_49536C.1.pep
MFCLLGRQFEDAFWNISDITEEVHHTGSSAKCQEDMDGKNSDGPSVPSVICHEEREGELVDAFLEDLDAIHQGDATKGQEEPQETELEIEENEGCVPKKYYEYLQSLNDRQREAACSDVTIPLMIVAGPGSGKEFPPSNILAMTFTTAAASEMRDRIGTVVGKAVAKEIVISTFHSFCLQLCRTHAEKLGRTSEFIIYGNGQQRRAVIEAERLLESDKNNGLGDANKNCDGDIKNSFKDKAKKWQKFVTQAKASGRTPEEYEKKGDLTGASILRHYNEILRSCNALDYHDFINSSITLLTKFPEVYDECRNTWQAIVVDEFQDTSAMQYYLLKTLASHNRITIVGDEDQSIFSFNGADVSGFDSFRRDFPNHKEVRLSKNYRSTRAIVEAATALIHNNTKRQSHKLAETDNPSGNKIIVKECHSEDSQCAFVIDKIIETTSSSVEGCHFGKIAVLYRRQITGKAFQASFRNRKIPFNIHGVAFYRKKVIKAIMAILKTTLPGCDDDAPWHQAFKAILPGDKEEKKKIIHHIEKISLARKCSFISAATDIFSAKVSGTFKRAQITQGRKVLSALDSLSKLVERLYLMSFAFMYDLLEVDLETRHFFFLWCKCCTIHCSLVHFKKYLLEKRAIVDADGGKLLNEDNDIRSVLQFLMDDVSDFLSTHFSSSVDTSKTEEKGCASTLKAFIDYISLRETENFRSRKEENKNSITLTTIHQMYIPFYDSQSKGLEWDVVFIVQEYFLAFVHFSPFAQANDSEIPLLHEYNGTVKEAGSTLELLQPSRFLREIPAHLLEVQGEGTVRRTPEQPVNIPFDQPEGDTSVERPMVVRNETSPFPEMDQPCLANDFLKRFEIEDRAIISHIFHQWAKKQAFQNPKRLLDKIGFVIDERLRGKGYKRKDVLCKLKSFLSGDEAFGYAQYEHFQKQRIENSMGSSEPTPKQISYLRNLGCTITPTSRLHASHLIEKYKSL

SEQ ID NO: 149178 - protein, 631 aa, Oryza sativa
  Clone ID: PAT_MRT4530_49537C.1.pep
MAWWWWWSEAVVVGGGTGGGSSGTVVSICVFTAVLCVCLVAGHLLEENKWVNESITALLIGCVVGAIIFLLSEGKNSRILRFDEQLFFIYVLPPIIFNAGFQVKKKQFFHNFLTIMSFGIFGVFISVAIVSTGCYWLFPKVGFGDLGAVDYLDLILFTTTALGAIFSSTDTVCTLQVISQDETPRLYSLVFGEGVVNDATSVVLFNAIKNLDITQLKGGVALKVISDFLYLFFTSTMLGVTIGLSTAYALKALYFGRHSTDREVALMALMAYLSYMLAEFLDLSGILMVFFCGIVMSHYAWHNVTESSRITTRHIFATLSFIAETFIFLYVGMDALDIDKWKTSETSFKTSLGIFGIIISLVLLGRAAFVFPLSIMSNYMSGSSEKAPITFNHQFTFSGVTLDPVHATIITSTIIVVFFTTLVFGFLTRPLISAILPHQHRQSTTPGTGGGGRSTGSNSPKDDFIMPFLSPDEEASGSGSGFLQAKRSISMLLERPVHTVHIYWRKFDDRFMRPIFGGPMERDRGDSRCRESICGDGLGVGLGIRRRPWWSEIMRDTKARVQYTWLVKIPYGIRWRESSPEKKPTRTSMAEATKTKEPDADDPFELYKKGLTQQREIPEKSKPKLTSEGRN

SEQ ID NO: 149179 - protein, 109 aa, Oryza sativa
  Clone ID: PAT_MRT4530_49538C.1.pep
MPRCGCDGKRRGKPVDPYPRDYHAGRTFPGGSQKMGRGMPKAEAGRSVSPYPARAVPIMRAGMQSQHARAEDDDDWAEQPPCRHGSSYRRRRCKTCTRALAGSRQRTVG

SEQ ID NO: 149180 - protein, 200 aa, Oryza sativa
  unsure (1)..(200): unsure at all Xaa locations
  Clone ID: PAT_MRT4530_49539C.1.pep
TSLGIFGIIISLVLLGRAAFVFPLSIMSNYMSGXLEKAPITFNHGGGIWWAGLMRGAVSIALAYNQFTFSGVTLDPVHATIITSTIIVVFFTTLVFGFLTRPLISAILPHQHRQSTTPGTGGGGRSTGSNSPKDDFIMPFLSPDEEASGSGSGFLQAKRSISMLLERPVHTVHIYWRKFDDRFMRPIFGGPMERDRGNCY

SEQ ID NO: 149181 - protein, 263 aa, Oryza sativa
  unsure (1)..(263): unsure at all Xaa locations
  Clone ID: PAT_MRT4530_4953C.1.pep
MGDHVVVNVEGLGNDGGAVEKPSEAVNSSVVAAASLSTTVDTVEEGGGEEEPLIQAAECRICQEEDSIKNLEKPCACSGSLKYACATLVRXQYKHGYTAPPRVEPDDTIIDIGGDWARDPRIIAVAAAQRRLLETEYDEYAGTDASGAAFCRSAALILMALLLLRHALSISDNEGDDDASTMFSLFLLRAAGFLLPCYIMAWIFSILHRRRQRQEAAAIAAAEVAFILQSAQGHALQFTIAPDSPATPQHEPQQQQPQPQPQQ

SEQ ID NO: 149182 - protein, 129 aa, Oryza sativa
  Clone ID: PAT_MRT4530_49540C.1.pep
MEIQYELNSDRDPNRSPTGLGGPSHGFYIFVRGVTGGGIPSPWEYGEENAREGEGRAGAVNYFLYIDARYILRTSVVEDIFIRLDSQASIVPRVAAAAKIHLRLAENLAPALRPPPSRAAAAPIGLPLP

SEQ ID NO: 149183 - protein, 140 aa, Oryza sativa
  Clone ID: PAT_MRT4530_49541C.1.pep
SVDSIRDILFMVMDNKTLISSDKFKKARNDFLKSPSDLNAQYRYALAMVYSKDRTHIEEGLKLLKDLSGNANFPEICNCLYHICYGYFRVEKYHDVKLYAEKLYKESPNLLIPDKDSMAVIMHKTQALVLLSDEFLQKPH

SEQ ID NO: 149184 - protein, 57 aa, Oryza sativa
  Clone ID: PAT_MRT4530_49542C.1.pep
CNCHLTADLEIIYFIFIVVLNYFFSIHSDPSLLGINRRHFLAAGPHRNCIEDEVLTG

SEQ ID NO: 149185 - protein, 64 aa, Oryza sativa
  Clone ID: PAT_MRT4530_49543C.1.pep
MPERLRSPGRPLIPLLALRHSCPARWAAHVFEPDSTPDCWCSRGQAMPGGPYGHLYYSPWKLWV

SEQ ID NO: 149186 - protein, 63 aa, Oryza sativa
  Clone ID: PAT_MRT4530_49544C.1.pep
LRKLFSLKCSSRLLSRETLPSQRHHYTIYLLASVLSQYNSLYHRPATENIVQQTKLIKLSTDI

SEQ ID NO: 149187 - protein, 230 aa, Oryza sativa
  unsure (1)..(230): unsure at all Xaa locations
  Clone ID: PAT_MRT4530_49545C.1.pep
RTTLFWKDQWMPQHLEYTYPVLFSFAINKECAVESQFSHNTWQLQLHPNLSYQAETELQALLQNLQTISPSPETADTRELLYPKPLISTANAYRLLTXHGSLWNPADYIWIYTIPQNCKVFLWLAFRDRLNTKANMVNKKWSNDPHCPICLALESADRIILRCRNANNLWKRLGLMHSANRSETISDFIQAVIDRTQSTKRLEPIWFAACAYTLWKSRNNMVFERHMDHI

SEQ ID NO: 149188 - protein, 126 aa, Oryza sativa
  unsure (1)..(126): unsure at all Xaa locations
  Clone ID: PAT_MRT4530_49546C.1.pep
MELDTDPTKLKAKPIIKPKVEPCDDDDELPPPPPPASGSGEDWEATTPLAAXNPFFTALIAKSHLHPKFQMWIPPRFQHRLAXEGXTAAVLQSGGKSLGENXFGHLKMKXLDAGLSKFXVENRLLV

SEQ ID NO: 149189 - protein, 103 aa, Oryza sativa
  Clone ID: PAT_MRT4530_49547C.1.pep
MQAVKEKVKDKVSAVKAKGKVSKAKADEKKEVATARSHAERELAHERAKARVAAAKMELHQDKALHREEAIQHRLHKHGAGTTAGVRPTAAAPAPHLPPASYY

SEQ ID NO: 149190 - protein, 134 aa, Oryza sativa
  unsure (1)..(134): unsure at all Xaa locations
  Clone ID: PAT_MRT4530_49548C.1.pep
MGAYNGVIQGGIYCQGCAACPRSCITNMKDECTFDXRLRNKKSSWNANXVKSENVFQTLSNMAIKTSFWQSTETTLNTASAAGPAAVTTTVKSEAELEVALPTTTEGXATVIPAAAAPTAHAAPEAAPSTADAR

SEQ ID NO: 149191 - protein, 220 aa, Oryza sativa
  Clone ID: PAT_MRT4530_49549C.1.pep
MGTERKRMVSLFDVVDESSVSTKLGHAGTTNSTATAAANPSINWWTGRPYSARGFFSLLDGIPPQYIDPQIHRFAVVSTGERCSDLHFHPQQRFIWSDSIHFVVNWLVSPSFTLQQMISMAIVSSTGKFMDGLQCKFNVGWCLILTKISHHVQLHKSQALKDMAAINCIIFCPKWFSSRALKDGYCRCIDVTFNLHAEYHIMTHKDLSLGAVYNYCYRGL

SEQ ID NO: 149192 - protein, 261 aa, Oryza sativa
  Clone ID: PAT_MRT4530_4954C.1.pep
MNPSIPRRRAKDAALRREAERYVSTAKDLLSGQITKGKIERCWHLLIKALGLDPCAPSGQALLVAAVALRTTHHHRYRLPSGAPDPYLVFGLNPAVPTARDPAVIESYYRQASDLLNRSLCSHPLDPCYPAFSHAARLVADAWAVLSDADRKASLDSRFEKPPPPPPQPSAPPTAQPGRGTSAATTIPTRAARKYATTNCLDWKYATANSYLKRTAITDDVGHQVDEVEGGLAALSNDVQREEATGHRMEHAWASETARSS

SEQ ID NO: 149193 - protein, 286 aa, Oryza sativa
  Clone ID: PAT_MRT4530_49550C.1.pep
MVSMPPSLPPLPLPPQLSLADLKALSVLGRGARGVVFHVVPAGGAAAAVSATADEDPMALKAISRAAARHKCAEVAGGPGGDGHRRIWFERDVLLALRHPLLPSLRGVVATDSVVGFAIDRCAGGDLNALRRRQAGRVFSVAAIRFYAAELVLALEHLHGLGVVYRDLKPENVLIQDSGHIMLVDFDLSTTLPPPPPPPPPDTAPPPQTARSRGGRRDSTKAAAAVFGCFSSRRAAASRPSPSSSSSSRSPPSTSRTASSSSSSTRCSSAAAKSNSFVGTEDYVAP

SEQ ID NO: 149194 - protein, 509 aa, Oryza sativa
  unsure (1)..(509): unsure at all Xaa locations
  Clone ID: PAT_MRT4530_49551C.1.pep
MGLCHGKSAAVLEPTVEEEXGAKKVKHGLISAPAKPASPAPSAGECRDWTEIEKXRWYQVHIXDPLPASSYKGSPANSSVASTPARGGFKRPFPPPSPAKHIRALLAQCHGSVKPNEASIPESGEPGVALDKGFGFSRHFAAKYELGREVGRGHFGYTCAATCKKGELKGDDVAVKVIPKAKKTTAIAIEDVRREVRILSSVAGHSNLVQFYDAYEDEENVYIVMELCKGGELLDRILARGGKYSEEDAKVVMRQILSVASFCHLQGVVHRDLKPENFLFSSKDENSAMKVIDFGLSDFVKPDERLNDIVGSAYYVAPEVLHRSYGTEADMWSIGVIVYILLCGSRPFWARTESGIFRAVLKADPSFEEAPWPTLSAEAKDFVRRLLNKDYRKRMTAAQALCHPWIRGTEEVKLPLDMIIYRLMRAYISSSSLRRAALRALAKTLTTDQIYYLREQFELIGPNKSDLITLQNLKTALMKNSTNAMKDSRIVDFVNTILHGVSSRSIPKA

SEQ ID NO: 149195 - protein, 174 aa, Oryza sativa
  unsure (1)..(174): unsure at all Xaa locations
  Clone ID: PAT_MRT4530_49552C.1.pep
MGXNRPPWMKHRPTTPTNVAAPPGMXQQGRDNPPCPPSSVTRATNFSTAXXPPAHPLTGXXGRXFYLGAPHPAERTGVRAFWQRGXLSRHPNNXPPTXEHPSTESVXQAFPRPKSHPNFFPGGSFRCPVXYXXKKKVAXKLGLFWEHXGCWEKTFWAKKGWVETSQRGRGPPRE

SEQ ID NO: 149196 - protein, 91 aa, Oryza sativa
  Clone ID: PAT_MRT4530_49553C.1.pep
MKLIAFGLLLLGYIQYFATPDSEVIALYEIRTMLNDSRGVLNGWNNNQVSPCYFPSISCNQDQNVISITRSSSLLSGFLSPSFGKLLFLQQ

SEQ ID NO: 149197 - protein, 145 aa, Oryza sativa
  Clone ID: PAT_MRT4530_49554C.1.pep
EQHTVLLPLFLLFSADLKSKVPLFSIKKANTVYSRVLLFLKIKQIDNNFQGSMKLIAFGLLLLGYIQYFATPDSEVIALYEIRTMLNDSRGVLNGWNNNQVSPCYFPSISCNQDQKVISITLSSSGLSGFLHPALESYYIYNSYY

SEQ ID NO: 149198 - protein, 97 aa, Oryza sativa
  unsure (1)..(97): unsure at all Xaa locations
  Clone ID: PAT_MRT4530_49555C.1.pep
SMCKTEQEKAAAMNETFAAVANLEAAFKECSKGKPFFGGDAVVYVNVTLSAEIVFARSXEAWHGMRLLDASRYPVLDPXLDRFAALYAAKARLSDTG

SEQ ID NO: 149199 - protein, 68 aa, Oryza sativa
  Clone ID: PAT_MRT4530_49556C.1.pep
HLKGAKGTIVSLEEEKKKIKLACLTCLLLRLGHGVETHNSKESSSSAAPSRESAGRGRRCVRDSNSAA

SEQ ID NO: 149200 - protein, 73 aa, Oryza sativa
  unsure (1)..(73): unsure at all Xaa locations
  Clone ID: PAT_MRT4530_49557C.1.pep
ETLGDLPCLPQAGVAVRRRRSSRRRRSGRLPSWSPSRRRPRPPLRRRXRPPEHRRRRQAEECRRFFLDAVAVR

SEQ ID NO: 149201 - protein, 138 aa, Oryza sativa
  Clone ID: PAT_MRT4530_49558C.1.pep
MGARRRRRPRLGGALAVGANRVRRRWWEGICAGRRGGRRVPWCGGNRPAVVVIDDGSSAVSDLAGHELEEEDYPVVDYGMVSWLPYRQQLDKLPQILYCGEIEMNVAVSPSAGAGRCVAGGGRAGRHVRPRQAGRQAT

SEQ ID NO: 149202 - protein, 131 aa, Oryza sativa
  Clone ID: PAT_MRT4530_49559C.1.pep
TVALPLPPPSLCDVLRGGNDGDGCSSRWLLPSDSSPLWPAACHPFSFPSSSLSPPSLSFLFPLWTHRWWRRPRAGAATAACRRRLRHRLSRHRRARGGRRRGGAPGSRRRACGARPTPWARCQVAVPCTHR

SEQ ID NO: 149203 - protein, 68 aa, Oryza sativa
  Clone ID: PAT_MRT4530_4955C.1.pep
MISCFSHVNILLFEMVPAAQARECETPTNEFKGICMMVANCANVCLTEGFSGGKCSGFRRRCMCTKDC

SEQ ID NO: 149204 - protein, 166 aa, Oryza sativa
  unsure (1)..(166): unsure at all Xaa locations
  Clone ID: PAT_MRT4530_49560C.1.pep
KGQTPKRKKKGAPKKGRKNGGPRGPPQGPKXWPPPDGKKNPQPGKKPNQPTLLGPPGGGKTPTPPQNGKPYGGPPPLEGKKTPHPLKMGPTPGRGPPGPGPQKGERGVKPPGPHPFGLGGAPILGPTPKKGFLGGLKKPAKKTAATRRGGVKGSRGSKKPVKKGNT

SEQ ID NO: 149205 - protein, 67 aa, Oryza sativa
  Clone ID: PAT_MRT4530_49561C.1.pep
MEGTGESGGKRKKVEGSAGMLYRGSGETDVAEALPISSATWEVEGAHARAWPMWTEEGGVRMVGEWP

SEQ ID NO: 149206 - protein, 79 aa, Oryza sativa
  unsure (1)..(79): unsure at all Xaa locations
  Clone ID: PAT_MRT4530_49562C.1.pep
PLEQDWSXSSSKSSVGQGSSSEQGFSGXGVVGXGYYVEQQQQPGIPRVRLTRASQYSAQLPSMCRVXPQQCSIFAAGQY

SEQ ID NO: 149207 - protein, 51 aa, Oryza sativa
  Clone ID: PAT_MRT4530_49563C.1.pep
RALCRAHGPSARDHGLVRSAIGRITPLSIRAGRPGWASQAGPLSVRRNSAF

SEQ ID NO: 149208 - protein, 164 aa, Oryza sativa
  Clone ID: PAT_MRT4530_49564C.1.pep
SCPIIVDDINDDVVIYSASSFPQVRQQAPRTEPVVTIEDDSETTPGQAGDAVDEHVDILLSLTLGRYPRHGHQRSSNISTSPVIHIIDTPSNALPEPEKAVPKEPTFNCPVCMNELVEPSSTICGHIFCKQCIKASIQAQKKCPTCRRKLTMNNFHRVYLPFAE

SEQ ID NO: 149209 - protein, 75 aa, Oryza sativa
  Clone ID: PAT_MRT4530_49565C.1.pep
MPRFVHRLLSFNSGGLPFFSGAGDTPTLTEGWPWATEDRWWAVDSGGRQGGGGTAEATGMKEGGRPASAVGAKQA

SEQ ID NO: 149210 - protein, 120 aa, Oryza sativa
  unsure (1)..(120): unsure at all Xaa locations
  Clone ID: PAT_MRT4530_49566C.1.pep
MARRPPGWRSRRIRIYSALDDLVVGRRITTDTYAHRRRREVGGGASVAARGLGGAEAAEIDRGMSRFGGTRSSGYGGGKRLEYRRTHGRRPKGAHKATSXRLHWLGDSGARWYQLLETLA

SEQ ID NO: 149211 - protein, 181 aa, Oryza sativa
  unsure (1)..(181): unsure at all Xaa locations
  Clone ID: PAT_MRT4530_49567C.1.pep
MVSPQSIRPEKERGGRIGRKQRRRRELGFRRRWREEDEALRVYGTHNIHTQHYNFVGASSHYTPLHANGYSTLLAHDGSSVPLAKPTSSALTGNNDHVTVDSDDDNGAVRTRLKLNWIQEEDVRLMSVWLNNSMDPINGNDKKAEKYWGDXKRWRSPKQAKERWHKLNTRKDVFQGCWWKA

SEQ ID NO: 149212 - protein, 262 aa, Oryza sativa
  Clone ID: PAT_MRT4530_49568C.1.pep
MAWIWMLMAAGAVLLWAVSLGRVLSSSSPACLPANSTFLSPPRGDRMSRNVLLVLAHPDDESMFFAPTILFLKSKGHSIHILCLSQGNADGLGNIRKEELYLACVTLKIPAEQVKVLDHSELQDGFHKNWDHGLIAELTLAQSQLWNIDTIVAFDSRGVSGHPNHCDVHHGICKLLRDNGQGHIEAWELVSLNIFRKYSGPVDIWLSSTLSSSSKQPTYTLVNNSPSRSFEAMASHKSQWVWFRRLFVLFSSYTYINVLQKI

SEQ ID NO: 149213 - protein, 193 aa, Oryza sativa
  Clone ID: PAT_MRT4530_49569C.1.pep
MAPSIARNGRAIPGHLPWPPAVFPVAVPPSPMPGSLPSPIKWNPLLVFSRFCLFSSLLKVPSHLPAVLLSLPCRRPPLAASPSSPVRRPAVLSPSSATQLPPLPRCVLRFARRPPETHSCQRPVALPPLHHLQPPLPWYCGIDLHPGLPSVSSGDRRRRAGLLFLLVGIQYLSSGRLLFLTGESADVAVSSSG

SEQ ID NO: 149214 - protein, 272 aa, Oryza sativa
  Clone ID: PAT_MRT4530_4956C.1.pep
GKGRQMPIHYGSNRLNYFTVSSPIATQLPHAVGAAYSLKMDKKDACAITYFGDGGTSEGDFHAALNFAAVMEAPVIFFCRNNGWAISTPTSEQFRSDLYNNLNSTAIAGDGAVIRGQAYGMRSIRVDGNDALAVYSAVHTAREMAIKEGRPILVEALTYRVGHHSTSDDSTKYRPVDEIEHWRTARDPISRYRKWVQGNGWWCDEEESELRNNVKQELLKAIQVAERMPKPPLAELFTDVYDEVPSNLREQERLLRDTIKKHPADYPADVHI

SEQ ID NO: 149215 - protein, 245 aa, Oryza sativa
  Clone ID: PAT_MRT4530_49570C.1.pep
MSAVTPYSSPEVVDVEGTRSPPASGGATGEEGGELGVGENSRRPTRGQSTTAQPHRHGEEWRARPPEKAMAWIWMLMAAGAVLLWAVSLGRVLSSSSPACLPANSTFLSPPRGDRMSRNVLLVLAHPDDESMFFAPTILFLKSKGHSIHILCLSQGNADGLGNIRKEELYLACVTLKIPAEQVKVLDHSELQLLRDNGQGHIEAWELVITLAQSQLWNIDTIVTFDSRGVSGHPNHCDVHHGICK

SEQ ID NO: 149216 - protein, 219 aa, Oryza sativa
  Clone ID: PAT_MRT4530_49571C.1.pep
MGRRPARCYRQIKNKPYPKSRYCRGVPDPKIRIYDVGMKKKGVDEFSHCVHLVSWEKENVTSEALEAARIACNKYMTKSAGKDAFHLRVRVHPFHVLRINKMLSCAGADRLQTGMRGAFGKPQGTCARVDIGQVLLSVRCKPNNAVHASEALRRAKFKFPGRQKIIESRKWGFTKFSRDEYVRLKSEGRIMPDGVNAKLLGCHGRLSARAPGKAFLSAA

SEQ ID NO: 149217 - protein, 62 aa, Oryza sativa
  Clone ID: PAT_MRT4530_49572C.1.pep
MGLWDALYRVVMRRNAVYVTFVVAGAFAGERAVDYGVHKVWEMNNIGKRYEDISVLGQRPAE

SEQ ID NO: 149218 - protein, 459 aa, Oryza sativa
  Clone ID: PAT_MRT4530_49573C.1.pep
MWIRSESTVYEARLGGERVAAKKPVLSTSDDLDKFHYQLQLLCELDHPGLARLVAAHARPPNYLMFFDFFEPPNLADKIHVEEWNPSVQQVVTIATDLGPNLLQSSFLLLFERLNRVMSKALQYLNILGIVHRDIKPANILIDKDFHPHLADFGLAMYQKDIKHVSVENWRSSGKPTGGFHKKNMVGTLIYMAPEILRKDIHTEKSDVYSFAISINELLTGVVPYTDLRAEAQAHTVLEMTYTEQQLTAAIVSQGLRPALALPESGAPPSLLSLIQRCWDSDPQQRPSFKDITEELKIIEKHIAVNSCSLASPANKSQNGNTEVHHYQEALSCPTDALTEAFVRTDIAFREELILHQKSKRITQKNWHPGCTAVTALIVRNKLFVANAGDCRAILNRAGEPFPMTRDHVASCPKERERIVKEGTEVKWQIDTWRVGAAALQVLAFALYGMCSHEYHSLW

SEQ ID NO: 149219 - protein, 69 aa, Oryza sativa
  unsure (1)..(69): unsure at all Xaa locations
  Clone ID: PAT_MRT4530_49574C.1.pep
RQVSAAHREQTPRMRTTPNHAAXAPDIRPVISHALTDAQPHRPATNTPTPAGRHRPEQRCRTXPAQPXT

SEQ ID NO: 149220 - protein, 672 aa, Oryza sativa
  Clone ID: PAT_MRT4530_49575C.1.pep
MGVEVPPEESNRCVRGCCRSAAIPLHLPPSSFSLLSPIAKGSESTVYEARLGGERVAAKKPVLSTSDDLDKFHYQLQLLCELDHPGLARLVAAHARPPNYLMFFDFFEPPNLADKIHVEEWNPSVQQVVTIATDLGPNLLQSSFLLLFERLNRVMSKALQYLNILGIVHRDIKPANILIDKDFHPHLADFGLAMYQKDIKHVSVENWRSSGKPTGGFHKKNMVGTLIYMAPEILRKDIHTEKSDVYSFAISINELLTGVVPYTDLRAEAQAHTVLEMTYTEQQLTAAIVSQGLRPALALPESGAPPSLLSLIQRCWDSDPQQRPSFKDITEELKIIEKHIAVNSCSLASPANKSQNGNTEVHHYQEALSWLNQGELFAKGNKLDSTVDHWSDIFDQSSKYCPTLSWGSFATCGRRETMEDTHFMLPHMSEEKDLHAFGIFDGHRGSAAAEFSVRAVPGFLKQFNSNTSPTDALTEAFVRTDIAFREELILHQKSKRITQKNWHPGCTAVTALIVRNKLFVANAGDCRAILNRAGEPFPMTRDHVASCPKERERIVKEGTEVKWQIDTWRVGAAALQVTRSIGDDDLKPAVTAQPEVIETILSPDDEFLVMASDGLWDVMSNEDVLSIIKDTVKEPGMCSKRLATEAAARGSKDNITVIVVFLRPVSTAERIY

SEQ ID NO: 149221 - protein, 395 aa, Oryza sativa
  Clone ID: PAT_MRT4530_49576C.1.pep
MEPNYSDYHPNSVPFDAYYEHGHGHLDDHGHGHHHLIPAHPEPSYSYGNWSFLHADATATSSSESSSASASSGAAHIVGASGPSASFVRQLHFGGEYYDDDAADISALMEAASISCWTTNGGAGASTSQTTGLEGVEVMRRAAAPAPDNGSSDKEEAARPLIGVRKRPWGKYAAEIRDSTRNGARVWLGTFNTPEQAALAYDQAALSVRGPGAVLNYPLHRVRESLRTLELGAAAAASESPVLTLKRRHRIRKRSTTKKALAGKEADEAPATTSSEGKKKRQVNTTSHSHDGAWRRHLLSSGRLSMEGSTAAGGHGGLAGGRGEAAGSNVRAADDDEDGEAAAGSSVHVANDDDDGSEAAAVSSMHAADNDDEAVAGSGVRMTTTTAARRRSGAG

SEQ ID NO: 149222 - protein, 85 aa, Oryza sativa
  Clone ID: PAT_MRT4530_49577C.1.pep
MSMRPQRQVQHDPVYSIPLVSVHRRSGEHVSETSAFDVLHREKAALSFLGSASRDCYLFDHNGSSSYSLACCARSSTPTTTSNSC

SEQ ID NO: 149223 - protein, 94 aa, Oryza sativa
  Clone ID: PAT_MRT4530_49578C.1.pep
MEWSAPLIDASASLLSRALLVVAATSSRPPLRHRPSPLLLHLFYTPGWRWPRGAEEVPVAAEDPSLALDFPVAAAGGGNGNGNEEKEATKMVVV

SEQ ID NO: 149224 - protein, 408 aa, Oryza sativa
  Clone ID: PAT_MRT4530_49579C.1.pep
MSNQSDGDSPTHDDSLDEVSSIDPMDLYPLDEISNILGDLADHVVAELKSEVEALQDMRPTRQSGPRRYVDRPYEESKHGLLKDYFVQNPVYNDTTFRRRFRMKKHLFLRIVEALGQWDKYFTLRMDALNRPGLSPLKKCTSAICQLGNGSPADQLDEYLNIGDSTTVECLKMFVKGVIEVFGAEYLRRPMVQDVERLVQIGERRGFPGMLGSIDCMHWHWEKCPVAWKEMYTRGNQGVPTVILEAVASHDRWIWHAFFGVAGSNNDINVLNQSPLFVQQLRGEGPQVQYHVNGRQYNTGYYLADGIYPEWAVFVKSIRHPQSEKHKLFAKHQEGKWKDVECAFGILQSRFSILKRPARLYDQGDLENIMLACIILHNMIKSCYFGAVVLLVEMLWIKFVHLEELLMS

SEQ ID NO: 149225 - protein, 83 aa, Oryza sativa
  Clone ID: PAT_MRT4530_4957C.1.pep
QKEIKNQVVIQKEKRKIGAKAIEQYLGAAAAALPARRSDCGGSSGVRRRQRYTRGGATVGAMVECSGGNGAREEARRLFRGPV

SEQ ID NO: 149226 - protein, 137 aa, Oryza sativa
  Clone ID: PAT_MRT4530_49580C.1.pep
MPLDRTPLIPHQDAGASAQALFLRGPVPTSPLPGDGSGTALPSSSLQLPLPLGRAPPTGDGPLTEARGLEVTRRRSSDDQHDAARTAAELDEVGSFMGTHEERPANTKVKLIGMLMNCCSWKSILVISSQLRKTKAE

SEQ ID NO: 149227 - protein, 37 aa, Oryza sativa
  Clone ID: PAT_MRT4530_49581C.1.pep
LLVRSLFIVRTIWAPISFQLGVGHILLCTVTYVMFAC

SEQ ID NO: 149228 - protein, 72 aa, Oryza sativa
  unsure (1)..(72): unsure at all Xaa locations
  Clone ID: PAT_MRT4530_49582C.1.pep
GRXXNAWAAHLLLSPQGGLPPRRRRRPAAARRRRVWSGGIANAGAGGWIDTDLRNCRCRRTRFQAIKAWLSS

SEQ ID NO: 149229 - protein, 49 aa, Oryza sativa
  Clone ID: PAT_MRT4530_49583C.1.pep
SARLGWVRLERVTRSFPAVSPKNWFVYEQHFILMKSFRPRFYSPDGVCH

SEQ ID NO: 149230 - protein, 58 aa, Oryza sativa
  Clone ID: PAT_MRT4530_49584C.1.pep
MFCSTKRPTDDAYLLPPPRLAPNGRRVVDLISSTSVSHVKRGRPRVLGYQPLLLRNLG

SEQ ID NO: 149231 - protein, 439 aa, Oryza sativa
  Clone ID: PAT_MRT4530_49585C.1.pep
MSKRRKKNERVELRFKAPDYATWKKEAAACDKANGNGKDGSITFMDERNISIAKTIANDIIIPDPAPEWMCYTFLDKYDQLEPIFIKDSARCFLRLFKNWKGYTMSWNLTITAQTLTCMVSFNSLRCAKVVLEGRAPELLGVHANPNCVTKYGYFPLHEAAERFSIEMIKLLLRHGASANVRTVGDDVIDGLLLLHIAIENTCLHKYLEDNLSPGQDHLDYIYKLFHLLCLPEMKIFLDTTRLLAGKTNNLLEELWNYIENGKLIQTAILLLAAQEQIRGGCSSKINGSRKKNGYDIMYKRILRLSFALRWGKVSNGMTQKLMKEKRALIDCMGLLVDAISHAGEPLSAYIQAHSEAPHVEVLEHVSTILKEYGFCPTEEVMDTINLQPYDCKMSETKSCSKGFTDANTAVAEMANLHAADKKALEAVEVKHEYKRFYS

SEQ ID NO: 149232 - protein, 125 aa, Oryza sativa
  Clone ID: PAT_MRT4530_49586C.1.pep
GGGSSARRTLLHSSRLPTAARRPLVLSRCLPPTARRTPVHFGCLPLLSCMVSFNSLRCAKVVLEGRAPELLGVHANPNCVTKYGYFPLHEVLLHIAIENTCLHKYLEDNLSPGQDHLDYIYKLFH

SEQ ID NO: 149233 - protein, 1146 aa, Oryza sativa
  Clone ID: PAT_MRT4530_49587C.1.pep
MCYTFLDKYDQLEPIFIKDSARCFLRLFKNWKGYTMSWNLTITAQTLTCMVSFNSLRCAKVVLEGRAPELLGVHANPNCVTKYGYFPLHEAAERFSIEMIKLLLRHGASANVRTVGDDVIDGLLLLHIAIENTCLHKYLEDNLSPGQDHLDYIYKLFHLLCLPEMKIFLDTTRLLAGKTNNLLEELWNYIENGKLIQTAILLLAAQEQIRGGCSSKINGSSKKNGYDIMYKRILRLSFALRWGKVSNGMAQKLREEKRALIDCTGLLVDVISQAGEPLSAYVQAHSEAPHVEVLEHVSTILKEYGFYPTAEVIDTMNLQPYDCEMERESCSKGWEKGSRRRMGSHVYKEKFFPILEISFTNPVSCEVGRIPPFANNHQSKRSFSTCATGAFRLLKLLKSSVTDLAWGLRYPCPLDLEAQQLGKYIVKYSLLFCQFQNVMVTIYWCSRQKVAWSATGCTLLISLLFFFSGSPHRILLNKKPLNFKTAPSRLLREISISSSRVQRVNNSSAEFVANLNDRNVEIVQHMEDNDHNIINATANVTSDWSIVKEEFTFPAGSAPFNSCHASTIVETEKDSFLVAYFGGSKEGAPDVKIWLQRYSPFLVEDGRLLCGSSVESWNSWGAWLEVTKDAGRTWRKYGPIYIEGETLGVIQPVPYMTANGTIRVLLRSFETIGRVCMADSADGGVTWSYVHETDLPNPNSGIDGVKMKDGRVLLAYNTFSRGTLKVAVSMDDGDSWNDVMTLEDTEGMEFSYPAVIQTMDDLIHITYTYNRTQIKFDLPTLSSQGSKDHGLILHIQEKCDKMTNKWSVLREEFTFSEGNVPFKTCHASTIVEVQKNMFLVAYFGGTQEGADDVKIWLQRYYNGSWHSPEVVDEVPNVPLWNPVLFQLPSGEILLFYKVGKTVESWSGCMKCSSDGGVIWSKREQLPPGILGPIKNKVTKDHGKTWKKYGPIYVRGKTMGVIQPVLYQTSSGTIRMLLRPSDEVGRICVAESKDSGVNWSYAQPTELPNPNSGIDGVKLKDGRVVLVYNSTSRGVLKVAVSQDDGDKWEDVLTLEETHGVEFSYPAVIQTSDGLVHVTYTYKRTQIKVVLPMLFGLLMVITSFIIFHVKNEFLLVTALCSMSFYNQARFDAVSNQTCGFVSGVKFEL

SEQ ID NO: 149234 - protein, 64 aa, Oryza sativa
  Clone ID: PAT_MRT4530_49588C.1.pep
LTFTWQNVLLPVYNTQSGFSNKIVIIIPLETILIHLYKTYHSMNNSIGSYKNWKPFSQLKRVQN

SEQ ID NO: 149235 - protein, 105 aa, Oryza sativa
  unsure (1)..(105): unsure at all Xaa locations
  Clone ID: PAT_MRT4530_49589C.1.pep
MKLNMKRPQYSRTSRMEFSPSGAPELLSLLETXTPRVHEGLSSWSGYCQSEVIERLCRGKSHSLGRXGSCVGQXRSTGKVYIHCSESVEEKPLSQQNETLLDNKT

SEQ ID NO: 149236 - protein, 177 aa, Oryza sativa
  Clone ID: PAT_MRT4530_4958C.1.pep
EVKTIVLFSRIFFRSLCYMALGGYVLIALLQTPPLRFRLYRGIFMVAVMIGTSLRAYSVFCLHGLLMGQVTWPSPWRSLRKARWPAGPSPGEVRHSAKPMPFVARLSPRGLRPYVPPARSIFSEGCILHATTFAVWLSPMLSLRPSPLTSGLRPCLSLVLVGPAEGPRGIPPTHTYI

SEQ ID NO: 149237 - protein, 154 aa, Oryza sativa
  unsure (1)..(154): unsure at all Xaa locations
  Clone ID: PAT_MRT4530_49590C.1.pep
MCIKIPVQDQPGYTNDNVDIQIHREHHSTGILDGTDEAYSSEKPSSDTYSNSGRLGEGGRAPXKRAPPVSGSGRAVHGGSGPRTGEERRATRRPNRWPRSTQGXIGRRRELAAGARGHGANRPGDHGARRRGXHMRQRRKTAADGDRPAAESGG

SEQ ID NO: 149238 - protein, 220 aa, Oryza sativa
  unsure (1)..(220): unsure at all Xaa locations
  Clone ID: PAT_MRT4530_49591C.1.pep
MCIKIPVQDRPGYTNDNREHHSTGILDGTDKAYSSKKPSSDPNSNSGVGKSFTPTPRKAAGSPLSCLGESGSRIGRRRAHPNSITPTLAWMRRLEESYATSLAVAHAGLWADVIKAGRGTDMRAPPVSGSGREEGRRQAGPTGQRLGEGGPRRIGSTDRGGAARHAAAEPMAPIYPXRRELAAGARGHGANRPGDHGARRRGAHAAAAQDGGRRRPTGCG

SEQ ID NO: 149239 - protein, 225 aa, Oryza sativa
  unsure (1)..(225): unsure at all Xaa locations
  Clone ID: PAT_MRT4530_49592C.1.pep
MCIKIPVQDRPGYTNDNREHHSTGILDGTDKAYSSEKPSSDPNSNSGVGKSFTPTPRKAAGSPLSCLGESGSRIGRRRAHPNSITPTLAWMRRLEESYATSPAVAHAGLWADVIKAGRGAGKRDPHGSXLGEGGPRRIGSTDRGGAAHHAAATRQPNRWPRSTQGXIGRRRELAAGARGHGANRPGGHGARRRGAHAAAAQDGGRRRPTGGGERRRRGEAAATRL

SEQ ID NO: 149240 - protein, 112 aa, Oryza sativa
  unsure (1)..(112): unsure at all Xaa locations
  Clone ID: PAT_MRT4530_49593C.1.pep
ALWSRGRQCGRRGCPWPAPPPAPPSPAGSSSPSACSPPTTTRTHYYSRSSSSSPAXPPHDDLLPPPPPXASPRGAPPPGPAGPRAPSRSPPADGSPPPQKPLPIQSTQLDRN

SEQ ID NO: 149241 - protein, 85 aa, Oryza sativa
  Clone ID: PAT_MRT4530_49594C.1.pep
APFPNPFYRNLSEAFIVLHAFVHVIVWSQINLSNMTILNATMGGHGKRSSRASSVPGTKLTYIVLLIRYMIKADWLFDYYIVMNL

SEQ ID NO: 149242 - protein, 94 aa, Oryza sativa
  unsure (1)..(94): unsure at all Xaa locations
  Clone ID: PAT_MRT4530_49595C.1.pep
NDVIRLLYLYHSRSKKNQECKYFLFPLIXXHFSLAGICIINSYRVTVLLVFAYPIXLSRXELALILAFQEETHSCFVTLIGARRKSHSAGRPPG

SEQ ID NO: 149243 - protein, 34 aa, Oryza sativa
  Clone ID: PAT_MRT4530_49596C.1.pep
VYMEISRWLLLYLKEEITICTYICCPFYLRCHSG

SEQ ID NO: 149244 - protein, 440 aa, Oryza sativa
  unsure (1)..(440): unsure at all Xaa locations
  Clone ID: PAT_MRT4530_49597C.1.pep
SWSHKGAGAAAVLTLPGAAPIRYTARLQFDTTNNTAEYEVVLLGLRKAKALGVRHLLIRTDSKLVASHVDKSFEAKEEGMKRYLEAVRSMEKCFAGITVEHLSRCQNEEADALVKSAACGGSHSPGIFFEVLYAPSVPTESLHIMAIDQAELGEDPEDWRTPFVKYLKNGWLLEDEVEAKRLQLRAARYKLISGQLYRSGVLQSLLRCISFAEGEEVAKEIHQELCAIEYFSRWIEAEPLGAITSAAVQKFVWKNIVCRFGVPKEFITDNGKQFASEEFREMCEGLNLEIRFASVVHPQSNGAAERTNGKILEALKKRLEGAAKGKWPDKMLSVLWALRTIRTRPTKFSPLMLLYGDEAMTPTELGATNLPRVMFSRGEDGHEVSLELLEGVRVEALEHMRKYTTSTSATYNKKXVRPTELLPGHLILRKKANPVAVGKL

SEQ ID NO: 149245 - protein, 473 aa, Oryza sativa
  Clone ID: PAT_MRT4530_49598C.1.pep
MAWGACALLLLLLVLGAGGGGGVHCLEVTRSRRALQRRHHLRSRAESGATILELRHHGGGGGGGSGKSGGRSREEELGGLFSSDAARVSSLQRRAGGGSWAEDEAAAAAATGRVPVTSGARLRTLNYVATVGLGGGEATVIVDTASELTWVQCAPCASCHDQQGPLFDPASSPSYAVLPCNSSSCDALQVATGSAAGACGGGEQPSCSYTLSYRDGSYSQGVLAHDKLSLAGEVIDGFVFGCGTSNQGPFGGTSGLMGLGRSQLSLISQTMDQFGGVFSYCLPLKESESSGSLVLGDDTSVYRNSTPIVYTTMVSDPVQGPFYFVNLTGITIGGQEVESSAGKVIVDSGTIITSLVPSVYNAVKAEFLSQFAEYPQAPGFSILDTCFNLTGFREVQIPSLKFVFEGNVEVEVDSSGVLYFVSSDSSQVCLALASLKSEYETSIIGNYQQKNLRVIFDTLGSQIGFAQETCDYI

SEQ ID NO: 149246 - protein, 91 aa, Oryza sativa
  Clone ID: PAT_MRT4530_49599C.1.pep
QNTCLVILPRTATQGPPTPSKPTHHASPPPPAPIRSDPNRHGLIQVPSWRARARAILRGLCLGGGLSCWAWGCGVAEPSERVSTEGEPADV

SEQ ID NO: 149247 - protein, 268 aa, Oryza sativa
  unsure (1)..(268): unsure at all Xaa locations
  Clone ID: PAT_MRT4530_4959C.1.pep
MWIWGLIAAAHLLPPPLPPPPADAALATRTIVVVAGFTLSLSSAGSASSSSSPRRSSPAPDLRARHHSLLPPTRRSPAAAHRCGYDTAYKNINRGGYLLPACENQFFQVDHLREILHLHPTSPRPSSPPPPPVPLLRRLPSAPPPLRRRFSSSPSPPPVPXSMTTTTEPPPAPLLDCSSTAPPPAPXSPPPPPAPSSPPPPPAPLLDARRRWCRCLGAAGRDNDDLRDAAMAPSSPPQRRPTRRRVPPRRRLLSSTRDDDAADARAPL

SEQ ID NO: 149248 - protein, 1868 aa, Oryza sativa
  unsure (1)..(1868): unsure at all Xaa locations
  Clone ID: PAT_MRT4530_495C.1.pep
GPMDHNYAMYPCKCPFHKGNHLSFRQQLAPTVGTSKRNHSERMPPKVVKEKVTRRKESEARAVMAAEEGAEPSAPIAEDGGAPSASAPAPSLPPSAPGPSTQVPNAADMAKAAAVARALQTKAEILSTSQLLVPQAAPSQSAAAPTALSAVQAQVNPDPETQTEADMEAMRQNMTXLQDMLRQMQEQQXGXETARRSKVTLAPILQYXAGYVPPQVYPQVSTQPLPPQVAQXAPMYIAGXPSTAAAHPAPHVQLQAQPVAAQVHSQPPGQVPQTMAEGASALQAQLQAFLQQLSQPHNISGTAPSAHPKGNTSQGAPSWLPSNQPGLGASPWSQGPQFDFINAAQAPTVQPQAPTPGFRANQAPNQVAMTWPQPTFDPSMAAQQASPIEAGQPNAMAQPHAQAVISPFTTLYPQQGAVNRAGGEKGLLLSRGIKTRPIPPQFKFPPFPRYSGETDPKEFLSIYESAIEAAHGDENTKAKVIHLALDCIARSXYFNLPANSIYSWEQLRDVFVLNFRGTYEEPKTQQHLLGIRQRPGESIREYMRHFSQARCXVQDITEASVINAAAAGLLEGELTRKIANNEPQTLEHLLRIIDGYARGEEDSKRRQAIQAEYDKAFITAAQAQAQSQVAEPPSLAVRQPQPVIQGQSPRLGQAPMTWRKFRIDRAGKAVMAVEEVQALRKEFDAQQASNHQQPVRKKYLNXLISFGPKDAEGVMFPHQDPLVISAEIAGFEIRRILVDRGSSADVIFAEAYAKMGLPTLALTPAPASLRGFGGEAVQVLRQAHLLVAFGTGENRREEQVLFDVVDIPYNYNAIFGWATLNKFETISHHNYLKLKMPGPAGVIVVKGLQPSVASKGDLAIINRAVHNVEAEPHDRAKHAAKPTPHGRIIKIQIDDADPTKLVSLEGDMGKEEAEIILEVLKKNIDIFAXGLDEVGGVSTDLIMHHLAVKPDAKPRKXKLRKMSADRQEAAKAEVQKLLKAGVIQEIDHPEWLANLVLVRKSNGKWRMCVDFTDLNKACPKDDFPLPRIDQLVDSTAGCELMSFLDAYSGYHQIHMNPADIPKTAFITLFGTFCHLRMPFGLRNAGATFTRLVCKVLYKQLGQNVEAYVDDIIVKSRKAFNHASDLQETFDNLHAAGMKLNPEKCVFSVRAGKLLGFLAAERGLPFFKTLRGAGKFNWTPECQAAFDELKQYLQNPPTLISPAPGNELLLYLAASPVPVSAALVQERDSGQKSIYFVSEALQGAKTRYIEMEKLAXALVMASRKLKHYFQAHKVIVPSQYPLGKILWGKEVTGRLSKWAAELSPFNLHFVARTAVKSQVLADFVAEWTPALAPEPEPVEQPWVMHSDGSSSHKGASIAAVLTSPIGVLIQYAARLQFDTTNNAAEYEAILLGLRKVKALWIRLXLIRTDSKLVAGHVDKSFEAKEEGMKWFLEAVRSMEKCFTGITVEHLLRSQNEEADALVKSAACGGPHSPGIFFEVLYAPSVPMDSLEVMTIDQVKLGKDPYDWRTPFVKHLETGWLLEDEAEAKRLQLRATKYKMVSGQLYRSGVLQPLLRCIPFAEGEEMAREIHQGLCGVHQAARTVASKVFRQGVYWPTVLKVCVEQVKKCESCXRHGRSQTAPXYELQPIASIWTFARWGLDIIGPFLVARNGYKFAIVAVEYFSRWIEAEPLGAITSAAVXKFVWKNIVCRFGVPKEFITDNGKQFDSDKFREMCEGLNLEIRFASVAHPQSNRVAERTNGKILEALKKRLEGAVKGKWPEEMLSVLWALWTTPTRPTMFSPFILLYGDEAMTPTKLWANSPRVTFSGGEEGRELSLELLEGVRVEALEHMRKYATVTSATYNKKVRPTXAVAWSSCPKEEGEPDSRWQA

SEQ ID NO: 149249 - protein, 138 aa, Oryza sativa
  Clone ID: PAT_MRT4530_49600C.1.pep
MATSATSWPLPPPLPDVIIIVHHGHQHSLDPCRHHCHREGGIGSVLRLPAFPPSDLDNNLISCTPMMNWGCHSKEGLSDWCYRQERSSLSMIAGVAMALAAVIDKEEKIFAYVTMYLILWALYDIEGWGWPYVTTTQS

SEQ ID NO: 149250 - protein, 139 aa, Oryza sativa
  unsure (1)..(139): unsure at all Xaa locations
  Clone ID: PAT_MRT4530_49601C.1.pep
MNRYSKGMFYTEGLMVVMVTISGSHLSXSEMKIMDRXCQSQEKDSPLDACWLVLDRLMTGLQRCXSWFPQQASLDQRMQCYQWLHDESWECQCSDNHHKETSYKESMMLSLELGCMRRMAEHYDSQVTSCKYWHYCMRR

SEQ ID NO: 149251 - protein, 138 aa, Oryza sativa
  unsure (1)..(138): unsure at all Xaa locations
  Clone ID: PAT_MRT4530_49602C.1.pep
MASTVVAPFLALSLLLFAVVAHGCTPNCPGEQAVPATPVAVPVQSHHGQHDEHGRCPINAPKLCRRLNVLNGLVDVKIGYGPDDCCSLLSGIADLDAAICLCTAVKANVLGIRVNXLPVDLGLILNKCGKTYPTDFTC

SEQ ID NO: 149252 - protein, 130 aa, Oryza sativa
  Clone ID: PAT_MRT4530_49603C.1.pep
MGKTIENSRRGCAPRPFRPLPCEDAEFKKPLLQVELKPAPHPPSHPVPQLTGLEVDELEHQLQGFDDYHHLLAPLFHALTLVGLDGVYPIRSSTSSLQSSIAVNSSRRNMVVSDAPWWIGRRVVDLEATG

SEQ ID NO: 149253 - protein, 185 aa, Oryza sativa
  unsure (1)..(185): unsure at all Xaa locations
  Clone ID: PAT_MRT4530_49604C.1.pep
NQKCYYYSVMNNXHWRLLVLLFRIYLRSGFGYDWISQVXLQVQLFVGPVRPDMCCRSDLIHVVGEDSIWHTMEVLCAYVMWSXIWKESKFGMIGYVKFVSGTRGFPRVIRSSSMSLVRGFRLPTLGINREGASDWRHRGGPTGGHTAVRPAVATGSGRRSRRFDRSLISVRPTFIRRSDWRIHFG

SEQ ID NO: 149254 - protein, 46 aa, Oryza sativa
  Clone ID: PAT_MRT4530_49605C.1.pep
MPFGRVVVFVLEGSTKSGKGGEIIRPGSEHQAEELGLSTTQADAWA

SEQ ID NO: 149255 - protein, 44 aa, Oryza sativa
  Clone ID: PAT_MRT4530_49606C.1.pep
ATNPNYATKQEVSSLHSEHSQLDIEPRLYRDLYLTRIVQKLLVT

SEQ ID NO: 149256 - protein, 64 aa, Oryza sativa
  Clone ID: PAT_MRT4530_49607C.1.pep
FFQVGERTSYSLRVAKIIFSRDTCIFAGGRFTRLGKTLQRLKKGVRPMGLLLHSAGSLTTGADA

SEQ ID NO: 149257 - protein, 41 aa, Oryza sativa
  Clone ID: PAT_MRT4530_49608C.1.pep
PQHWGITSRLLFYLALAIYLFVEIIRPLFWLVACLNHLHSY

SEQ ID NO: 149258 - protein, 67 aa, Oryza sativa
  Clone ID: PAT_MRT4530_49609C.1.pep
MVSIYLMTWRNVQATSLYKLPNIYMAQGTRAVALPVLPQDQTRTVHEWSTTVEMRWKCACVARRVPE

SEQ ID NO: 149259 - protein, 64 aa, Oryza sativa
  Clone ID: PAT_MRT4530_4960C.1.pep
GENTLLSKLEFLFPQKFFKNRGRGPRVLLNEFETGLGRGPQGKGVPKNKGFFFFFFLKPPNFGA

SEQ ID NO: 149260 - protein, 62 aa, Oryza sativa
  Clone ID: PAT_MRT4530_49610C.1.pep
PTKTSDRGLLHLAERQNSEKSLTGVKHTRIQNAWLTIPIDETAEGTKKEKWYFTAPSNRRNI

SEQ ID NO: 149261 - protein, 228 aa, Oryza sativa
  unsure (1)..(228): unsure at all Xaa locations
  Clone ID: PAT_MRT4530_49611C.1.pep
RARMRAAQRRASAATEQRKARARQRAEQWSASRXGQSSGARARRRSGGEQARRPAKPGGRGRRXADKKPTRPRAQPPQPPPRPXRNATTAKGATNPRREPNQKRPPPQSGGREGNPRPGRGPGTPPAGRSTEPRRQRPTAPXGAPKAARERPQRRRPNHSPPQEAAGRRPRRRGRRRWRGRRARSRRGRERSRGGGARRGRARPGGAAARSRRRTRRRGPRRPGRGCG

SEQ ID NO: 149262 - protein, 207 aa, Oryza sativa
  Clone ID: PAT_MRT4530_49612C.1.pep
TDGESKVLLHEALFRKRRKQELCCCFFFIIFLLPFLSVLSRLLLVSSLSVLERLLRLLASRGVFSEHTSSPRRFSLTTVSRTLVPAGGGPSAASYADYVLQHHQDELVHAWPLLHEIVLDPAGSEPFARANAGALACEPVVPDTTDGSTRTRALLENDIFVMATYRTQGRERSEEEFRPCSGQRRVHNQLARSRHRRHRRQRHVRLH

SEQ ID NO: 149263 - protein, 826 aa, Oryza sativa
  Clone ID: PAT_MRT4530_49613C.1.pep
MVKFTVEELRRIMDKKHNIRNMSVVAHVDHGKSTLTDSLVAAAGIIAQEVAGDVRMTDTRADEAERGITIKSTGISLFYEMSDESLKSYKGDRDGNEYLINLIDSPGHVDFSSEVTAALRITDGALVVVDCIEGVCVQTETVLRQALGERIRPVLTVNKMDRCFLELQVGGEEAYQTFSRVIENANVIMATYEDALLGDVQVYPEKGTVAFSAGLHGWAFTLSNFAKMYASKFGVDESKMMERLWGENYFDPTTKKWTIKHTGSDTCKRGFIQFCYEPIRQIINTCMNDQKDKLLPMLQKLGVTMKDLTGKALMKRVMQTWLPASNALLEMMIYHLPSPAKAQRYRVENLYEGPLDDIYASAIRNCDPEGPLMLYVSKMIPASDKGRFYAFGRVFSGRVATGMKVRIMGPNYAPGQKKDLYVKNVQRTVIWMGKKQESVEGVPCGNTVAMVGLDQFITKNATLTNEKEVDACPIKAMKFSVSPVVRVAVQCKVASDLPKLVEGLKRLAKSDPMVLCTVEESGEHIIAGAGELHLEICLKDLQEDFMGGAEITVSPPVVSFRETVLEKSCRTVMSKSPNKHNRLYMEARPMEEGLPEAIDEGRIGPRDDPKVRSKILSEEFGWDKDLAKKIWCFGPETTGPNIVVDMCKGVQYLNEIKDSVVAGFQWASKEGALAEENMRGRGICFEVCDVILHSDAIHRGGGQIIPTARRVIYAAQLTAKPRLLEPVYLVEIQAPENALGGIYSVLNQKRGHVFEEMQRPGTPLYNIKAYLPVIESFGFTSTLRAATSGQAFPLFVFDHWEMLSVDPLEPGTRQLTLSWISARGRV

SEQ ID NO: 149264 - protein, 252 aa, Oryza sativa
  Clone ID: PAT_MRT4530_49614C.1.pep
MAAAALTSQLNALVNNMFAMGLLDDQFQQLQMLQDSTAPDFVSEVVTLFCDDGERIICELSRQLEKPNVDFDRVDSYVHQLKGSSASVGAQKVKNTCIQFREFCQQRSRDGCLKTLDLVRTEFYDLRNKFQAMLQVKLNYFWIDMHQNSQEHIYNPAFPSSGSRYSTLKVEQLYVDLPLFVGRWLRFDHFVATTYIQHCKLQQQQEEARLQCSCECGPLAAFMVSSYCKTVIFLTNQKFTTNRKKIHTNNIF

SEQ ID NO: 149265 - protein, 186 aa, Oryza sativa
  unsure (1)..(186): unsure at all Xaa locations
  Clone ID: PAT_MRT4530_49615C.1.pep
EEHQFFPTLALRVPPPLFLGCRILPRFCSPACTGVRDEXCFRNSVRLRNCMGRRAIKFLGSASSATAPILRSSTITLHLPLFLXTITSNGENGXDNINGGNMNTSTSSAPFPGYKILSLFDFLLDVYAYFAISMLMFMFSLITRSLLIVYVLIIVLKFWIKICXIMTKFLTINCLQRVFMLLLFLR

SEQ ID NO: 149266 - protein, 101 aa, Oryza sativa
  Clone ID: PAT_MRT4530_49616C.1.pep
MGSAVVRGGQREKKWREMRRQPGPCRWQDKKPRPMPVAGEEVAAGLCRRREKQWRPSWGGGGLALPSARSGRRGGGGGGATATRPEEDFFFRICDEFVFEN

SEQ ID NO: 149267 - protein, 35 aa, Oryza sativa
  Clone ID: PAT_MRT4530_49617C.1.pep
MAVISMRNVHSAPATAIRISSGASTPKPGIKGANG

SEQ ID NO: 149268 - protein, 81 aa, Oryza sativa
  Clone ID: PAT_MRT4530_49618C.1.pep
MARRQQTINREFAPALVQALRLAKTRRPRRRCRSGGGDRGEEVVQRRRGGSPPRTWLCPTTPAPTQSADYPRLEEDGGVLS

SEQ ID NO: 149269 - protein, 106 aa, Oryza sativa
  Clone ID: PAT_MRT4530_49619C.1.pep
MVHHTRVLSMLALSVQCIVSMSDGGASLGYSRFPCGAPRSKFAWSSRVSLSPTHRAAFSVARNEQTVVLGDCLKGGGSVRCRCYRHRSSARFSSRRVPSSEWLGRV

SEQ ID NO: 149270 - protein, 99 aa, Oryza sativa
  Clone ID: PAT_MRT4530_4961C.1.pep
QSNDDPCVVLVYNYRLLAKLLETRSCNKNNSSAKHLRRRRLLRQYALLEYVLIGVHIRSHTCPFCTGSVAYFLNIVHWIRTVFSRKIMDKNHRNQRCYS

SEQ ID NO: 149271 - protein, 179 aa, Oryza sativa
  Clone ID: PAT_MRT4530_49620C.1.pep
MDVDKQETMEETILVGDDLMRGLPSPVIPKEIASHVLDGVEICDGILKNLFLCLQINDIEPFCQDEIVLYRQCAEKRDKEIRERLQDSEYKLGFSMPLEEAKERATQLQSEITLLERRMILASGLEGMEGFRQRWSLHGQLGDTRKRLEALNSGIVKRGSQSSPVQETTPAVRKRWFLW

SEQ ID NO: 149272 - protein, 92 aa, Oryza sativa
  Clone ID: PAT_MRT4530_49621C.1.pep
MAVGWPIKERAASPASQFKLWGGGVGLGGDGMARWSDDAPRTFNVQRWPLVDSCNDSEADEAFAVLVSFLALRWVTIILIWLLLGKVGAASL

SEQ ID NO: 149273 - protein, 43 aa, Oryza sativa
  Clone ID: PAT_MRT4530_49622C.1.pep
AQLQVRVFCGPAHRSHMVAFMYTPLVTRYMIQYEQPILFNSHK

SEQ ID NO: 149274 - protein, 373 aa, Oryza sativa
  unsure (1)..(373): unsure at all Xaa locations
  Clone ID: PAT_MRT4530_49623C.1.pep
VLTQHSFAVVGRLNQTELNYPFIQACRSSTLPCPLSRSPPSPLPALPSPPPHAPPPLPPRKEARHALGDERPAPPRQGSTSPXPPPPPXPAPPRPLPPSSLPPPPAPSSTTTTTATPPPXPSAPLADPPAPLPPPPSSXPSSPSPPPAPSPPPPXPSSPSAPSPPPAPSSPPXPPSPPHPRPTKQMPPPPASSRRSTPRSXSPPWPASPSPPHSSSSPSAASSTARPIRRPPPPTPTVKPTSSTMVVTPPARPSPSSRPTSTPPPPPAGLPPLPLPLPLPLPPPHAPRRPAPPRPPLPPPPSSPPPLPPPPPPPPPQDAPPPRLPLPPPPPPPQLPPPSPLSLPIPPPXSPPLPPPXSPPPXSPPLPPTDPAQ

SEQ ID NO: 149275 - protein, 484 aa, Oryza sativa
  Clone ID: PAT_MRT4530_49624C.1.pep
MAGRRRVVVLVVAAALLVAVASAGASGKSARFELLRLAPAASLADLARMDRERMAFISSRGRRRAAETASAFAMPLSSGAYTGTGQYFVRFRVGTPAQPFLLVADTGSDLTWVKCHRAAAAASASPRNASSLPAPAPASPRRTFRPDKSRTWAPIPCSSATCRESLPFSLAACATPANPCAYDYRYKDGSAARGTVGVDSATIALSGRAARKAKLRGVVLGCTTSYNGQSFLASDGVLSLGYSNISFASRAASRFGGRFSYCLVDHLAPRNATSYLTFGPNPAFSSRRPSEGTASCKPAPAPTPAPAGAPGARQTPLVLDHRTRPFYAVTVKGVSVAGELLKIPRAVWDVEQGGGAILDSGTSLTMLAKPAYRAVVAALSKRLAGLPRVTMDPFDYCYNWTSPSGSDVAAPLPMLAVHFAGSARLEPPAKSYVIDAAPGVKCIGLQEGPWPGLSVIGNILQQEHLWEYDLKNRRLRFKRSRCMH

SEQ ID NO: 149276 - protein, 569 aa, Oryza sativa
  unsure (1)..(569): unsure at all Xaa locations
  Clone ID: PAT_MRT4530_49625C.1.pep
SHPPARRSLPDSVALCTARPQLWRRRPSTSRSSSSSSAANITPPPYTPFPPPVRPIHPPPHAPPPLPPRKEARHALGDERPAPPRQXRPVHPPPPPQLRRRPGPCPPPPPPLIPPPLSLLLPHTLSKKNPPPAHLIPASAAGCPPPXPPPPAPSSTTTTTATPPPXPSAPPDPPAPLPPASVVSCPPPXSPPPAPPSSPPPPPXPSSMTTTTATPPPRAVGSPRPPADPPAPXSLPPPPXPSSPSAPSPPPAPSSPPASSPPHPRPTKQMPPPPASSRRSTPRSXLSPPWPASPSPPHSSSSPSAASSTARPIRRPPPPTPTVKPTSSTMVVTPPARPSPSSRPTSTPPPPPPAGLPPLPLPLPLPLPPPHAPRRPSPAPPRPPLPPPPSSPPPSSPPVDQLPPPPPPPPPPRRRPRAARGGCAHEAVPPPPRGGGGVRDEDQALPPPPPPPPPRLPLPPPPPPPQLPPPRGXTPPPPPLPPPXSPPLPPPXSPPPFXPPLPPPXSPPLPPPHLPPGPTHPSPPPSPPXPPPPSPAVASPAPHRRTSSPPPRHIAPTTPPPPRTSIKTG

SEQ ID NO: 149277 - protein, 179 aa, Oryza sativa
  Clone ID: PAT_MRT4530_49626C.1.pep
MAFHPPLSYPTTPITTSTCSASPSTGHASLFPTTRSRSTQTPAKTRGVAFQIGAPATLLVEPAYTAVVEAFRARMSRTYEAVNGSGLLCFLVDDASKNVVTVPTMTMHFDGMDMELLFGNYFAYTGKQSGGGGGDVLCLMIGKSSTGSRIGNYLQMDFHVLYELKNSVLSVQPADCGKI

SEQ ID NO: 149278 - protein, 128 aa, Oryza sativa
  Clone ID: PAT_MRT4530_49627C.1.pep
MARLHHGRRSHHHHHSHHEDDHEQREEGAPMKRFRHHHEEEEESEMRTKRFHHHHHKDDDERELEEMARRWIRKALMSSRMHHHRGCRFHHHHHHLSFRHRAEDAAAAGEEEEKGGVMSWLKDFVNRF

SEQ ID NO: 149279 - protein, 270 aa, Oryza sativa
  unsure (1)..(270): unsure at all Xaa locations
  Clone ID: PAT_MRT4530_49628C.1.pep
RSAPRVPSCGGGAPLRRGARAPHPPRTLLRLHTLLSHHSISGGVGGRQTASLLCAAPPRQGSTSPSSSSSAAPAPPRPLLQTRPSISSACENHFFQADHLRGPPHPCLRCRLPSSLPPPPAPSSTTTTTATPPPLAVGSPRGSTSSPPPRLRRQLPSSPSPPPAPSSMRRRLSEPSAPLGRNDXPSRRATPPPRAVGSPRPRRRRRRSRHHEAADPPAPLLPASAAGSPPXPSAPSPPPAPSSPPASSLSTTTVPTTLRRPRRDNGATSF

SEQ ID NO: 149280 - protein, 121 aa, Oryza sativa
  Clone ID: PAT_MRT4530_49629C.1.pep
MASTDSASGGATLRRASSGYGYGRRATEAADPEEEEVAIAVDGGRTASSRPGLAAGAASGDAGGSGFHDAGGSSSGGPPPTQIRRRRALSCTDPMAGVDGGGSGQWWLPRRWERRARRRLM

SEQ ID NO: 149281 - protein, 778 aa, Oryza sativa
  Clone ID: PAT_MRT4530_4962C.1.pep
MVNTRSNGNGPNNPNNNNNGENPTLAQVLAQQTQLMNMMMQQLQNQQNQGNNHVPPQNKLAEFLHVRPPVFSSTTNPVEAGDWLHAIEKKLDLLQCTDQEKVSFASHQLHGPASEWWDHFRLNRTTAEPITWLEFTAAFRKTHIPSGVVSLKKKEFRSLTQGSRSVTEYLHEFNRLARYAPEDVRNDEERQEKFLEGLNDELSYPLMTGDYSDFQKLVDKAIRQEDKYNRMEQKKCRIAHFKAQQGNNQKPRLTLGSQSMPQGGSSSVVRPQRQFFNNNAGNNIRNQAPRPVAAPAQQQPVKREQGSKPVVCFNCGDPGHYADKCPKPRRVKVVPAQSNSTAPASKARVNHVAAAEAQDAPDVILVREYSDVFPDDLPANELAEVKRQVDDLLQKGYIRPSSSPWGAPVIFVEKKDHTQRMCVDYRALNDVTIKNKYPLPRIDDLFDQLKGATVFSKIDLRSGYHQLRIKEEDIPKTAFTTRYGLFECTVMSFGLTNAPAFFMNLMNKVFMEYLDKFVVVFIDDILIYSRTKEEHEEHLRLALEKLREHQLYAKFSKCEFWLSEVKFLGHVISAGGVAVDPSNVESVTNWKQPKTVSEIRSFLGLAGYYRRFIENFSKIAKPMTRLLQKDVKYKWSEEYVAVAREGRHRGRRRVAVLVRPFAVAGDHRSSVAVDNPKVSAASFSSPSSSVVRPPPFWSPVCSPRRPLRAGALRLRPSAAVRRRACAARAVRSAEPPPLSVTSPLTSSGSSARGSLRGTRLRSGGDKPTGVAGESMPCL

SEQ ID NO: 149282 - protein, 45 aa, Oryza sativa
  Clone ID: PAT_MRT4530_49630C.1.pep
SFLLCYARHHQFVLTSCFSTPSCEPWTYAPRWQLLHRRSSSKGNR

SEQ ID NO: 149283 - protein, 72 aa, Oryza sativa
  Clone ID: PAT_MRT4530_49631C.1.pep
MAWGLSVSAAGRASIFHPARRGDGVLLRRSVTASASDFTMDRWWLLGRNIGPTAETQMMRLPGSNLGSKGLV

SEQ ID NO: 149284 - protein, 62 aa, Oryza sativa
  Clone ID: PAT_MRT4530_49632C.1.pep
GSNTVKWRGQLRGYSGHGLSFSFLRPGPKIVSKGLCLGTWFWLGHRPGPKAPSIKNPFHPRG

SEQ ID NO: 149285 - protein, 110 aa, Oryza sativa
  unsure (1)..(110): unsure at all Xaa locations
  Clone ID: PAT_MRT4530_49633C.1.pep
LFLVQEGLVSTKGYXNMYTQGHCKLYHRSIPLLSAHRHPLFRGFSLSXGTWHLMRGCIGFRSPTKGXSYVPSALGYIGVVQTCIALTSWIALVRLIFLPTYLSYILVNLV

SEQ ID NO: 149286 - protein, 48 aa, Oryza sativa
  Clone ID: PAT_MRT4530_49634C.1.pep
MGMRIFIQVRALELSVDNKVAFLLESASGKIRDSAISLLTVAIGTVGD

SEQ ID NO: 149287 - protein, 131 aa, Oryza sativa
  Clone ID: PAT_MRT4530_49635C.1.pep
IAFSSDECATSFAAAFDPPWILASHQPLKTRVRPRDEDAKKMKSEQGNPGFKVHTLDVRSDHPSGRKRRAPSSTPRRGSGGDGYGDGGGGIGSAAPTSPRRWFFFFSSASAGDEILVKTQVYGHAATHLNS

SEQ ID NO: 149288 - protein, 151 aa, Oryza sativa
  unsure (1)..(151): unsure at all Xaa locations
  Clone ID: PAT_MRT4530_49636C.1.pep
GCLGGELGAPAXRLEMGAXASFACALGPRAPPTPXSSRCPTLAPCSPARRRHPTPXPAPPVTAACVLASSQAKVCAGASTCLPPPPPPPTAVLPIVFVDGDQTVDLATVTVPPPPPPAFRLHSPPVGRISTMGADSRAXALSISSTAYSIQ

SEQ ID NO: 149289 - protein, 655 aa, Oryza sativa
  Clone ID: PAT_MRT4530_49637C.1.pep
MEWRGPWMTSAMTAAGGLSWSRGKAAARGVGGARADGGGGQSVGHLASERARDAGVRPDFEQRWREIGAGEREFDEGEIREQFWARTCKKNSPVMEAATANIFHLSLTFFFMVLLTLGTSAAGVASDTLSNGRNLTDGNTLVSAGGSFTLGFFSLGLPNRRYLAIWFSESADAVWVANRDSPLNDTAGVLVNNGAGGLVLLDGSGRAAWSSNTTGKSSSATAAQLLESGNLVVRERDQLNTGVFIWQSFDHPSNTLIAGMRLGNNRQTGDAWFLSSWRAHDDPATGDCRRVLDTRGLPDCVTWCGGAKKYRTGPWNGQWFSGVPEMASYESIFSSQVVVTPDEIAYVFTAAAAAGSPFSRLVLDEAGVTERLVWDPSSKVWIPYMKAPRGVCDDYAKCGAFGLCNEDTASTLFCSCMAGFSPVSPSRWSMRDTSGGCRRNAPLECGNGSTTDGFVPVRGVKLPDTDNATVDTGATLDECRARCLANCSCVAYAAADISGRGCVMWIGDMVDVRYVDKGQDLHVRLAKSELGKRHQNKVVQKRGILGYLSASNELGDENLELPFVSFGEIAAATNNFSDDNMLGQGGFGKVYKGMLDDGKEVAIKRLSKGSGQGAEEFRNEVVLIAKLQHRNLVRLLGMELVEERQGDGFDGLIHF

SEQ ID NO: 149290 - protein, 801 aa, Oryza sativa
  Clone ID: PAT_MRT4530_49638C.1.pep
MEAATANIFHLSLTFFFMVLLTLGTSAAGVASDTLSNGRNLTDGNTLVSAGGSFTLGFFSLGLPSRRYLAIWFSESADAVWVANRDSPLNDTAGVLVNNGAGGLVLLDGSGRAAWSSNTTGKSSSATAAQLLESGNLVVRERDQLNTGVFIWQSFDHPSNTLIAGMRLGNNRQTGDAWFLSSWRAHDDPATGDCRRVLDTRGLPDCVTWCGGAKKYRTGPWNGQWFSGVPEMASYESIFSSQVVVTPDEIAYVFTAAAAAGSPFSRLVLDEAGVTERLVWDPSSKVWIPYMKAPRGVCDDYAKCGAFGLCNEDTASTLFCSCMAGFSPVSPSRWSMRDTSGGCRRNAPLECGNGSTTDGFVTVRGVKLPDTDNATVDTGATLDECRARCLANCSCVAYAAADISGRGCVMWIGDMVDVRYVDKGQDLHVRLAKSELVNNKKRTVVKIMLPLTAACLLLLMSIFLVWLYKCRVLSGKRHQNKVVQKRGILGYLSASNELGDENLELPFVSFGEIAAATNNFSDDNMLGQGGFGKVYKGMLDDGKEVAIKRLSKGSGQGAEEFRNEAVLIAKLQHRNLVRLLDHANKYVLDWPTRFKIIKGVARGLLYLHQDSRLTVIHRDLKPSNILLDVDMSPKISDFGMARIFGGNQHEANTNRVVGTYGYMSPEYAMDGAFSVKSDTYSFGVILLEIVSCLKISLPRLTDFPNLLAYAWNLWKNDRAMDLMDSSISKSCSPTEVLLCIQIGLLCVQDNPNNRPLMSSVVSMLENETTTLSAPIQPVYFAHRAFEGRQTGENSISLLEGR

SEQ ID NO: 149291 - protein, 91 aa, Oryza sativa
  unsure (1)..(91): unsure at all Xaa locations
  Clone ID: PAT_MRT4530_49639C.1.pep
MEIQYELNLDRDPNRSPTGLGGPNDGSYIFVRGVTGGGIASPWEYDEENARGGEGRASAIDYFLYIDARYFVRIPSTSXRLLPLRSASSGN

SEQ ID NO: 149292 - protein, 83 aa, Oryza sativa
  Clone ID: PAT_MRT4530_4963C.1.pep
PGSTPRRPASVTNNLNASAQQVQDIKVPTGCTGRSGPTTKEAEDKHFQSLPSHKLVYGGSKCGLAHVAGEDLAKYGVVVVPRT

SEQ ID NO: 149293 - protein, 46 aa, Oryza sativa
  Clone ID: PAT_MRT4530_49640C.1.pep
VRESVGSLLYGGDSLIRDNDIMWQICACQNNTKIPPSENLTHSPKG

SEQ ID NO: 149294 - protein, 60 aa, Oryza sativa
  Clone ID: PAT_MRT4530_49641C.1.pep
MEPYGESRRDGGLDLDLPLQLGRVRGLDLHRRGLGQRANANTPTIIKGEEAHGRGEGCSS

SEQ ID NO: 149295 - protein, 503 aa, Oryza sativa
  Clone ID: PAT_MRT4530_49642C.1.pep
MKPFNISTNWWWGREKTPRHASTQTGAEKVTEVLEGHVMNCLVAYRMEPEVFKSTAEFLRRKNLVRDTRGVRVEEKLAMFMYMLSHNASYQDMQYEFKHSGATIHLHIRAFFDIVPTLTHRFIKPPLANQTHSKITSNPRFYPYFKNCLGAIDGTHVPITINPEMAAPYRNRKSTLSQNVMLACDFDLNFTFISCGWEGSATDARVLRSAQLNGFRIPMGKFYLVDGGYANTPSFLAPYRGVRYHLKEFGRERAIGVLKKRFPILKVGTLHPIENQVRIPAAAAVFHNLIRRYNGNEGWLDLDHQPHDPHHISPEDFVDVPAGGQIQDKEKELKRDYRCLKDARTQSGASWDEKLGMIIADDPAVWDNIIHSFPRAKKFRNKPFPIFEALGELYDGQTAEGLLNFTSLQPTNTLDQSRNTEDDIVTQVGADDLLMENNQDDLNNDDPITASEQSKVEVSNQLNQRRQTVSTSRKPPEDKREKNPKRHKQNGNVADAMEKYIEL

SEQ ID NO: 149296 - protein, 64 aa, Oryza sativa
  unsure (1)..(64): unsure at all Xaa locations
  Clone ID: PAT_MRT4530_49643C.1.pep
QADPNRFIVLTYIRXELRNLLIGVLPTRYQLETPDLTEEHRKLLASNGLWQEELKKILHDTDLE

SEQ ID NO: 149297 - protein, 111 aa, Oryza sativa
  unsure (1)..(111): unsure at all Xaa locations
  Clone ID: PAT_MRT4530_49644C.1.pep
MPWMEKVCFLVFRMIASSFAWQFSSPTVAYCPHTCSSHGYKXVLPVAVEIXFLYPHHDKIKEYLKDPSKFTVAAPVAAASGAGATSAAKEGDKKEEPEEESDGELGMSLFV

SEQ ID NO: 149298 - protein, 94 aa, Oryza sativa
  unsure (1)..(94): unsure at all Xaa locations
  Clone ID: PAT_MRT4530_49645C.1.pep
INEYKLDDERVTKRKILXSALEEQNGGEKKNASKINPSFNKXPFKFAKYSNAYMLVYIRESDKNKIMCYDDEKDNTEHLRVRLKKEQETQVHKT

SEQ ID NO: 149299 - protein, 101 aa, Oryza sativa
  Clone ID: PAT_MRT4530_49646C.1.pep
MWVGAEEQSAASLCKDKQWKPLFKGVETDELELLTTRLKECYAGLRNIRTGVDDQFHCQIETNMLALELRTLFLDDRFYMDESMVDLLRWSSRTAVEKSDG

SEQ ID NO: 149300 - protein, 133 aa, Oryza sativa
  Clone ID: PAT_MRT4530_49647C.1.pep
QSSRLDVNSSLSTNFRRKSLQIEDDEFLCLPCDETLDCFGPDASDPRSEDCPRCDSMCGDLQNSASQWLAGSAPTLRYPPAARDEEDPRPRRRTPTPPPPPPPTGRWLGSPGLALPPSPPRRPCSTRDGRRTW

SEQ ID NO: 149301 - protein, 95 aa, Oryza sativa
  Clone ID: PAT_MRT4530_49648C.1.pep
RPRDLVVIIQSMHSLYGYIDYLITHKVCVPPLENAITKLMNNIEDVGLSMMRNYAGYICESLQHDVVYICDTAREIAEYRCCLARVEKDRSDVLR

SEQ ID NO: 149302 - protein, 99 aa, Oryza sativa
  Clone ID: PAT_MRT4530_49649C.1.pep
FYHQSASPRMELGRQSQWLGVGGNGDGASSWLLQFFFPLGHKQISQDSVLDGAEGHGEAGFDRGIAVTLYMRAPEAAITPSRRWGMLPWFFSHRWARQP

SEQ ID NO: 149303 - protein, 77 aa, Oryza sativa
  unsure (1)..(77): unsure at all Xaa locations
  Clone ID: PAT_MRT4530_4964C.1.pep
LSFSMSSSFARRGPRVSVAIALTPGYLLVVVRQVEVLAPQTTLVPVLVVVHDVVVVVPLQLHLYIPLLGLLPVGNXQ

SEQ ID NO: 149304 - protein, 63 aa, Oryza sativa
  Clone ID: PAT_MRT4530_49650C.1.pep
ENKKNKKKKIKKTLKTNKTQKKKKKMWRPFLNTSQLYVSWHAIPYLFYLHTPINFFDHRLPTH

SEQ ID NO: 149305 - protein, 88 aa, Oryza sativa
  unsure (1)..(88): unsure at all Xaa locations
  Clone ID: PAT_MRT4530_49651C.1.pep
IRRPGGEGEGQVTVEEVDPAAATMTTARPXEGSGSTSNPLPSPRSSRXDRWWLRAWVVDLEAQGGGVATGGGARSLEAGSKFGDGLGH

SEQ ID NO: 149306 - protein, 31 aa, Oryza sativa
  Clone ID: PAT_MRT4530_49652C.1.pep
AWGSLTASRTCLGLVFSQSPPTCPDLSSPSK

SEQ ID NO: 149307 - protein, 66 aa, Oryza sativa
  Clone ID: PAT_MRT4530_49653C.1.pep
MATTSPLDLTAAAATRGRIRFDLRMEILEWSSVNPETTPNSLRTSEECNFRNALCGSSYTRIPNAS

SEQ ID NO: 149308 - protein, 108 aa, Oryza sativa
  Clone ID: PAT_MRT4530_49654C.1.pep
MAARRRPRRRRWHGGGAGYMKVLSEVDQQLADGGGAEPPAGDVAAGCCLPALEDKTLMVGPGQPTCTSGKDARWPAPHLAMALWHSHAGGGVVASAGGGDEEDDRIWL

SEQ ID NO: 149309 - protein, 47 aa, Oryza sativa
  Clone ID: PAT_MRT4530_49655C.1.pep
FLRFSPPGLYKAGFGIMPTKVINLFKEGNTRVDLHRGEVLHTNDTYL

SEQ ID NO: 149310 - protein, 142 aa, Oryza sativa
  Clone ID: PAT_MRT4530_49656C.1.pep
MTEAWVRHKPGMASVKDMPVLQDGPPPGGFAPVRYARRIPTKGPSAIAIFLTTFGAFAWGMYQVGQGNKVRRALKEEKIAARTALVPVLQAEEDERFVKEWTKSLMWEEIIMKDVPGWKVGQSVYNSGKWMPPATGELRRED

SEQ ID NO: 149311 - protein, 111 aa, Oryza sativa
  unsure (1)..(111): unsure at all Xaa locations
  Clone ID: PAT_MRT4530_49657C.1.pep
PKQKKPPLFKSFFKGPKPGGKGPISDYCKGPGKPSKKFAASIKQRGYDLPEVRAYGQKLXKAGFQKVIAKNRPDQFPDVLKREPAKVLKNQKNPSSARVVFAFFSWKVQLP

SEQ ID NO: 149312 - protein, 259 aa, Oryza sativa
  Clone ID: PAT_MRT4530_49658C.1.pep
MASPLFSLVSRRFPKNLAPISFASSSRLAPSTNPSGNCDLQPLDLSPEAPDLREVVDLVAGGGVSESGAKMTEAWVRHKPGMASVKDMPVLQDGPPPGGFAPVRYARRIPTKGPSAIAIFLTTFGAFAWGMYQVGQGNKVRRREFRWYGTPAKNHAFQSCFLLSIFYATSNELLQPAIWSEKNLLHEVRALKEEKIAARTALVPVLQAEEDERFVKEWTKSLMWEEIIMKDVPGWKVGQSVYNSGKWMPPATGELRRED

SEQ ID NO: 149313 - protein, 116 aa, Oryza sativa
  Clone ID: PAT_MRT4530_49659C.1.pep
VHTEIMNYFTYKATSTVLHQLYEMNPPAYTWLYNYVVVNDPKEGKHFLIALAKERQDLAERVMITRLHLYSKWIKKCDHAKMYEKISNENLEIMRQRLMETVAWPTDDTNTSDTAK

SEQ ID NO: 149314 - protein, 450 aa, Oryza sativa
  unsure (1)..(450): unsure at all Xaa locations
  Clone ID: PAT_MRT4530_4965C.1.pep
RCPSTPDFVHLHPCTFVYNQTEPQTKPYPLDMWKYGSALQQRPELNPYSTRGTTNKTXHAPRAQPKTILGVLNRGGERXRPSEPSATTANHASGTSGTTKTTRSTQAKLQAYKEAITIHKKKTEYTETVHGSTEADPVCQPRQVADKRTPLDTTRAAHLETTRLPSAHTNTATTRTHKRLPTPVHGXDAAGARLDDAETRTKTMTGXVAAHLTERGRRTRMAXRRDERHDDRERREDDDDDDRGRRGGDEGSQQXLHRDEDGXGTAAANPTTEAAPRDDEPARTNDRPEESRCRRRRWRRRPMHGHGGRGCRRNSGEVEGETGVGDGVPAKPRAGRGGGRRGDAEGGDGAAGPHLSGAAGAAGGWVAAMPPVAGGDAPPVVSPRNGGLTGGEKVAARPLVATARPDGARARRERRLEAGRRRRERRRRRGEVPKVFKEDSNLRSSTSLAM

SEQ ID NO: 149315 - protein, 108 aa, Oryza sativa
  unsure (1)..(108): unsure at all Xaa locations
  Clone ID: PAT_MRT4530_49660C.1.pep
SEKEGAAESRSPPLMKVKRHLTXPPPIVRGAGQFQEEEVKSPEPSVHKLASXVKKLHKENIEFRDRNAELRVELAELRNNVDTLSRGLCAKIKHPFVEMGKENRDYAK

SEQ ID NO: 149316 - protein, 42 aa, Oryza sativa
  Clone ID: PAT_MRT4530_49661C.1.pep
TSVIKAKSVKKDLFFGGAIYIFMVTNFFMSNHLERTDAILEE

SEQ ID NO: 149317 - protein, 61 aa, Oryza sativa
  Clone ID: PAT_MRT4530_49662C.1.pep
CSRPQHELVQEVESFNQRKLSAMRSPGEQVSEAPVFQYIAHVRPSPIVDSSCIALVAFWHS

SEQ ID NO: 149318 - protein, 73 aa, Oryza sativa
  Clone ID: PAT_MRT4530_49663C.1.pep
SSSVFIDLFCTSLQCCFFAILLFVQLFASLYPVFPCTNCFMHVILYSATFFWIFFSTSVSPLNFQNFFFVCVI

SEQ ID NO: 149319 - protein, 62 aa, Oryza sativa
  Clone ID: PAT_MRT4530_49664C.1.pep
MCGERGEERREDAGHAEVPTEEEPNDVVEHRAVREAPMSTVDEAIFATVVVTSRSSGESAPD

SEQ ID NO: 149320 - protein, 81 aa, Oryza sativa
  Clone ID: PAT_MRT4530_49665C.1.pep
MSADGGERRGHTVVRYQSGQHVNRALALIYTRWDPAKVLGMFKTLAGWHRLQVSGKRTMLNGMRTVAATNPVHTFETRYGP

SEQ ID NO: 149321 - protein, 92 aa, Oryza sativa
  Clone ID: PAT_MRT4530_49666C.1.pep
FIYAKPIPGTFVCNIGDMLKVWSNGIYQPTLHRVVNNSPRYRVSVAFFYESNFDAAVEPVEFCRERTGGVAKYEKVVYGEHLVQKVLTNFVM

SEQ ID NO: 149322 - protein, 61 aa, Oryza sativa
  Clone ID: PAT_MRT4530_49667C.1.pep
MVNASNELLRPFYMWKYWLLDVDLTTSTNMLGCLELSSDESANLGHLGQELSAVEAGAESK

SEQ ID NO: 149323 - protein, 235 aa, Oryza sativa
  Clone ID: PAT_MRT4530_49668C.1.pep
TRPASRKKDESKDSDFKDAAEVCLPLIHAALEGVEKGTFLRGCLLNIGVPSSPTTNKGFKLTKQSIYRPAQSWEGVSTSRPTPATHFMGMHQSLGIQLAQLGKDASAAGAARRINAQRKIVEVESVASTGKAEAREVVKKLFRAEFTEKQHECLDEDIDLRALENGFISVTPLNIHGNVAPETGAPASDWLSVAVGLDKAKEDSVVTAEEQDAPAVAEEKEAPSATNSQDMYTFP

SEQ ID NO: 149324 - protein, 447 aa, Oryza sativa
  Clone ID: PAT_MRT4530_49669C.1.pep
MAASSGDDAPRPNPLPSALVSNLQSVLAARRPPPPAAEEAGAEAPAPEAAESSGAAPVADEGPAKPAVLLTCAGGIRAPGLAALVDSLVAGGRCDVHVCAPESDKPACGYSITIRETITATSVDFKGAKAFEISGTPVDCVSLALSGRLFSWSAPALVISGINAGANCGYEMFHSSAIAAAREALLYDVPSIAISLNWKKDESKDSDFKDAAEVCLPLIHAALEGVEKGTFLRGCLLNIGVPSSPTTNKNAYCLSRPGTSYLTGLPTNAKISISLIYQGFKLTKQSIYRPAQSWEGVSTSRPTPATHFMGMHQSLGIQLAQLGKDASAAGAARRINAQRKIVEVESVASTGKAEAREVVKKLFRAEFTEKQHECLDEDIDLRALENGFISVTPLNIHGNVAPETGAPASDWLSVAVGLDKAKEDSVVTAEEQDAPAVAEEKEAPSAT

SEQ ID NO: 149325 - protein, 179 aa, Oryza sativa
  Clone ID: PAT_MRT4530_4966C.1.pep
MELRVFAPSISAATRLEAGGRRRHPPAAEKTIGLRRRYLSFAPQSSAATRSSSAVRMPQLHSSRFQGLRNSSNSSDSNHSQAGTNVLIHSGCAFCDPYGILQRIQYSAYSQDMCTCITVGSKQQTQRFSTQLLTTDTNCCWFQASEFRETRYFAFRSQVHNMLRKALINGINCSAIHPA

SEQ ID NO: 149326 - protein, 236 aa, Oryza sativa
  Clone ID: PAT_MRT4530_49670C.1.pep
MRVAAAAGFGEPAHLRLRPQPRELAPPTSAIGRQTPPPPHTRYFGVAPPPGATTDRPTHRPSASTDPQPHHPRRPSATTQPPPSATTDAPAATVHHHPAGTVRHHLQPPQPSAPLENGGVDLGWRRTVLAALLDGGVVGRRTRAAAARRRGGGAEPLGGAVVVASVWWRSASLVSGIDPEPERYFSFYLTGMGGGGAAEGGDEAGQWKAEEEEARRRNAGEDARRQKVGKEEAQAN

SEQ ID NO: 149327 - protein, 148 aa, Oryza sativa
  Clone ID: PAT_MRT4530_49671C.1.pep
CPPPGGRPRAPPPRRRQPTPRSPSTRPRPAPRSAPPPPAAPPPATAAPQRGRRTLASARAAAAARRRARASGGAGRGPSRWPSTGTPPRRAALALSGTTPTRWRCSRPRSPSARATGSRPASRTWARCSSPSGAPSPPTSTRPRCTTS

SEQ ID NO: 149328 - protein, 38 aa, Oryza sativa
  Clone ID: PAT_MRT4530_49672C.1.pep
FWGFLTLRGSFNHRKNLILVVLHETRTERNWWVTHTGQ

SEQ ID NO: 149329 - protein, 48 aa, Oryza sativa
  Clone ID: PAT_MRT4530_49673C.1.pep
PLVRSSLGRRPNGTAMGSPRGGRVRSAWLENKTMRRVALRWGWIERCG

SEQ ID NO: 149330 - protein, 68 aa, Oryza sativa
  Clone ID: PAT_MRT4530_49674C.1.pep
PLTYSGSTTGSLEAAYTQATGKPVSLSEQQLVDCATAYNNFGCSGGLPSQAFEYIKYNGGLDTEEAYP

SEQ ID NO: 149331 - protein, 86 aa, Oryza sativa
  Clone ID: PAT_MRT4530_49675C.1.pep
MALALSTFAAAAAARRGPALPARVTTTRGYPRFGGFSANKPAAAAVEGKGPSGITQAKGRAVSSAGKEGSWVPHPVTGHFRPFNFG

SEQ ID NO: 149332 - protein, 217 aa, Oryza sativa
  Clone ID: PAT_MRT4530_49676C.1.pep
MAARARATRKPGRRGGRRQGRWCRSWMGSMYRHLRDRSSRRRRFSPAWRQELARQESPGVAGGRRQGRWCRSWHGRRIGRDDQEVRARTANTIDIDHDLEILVVIFACYDNIGTERSAYFRQIEEDVGTHPAAILELKDAVGAFQSMDMGELARFEGFPSKKLEALRMAAALYSKLDGVVATPKGPFFVPLVPLLDTVVNRGKFLGLIVISNIRIHI

SEQ ID NO: 149333 - protein, 1366 aa, Oryza sativa
  Clone ID: PAT_MRT4530_49677C.1.pep
MASPSGNPNPTPNQPFELNRLFKQHPPASASASAAPNPNHHPAPAGIFPGAAAPAPHHGVVVPPPMTSGGGPYSYPPATPPFHRGPYLPPYPNDPHLAFAGNPNPPAAAAAPNPAGARLMQLLGNTAPTHLESAVSMPMPSEFSAAAAVAPPAPLPAMPSAPPARMPSSSSSKMPRGRLLGPGDRAVHDVDSRLPGEAQPPQLEVTPITKYTSDPGLVLGRQIAVNRTYIVYGLKLGNIRVLNINTALRSLLRGHTQRVTDMAFFAEDVHRLASASVDGRIYVWKIDEGPDEQNKPQITGKIEIAIQIVGDAETYHPRICWHSHKQEILFVGVANCVLKIDTTKVGRGMDFSREEPLKCPLDKLVDGVHLVGKHDADITDLSLSQWMTTRLASASKDGMVKIWDDRKSVPLSVLKPHDGQAVYSVSFLTAPEHPQHINLITAGPLNREVKIWASTNDEGWLLPSDSETWRCTQTLELVSSLEHRFEEAFFNQVAVLPQASLILLANAKKNAIYAVHVEYGPDPASTRLDYIADFTVAMPILSLTGTHESQLDTEQIVQVYCVQTMAIQQYGLELSLCLPPTADNPGFGRDPAISHVYERPPAEVTVVESSKETSLIDSSVVGPTKPASNNQALGNTFETSHPNASINYGTVKFVINISPGLFAYAEANVPSQVQSTTPPSSIDLGYLEEGALRRGPSRGPSLGDRDIDPSSLDYSSKKRMDSDGASGQGSFGRKDSFGKEEPRGSQGDGTKTSDPRPMFKVGGNATHLITPSEIISGVLSSPETIATGSSQNVEVDAKHVDGRKSERSVELEAVKETQIVHEKRERPPKTAEQTVNTISERLVTTDKYSVEDSQSRSADGSVSTLLKHPSGAGDENTVSEAPEKTSDGYASRNLQLTLATKEEKVLHPQVSRQLSPSTSTYNSADSSHEPPSNVNPPIDNVPQVGIQETLQQLMAMHSDLQKQLSTIVSAPIAKEGKRIETSLGRNMEKSIKANIDAMWARFQEENAKHEKAERERMQHITTLITTAVNKDIPVMLEKSLKKEISSVGPAVARTTAPIIEKSLSSAVSDSLQKVLGDKVVNQLDKSLSTKLEATVARQIQTQFHTSAKQALQDALRSSFESTIIPAFEQSCKTMFEQVDGAFQKGMSEHGAAIRQQVATAHTPLAQTLRETIASASSINQGLASELLDGQRKLLALVSSGGSLSHNTSVLQPSNGPVASLPEVDAPLDPVKELSRLISERKFDEAFTMALQRSDVSIVSWLCSQVDLHELCRMNPIPLNQGVLLALFQQLACDIVNDTPRKLEWMTAVAVAISPTDPMIAVHVRPIFEQVYGVLNHQRSLPASSSSEATNIRLIMHVINSVLLTYK

SEQ ID NO: 149334 - protein, 161 aa, Oryza sativa
  unsure (1)..(161): unsure at all Xaa locations
  Clone ID: PAT_MRT4530_49678C.1.pep
GXKRGGXKXXNPRRGXXLGGGAKKXFFGKKKXGGGGSXPXXXXGGXXXXXXXXPXKRGGGXFFXKGXXXPPPPPPPGGKKXGGGAXXXLKXKISGGXXXFLEXFXGGVXXPQXXGGKKXXGSCEXSSIQXGGGXXXFLDSFRGNQCQHLLPWFXSLXLIRV

SEQ ID NO: 149335 - protein, 75 aa, Oryza sativa
  Clone ID: PAT_MRT4530_49679C.1.pep
PLDRPLPRVVGAYRPPPRGNFKPTNNQNRRPQRAPQLINKVIFPKKSGRVHTGANNTGTPCPPGKWVVHAFNPND

SEQ ID NO: 149336 - protein, 1659 aa, Oryza sativa
  unsure (1)..(1659): unsure at all Xaa locations
  Clone ID: PAT_MRT4530_4967C.1.pep
MSSSFVDNGVNTNLCQVHPASTMLVWTQVGEIVFPVYTTMLISTGPPMTGNENVVATNQDDFMSKNPPAETENRASTTSELEKDSDAAKPCSSDMNREPTKMTSEATRSWCSIHKTRKHTLQACWVFLNVRAEIHACKERGIQRVSPTRDVYCPIHKTKNHGLSSCKVFLGAMKDPSPKSYVPIRDNDKEQGATSISDRFVGVIDIDPHEPSVLHLLEDYGSSKTSVSWEPSTIRAIQAILRETPYDPILNDDLERLIERLRESVTNLSNTFEEAAIAAHPEQPPTDDVNGEDLERRESPQRATPPPRGTGDLRDHINGRREARRTRDNVNRSRRHVSSRRHDNGNQRDRSNEDRDQDNHHDHNDRERRVRDNTGRGRRHNDDDDGDRRRDNSGRRRQDSRDPGRHPRNRTLEASDLSSSSSSSSSSSSDRHPRRTHNRRQPTAPNAGCRAFGRSLRDVRWPERFRPRVIEKYDGSTDPEEFLQVYSTVLYAAGADDNALANYLPTALKGSARSWLMHLPPYSISSWADLWQQFVANFQGTYKRHAIEDDLHALTQNSGESLREYLRRFNECRNTIPEITDASVIRAFKSGVRDRYTTQELATRRITTTRRLFEIVERCAHADDALRRKNDKPKTGGEKKPATDGFESSKKKNRKNGKRKAQVEVLAAEYVNPPKRPDPQSSDTKKAWCPIHKTDRHSLEDCLVFKNSLEKHIAFEKXKRVRVVEKNEEEVPHESDPAYPDSDLHVSHIFGASTTXYNAIIGRTALAKFMAASHYAYQVLKMPGLNGTITIQGNAKLAVQCDKRSLNMVEQTPSPLATTTPPKKPSDMPGVPREVIEHKLMVQPDAKPVKQRLRRFAPDRKQAIREELDKLLKVGFIREVLHPEWLANPVMVRKANGKWRMCVDFTDLNKACPKDHFPLPRIDQLVDSTTGCELLSFLDAYSSYHQINMAKEDEEKTAFIMPFGVFCYVKMPFGLITVGNTFQRTVQGALSDQLGNNVEAYVDDIVVKTKTCDSLIANLRQTFDNLRRYRLMLNPEKCTFGVPSGKLLGFLVSGRGIEANPKKIKAIENMKSPTRLNTVIVVEREKVQRPVYYVSEALHDAKTRYPQIQKLLYTVIMTSRKLRHYFQAHRVTVVSFFPLGKVVRNKDVVGRIAKWVVELSQFDVHFVPRTAIKSQILADFVANWTMPDNKLDNQVDNETWTMAFDGALNSQGAGAGFILTSPSEDQFKHAIHLNFRATNNTAEYEGLLAGIRAAAALGVKRLIVKGDSELVANQVHKDYKCSNPELSKYLAEVRKLEKRFDAIEVRHVYRKDNIEPDDLAQRAFRRESLEPGTFLDILTKPSVKEVSGEVSPDTPDIETTDDWRIPLIKFINIEELPEDDTEAEKITRKAKIYCMVGNDLYKKAPNGVLLKCVSSDDGRHLLLGIHEGICGSHAAGRTLVGKAFRQGFFWPTALKDACDMVQRCEACQFHSKHTKLPAQALQTIPLTWSFSCWGLDILGPFPRGQGGYRFLFVAIDKFTKWIEAVPTGEIKADNAIKFIKGIFCRYGLPHRIITDNGSQFISADFQDYCIGLGVKICFASVSHPQSNRQVERANGIVLQGIKTHVYDRLMSHDKKWVEEIPSVLWAIRTTPTTSNKETPFFLVYGSEAMLPGELRHQST

SEQ ID NO: 149337 - protein, 87 aa, Oryza sativa
  Clone ID: PAT_MRT4530_49680C.1.pep
YLFSPFSPCRDISHSLSAMNPPIGEVLLVSSSPLLPYDTETSFSPSLRLHLKTSCVPYLTYTLLERMVSLAPLHHHFHMSRRLSLIQ

SEQ ID NO: 149338 - protein, 86 aa, Oryza sativa
  unsure (1)..(86): unsure at all Xaa locations
  Clone ID: PAT_MRT4530_49681C.1.pep
MWGGPILPEFIPAPWRAAAATKRVTVCHLWPAGSKNAARGKSKSKRQQRSFSDVDXDFEAVFEQFDDDSDFYDAVDEDXGHFVFAF

SEQ ID NO: 149339 - protein, 43 aa, Oryza sativa
  Clone ID: PAT_MRT4530_49682C.1.pep
NFVGLHVISVGCRVINDILTVCNQLTTFCHFTPNRIKGAYLLI

SEQ ID NO: 149340 - protein, 65 aa, Oryza sativa
  Clone ID: PAT_MRT4530_49683C.1.pep
MEIGDPRGQRAAEGGRKNSRGADAVITPTRGGIEGGLVPDMWTPHIGDHHVTGHHGLPHQRGWGK

SEQ ID NO: 149341 - protein, 204 aa, Oryza sativa
  Clone ID: PAT_MRT4530_49684C.1.pep
MAAPPPRRTPNPERGSRRKGEDPWLAASLRPGNFLPGLAIGFLLGLLVDLTSSWRPQSSPPLAPAAPAPRGSKRTGGSSSAGGGIGGEELKMVLVVRKDLKMRAGKIASQCAHAATGLYAELMASNRGLLRQWEQFGQAKIVLTCKNQQEMNRIKETAEHRGIPTFVVADAGRTQVQAGSKTVLAVGPGRKADIDSVTGKLSLL

SEQ ID NO: 149342 - protein, 58 aa, Oryza sativa
  Clone ID: PAT_MRT4530_49685C.1.pep
TELISLVMNKEHQNSEESRKCTTICINILSCSLVYLLNRRWGTLSQSAQEITKVHSAT

SEQ ID NO: 149343 - protein, 108 aa, Oryza sativa
  Clone ID: PAT_MRT4530_49686C.1.pep
MAAKAVMLALLVLVSTAQVSMGARRRMELYKPDPADMLSYHSGAVLQGNIPVSIYWYGKFTPAQKSILFDFLLSLSVAPYAAAPSVAQWWSSHRRALLIKVQTNSTAR

SEQ ID NO: 149344 - protein, 64 aa, Oryza sativa
  Clone ID: PAT_MRT4530_49687C.1.pep
MSFRYHIVRVRPCYPARNCSRTLFPAVVALAWLRRIGPSLCGGCAQHVNPCSPASLRFSCNMMP

SEQ ID NO: 149345 - protein, 91 aa, Oryza sativa
  unsure (1)..(91): unsure at all Xaa locations
  Clone ID: PAT_MRT4530_49688C.1.pep
MFSSRKEVGRKVIDKGXQKHALHRSRNTPDSNCPATVTLSLRXKKIIMSKQDDLGKSVFMKARSEIFNSVSDATRSEKCRHQLPGNAMSWE

SEQ ID NO: 149346 - protein, 54 aa, Oryza sativa
  Clone ID: PAT_MRT4530_49689C.1.pep
IWIGSCASNAAALAVVVDLGSNAALDLGRRRRRLVLRLAVRELDERRVPRPRVR

SEQ ID NO: 149347 - protein, 1739 aa, Oryza sativa
  unsure (1)..(1739): unsure at all Xaa locations
  Clone ID: PAT_MRT4530_4968C.1.pep
MSSSFVDNGVNTNLSQVHPALTMLVWTQVSEIVFPVYTTTPISTGPPMTGNENAVSTNQDDFMSKNPPAETENGASTTSELEKDSDAAKPCSSDMNRELTKMTSEATSNAFEEAATAAHSEQPPTGDVNGEDPERRESPQRATPPPRGTGDLRDHINGRREARRTQDNVNRSRRHVSSRRHDNGNQRDRSNEDRDQDNHHDHNDRERRVPDNTGRGHRHNEDDDRDRRRDNSGRRRQDSRDPGRHPRNRTPEPSDPSSSSSSSSSSSSDRHPRRTHDRRQPTAPNAGCRAFGRSLRDVRWPERFQPGAIEKYDGSTGPEEFLQVYSTVLYAAGADDNALANYLPTALKGFARSWLMHLPPYSISSWADLWQQFVANFQGTYKRHAIEDDLHVLTQNSGESLREYVRRFNECRNTIPEITDTSVIRAFKSGVRDRYTTQELATRRITTTRRLFEIVERCAHADDALRRKNDKPKTGGDKKPATDASESSKKKNRKNGKRKAQVEVLAAEYVNPPKRPDPQSSNTKKAWCPIHKTDKHSLEDCLVFKKSLEKHIAFEKGKRVRVVEKNEEEVPHESDPAYPDSDLHVSHIFGGSTTYSSKREYKKVERDVCSTWQRAAPKMKWSEQKIEFSEEDHPKTAVIXDDIRSWSNPLFGTSSTLDAMGIPXSELTPTDQPFHGITPQXPLGKITLPVTFGQANNFQIEQITFDVAEFDTAYNAIIGRTALAKFMAASHYAYQVLKMPGPKGTITIQGNAKLAVQCDKRSLDMVEQTPSPPAMTEPPKKPSDMPGVPREVIEHKLMVRPDAKPVKQRLRRFAPDRKQAIREELDKLLKAGFIREVLHPEWLANLVMVRKANGKWRMCVDFTDLNKACPKDHFPLPRIDQLVDSTAGCELLSFLDAYSGYHQISMAKEDEEKTAFITPFRVFCYVKMPFGLITAGNIFQRTVQGALSDQLGNNVEAYVDDIVVKTKTGDSLIADLRQTFDNLRRYRLMLNPEKCMFGVPLGKLLGFLVSSKGIEANPEKIKAIKNMKSPTRLKEVQKLTGCMTALSRFIARMGERGQPFFALLKKQDKFVWTQEAEEAFVALKRYLSNPPVLVAPQPNEELFLYIATTPYSVSTVIVVEREKVQRPVYYVSEALHDAKTRYPQIQKLLYAVIMTSRKLRHYFQAHRVTVVSSFPLGEVVRNKDVVGRIAKWVVELSQFDVHFVPRTAIKSQVLADFVADWTMPDNKSDNQVDNETWTMTFDGALNSQGAGVGFILTSPSGDQFKHAIHLNFRATNNTAEYEGLLAGIRAAAALGVKRLIVKGDSELVANQVHKDYKCSNPELSKYLAEVRKLEKRFDGIEVRHVYRKDNIEPDDLARRASRRESLEPGTFLDILTKPSVKEVSGEVSSDTPDISSEVTKVERAVADIETTDDWRIPLIKFVNSKELPEDDTEAEKITRKAKIYCMVGNDLYKKAPNGGXRYTWAIPTRAGRLQIPIXVAIDKFTKWIEAVPTGEIKADNAIKFIKGIFCRYGLPHRIITDNGSQFISVDFQDYCIGLGVKICFASVSHPQSNGQVERANGIVLQGIKTRVYDRLMSHDKKWVEELPSVLWAVRTTPTTSNKETPFFLVYGSEAMLPGELRHQSTRVQKHCDEDQEEQRDIDVNLLEEHREQVAVRAASYQQALRRYHEKRIRARIPSIGDYVLQRVQSQAGRNKLSPKWEGPYTITQVLWPGAFKIADGDGRELANSWNIDQLRKFYV

SEQ ID NO: 149348 - protein, 68 aa, Oryza sativa
  Clone ID: PAT_MRT4530_49690C.1.pep
SGTPHRPTRQQPTSSPKPCRARRRSSPRRPPPVAPRFAASSPPRPSPLPASSLASWASSPPHSPSPGR

SEQ ID NO: 149349 - protein, 132 aa, Oryza sativa
  Clone ID: PAT_MRT4530_49691C.1.pep
MPFEPTMTHTLRQLAEHVRTYTTPPTRSNIAEVVGASEPPTQLRPVSGLVICGLDNKRISTSPPPEGSKENPMALKKGSSSGFSFWKLAECAMVGGDGGHNEEGGSRWPGVNRLFVPGPTDIGMDEGECKEV

SEQ ID NO: 149350 - protein, 865 aa, Oryza sativa
  Clone ID: PAT_MRT4530_49692C.1.pep
MSLRRLCFVLPMDADEVVVVAGAAGEEQPRRRGMAASGRLASYVRRKVGRALRCGLCGAWCHHRSSGVCSFEDIAGVDAVGAGKLGGGAGGSPRIFSYSELYIGTSGFSDTEILGSGGFGRVYRAVLPSDGTTVAVKCVAGRGDRFEKSFLAELAAVARLRHRNLVRLRGWCVQDEEELLLVYDYMPNRSLDRLLFRPAAAAAPAASAPALSWDRRRRIVSGLAAALFYLHEQLDTQIIHRDVKTSNVMLDSEYNARLGDFGLARWLEHAMSGEDAPPPQLEVSPSPHSARSSSFASANYQFRLMDTSRIGGTIGYLPPESFQRRAMATAKSDVFSFGIVLLEVATGRRAVDLAYPDDQIFMLDWVRRLSDEGKLLDAGDRKLPDGSYPLFDMGRLIHLGLLCSLHDPRSRPSMKWVVENLSGSCSGDLPPLPSFLALPKYVSLTSPSDSGTTTNATDSTVTSASKLYGTAAGTTIYLTAENGHRSRGGLADNSGGSSQRSTRPLVVIPSVDTPREISYKEIVAITNNFSESQMVAELDFGTGYEGFLDNGYGGNGARRDRVHVLVKRFGMKTCPALRVRFANELRNLAKLQHRNLVQLRGWCTEHGEMLVVYDYSPGNLLSHHLLRRDGAGAAAVLPWRHRYSIVKALASAVLYLHEEWDEQVIHRNITSAAVFLDPDRNPRLGSFALAEFLSRNESHGGAGGHHVALPATSSAARGIFGYMSPEYMETGEATTMADVYSFGVVVLEVVTGEMAVDVRSPEVLLVRRAQRWKEQSRPVEAIVDRRLDGQVDRPELERLVRLGMACTQSDPAARPTMRKIVSIMDGNDEILKKFEQRKQQSKEEWETTNAAALSLVRRLHALAIH

SEQ ID NO: 149351 - protein, 132 aa, Oryza sativa
  Clone ID: PAT_MRT4530_49693C.1.pep
MPSSPDLLVSGADVDAKNMRRYSALPSAHPDTLADRLHRYRGVLLVILTPLALISLVFLLMPRSPASSTAGAGRRWGPVDANKCAVIFDAEISRSHVHVFRFDANLDLLALMRKGKARAGAGRGDGGGLKVA

SEQ ID NO: 149352 - protein, 449 aa, Oryza sativa
  Clone ID: PAT_MRT4530_49694C.1.pep
MAEDAPPSSLPLLLPRKSLSSSSAQRKQQYARCVSHAGDELHSFRSCLAWMCVDHSTRARGAASWAAFLLLAVAAPSAATLALPSPVGGGGSPFDGQVQVSLTLAAALAYLTLTALLQGRGLRRLLYLDRLRDDSEEVRSGYIEELAGSFRVLACFLLPCTLAEAAYKAYWYLAAPPFRSPWWSAAACAVEVASWAYRTAVFFMVCVLFRTICYLQILRMKGFAREFCRFADVAAVLESHRRIRKQLHRISHRYRRFILCCLVLVTTSQFAALLATTRPHAQINLATAGELALCSLSLVAGLLVCLQSAAKITHKTQAITSVAAGWHADATINAFDNDQEDPNPDLPRIVGYLVPVNAYWMASGESSSDSSSSSSSSDDDDSGHPKSKYIPFQNNHCFQQRQALVTYLENNRAGITVYGFVVDRTWLHALFMIEFSLVMWLLGKTVGIS

SEQ ID NO: 149353 - protein, 123 aa, Oryza sativa
  unsure (1)..(123): unsure at all Xaa locations
  Clone ID: PAT_MRT4530_49695C.1.pep
LLEESQYXPCPSVPLRRVPVXFRQSDAPIGGWTXRRAGVSNVRSTGLXAYRFRKARLPSDDAAARQRXSTVSRRRATTRLILNKAMTPNRISGSVSSRFVVLXLLFELEYXLRFTCQKKKKKK

SEQ ID NO: 149354 - protein, 48 aa, Oryza sativa
  Clone ID: PAT_MRT4530_49696C.1.pep
RNHILLCSFYLLPGTFSSMQKLNWTTVLSCFPVNNLEPTLCCPFVFAL

SEQ ID NO: 149355 - protein, 526 aa, Oryza sativa
  Clone ID: PAT_MRT4530_49697C.1.pep
MATPGLAADARCGAIDPVVVLVCVVATLATQPKQIHEIKDFLLTARRKDARSVRIKRTKDAVKFKVRCSKYLYTLCVFDADKANKLKQSLPPGLTVQEVLNISILQLEYLLLGRLGSTQCNLHPLGQEANQALQKVRRLPNGPCRKLVTDFYALRKDVELAVARVSEVRQSAGLDQLEEEIASLEKKSADSSLWDDPSKAQEILVALTEVKDRVKLLNDLKLQVEEAETIVKLTEELDSIDTGLLEEASKIIKALNKALDNFEMTQLLSGPYDKEGAVINITAGAGGTDAQDWADMLLRMYVRWGEKQRYKTRVVEKSPGEEAGIKSATIELEGRYAYGYLSGEKGTHRIVRQSPFNAKGLRQTSFAGVEVMPLLPEESMDVEIPEEDLEISFTRAGGKGGQNVNKVETAVRMVHIPTGIAVRCTEERSQLANKIKALSRLKAKLLVIAEEQRASEIKQIRGDAVKAEWGQQIRNYVFHPYKLVKDVRTACETSDITGVMDGELDTFIRAYLKYKLSAAAEEQSVK

SEQ ID NO: 149356 - protein, 164 aa, Oryza sativa
  Clone ID: PAT_MRT4530_49698C.1.pep
MSSNFGYGWGGRGCERVGKINLSGGRPRSNTYRRRIGLTAVEIGWRRVGANPGATRGGGEGENGWLRGECKNWRDSPRIETKSHSAAAWMGAHGVECRFLAAEVVPALSSSRLVWQRRLEGVGRVTARQDDRARASGPEADARRLGARRSRTPGRRAQGEEKVN

SEQ ID NO: 149357 - protein, 275 aa, Oryza sativa
  unsure (1)..(275): unsure at all Xaa locations
  Clone ID: PAT_MRT4530_49699C.1.pep
PSPPLARAALASDFAARRAAARQPRGRLRVPDRLGAPSPVQRLQVAVATPILTTTKPGRPPPQGIDTRRRALPSKPPPSAILFLSGVNRANFCRTVELKIDGGFPSHNSNHSPLSQPFSPSPPPRVAPGLAPTRRQPISTAVKPILRRIVSPNRSPASSFTSPHQAEHRRPRVALFFAAAKFFRPQSAVSTDLAARPSTHQISSSAAARHRQRSLAPSXPLQSQTLTPPTDFGERPEVEEEKREREXTGLEDSSDSLNNINQSQDIEQGKLLYTF

SEQ ID NO: 149358 - protein, 440 aa, Oryza sativa
  Clone ID: PAT_MRT4530_4969C.1.pep
MDEVGGRWTFSRANEGYTSCGPMFNREKGKNVSGYASSNPSFQLNPPLASRELTRAYPWSIPSMLLSSQLPLVGSQDQNQYVFDRAFATQVNELPMLEEDVPFCHDCREQGHYALNCPWVYAKEAPSFGLAGQTSLNQPPRTKSSLQPSVQRREPNGENPLNPGNCFPPSPSYHVGSRAKQAKGKKSKNQKRKAPMRTEEEVRKMTITSTEWPPAGITIPRRQRGNTFRGARQLTQHLLSHGGRVSDSEGSDQVSSDYEDESLRHLGEEEMESKACPRCGEIGHVASLCFTLCPYCEEDHPPGKCPTRKVTCFLCEGTNHVPKDCQLSVLLTKTAEIQRTTLRLSHQLVSSNINIDDIIPSTNAPPAAPDSAVNHSNNTFNTNHSLHRRPQQRIVVDGRSCVSPRPTPGRAKGNQSQECDTKQKTVIRLNQQSEGNFSCE

SEQ ID NO: 149359 - protein, 1933 aa, Oryza sativa
  unsure (1)..(1933): unsure at all Xaa locations
  Clone ID: PAT_MRT4530_496C.1.pep
EAKDRAGTLLSRRPLGRRMXGEEYMSKGADFAKASLPPRGPKKPFXPIKPRGHWADDRLTAHQESMNLYYTMYPCKCPFHKGNHLSFRXKLAPAIGNFERNXHEKRMPXKKVVXKEKVQRRKKSDAGANMAAEEGAEPWAPVAEDGGAPSTSAPAPSLPPSAPATSVQVPNAADMAKAAAAARALQTRAEILSTSQLLVPQAAPSQPAAAQTALAAMQAQVNPDPETQTEADMEAMRQNMTRLQDMLRQMQEQQQAYEAARRSKVASAPILQYSAGYVPPQVYPQVPTQPLPPQVTQAPMYFVGQPLTAAAHPAPHVQLQAQPVATQVHPQPPGQVPQTMVEGASALQAQLQAFLQQLSQPHNISSTAPSACPEGNTSQGAPSXLPSNQPGLGASPWSQGPQFDSINAAQAPTVRPQAPTPGFGANQAPNQIAMTWSQPTFDPFMAAHQASPIGAGQPNAMAQPHAQAVISPFATPYPQQGAMNRAGGEKGLPLSGGIKTRPIPPQFKFPPVPRYSGETDPKEFLSIYESAIEAAHGDENTKAKVIHLTLDGIARSCYFNLTANSIYSWEQLHDVFVLNFRGTYEEPKTQQHLLGIRXRPGESIREYMRRFSQARCQVQDITEASVINAASAGLLEGELTRKIANKEPQTLEHLLRIIDGFTRGEDDSKRRQAIQAEYDKASVTAAXAQQQVQVAEPPPLVVRQPQPAIQAQPPRQGQAPMTWRKFRTDRAGKAVMAVEEVQALRKEFDAXQASNHQQPFHKKYLNQQIFFGPEDAEGVMFSHQDPLVISAEIAGFEVRXILVDGGSSADVIFAEAYAKMGLTTQALTLAPTSLRGFGGEAVQVLGQAQLIVAFGTGENRREEQVLFDVVDIPHNYNAIFGHATLNKFEAISHHNYLKFKMLGPAGVIVVKGLQPSAVSKGDLAIINRAVHNVEAEPHDRAKHAPKPAPHGKIVKMQIDDADPTKLVSLGXDMGEEEAKNILEVLKKNIDIFAWGPDEVGGVSADLIMHHLAVKPDAKPRKQKLHKMSANRQEAAKAEVKKLLKAGVIQEIDHPEWLANPVLVRKSNGKWRMCVDFTDLNKACPKDDFPLPRIDQLVDSTVGCELMSFLDAYSGYHQIRMNPADIPKTAFITPFGTFCHLRMPFGLKNAGATFARLVYKVLYKQLGRNVEAYVDDIVVKSRKAFDHASDLQETFDNLCAAGMKLNPEKCVFGVRTGKLLGFLAAERGLPFFKTLRGAGKFNWTPECQAVFDELKQYLQSPPALISPASGSELLLYLAASPVAVSAALVQETDSGQKPVYFVSEALQGAKTRYIEMEKLAYALVMASLKLKHYFQAHKVIVPSQYPLGEILRGKEVTGRLSKWAAELSPFDLHFVARTAVKSXVLADFVAEWTPAFAPEPEPIEQPWVMYSDGSWSHKGAGVAAVLTSPNGVPIWYAARLQFDTTNNAAEYEAIILGLRKAKALGIRRLLIRTDSKLVVGHVDKSFEAKEEGMKRYLDAVRSIEKCFSGITVEHLPRGQNEEANALAKSAACGGPHSPGILFEVLYAPSVPMDSLEVLAIDQVKLVEDPYDXXTPFVKHLETGWLPIDEAEAKRLQFRATKYKMVSGQFYRSGILQPLLRCISFAEGEEMAKEIQQGLCGAHQAARIVAFKVFRQGVYWPTVLKVCVEQIKKCESCQHHGRSQTTPQYELQPITPIWPFARWGLDIIRPFLAARNGHKFAIVAVEYFSRWIEAEPLGVITSATVQKFVWKSIVSRFGVPKEFITDNGKXFDSDKFREMCEGLNLEIRFTSVTHPHSNGAAECINGKILEALKKRLEGAAKGEWPEEMLSVLWVLRTTPTRPTKFSPFMLLYGDEAMTPTELGANSPRVTFFRGEEGRELLLELLEGVRVEALEHMQKYATGTSATYNKKXSTDGVVAWSSCPKEKGEPYSRWQA

SEQ ID NO: 149360 - protein, 56 aa, Oryza sativa
  Clone ID: PAT_MRT4530_49700C.1.pep
TVISPSGPGQRMCPGMALALLHLEYFVTILVREFEWREVAGDEVDLTQKLQFTVVM

SEQ ID NO: 149361 - protein, 59 aa, Oryza sativa
  Clone ID: PAT_MRT4530_49701C.1.pep
SLGLHLAVLKGGSSMGRRVSSLHENPTNIFYAPSTTTPATVVVYTPRSAQPEHVTCVPG

SEQ ID NO: 149362 - protein, 55 aa, Oryza sativa
  Clone ID: PAT_MRT4530_49702C.1.pep
MARAYTLETQTQQQQQAVASAALLVLPEPSLTLSLFLCVVFTAAFEGSGSEYGYV

SEQ ID NO: 149363 - protein, 803 aa, Oryza sativa
  Clone ID: PAT_MRT4530_49703C.1.pep
MGGGGMRKAPSMEWRWVSTEEDDEGEEDGDTVEAAAAAVGAVGRGGSFGSEEEEDEEDGGGGGEGEGEGEDGEKQKLIRTVPSVDWFDVEGYEVSVAQHIEDSEEFDFGRTMFLALQTLAVVFGDIGISPLYTFDVMFSKYPILGEEDVLGALSLVLYTLISMPLVKYVLVVLWANDDGEGGIFALYSLICRNAKVSLIPNQVHSEKRMSSFRLKLPTPELERSIKVKEKLESSLLLKKLLLGLVLFGTAMFISNGVITPAMSVLSAVSGLKVGIPNASQGLVVMISVVLLVILYSVQRNPFQAWLSLAGCLLCATGSEAIFANLSYFPVRYVQSMFALLVLPCLVLAYLGQGAFLIANQNSSEQIFFSSIPSGVFWPVFLIANLAALIASRTMTTAIFQCLKQSIALGCFPRLKIIHTSRKFMAKIYIPVVNWFLLFSCLGFILLFRSIYDVGNAYAIAELGVMIMATVYVTIIMLLIWETSIVKVLSFVITFLSLELVFFSSSLSSVGDGGWALIIFASGILMVMFIWNYGSKLKYDSEVKKKLSKDLMRKLGPNLGTIRAPGLGLVYSEIVKGVPAIFGHFLIALPAIHSIIVFVCIRNVPVPVVPQTERFLFQRVCTRGYHMFRCIARYGYKDKNQESQSTFERLLIEGLEKFIQREAVELSLQSGDDIDSDEEPPTPSRTIVAPNGSLYSLDVPLLADFVPSAEVIPEASCSTPQHDPVVDYTQNLELELAFIRQAKQSGAVYLIDNPIVKARKNSWFFKKLIINYFFAFLRNNCRRAMMSMSIPHTNVMQVRLTSYV

SEQ ID NO: 149364 - protein, 97 aa, Oryza sativa
  unsure (1)..(97): unsure at all Xaa locations
  Clone ID: PAT_MRT4530_49704C.1.pep
LNSGEGQPSLFSHVTLQTYPSPNCPLWIIGNFKFTGXISPELGRFVNLHYLKRAGTNLTGDIQNKSEQRRNFITLDLNANKLTGTIPKALSKKGSLR

SEQ ID NO: 149365 - protein, 86 aa, Oryza sativa
  unsure (1)..(86): unsure at all Xaa locations
  Clone ID: PAT_MRT4530_49705C.1.pep
RXCXXRLGSXSQXXSXFFXPHXSPXAVTFPATALIPXCXRARTXTALPXPSPSCCTTWRPDADQRRXPTRPWFNXSPTXDPXGLTL

SEQ ID NO: 149366 - protein, 213 aa, Oryza sativa
  Clone ID: PAT_MRT4530_49706C.1.pep
MAGAMTMSRRRLSHALLLVLAILPNLAALAVAAGGGSGGGGFFPHRSLLQSSSCQPSGAITGTSGDCNADNGSECCQDGVQYMTYACSPPVAAGGTGTAALLTLNSFADGGDGGGAPSCTGRFYDDGQLVVALSTGWFDGRSRCEKDVVIRASGGASVTAMVVDECDSQRGCDSDHNFEPPCRNNIVDGSPAVWDALGLNKDDGEAQITWSDA

SEQ ID NO: 149367 - protein, 348 aa, Oryza sativa
  Clone ID: PAT_MRT4530_49707C.1.pep
MADKLQHTADTMPNDLTIDLLTRITDNFSTKHQIGHGGFGTVYKGVLENGEEIAVKKLDIISLDDVKFMNEFTNLMSVRHKNIVRLVGYCCETRRKLVPHNGKLVLAYMEERVLCFEYLQRGSLDNYLSDESSGFDWCTRYNIIKGTCEGVNYLHNGPQGHIFHLDLKPGNILLDKNNVPKIADFGLSRLFEKTLSHHTTKVVIGTPGYMPPEYIEKKHITEMFDVFSLGVIIIEIMEGPKARSKLLEMPSQEFIELVHENWSRRFQQTTPTYTSEEIGSLQRQVKTCLEMALQCVEADRHKRPTIAEVVSRLNELDAMFQRTSPSLLPSELPIDPASPGDQKVYMRD

SEQ ID NO: 149368 - protein, 184 aa, Oryza sativa
  Clone ID: PAT_MRT4530_49708C.1.pep
MQLEISPRQRSQQQKEEEGEHQQRAGEEAVGAVFSIEPWVDAAAVLVPPLNFAEVNDGIFRSGFPAADNFAFLLSLKLRSIVYLCPEPYPEENTRFLEQNGIKLHQFGIDGSKELLVNIPEEKIREALKVILDVRNQPVLIHCKRGKECAYVQQQKIFFWCKNYLLTGWIALNTRYPSLLCPDF

SEQ ID NO: 149369 - protein, 87 aa, Oryza sativa
  Clone ID: PAT_MRT4530_49709C.1.pep
FYAPGQMVGGLIVPASPGGEPPAVTTLRGESPGPSPLNFNPNTAQGFPMGPKLRLSSHGVETLFWPTCKGSPPRLAFGGGFLLVRPQ

SEQ ID NO: 149370 - protein, 145 aa, Oryza sativa
  Clone ID: PAT_MRT4530_4970C.1.pep
MSPPWSPLGWEARVTTRRTSKMEAVDKEVAVHYQYTRTVYSSSLIIECLVVLFASGSFDEIAIVAGGCDKNGQVLKSAELYNSETGHWETLADMNLARRLSSSFFLDGFYRCKVAYDIALNRPVVCKLLFFRWARPKADKIYNWA

SEQ ID NO: 149371 - protein, 41 aa, Oryza sativa
  Clone ID: PAT_MRT4530_49710C.1.pep
VKSRICPLDLRSYPSYEVEMYIPGKAGLLESVSGKFSLDRH

SEQ ID NO: 149372 - protein, 865 aa, Oryza sativa
  Clone ID: PAT_MRT4530_49711C.1.pep
MAVTQALADALRSCGSRGALAGARALHGRLVTVGLASAVFLQNTLLHAYLSCGALSDARRLLRADIKEPNVITHNIMMNGYAKQGSLSDAEELFDRMPRRDVASWNTLMSGYFQARRFLDGLETFVSMHRSGDSLPNAFTFCCVMKSCGALGCRELAPQLLGLFWKFDFWGDPDVETALVDMFVRCGYVDFASRLFSQIERPTIFCRNSMLAGYAKLYGIDHAIEYFEDMAERDVVSWNMMIAALSQSGRVREALGLVVEMHRKGVRLDSTTYTSSLTACARLFSLGWGKQLHAKVIRSLPQIDPYVASALIELYAKCGSFKEAKRVFNSLQDRNSVSWTVLIGGSLQYECFSKSVELFNQMRAELMAIDQFALATLISGCFNRMDLCLGRQLHSLCLKSGHNRAIVVSNSLISLYAKCGDLQNAEFVFSSMSERDIVSWTSMITAYSQIGNIIKAREFFDGMATRNAITWNAMLGAYIQHGAEEDGLKMYSAMLSQKDVTPDWVTYVTLFRGCADIGANKLGDQIIGHTVKAGLILNVSVANAAITMYSKCGRISEAQKLFDLLNGKDVVSWNAMITGYSQHGMGKQAAKTFDDMLSKGAKPDYISYVAVLSGCSHSGLVQEGKLYFDMMTRVHGISPGLEHFSCMVDLLGRAGHLTEAKDLIDKMPMKPTAEVWGALLSACKIHGNDELAELAAKHVFELDSPDSGSYMLLAKIYSDAGKSDDSAQVRKLMRDKGIKKNPGYSWMEVENKVHVFKADDVSHPQVIAIRNKMDELMEKIAHLGYVRTESPRSEIHHSEKLAVAFGIMSLPAWMPIHIMKNLRICGDCHTVIKLISSVTDREFVIRDGVRFHHFKSGSCSCGDYW

SEQ ID NO: 149373 - protein, 67 aa, Oryza sativa
  Clone ID: PAT_MRT4530_49712C.1.pep
MPDAASLPTITPCTAGSVKRRAPPKQLGDHREQRLHAPGASRATPTAIAMEAGDGIGGGVSTASRTM

SEQ ID NO: 149374 - protein, 99 aa, Oryza sativa
  unsure (1)..(99): unsure at all Xaa locations
  Clone ID: PAT_MRT4530_49713C.1.pep
MGILDHMSHVCSITETKEALKLRKKRPLQTVNIKVKMDCEGCERRVKSAVKSMRGVTSVTVNAKQSKCTVTGDGEPAXVLERVKATGKNAEMWPYGPYT

SEQ ID NO: 149375 - protein, 240 aa, Oryza sativa
  Clone ID: PAT_MRT4530_49714C.1.pep
MLVYEFIPNGTLFELIHGKYSRITSISLDARLRIAQESAEAPAYLHSSASPPIVHGDVKSPNILLGDKYIAKVTDFGASRMLPKDEIQFMKMNILGVGTELFQDVAQLAKCCLSTTGGERTLTTEVAERLKAIRSTWREQLIESANGETVQYVRTKICHGMICPLFVLPDGLSYFHHGRSSEKDIVGTSILEVDDFSDAEEDWKDAGRSRWRVGLLETMKSSWKTTTFCLFVTCSLLKLG

SEQ ID NO: 149376 - protein, 144 aa, Oryza sativa
  unsure (1)..(144): unsure at all Xaa locations
  Clone ID: PAT_MRT4530_49715C.1.pep
GDTRGPLQEKKKGPPKGPVQKKNGAFLGIKKGQVVPKGEVPPFPXSAQKGKSPKRGPFFRNFSRGGGGFPPKKKGILRLLKIGKDKXALKVEKKKLGPPKRAKKKKKKMAGVLKKKRFGGGPPPPQKKKKRISKFIKARAKLFC

SEQ ID NO: 149377 - protein, 437 aa, Oryza sativa
  Clone ID: PAT_MRT4530_49716C.1.pep
MSHRRRRNAAGPPPPEGIGGSSTAEASSTGEERPDLPWAWALGSERRVLALALAFRAANALLVRTYFNPDEHWQCLEVAHRIVFGYGHLTWEWKRGLRSYLHPFIFAALYKILSLLHLDSPWFMLFSQLVNWFMFFCITRTLSNSMETVLTVTGLYYWFVAIESVKGNSVVSKQQAASKQSPPSRKMALLIAALACAIRPTSAITWLYVGLLDFIQMKSKSRFIFLEVVPLGVFVLAVTTFLDCWMYGSRIIVPLNFLKFNLFSSGGDYYGTHVFHWYFSQGHNLAAMAQLKGKGHNEKGRLSRLKLSVILLILTNVPMALYMSLYHQRGTEDAMLYLSREAHDGRVKSVLFLMPCHSTPYYSTLHYNLPMRFLDCTPSENKGTLDESDRFLMNPADFVGEVFGNLSSFSHIVLFESEERHVKLLLRNSFQEVYAFI

SEQ ID NO: 149378 - protein, 526 aa, Oryza sativa
  unsure (1)..(526): unsure at all Xaa locations
  Clone ID: PAT_MRT4530_49717C.1.pep
MSHRRRSNATGPPPPEGVGDSSTAQASSTEKERPDPPSVLGSERRVLALALAFRAANALLVRTYFNPDEHWQCLEVAHRIVFGYDHLTWEWKRGLRSYLHPLVFAALYKILALLHLDTPWFMLFSQLVNWFMLFCITCTLSNSMETVLTITGLYYWFVAIESSKGTLVVPRQKPASKQSPPSRKMALLIAALACAIRPTSAITWLYVGLLDFIQTKSKSRFLFLEVIPLGVFVLAVTTFLDCWMYGSQVIVPPLNFLKFNLFSSGGDYYGTHVFHWYFSQGFPSMIWTFLPFSISGIMKSREWRLAGLIVWVLAVYSILGHKEFRFVLPVLPLMFMFSGYNLAAMAQFKGKGRSEKGHLSRFQLSVILLILTNVPMALYMSLYHQRGTEDVMFYLSREAQDGRVKSVLFLMPCHSTPYYSTLHYNLPMRFLDCTPRXNKGTLDESDRFLMNPADFVGEVFGNLSSFSHIVLFESEERHVKLLLRTSVRQVRRFFHSHFKVDRDLQVVSCCLFKEECIVITVAEKAR

SEQ ID NO: 149379 - protein, 737 aa, Oryza sativa
  Clone ID: PAT_MRT4530_49718C.1.pep
MTGVVPWMCLAAPLPPATLSSCAASRMAKPRCRGTCGNLTIPYPFGIGAGCFYTDGFDVSCEENRTYMHNSSSNMEIYSLNLIGGQAQVSTFIADKCSNNTDGTSTDGWVSTSTAPFFTLSSRANKLTVVGCNTLAFLGGYNEEEQNVGAGCFSMCPDKQSVDSSGQCSGMGCCQTSIAPNLTSLNVTFDSRFNNSEVNSFNPCSYAFVAEQDWFRFEPDYLEGHKFTDKYKGVPTVLDWVAGRESCAQAPKNRTSYACVSTNSSCINSPNATGYLCACNNGFAGNPYLEGGCQDINECESPGQYCHGICDNTIGGYHCYCGPGTQSTDPKREPCNPITASERARLTKTFIGISVCAIILLSCTFALLIECQKRKLMKEKERFFQQNGGMLLYEQIRSKQVDTVRIFTKEELENATDNFDSSKELGRGGHGTVYKGILKDNRIVAIKRSKIMNMVQKDEFVQEMIILSQINHRNVVRLLGCCLEVEVPMLVYEFIPNGTLFEHIHGKYRTTSISLDARLRIAQESAEALAYLHSSASPPIVHGDVKSPNILLGDNYITKVTDFGASRMLPKDEIQFMTMVQGTLGYLDPEYLQERQLTQKSDVYSFGVVLLELITGKTAIYSENTEEKKSLASSFLLALKENRLESILDRNILGVGTELFQDVAQLAKCCLSTKGEERPLMTEVAERLKAIRSTWREQLIEGANEETVCLLENSSQYDPSTTGRHGSLMALDIETGR

SEQ ID NO: 149380 - protein, 48 aa, Oryza sativa
  Clone ID: PAT_MRT4530_49719C.1.pep
VLAKSMICRTGDYGLVNNPIGFFCHPPDCPFPLRAGCLFWRKCAVHLT

SEQ ID NO: 149381 - protein, 508 aa, Oryza sativa
  unsure (1)..(508): unsure at all Xaa locations
  Clone ID: PAT_MRT4530_4971C.1.pep
MSWHKAGVLLLGGSILPACPGGSGRRWGWMFNREKEKNVRGYASSNSSFQLNPPLASRELTRAHPWSIPSMLLGSQLPLVGSQDQNQYVFDQAFATQVNELPMPEEHVPFCHDCREQGHYALNCPWVYAKEAPSFGLAGQTSLNPPPRTKSSLQPSVQGREPNGENPLNPENCFPPSLSYHVGSRTKQAKGKKSKSQKRKAPMRTKEEVRKMTITSAEWPPAGITIPRRQRGNTFRGARRLTQHLLSHGGRVSDQVSSDDEDESPRHLGEEEMESKACTRCGEIGHVASMCLTLCLHCEEDHPPDRCPTSRITCFFCEGTDHVPKDCQSSFLLTKKMANQPASSNGEKHQGNTNPRQDYSFSLTPVPGQRNQNEKRKCRVREDICCFNCQGMGHFADKCPKPRNIAASTSVHATPCNQKLAPQRIVIHASRSSPIARVATAPTPASALPQGVNAQFQPQPSVDKTEAXSALYLWMFQHSSQRNQVQDEEPEQKHEIMNELDKLMKDPC

SEQ ID NO: 149382 - protein, 121 aa, Oryza sativa
  Clone ID: PAT_MRT4530_49720C.1.pep
HASAFLHAKASTKDEYDTPILAEALPREVADPFDYGGGNINPIGAADPGLIYDIDPKDYNKFFACQIKKYEICNITTLPAYHLNLPSISIPDLRHPINVRRAVTNVGEVDAVYQSSIESPL

SEQ ID NO: 149383 - protein, 132 aa, Oryza sativa
  Clone ID: PAT_MRT4530_49721C.1.pep
MNSVPDLNPVVWPGEVHTVPKGWQIPTNGKKLRIGVRTNAYPEFMKVESNPVTNEITASGYAIDVFEEALKRLPYAIPYEYVSFDNGQGINSGSYNDFVYQVYLGVRNFYSQFIKFMPQKSVCSLEILIKQI

SEQ ID NO: 149384 - protein, 39 aa, Oryza sativa
  Clone ID: PAT_MRT4530_49722C.1.pep
SNQRKSRQSCRRRSDRLHATDLTAALSPVEPPPCRECDR

SEQ ID NO: 149385 - protein, 356 aa, Oryza sativa
  Clone ID: PAT_MRT4530_49723C.1.pep
MDAATGTPADQSPNAPLPVRARCSTECVLASEAPWLDDARGRPWADLPADILGLVVGCLPLVEDRARLRSVCRAWRVLHQRSPPPLPLLVMADFSFSSFCAGETIMGVRGRVPLPEREREMAAGGSVCCVGSFEGWLVGVKANKGRYFGDRRRFLMNSFSRDVIRLPLPSGASRSADAYTRSLPIINGSGVLHCTINAAKCVMLFWKVVLSSSPDSGSKCVVAATSMVKDAVKLALWRPGMKSWSVCDDDNGLMVSRVESCVIKLPGVMGTANETWSIVEWRGKLLIVVTYFGEFGHNIIEIRVYEVDCSTNPATFTEIKSLDGDCNFISQLSSKFLDFYDNIPLVDDVMDMKNVP

SEQ ID NO: 149386 - protein, 75 aa, Oryza sativa
  Clone ID: PAT_MRT4530_49724C.1.pep
RRRTPPLTRRRRLGSACRGGARLFFPGSSGLRLARSRGGRVGLPWPRPVCLLFLSPELCLFLCTCLFKLVRAGFF

SEQ ID NO: 149387 - protein, 170 aa, Oryza sativa
  Clone ID: PAT_MRT4530_49725C.1.pep
MTKSHSNSCHFSDSISRRIVMQQRCEAESDQTKSQPHKTKAQKYSEFPTHKYKVISISCRPATGRRGRRVRHVRLGSVLRLRVRLFGVVGLLLRCLEELNCCPRRWSPATAAAAATTVMRAQRLSQDCRRRRLAAPAEAGGESSFQAEAIADCLEFIKRSYLQPTTASAC

SEQ ID NO: 149388 - protein, 80 aa, Oryza sativa
  unsure (1)..(80): unsure at all Xaa locations
  Clone ID: PAT_MRT4530_49726C.1.pep
MSSGGKQDGAAAAGEEERKTSWPEVVGLPVEEAKKVILKDMPDADIVVLPAGSXRPVTKDFRPNRVRIFVDTVAGTPTIG

SEQ ID NO: 149389 - protein, 285 aa, Oryza sativa
  Clone ID: PAT_MRT4530_49727C.1.pep
MASSGDHAPQLSTAVAVPGAGAPVRVVAAPGLTEADFTSAVESSLFRQWLKNLQEEKGVLTYGRLNLRQILIQGVDMFGKRVGFVKFKADIIDEETKAKIPGIVFARGPAVAVLILLESKGQTYAVLTEQVRVPVGKFILELPAGMLDDEKGDFVGTAVREVEEETGIKLNLEDMIDLTALLNPDTGCRMLPSPGGCDEEIGLFLYRGHADEDTLRALQGKETGLRDHGELIKLRVVPYSQLWRATADAKALSAIALYEMAKREGLLPSSPTTSRRRGSSSSANL

SEQ ID NO: 149390 - protein, 125 aa, Oryza sativa
  Clone ID: PAT_MRT4530_49728C.1.pep
NERKKREQIRRETNATILEGSSHRDGSIYKFCPGFIQVFQIADRHETCLEPMMLSQPMDCQPNRDTCTVHFSTRMMQIFSIKLAKIHMYSGPVQIYGYIAVRDHLDSMLNYVVNRSRDDPIIVKQ

SEQ ID NO: 149391 - protein, 178 aa, Oryza sativa
  Clone ID: PAT_MRT4530_49729C.1.pep
DTQTLTELFIIIKDRFDRPYSKAGRQAGRLVVVELEAHPVVDLVVGEGDVVLVDVVPLLDADLLGARPRLRRHQLLQVADGVVLVALDAHLLPQPVVEHHLDHLRSLLLLLPLPLLLLRPSKATRESRGDDDEDDPTRPPTRPPTRPPTRPPTRPPTRPATYILSQKFTLIADSSSSV

SEQ ID NO: 149392 - protein, 157 aa, Oryza sativa
  Clone ID: PAT_MRT4530_4972C.1.pep
MQGLSFLANIGGPATPQYLQHPPQEELLERYFHPDHMSSEEKMKLELQRVRDEFKMSENDCGSARVQIAQLTVKIKHLSTVLHKKDKHSRKGLQDMVQRRKKYLKYLRRTDWDSYCLVLSKLGLRDVPEYKAPDYKNKSTSKAKSKKSKSKKRKMKA

SEQ ID NO: 149393 - protein, 46 aa, Oryza sativa
  Clone ID: PAT_MRT4530_49730C.1.pep
WRPLTRRAATTSGSITMSARLWHITDLLLHQLFTYLQNKIYPKLFH

SEQ ID NO: 149394 - protein, 62 aa, Oryza sativa
  Clone ID: PAT_MRT4530_49731C.1.pep
MEGDPNVKRGNKGGVDVRGDETSTDGDNGEPRKTPLVGGNPKKEGEASQPAAPKASTVGTRE

SEQ ID NO: 149395 - protein, 1427 aa, Oryza sativa
  Clone ID: PAT_MRT4530_49732C.1.pep
MTRPGEPANRPDSIQRVLPRTSAIREDESFLSHSAAVVQVPHEDLNVVVFPKGGYLVTCTSRSLRDMMVAASPFAVEDIDLSVLPWSRRVQAELVKWRFSIRVCFEGIPSHARSAETVTAKNGERDSLPLRLAVGGRSRLHPKEVHFELEEPLSPRSPDSRWDLDGEARQRTSPPKLLAYPVLVHLDQVLNFNPPPTEPTWMYSPGSQASGIISPVLMTEEIPKRHDFIWSLSVKDGTLAPQPPASPSPGPGRDRSRSRSRSPPARERRRPLGWDVPPARSSAFPRRSSSRSSKNIGGSYGGGHRRAACSPVSRAAQSQPSQLPLMISPDKLADFLSQAFAVVQPPLLKTPTRQVSKGKLLKKSPTRLSQAGRKSARLAKKAAARSSPAKQGDLAHELLMKKAGLLPEDGKKTEDAMAKYVKLFKQPLSQEVMDAFSALVAGCAIGTRGGILLAVSDSKYSIESVQTGVYSIMANLKEKEDGSAWSITGVYGPQPYNEKRDFLEELKQTKNTVNQKWMILGDFNLIVQDSDKNNSNLNRGMMQSFRAALNTLEVIEIKLNGRRYTWSSETEIPTLTKIDRVFCSHEWEERFPNCLLSAISTMVSDHCPLLLTANPSGPKCNLLRIHIKLARTAKALRNWSRCRVRSLKLRMEIASELILRLDLAQEERNLSAQEILFRRSLKQKLLGLAALDRVRLRQRSRQVWIKASDANTRFFQIKASARRRKNFIQHLLTDSGMVHSHEEKGQELFNVYKQHSAVINPSLQEHNLDLADLEAPFSVEEIKSAIFQSRSDNSPGLDGFTENALRVSEFRLISLIHAFGKLFSKLLANKLAPKLQQLVSHNQSAFIKGRNIQDNFLFVNNLVKELHSSKTPAILLKLDIAKAFDSVSWPYLLDRLRTLGFGSRWLGWICSILGSSSSKVLLNGRAGSSFMHGKGLRQGDPLSPILFILAIDPLQNLLVAAQDEGLLQPLHRRTARFNMALYANDAVIFTRLVKDEIQAVQAILLHFGRATGMITNLTKSEVYAIRCKDLDLQDILSPFPAQLKEFPCSYLGLPLHIRKLRRLDVQPLIDRFAARLPTWKGKLLNKTGRAVLIKSTLSALPTYHLTVFPLKKWVEKKIDKIRRAFLWTGSEQANGAQDKLWQGSNLPCDETDKQLFRASTIISLGNGNKAKFWHERWLEGKAPKDIAPSLFQIASRKNRTVAQELGDNRWLRQMRRMNSTVQVREFIILWHSLQQIHLQDGIEDSISWRWTPNGCYSASSAYRIQFLGSIQDNRSTFVWKAKTENKCKFFGWLMIHRKILTADKLQLRGWDNSEICPLCGIEPETANHLLMDCAFARQVWSSMWNKLGLHMPSPSLFPGRLLDWWEACRKELVKEQRRNFDGLFIYTAWGIWLQRNGRIFNDIYNSVAQVVNFIIALCKEFDEALSS

SEQ ID NO: 149396 - protein, 1239 aa, Oryza sativa
  unsure (1)..(1239): unsure at all Xaa locations
  Clone ID: PAT_MRT4530_49733C.1.pep
MSRPGDPANRPDSIQRVLPRTSAIREDESFLSRTAAVVQVTGNLPVTNMRQINRLLASRFQVPREDLNVVVFSKGGYLVTCTSRSLRDMMVAASPFAVEDIDLSVLPWSRRVQAELVKWCFSIRVCFEGIPSHAWSAETVTGLLDEGCLIQDLDEPRTENETACLCAWLWADDPDSIPKEVHFELEEPLSPRSPDSRWDLDGEARQRTSPPKLLAYPVLVHLDQVLDFNPPPTEPTWMNSLGSQASGIISPVSMTEEIPKHHDFIWSLGVKDGTLPPQPPAFPSPGPGRDRSRSRSRSPPARERRRPLGWDVPPARSSAFPRRSSSRSSENRVMKDGGFQLSRPPSTSPQDPITQATPLQANQFVMEADPMLEELVADQASQSAVLAFAAVQPPLLKTPTRQVSKGKLLKKIPTRLSQAGRKSARLAKKAAARSSPAKQGDLAHELLMKKAGLLPEDGKKTEDAMAKYVKLFKQPLSQEVIDAFSALVAGCAIGTRGGILLAVSDSKYSIESVQTGVYSITANLKEKEDVLAWSITGVYGPQPDNEKREFLEELKQTKNTVNQKWMILDDFNLIVQDSDKNNSNLNRGMMQFEKYWIRLPGFLETVQSAWSKPVHSPDALKRILIKLARTVKALRNWSRCRVRSLKLRMEIATELIFRLDLAQEERNLSAQEILFRRSLKQKLLGLAALDREHNLDLADLEAPFSVEEIKSAIFQSRSDNSPGPDGFTGXFFKKCWDIIQEDITQAXLLNSAYIALLPKKENALRVSEFRPISLIHAFGKLFSKLLANRLAPKLQQLVSHNQSAFIKGRNIQDNFLFVNNLVKELHSSKTPAILLKLDIAKAFDSGDPLSPMLFILAIDPLQNLLAAAQDEGLLQPLHRRTARFNMALYADDAVIFTKPIKDEIQAVQAILLHFGRTTGMITNLTKSEVYAIRCEDLDLQDILSPFPAQLKEFACSYLGLPLHIRKLRRLDVQPLIDRFAARLPTWKGKLLNKTGRAVLIKSTLSALPTYHLTVFPLKKWAEKKMDKIRRAFLWTGSEQANGGHCLVNWKRVCRPKDLGGLGITNLELFGRALRLRWLWYDWTAQDKPWQGSNLPCDETDKQLFRASTVISLGNGNKVKFWHDRWLEGKAPKDIATSLFQIASRKNRTVAQELGDNRWLRQMQRMKSTVQVREFIILWHSLQQIHLQDGIEDSISWRWTPNGCYSASSAYRIQFLRSIQDNRSTFVWKAKMENKCKFFG

SEQ ID NO: 149397 - protein, 112 aa, Oryza sativa
  Clone ID: PAT_MRT4530_49734C.1.pep
MDPAMSSPNPATSSLDLAAADLASSDTTTTVAVCTARVHGTTVPTTMGARLRRGGLDHMIGWNVVHGLISPQTYKFHTQAKAPFSAKQAETYRQKHLSPHRSTRPERRQLKP

SEQ ID NO: 149398 - protein, 84 aa, Oryza sativa
  Clone ID: PAT_MRT4530_49735C.1.pep
MGGGNDDTVFFTHLGGADEVNATASVTAVVLERKAPLLPSHRRYPSCSLAIRLGGVAGPHHVGRARGGGDMTSTTCRFPHPNKN

SEQ ID NO: 149399 - protein, 47 aa, Oryza sativa
  Clone ID: PAT_MRT4530_49736C.1.pep
MVTVCNSLMMFCNHCNHELSRGFIYMFSVVECVYYHLKKHLWAFLQI

SEQ ID NO: 149400 - protein, 1421 aa, Oryza sativa
  Clone ID: PAT_MRT4530_49737C.1.pep
MEELVEDNGWPLPAAIARVVGKLRLHLGGSSDAHKYRGTMKMLDLLEDKLSILRGESLQGVDADREEEAAAWLRQVKEAADEAEELVNAMEASAAAAASDSSSLLLGVKYTVGKLVSACSEVESLLPVPGLDEDGLETPGDDVAALPPGPDQPFVVGRDEEIGVILEMILDDARFVADESVEERASADGSQISRKGWIIDALRSIDLSDQRNQPAESAAAYQKEMGSRVKYTRVQSSTVSSMCNPTVIPIVGVGGVGKTALAQFIFDDERVREHFRGNSAWVYFTDNIRKEEPMAQIFVSMQPEHNMLDHAFSLNSLRVQLQSVIEGKRFLLVLDDVSDEIRAMWGDLRSALKKGAPGSVVLVTTNLYSVASFVGTTTPVFLDYLHYDDLWKLFKHHAFASYQSTEALEPIGRKIVDKVHGSPLAAKFIGASLRNCLDEAYWKRVLESWWWNVSSCSFDIHIISSFGICHSELPAYLRQCLVFCSIFPRNYLFEKYELIQMWIANGFVELDNTTVARKLEDVAGEWFDELVNKCFLQPTVWKAWYIMHSWVRDFAIALSSNEYQGVDCTMGNLPRSVRHLSVDMDAMNIPWTEYSIKQLRSLILFGGFRHNNSSKGFNNIYNILEGSYDAADSISERSYNTTDKDTADNISEWSSFSFDDGEVDIVAIILKRYCDIIGSILNRSTSLRLLSLSNLRANSATACIGDYPLEEDGIAQFVEFTTTHQMLPYLTHLRYLDFSHSGITKLPDSLCSLCNLQVLGLRGCRFTQLPRRMNSLVGLRHLHADADTVALIHGIGQLTRLQDLYEYRVKAEDGHTLIELKDMRYIQGSLCISDLQRVANREEAIQANLGRKEYVTCLALKWDRNQSSRGKYNLYGKELSQFDRGQKQPLQASLVEKNYTSDISGYLMNPPEVIKPDQDMEILECLSPPRNLQTIKFFGYTGLAFPDWVVQLRYIKVIEISHCTELQVLPPFGQLEHLRKLILHELPSMKDVSSDVYGTSNVAFKSLEILCFESMGKLENWADSQNEESFSNLQNLQINRCDNLRELPLMSLGLAIRKLSLTGCGSYAETVFRYLQKLTSLTHLSINDCSQKLILPCQNLISLENLHLSNCKELYFEGGILRLNNLKNLHISGCRKIISTVEEEINRLFSNWEIRLGKDQSLVLKSGLLNIAKELGTKRRELPLPGSPQKEEFMHTLQYLTDLTMDNLSQSSDLDNFLCKLSALRTLCLHKIDVISLHQEKWLEQITSLQELEFSCCYLLRQLPSNLVTLSSLKKLNMQSCFQIHSLPLKGLPGNLRELQILGCSPILEARCQKEDGETWVKKKRGEWHKETINEYRQKKTCEFWEGWLKYEEEWVESATDHLNDKGEWLENEEEDWLKNNSDELENNEDVWLKSRGEDWPKIAHIPYIRVNGDIIQNFYL

SEQ ID NO: 149401 - protein, 854 aa, Oryza sativa
  unsure (1)..(854): unsure at all Xaa locations
  Clone ID: PAT_MRT4530_49738C.1.pep
MAAKLARLHSLRERLGATFSSHPNELIALFSRYVNQGKGMLQRHQLLAEFDALIEADKEKYAPFEDILRAAQEAIVLPPWVALAIRPRPGVWDYIRVNVSELAVEELSVSEYLAFKEQLVDGHTNSNFVLELDFEPFNASFPRPSMSKSIGNGVQFLNRHLSSKLFQDKESLYPLLNFLKAHNHKGTTMMLNDRIQSLRGLQSSLRKAEEYLMGIPQDTPYSEFNHRFQELGLEKGWGDCAKRVLDTIHLLLDLLEAPDPANLEKFLGTIPMMFNVVILSPHGYFAQSNVLGYPDTGGQVVYILDQVRALENEMLLRIKQQGLDITPKILIVTRLLPDAVGTTCGQRVEKVIGTEHTDILRVPFRSENGILRKWISRFDVWPFLETYTEDVANEIMREMQAKPDLIIGNYSDGNLVATLLAHKLGVTQCTIAHALEKTKYPNSDIYLDKFDSQYHFSCQFTADLIAMNHTDFIITSTFQEIAGSKDTVGQYESHIAFTLPGLYRVVHGIDVFDPKFNIVSPGADMSVYFPYTEADKRLTAFHPEIEELLYSEVENDEHKFVLKDKNKPIIFSMARLDRVKNMTGLVEMYGKNAHLRDLANLVIVCGDHGNQSKDREEQAEFKKMYGLIDQYKLKGHIRWISAQMNRVRNGELYRYICDTKGVFVQPAFYEAFGLTVIEAMTCGLPTIATCHGGPAEIIVDGVSGLHIDPYHSDKAADILVNFFEKCKQDSTYWDNISXGRSATRIYEKYTWKLYSERLMTLXTGVYGFWKYVSTPLRGAEDSPVTLEMFYALKYRQPGQRPSHLAVDGESTSTVMEGKICIFTPRRSRQLHSNLIIFCSCHFGIHCLPLDVYYV

SEQ ID NO: 149402 - protein, 87 aa, Oryza sativa
  Clone ID: PAT_MRT4530_49739C.1.pep
TALHQLSHIKTAPPPPPPPPPPPPPLPKECLPTPSPPQSPDCPSFPAPPPPPPFGEHHSLSHLEWKRCPHHPPERPHYLPGEVGGAP

SEQ ID NO: 149403 - protein, 299 aa, Oryza sativa
  unsure (1)..(299): unsure at all Xaa locations
  Clone ID: PAT_MRT4530_4973C.1.pep
MVQQCEACQFHSKHTKLPAQALQTIPFTWPLSCWGLDILRPFPRGQGGYRFLFVAIDKFTKWIEATPTGEIKADNAIKFIKGIFCKFGLPHRXYCIRLGVKICFASVSHPQSNXTSREGNGIILQGIKTRVYDRLMSHDKNWVEELPSVLWAVRTTPTTSNKETPFFLVYGSEAMLPTELRHQSTRVQKYSDEDQEEQRYDDVNLLEEHRERVAVRAASYQQALRRYHEKRIRARMLSIGDYVLRRVQSQAGRNKLSPKWEGPYTITQVLRPGAFKIADGDGRELANSWNIDQLRKFYV

SEQ ID NO: 149404 - protein, 220 aa, Oryza sativa
  unsure (1)..(220): unsure at all Xaa locations
  Clone ID: PAT_MRT4530_49740C.1.pep
SPGLQVGVYQAGGEEVSRLVEAIATTSPATASIGMTQTLAALNNDIIARAVFGGRCQQQXLRYLRVLKVVATLAGSFNMVDLFPSSRLVRWLSCVERRLREHHAQTVRIVDSIIQDRKENEASASPGASAEDDDNDDLLDVLLRLQREDNLTFPITAEIIGALISDIFGAATDTTGSTLEWAMAELMRNPMTMEKAKQEVQNALGQGRAMVTGADIGDLH

SEQ ID NO: 149405 - protein, 285 aa, Oryza sativa
  Clone ID: PAT_MRT4530_49741C.1.pep
MVSLGNLRDLHGDIVERATLARDLLVPITSQLISEGGDMHSLHRRCVLAQGLDFIFQKLDDLQADMVAFGAIEAITLCVILDNTVIVFRDEDSVAIAVHRQEEAKHGLYFAVPPLHLALPICFIKPEIIEVALYPSPPSSEGTIGPTYDAEASAARAMVELNIGLCTISMPLWMRPRHVIVSNENLNLLSPPTTTTTRHGDGGQGPSPKTIIDTEFVLSTKSTLYGPRLGTDGHLWMDGGTITRYTGYTEIDGASVRVVQLSPPNYWMAISEPMKMVANTNSDPI

SEQ ID NO: 149406 - protein, 56 aa, Oryza sativa
  Clone ID: PAT_MRT4530_49742C.1.pep
IEYIILFICSLYKPVCLWFCESNAIYMTFVFVLLILQFHSNIFLLSMPSCHGVFTC

SEQ ID NO: 149407 - protein, 90 aa, Oryza sativa
  unsure (1)..(90): unsure at all Xaa locations
  Clone ID: PAT_MRT4530_49743C.1.pep
XKNPHXTXIQVXSTLPVAXRSLXXRTGPVGLDLDVDRLHQGGDLLKRXWGCHRRGGXGXXACRRPRWTTWRRARADLRTQQTKKAAAAEA

SEQ ID NO: 149408 - protein, 92 aa, Oryza sativa
  unsure (1)..(92): unsure at all Xaa locations
  Clone ID: PAT_MRT4530_49744C.1.pep
MMVVTVGMVGNTLQPSLGLHLNRPAKTWIQRRRGRLGXRPNQPTFRLAASSVATLCRLVNFGTQFXRVNSEFLAYSCISLILDIVRLIYRLS

SEQ ID NO: 149409 - protein, 441 aa, Oryza sativa
  Clone ID: PAT_MRT4530_49745C.1.pep
MAVAVAAAAAVSRQWTRVRTLGRGASGAEVFLAADDASGELFAVKSVGAAGAAALRREQGVMAGLSSPHVVPCIGGRVGRDGSYQMFLEFAPGGSLADVAARCGGRMEECAVGEYAVDVARGLAYLHGMGLVHGDVKARNVVIGGDGRAKLADFGCARWADSGRPIGGTPAFMAPEVARGEEQSPAADVWALGCTVIEMATGRAPWSDMDDVLAAVHRIGYTEAVPEVPGWLSADAKDFLARCLQRRPIDRSTAAQLLEHPFVASAAGDGKPEAAKSKWVSPKSTLDAALWESDTDEEEDDELSQSTAERIGSLACAASSLPDWDSDDGWIDVISTPTEESCETTTSPADEETTTDLNGDIRTAEFELPHIDVDSGNGNTTHNVGEANAQHIISPSNLVFDQVLCKTPFCNKHIAIEFIPCFLLTNVFLPLSLLCSYAPHP

SEQ ID NO: 149410 - protein, 41 aa, Oryza sativa
  Clone ID: PAT_MRT4530_49746C.1.pep
MKIAGNQLIPVEEYTMEGVNVVWAQPLVVVPGSPAILEPIG

SEQ ID NO: 149411 - protein, 112 aa, Oryza sativa
  Clone ID: PAT_MRT4530_49747C.1.pep
VKAFLERLWFSMVSLRPGHIDHSTHYAVLKKAEREGCQYIASDTLRFVTTCRENSVSCRRDVVAERIASQGQARTSKTQGESRPSLLDSPNTTDYRWSRNETSGVSIENSIA

SEQ ID NO: 149412 - protein, 139 aa, Oryza sativa
  Clone ID: PAT_MRT4530_49748C.1.pep
NRWLAQLPIGETMPGASAGTVAGGCIRRKSAPGDGIAVMSLTEKTRSKPSGLPARSTPLCRANRRREIQFQYLAMHSYSTSRRVIRFTIWVRRDDVLPFIWLSMLSAMAGGVVLKFSTCLLLQYMYFSHLLQKKIYRLH

SEQ ID NO: 149413 - protein, 156 aa, Oryza sativa
  Clone ID: PAT_MRT4530_49749C.1.pep
MAPTLPSWWLLFLLLLGVGATAAARGSKKLTPPVSTAYEWPERFHAVVVSINLTNHDRGGGRLQLIEIYYDWPHGRDLNIVRDQLSGDPPLYNVEWVNGTSYLFDTAASSCRTFQFPVGILPRSGVTPWTPTSPLAAPSAGYSTAIRGMCSCSKPV

SEQ ID NO: 149414 - protein, 374 aa, Oryza sativa
  unsure (1)..(374): unsure at all Xaa locations
  Clone ID: PAT_MRT4530_4974C.1.pep
LKIGFIASAGREGARTGSTGVGPTRQPLGPRWTGRTRLTPAGAVGPTRQPHPRARAADGRAPPGSRGARPKAALPARPTGGGAPAPRWSPPATNGAAERHPRERREGGSERAVLGSPRDDEGGGDDDRSGGRWRRGSDRRGRRRSDGRRAKRRGGRGXRGRGEAEGGDAETGGGPERRRRRTGARRRRRRESTTARARIRRKERAASGGNGGVRHGEQLYRDGRERGRPGRKETGAAISGSIDXAGELCGIXIRANPRERERGKWGERGRESRGVISPSLWRAGTAGCGGFGGGGGARARAXRRARREVGDDRWAPPVSEGGGRARPSAARARGGGRWAAGERREREGVGPGRPKRGXGGKRTYFRVFLFIKPF

SEQ ID NO: 149415 - protein, 111 aa, Oryza sativa
  unsure (1)..(111): unsure at all Xaa locations
  Clone ID: PAT_MRT4530_49750C.1.pep
NQNRTERTQRXARTKKKRREGNSQAYTGAKDMRVDPITQRAEAEEHGTRGGCGENNAPTPHHRARTNERLLHELPSRASASQTPKRSRTPRATGTGAQILSRRTRGTASST

SEQ ID NO: 149416 - protein, 630 aa, Oryza sativa
  unsure (1)..(630): unsure at all Xaa locations
  Clone ID: PAT_MRT4530_49751C.1.pep
ITGRDIYDVLAAIVPLYVAMFLAYGSVRWWGIFTPDQCSGINRFVAVFAVPLLSFHFISTNDPYSMNYRFLAADSLQKLVILAALAVWHNLLSRYRRNGGAAASLDWTITLFSLSTLPNTLVMGIPLLRAMYGDFSGSLMVQIVVLQSVIWYTLMLFLFEYRGAKALISEQFPPDVGASIASFRVDSDVVSLNGREALQADAEVGRDGRVHVVIRRSASASTTGGGGGAARSGVSRAYGASNAMTPRASNLTGVEIYSLQTSREPTPRASSFNQADFYAMFXRAARWPARWLAPWRSTAAPAAAPRASTSRSPTSSPPARXADPPSYPAPNPGMMPAPRKKELGGSNSNSNKELHMFVWSSSASPVSEANLRNAVNHAASTDFASAPPPAAVPVGGATPKGVSGSVTPAAKNGGGELEIEDGLKSPAAGLAAKFPVSGSPYVAPRKKGGGADVPGLAEAAHPMPPTSVMTRLILIMVWRKLIRNPNTYSSLIGLVWSLVSFRWNIQMPSIIKGSISILSDAGLGMAMFSLGLFMALQPKIISCGKTVATFAMAVRFLTGPAVIAATSIAIGLRGVLLHVAIVQAALPQGIVPFVFAKEYNCHPQILSTAVIFGMLIALPITILYYVLLGI

SEQ ID NO: 149417 - protein, 86 aa, Oryza sativa
  Clone ID: PAT_MRT4530_49752C.1.pep
LQMLMSVFVIIIGCYTAIDCITDIVIFINILYRWAPSSSLLADLTAADWFLRLHSCATSSLLIGITIFTTTNIFATSASVTQLFRS

SEQ ID NO: 149418 - protein, 845 aa, Oryza sativa
  Clone ID: PAT_MRT4530_49753C.1.pep
MAELRLLTFKVEHLLEELRWEAQHNKALVDGHRNRMMRNMYIPLVLPRSMKRKLKMITGQLNALGAEINGFINHVPLVMQNNIVGRVHEKQEIKQKLFCLDRYKHEGLKVLCVVGIEGVGKTALVQLIFDEVNVKEYFSLCIWVNVSRQFDAMRITKRIIEVATCEPLETQMDHKEEKELQSYLQNILHERRFLLVLDDVCDENTNGWEELRTSLASGASGSTVIVTTRELCVARTLEAPASGIIELGPMSDDEIWSIMRQRMLCGLDDKPELIQVGQSLVQKCHGIPLAAVTLGDLLRKKGTSNEWSSVIEAANEWLALAESDMLTTTAGVASVALQMSYEHLQPDTKRCFAFCALFPEAFEVDGDMLIQLWMANDMNLQTLTTYIVGNGDGYGIEEIKSMDLGGRLEIYNLKNVRDKSKAEAANLSLKTRMSNMLLCWGMFRNDEVNAYNAEEVMEALRTPMCVQTLKVWRYPGSILPIWWPGQTLANLVKLTIKDCARCKRLPPVQYFPSLEVLHLEGMDSLTLFCDNVSMDNIEVSYYRFFWRLKSLILCDMPSLEKWQEDEVIEVFTIPVLEEMKLINCPKLVTIPNVPMLRCFIVEGQNKQQLYSLAPSSSKSKGPSCRIYMASNAGKKLIQIDVSSDTVCPWCFVGKKNLEKAMEQNKDKFDFEVRWHPFFLNPNAPKEGIKKSDYYRMKFGPIQFEHATARMTEIFRGLGMEYDMSGLTGNTMDSHRLITLAGHQGYDKQSALVEELFQSYFCHGKFIGDRQVLLDAARKVGIEGAEELLQDSNKGVDEVKEELNKYSSGISGVPHFVINGKFQLSGGQPPNAFTRAFDVAAKDGAQ

SEQ ID NO: 149419 - protein, 156 aa, Oryza sativa
  Clone ID: PAT_MRT4530_49754C.1.pep
MEARARTYGSSGASPGNLGDRYDNYANYSSYLNDEPMPDAASEKEQGNEYFKQKKFAQAIECYSRSIGLSPSAVAFANRAMAYLKLRRFEEAENDCTEALNLDDRYVKAYSRRITARKELGKLKEAMDGTDAEFAVSIDPNNPELKKQYSEIKDYT

SEQ ID NO: 149420 - protein, 442 aa, Oryza sativa
  Clone ID: PAT_MRT4530_49755C.1.pep
MEARARTYGSSGASPGNLGDRYDNYANYSSYLNDEPMPDAASEKEQGNEYFKQKKFAQAIECYSRSIGLSPSAVAFANRAMAYLKLRRQILKNLSWISILEPLFNKFEEAENDCTEALNLDDRYVKAYSRRITARKELGKLKEAMDGILFLATSLSFFSLIVVLMNTDKQVHTDAEFAVSIDPNNPELRKQYSEIKELHMKEVANRSKPTKHTVFKFDKSGDKKDTSHAPSSSQKDSFMEVDPPSRVAVEIREKADGTSKGGSGVIFKDSTVQPSRDAKQKPGPEASIQDLASRAASRYMASTVKSVKTPKTAYDFEVSWRALSNDTAKQTQLLKSIPPSSLPEIFKNALSAAFLIDIVKCTTSIFREDTMLAVSILENLAKVPRFDLIIMCLSSMHKSELRKVWDQIFLAETASADQVEALRQLRAKYIQEGLQDNMFTSN

SEQ ID NO: 149421 - protein, 89 aa, Oryza sativa
  Clone ID: PAT_MRT4530_49756C.1.pep
PRVFFFFFSFFFFFIKLEGLTVLFVLNTSLWEQLDQQHPLFTQRTQEGCKPKKKQAPTVFATQINRASWRTQPVITPRWQDETVHQCYR

SEQ ID NO: 149422 - protein, 107 aa, Oryza sativa
  Clone ID: PAT_MRT4530_49757C.1.pep
MASPILVAFLLLGLYAVVSVDSSRPIEGGVETIWTAAAADQGDGGVARSSLPERSMIAVMPRRQPVRAPPSPKPSMAMTSYMPPCSGGVPGSPAPGVASCSSCSLSA

SEQ ID NO: 149423 - protein, 54 aa, Oryza sativa
  Clone ID: PAT_MRT4530_49758C.1.pep
MLTSSSQSPASEVGTPLATHAPPTYPVGGGMGRGSRVGDNGIEGCVATQQGATG

SEQ ID NO: 149424 - protein, 102 aa, Oryza sativa
  unsure (1)..(102): unsure at all Xaa locations
  Clone ID: PAT_MRT4530_49759C.1.pep
LSFEKEGKMMVNXQRCVHACIYRTHVSTTVALLRSTRXKSLGNTYLLFTFWLGVCVCTIDTDARTQSDREPGAHTEPMSGRPHGXAWQPDGLLVAVTHACAA

SEQ ID NO: 149425 - protein, 299 aa, Oryza sativa
  Clone ID: PAT_MRT4530_4975C.1.pep
MRGGASLRLRWPAALVAVVAAAVTAAAAAGHGDHNFHRDFDAVWGKGNARFRDGGRMVELTLDEQTGARLQSKERFLFGRFDLEIKLVRGESAGTITSFYICSGGARHDEVDFEFLGNVSGEPYLLHTNIFSDGKGEREQQFVLWFDPTADFHTYSILWNPHNIILYIDGTPIRVFKNNEAYGVPFPTRQPVHVFASIWNAEEWATQGGRVKTDWSRAPFVATYRRYNVSNACVWDAAGAGASRCAGGGGGWMRRRMDWWSWMTLNWVRMNYMAYDYCADRKRFPHRFPAECIIPIGRT

SEQ ID NO: 149426 - protein, 274 aa, Oryza sativa
  Clone ID: PAT_MRT4530_49760C.1.pep
MYYPSNIPKRNMPTSTVHKWIRTVGAPIGRATQGRGFDSDHPRPGPKRRTAAMCRGPLLPPPRQHAPEPNPIIHPPIESSTSPTGHSWDGGSNSDKAATEIERSERSLQDGIDQIDLIPSASALTEEECGATLVAATPSRLRIGFGSGAGAGPRHSLTYSSPPSCPSPLAPPPPFASAAPQSASPFAPAAHAVPSLLLLQSSRVAASIHVRRPSVSTVPPRLARRPVALPPPSHQGGGGAKKAARSGGGAATNTRITGGSGCGWGAAIRGTNSS

SEQ ID NO: 149427 - protein, 76 aa, Oryza sativa
  Clone ID: PAT_MRT4530_49761C.1.pep
LRPQAPLGTRADMLRTQLSSATTGSFVEVLQNGCQRLTGLIPWPKTSRFFVLNHIWEALHANFSLGFSKEQRDAGH

SEQ ID NO: 149428 - protein, 174 aa, Oryza sativa
  Clone ID: PAT_MRT4530_49762C.1.pep
MDAYGKAGGVDDHHLHHQHHQYPPQPPPPMDAYGKAVGVDDHHLHHQHHQYPPQAPPPMGYPGAHPYPPPPQPYGYPPPQMYPPPYAQPPPPPPHRHERPSFCQGWHVTLTNVAHPRVRLQQKERGIKPQCETRVEWRSNAGGGRSTERPNHRANGSFACLSPSYPKCKAQNPL

SEQ ID NO: 149429 - protein, 69 aa, Oryza sativa
  Clone ID: PAT_MRT4530_49763C.1.pep
CRQCHYKCCFVGRRAQAFCREDYQSSKRPQIVASCPLERIKSLLDLLMFSCPSILSCQKRLILITPLCV

SEQ ID NO: 149430 - protein, 104 aa, Oryza sativa
  Clone ID: PAT_MRT4530_49764C.1.pep
MASTVLEATRAKHEDMERLERLAVRELQREPANARDRLYQSHRVRHMLDLVISTSGKLVEIIVRTKENAEKKLTLTYEEMEAEREEEEVQADSESDDEDQQIYN

SEQ ID NO: 149431 - protein, 54 aa, Oryza sativa
  Clone ID: PAT_MRT4530_49765C.1.pep
TQTQFFGLRINLDWSKLFLLHARVYGKAKNLWVVPWNRVTRFPCGGLVNQIRVR

SEQ ID NO: 149432 - protein, 507 aa, Oryza sativa
  Clone ID: PAT_MRT4530_49766C.1.pep
MASTVLEATRANHEDMERLERLAVRELQREPANARDRLYQSHRVRHMLDLVISTSGKLVEIYEDKDNARKDEISNHLSSTVQAEIFPKFYDRLKEIRDYHRRNPSARFVSATDDFEELLKEEPAIEFTGEEAFGRYLDLHELYNEFINSKFGTPMEYSAYVGTFSHVEKMAQNLKTSRQYREYLEHILEYLTSFLYHTEPLQDIEKIFAKLESEFEEQWINGEVPGWESKDPEKESAQESVIDLDYYTTVEELVELGPEKLKEALAARGLKSGGTVQQRAERLFLLKHTPLEQLDRKHFAKGSHSSVSNATSNGNNFKDNLKKEIALMEVKMRRLCELLDEIIVRTKENAEKKLTLTYEEMEAEREEEEVQADSESDDEDQQIYNPLKLPMGWDGKPIPYWLYKLHGLGQEFKCEICGNHSYWGRRAYERHFKEWRHQHGMRCLGIPNTKNFNEITSIQEAKELWEKIQQRQGLNKWRPDLEEEYEDQEGNIYNKKTYTDLQRQGLI

SEQ ID NO: 149433 - protein, 306 aa, Oryza sativa
  Clone ID: PAT_MRT4530_49767C.1.pep
MQDHVVVQQRSGDQPAPSCDIAADEIPVNGHKPGRAVTASVYRAKIAGHSRVLTVSWSRDMLSHSFAVSVTGVDGASAECRVDLRPWQFWRRAGSRRVELAGTAPATVRVMWDLRRARFGAGLPEPRSGYYVAVEAAGEVVLVVGDMRKDALRRASPRAAPAACDAVPVARREHVFGKRRFAAKARFHDQGTVHDIAIECGGGGEGGDADMEMTIAIDGEEAVQVKHLQWKFRGNQSVTFSRAKVEIYWDVHDWLFSAGMRPALFIFRPIVLSSASAPAAAMLLDGSPPPPPATGFCLYLYAWKLD

SEQ ID NO: 149434 - protein, 105 aa, Oryza sativa
  unsure (1)..(105): unsure at all Xaa locations
  Clone ID: PAT_MRT4530_49768C.1.pep
NQDPFRIIVNFLRKEMNPTADVIYTPSRRRRELWAPSPSSGGDAIGAPSRSVRGGSRCRTGTWXGGSYLYTPSLRAAPAHYPPSNRQRTTAYAPRSPPPPPPRVR

SEQ ID NO: 149435 - protein, 52 aa, Oryza sativa
  Clone ID: PAT_MRT4530_49769C.1.pep
IILNKNMRVELTEHDHPVVLLVVLHLLDAVLLFKAAQNLPDLGIRSGSIAGT

SEQ ID NO: 149436 - protein, 157 aa, Oryza sativa
  Clone ID: PAT_MRT4530_4976C.1.pep
LKRIYCVSRGEGARGPGPREWGPRGSLMVHGGPGAPGLTPAGAVGPTRQPHPRERAADGRAPRGNHSARPRAAKPAQPAEVGARAPMVGGGAHRHGGAPPERGEGKGEKGRRSPAHLRSTATTKKSSGAQEGGPPARVDGVDGVPAVGERNGGVDEV

SEQ ID NO: 149437 - protein, 232 aa, Oryza sativa
  Clone ID: PAT_MRT4530_49770C.1.pep
MLARVSRLGLHALRRATAPGQNSLASRRHEAEAVTSHVNHLGKTFFCSNTNATSSDRSSESEAKISVTFVDKDGEEKLVKVPIGMSMLEAAHENDIELEGACEGSLACSTCHVIVTDVDYYNKLEDPVDEENDMLDLAFGLTETSRLGCQVIASPELDGMRLALPSATRNFAVDGLAFAPQICPMNIGHNGMTLTIADSTPIVDVLALLYPRVDFNVDLASKGSGIVDDNLI

SEQ ID NO: 149438 - protein, 107 aa, Oryza sativa
  Clone ID: PAT_MRT4530_49771C.1.pep
LCHQEAMAMIATASHVIRKITQYFLKSIIDPLDSPNSHTNHKPHIKNNNNQKNPDVSTTADGFQITTPPPPRSDPAGLLREIQIQRGKKTASLRSTCGGEGSGGDGG

SEQ ID NO: 149439 - protein, 208 aa, Oryza sativa
  unsure (1)..(208): unsure at all Xaa locations
  Clone ID: PAT_MRT4530_49772C.1.pep
PDPGGLGNPAGLSNTTWLGIQVDEQTQYFPDPRKLLPTSKIHSLNGASGGRRAIPAVIVRECGCANQPTSIEVEHVLTIHGSNNHDPKLDQIQEEEERGMKKGSMRIPSFGQSRDEGDVAFATIIFLLFSLFSQALSSSTADAFLPAPTRQXLVLASAIFPNGCRLSPSIDTAILVLASVVFPNGHRLSPSTDATILVLASVVFPNGH

SEQ ID NO: 149440 - protein, 217 aa, Oryza sativa
  unsure (1)..(217): unsure at all Xaa locations
  Clone ID: PAT_MRT4530_49773C.1.pep
MVELAVGSGDQLQVCQSIKNMNFAKTDTRSKVETYVDTFGAKKKSTRSSAAEKNPKPRDPRPAPRVPRPRRPSTAPPPHRPRPQSPRAPXPPPPPRRPAPPPLCPQPPTPRAASSPHPTPVAPXCPPPPPAASSSSPSPATNAYSVHPPPTPNPPPXPQPPPTPPPLSQLQIRCRADSSSSSLSRTPPPPMPTTPLRAPSSEQSRDGRGAVVLLHPW

SEQ ID NO: 149441 - protein, 87 aa, Oryza sativa
  Clone ID: PAT_MRT4530_49774C.1.pep
MGVVKSLATVFSMESDQLKGIYPEESGFKKDAAWQKVSFLSDKDLYQPMGNCIIYVGVVQGCISTFDLLDCSGLDAIIGIDWNYSIG

SEQ ID NO: 149442 - protein, 64 aa, Oryza sativa
  unsure (1)..(64): unsure at all Xaa locations
  Clone ID: PAT_MRT4530_49775C.1.pep
FFFFFFFFFFFFFXXXAYXXHXTINDXXXGXHAQFIGIFXPFKKDETTQHAHKREQXNAPIFCL

SEQ ID NO: 149443 - protein, 59 aa, Oryza sativa
  Clone ID: PAT_MRT4530_49776C.1.pep
SKVHHRSLNLYRCVIPVPKLANRPFRSSNLFDCVIPVPKLADHSFLSSNLFSCVSPVPK

SEQ ID NO: 149444 - protein, 90 aa, Oryza sativa
  unsure (1)..(90): unsure at all Xaa locations
  Clone ID: PAT_MRT4530_49777C.1.pep
APPPEKVVEETLXKLKKVLEVYKGPLTKCKNLAGDYIRVGALNHVAGPVCLGATPPASVLEANPHLKAWWITLMARPFSQKGGSLINPPA

SEQ ID NO: 149445 - protein, 62 aa, Oryza sativa
  Clone ID: PAT_MRT4530_49778C.1.pep
RRNWAHMSTVDFAKPHHHTCNFENCWHFWAISFAQEHSLEIKCDGKRPLIVHHLCIIIEKKE

SEQ ID NO: 149446 - protein, 124 aa, Oryza sativa
  Clone ID: PAT_MRT4530_49779C.1.pep
LHPQERAYGTPPIKLRFVIVVFKVICSPKVELCFAKTRSQYTTITSVCGGNLVKRVTFASSVPSHVPRPSSNMDFVVAFASSVPSNGDDAGLCIISAQHYGVVVLSWISSLTENEISLLLRTRR

SEQ ID NO: 149447 - protein, 310 aa, Oryza sativa
  Clone ID: PAT_MRT4530_4977C.1.pep
MAPSRPLMRGIRPPRVFPTRGGRTSPLALALAALLLASALLLALIAFGVFSLPVSAPNAATTDSAAAGGDAEPADPRPPRTRARRDLSEGLGERGAQWTEVISWEPRAFVYHNFLSKEECDYLIGLAKPHMVKSTVVDSTTGKSKDSRVRTSSGMFLQRGRDKVIRAIEKRIADYTFIPMEHGEGLQVLHYEVGQKYEPHFDYFLDEYNTKNGGQRMATLLMYLSDVEEGGETIFPDANVNSSSLPWYNELSECARKGLAVKPKMGDALLFWSMKPDATLDPLSLHGGCPVIKGNKWSSTKWMHVTEYKA

SEQ ID NO: 149448 - protein, 118 aa, Oryza sativa
  Clone ID: PAT_MRT4530_49780C.1.pep
RLITSIGRAYGTPPIKLRFVIVVFKIICSPKVELCFAKTRSQYTTITSVCGGNLVKRVTFASSVPSHVSRPSSNMDFVVAFASSVPSNGDNAGLCIISAQHYGAVVLSMTNSLTEKLC

SEQ ID NO: 149449 - protein, 55 aa, Oryza sativa
  Clone ID: PAT_MRT4530_49781C.1.pep
LKIKLLGVVFMEETQPARKKARSRRLAALHDNRSCVCKLAGVRAKLRNACQLCTG

SEQ ID NO: 149450 - protein, 67 aa, Oryza sativa
  Clone ID: PAT_MRT4530_49782C.1.pep
TRHMEVTLEIHVGVDLSLVLVNTASIKQLLLDDTLHDDAHSVPMILLRHLLVVVIALLPHHVVPVQL

SEQ ID NO: 149451 - protein, 125 aa, Oryza sativa
  Clone ID: PAT_MRT4530_49783C.1.pep
MAEAPPPPRPPASSSAAAEARVLPPTMLHAPSPLSSRRASRAAAGGRGGRGRRKGGAPIPAAGAGGGGGGSGVDRLADAVRLIGRDVDPGVAGADILELAMAKGPMFSWLSYWPEEGYPKEEHPY

SEQ ID NO: 149452 - protein, 179 aa, Oryza sativa
  Clone ID: PAT_MRT4530_49784C.1.pep
MHFTTFLTTVVAAGMASATTYNAAAVSSNKNINGSALQASKSGFALKLKNQGAACDRGLKENQVTFSLNKDGELNLYTFQNSQVAYVDRSGMGQGKLGYATIADKGLVIPKNGETKGWKVAANGDLTFDGKGLIACPYDGSYSLWVSAGVNNPGGNKDCQAVTIRAKKDDKAVACQYSV

SEQ ID NO: 149453 - protein, 196 aa, Oryza sativa
  unsure (1)..(196): unsure at all Xaa locations
  Clone ID: PAT_MRT4530_49785C.1.pep
WQRHARSPATATGGDRRQAAARDGTAASGATVATRHRDATAVHKWRAAERKERKGRALLTXERGRLVMEGGRRTAGSVGRDIGNTMREVRGREGVHGAQHXPAKGDGNGDAHRRLGRGGLRRRTLTEEGWTRWTSTTRTRRWQWCGAAEALAVARGGRSSGRGGGGWVHGAGAVESLGDGGGERGRIWNSNPGHLG

SEQ ID NO: 149454 - protein, 132 aa, Oryza sativa
  Clone ID: PAT_MRT4530_49786C.1.pep
CLPPGLFPASVTAFSLAANGSLAVDLGGPCYAHYEYLTYFEPRVTGVLRYGSLTGLSGVKVRRFLVWFDVVRVKVDLPPPPRYVYLDIGWITRKLPADEFESPHECEDSKKCRLSSALATVAAWFQNFFAQF

SEQ ID NO: 149455 - protein, 172 aa, Oryza sativa
  Clone ID: PAT_MRT4530_49787C.1.pep
MPPPLLLLLLLLLGGAAAAEEPPAAPSSSPPPHKNATLSEILPRYGLPPGLFPASVTAFSLAANGSLAVDLGGPCYAHYEYLTYFEPRVTGVLRYGSLTGLSGVKVRRFLVWFDVVRVKVDLPPPPRYVYLDIGWITRKLPADEFESPHECEDSKKCRLSSALATVAAWFQV

SEQ ID NO: 149456 - protein, 508 aa, Oryza sativa
  Clone ID: PAT_MRT4530_49788C.1.pep
MADRITVLAIALLVLILSPQMAVQGKPAAGNTASPRPKQQQLGNFFKKHGSDIAGLFPRHRNGGSSGSYSGQAVPADGGENGGGGQSQDPATNTGMYVLSFSVGTPPQVVTGVLDITSDFVWMQCSACATCGADAPAATSAPPFYAFLSSTIREVRCANRGCQRLVPQTCSADDSPCGYSYVYGGGAANTTAGLLAVDAFAFATVRADGVIFGCAVATEGDIGGVIGLGRGELSPVSQLQIGRFSYYLAPDDAVDVGSFILFLDDAKPRTSRAVSTPLVASRASRSLYYVELAGIRVDGEDLAIPRGTFDLQADGSGGVVLSITIPVTFLDAGAYKVVRQAMASKIELRAADGSELGLDLCYTSESLATAKVPSMALVFAGGAVMELEMGNYFYMDSTTGLECLTILPSPAGDGSLLGSLIQVSLLSCRRRADFTKVVHFDNVSSGLGGKLFTVWRSEFGETGGLGIAWEGLNLGPSWAAKMNRNYTEMGFVKHGPRDLRTGSGEIGP

SEQ ID NO: 149457 - protein, 61 aa, Oryza sativa
  Clone ID: PAT_MRT4530_49789C.1.pep
LSTRMTDALSHETLSISTRQEHSVTSYTMSLLWSSKKCLDIIKFHSTRYFFMEFLKSYKLC

SEQ ID NO: 149458 - protein, 729 aa, Oryza sativa
  Clone ID: PAT_MRT4530_4978C.1.pep
ILKLAEFLRVRPPVFSSTTNPVEASDWLHAIEKKLDLLQCRDQEKVSFASHQLHGPASEWWDHSCLNRTTAEPISWLEFTAALRKTHIPSGVVSLKKKEFRSLTQGSRTVTEYLHEFNHLARYAPEDVRTDEERQEKFLEGLNDELSYPLMTGDYHDFQKLVDKAIRQEDNYNRMEQKKHRIAHFKAQQGNSQRPRIASGPLSMPQGDPGHYADKCPKPCRAKVVPAQNNSSAPAAKARVNHVAAAEAQGAPDVILGTFPVNSVPATVLFDSGATHSFLSMSFAENHGMEVEELRRPLMVSTPSNQALSSQRSPSVRIEIRGVPFLANLILLESKDLDVILGMDWLARYKGVIDCANRKVTLTSNDGQVVTVHALPSEPRRSSLNQITLEEIPIDREYPDVFPDDLPGMPPKRDIEFRIDLVPGTTPIHKRPYRMAANELAEVKRQVDDLLQKGYIRPSSSPWGAPVIFVEKKDHTQRMCVDYRALNDVTIKNKYPLPSIDDLFDQLKGATVFSKIDLRSGYHQLRIKEEDIPKTAFTTRYGLFECTVMSFGLTNAPAFFMNLMNKHEEHLRLALEKLREHQLYAKFSKCEFWLSEVKFLGHVISAGGVAVDPSNMESVTNSKQPKTVTEIRSFLGLAGYYRRFIENFSKIAKPMTRLLQKDVKYKRLEECEQSFQELKSHLISAPILILPDPKKGFQVYYDASKLGLGCVLMQDGKVVAYASRQLRPH

SEQ ID NO: 149459 - protein, 117 aa, Oryza sativa
  Clone ID: PAT_MRT4530_49790C.1.pep
MGIVQPLVKLDLKAVSISRRREGRGSMDRVTNLYLENLCIMQENERLRKKAQLLDKENKALLAKLKLKNNPSTAAAAAAASSPSSQQQPDAGASAAASVVKAGAAAPSSSYGGKKTK

SEQ ID NO: 149460 - protein, 762 aa, Oryza sativa
  Clone ID: PAT_MRT4530_49791C.1.pep
MAESKRFDTQSPGCLEGLFNFLALNQRLQMPKAIAYRKHNEGSSNTLSVKVPKPKNRSENDESVPKGTNSPKAKVGTFIWRTLMFKKKTLKKDQKKSDSPANSPSSSRLTRSRSIHHSKCFEYVVPDELASQYHTMIESSSNEVDSFHSAPPLVQESPKVPNFQESCKSSGAKHSFNAEAPCETVPQSSNDETEAASKQKSRDAATHHSKEFMDFLELFNAHRELFLKILHDPSLLVPLENQDQEASSSGAVPLNKSDSFPRPGGSSGKRNPIFDRNDSENNRRSEIQKSPSRLKSDIETAKVIGTRMPDGVEGSSVSLTESKSLRKSGTTSNRFKVIRKKIKAAVKENRKELARITKDGVFHKLPYGQKMAGFMKSPSTDKYVQEEKQMRKSYSIAESIDKYSTLYESISRDPKISPERPSTMFEGDAKLKDKKPPLSMKRIASLPEMRLYSPQRDVLSEVSDSQIVPKTHDLESDSEPTFEHMQLEDDDWLVKPPHPPGPYDASLKDDEWLVRPLKSSGVDTIDHEDEEWLVSTSQLPGGNAADFEDEEWLVKPVQSSSADALDSEFQFIHEFAEDAGSLHIYVNDKNEADFHYVKDILKKSGFSCGEADWYASNQPLSPVIFEEAEFSCQETYTANDDPHSVVRRMLLFDLINEVLMDIYDSSLVTGPWHSRFDSRTRPIPMGSHVLGEVWGKVSYNLSLQWKPDLTVEDVVAHDVMMKDRWMNLVYDAECLALDLEDMVVDDLLDDIVLQIVLISIDA

SEQ ID NO: 149461 - protein, 72 aa, Oryza sativa
  Clone ID: PAT_MRT4530_49792C.1.pep
LFNTYMQVALSSHFNLLAILLEAPAIGHPNFVVKIECCFSTCKKNVSSLAYTYFRLSLLGKRFFKPKKKKKK

SEQ ID NO: 149462 - protein, 100 aa, Oryza sativa
  Clone ID: PAT_MRT4530_49793C.1.pep
HRHLANRLSFMDLTAISLSLFLIDCRIKSTGTLAYLKASFGHALELSKSPRPRVFTSTPRRRATRRWRCWRQPGRAKSSTCGKAKELLNRMVAFVNVTGA

SEQ ID NO: 149463 - protein, 89 aa, Oryza sativa
  Clone ID: PAT_MRT4530_49794C.1.pep
MDGVGGGGGGILSYEKLEGYAIWVGASVASAFFASMESCSCIHVHTADDEGDDYDPEEAKDRPLMLSRPQALPEYYYDRSASSASFAKM

SEQ ID NO: 149464 - protein, 358 aa, Oryza sativa
  unsure (1)..(358): unsure at all Xaa locations
  Clone ID: PAT_MRT4530_49795C.1.pep
MAHDASSPSTARDVKKKRIRGNRSAKAKQSKLDVRPEQXLTQVDVRREQWIGLVKDGKEVKAVVSPGAAAGANSGSPILASPHPPLPRRRAEIRTREGDPEDFKEDSVGASQDVGSSDHESPLHSPVSYNPPIGCLQQKHCSGNGGGRSFSSGSSAWSSSRSVTDSDDDTGGSPENDDDGVLDDWEAVADALSVDDNHNHQDPVPADPPVVPASCPVPANAATRQEPIKSSTRAWSPDDAFRPQSLPSLSKQVSFPASMGNCWVAMGIGSAQKGVPSKPTSCPICYEDLDPTDSSFLPCPCGFHLCLFCHKRILEADGRCPACRKQYISASSGGETVGSEREMGNLRLSRSCSMGPRY

SEQ ID NO: 149465 - protein, 60 aa, Oryza sativa
  Clone ID: PAT_MRT4530_49796C.1.pep
MEMADELGHLLVFGFLFNLGVYMVAPAMTDVTMDALCPGQDECSLAIYLTGLQQAVSYLP

SEQ ID NO: 149466 - protein, 106 aa, Oryza sativa
  unsure (1)..(106): unsure at all Xaa locations
  Clone ID: PAT_MRT4530_49797C.1.pep
LRWGKDPAGGGGGXPPKPRQTQEQARRKKTSRAQEGILKHMLKTMEACRAQGLANGNNPEKGKPESGATDNPRGWRKEKARFDRNGPAAMDKNQAEKRRTGPEEQA

SEQ ID NO: 149467 - protein, 140 aa, Oryza sativa
  Clone ID: PAT_MRT4530_49798C.1.pep
MSPVSGGEWCWAPPGGAEPSCFRLKARRAAAKSTRMRKYFQRKKNWLPPALPAAALPSDHHHHELCHHDGFEREREGKGAARATSSPRQPAAAAGPPHDVVGSERGGEGRGGKPPSESGSGSAIAAANDRVASAAALPTT

SEQ ID NO: 149468 - protein, 64 aa, Oryza sativa
  Clone ID: PAT_MRT4530_49799C.1.pep
PTLPLYIHQYHFTHLPNLSAKSCLTFLLPPTSSTHSPNSINIFLQYLSNNYKNVIFFLLFISLN

SEQ ID NO: 149469 - protein, 34 aa, Oryza sativa
  Clone ID: PAT_MRT4530_4979C.1.pep
DATLDPLSLHGGCPVIKGNKWSSPKWMHVREYKA

SEQ ID NO: 149470 - protein, 1493 aa, Oryza sativa
  unsure (1)..(1493): unsure at all Xaa locations
  Clone ID: PAT_MRT4530_497C.1.pep
MTKTMEQGRREARDRTGTLPSQRPLGRRMQGEEYMPKGDDFAKASSPPRGPKKPFRPIKSRGYXADDRPTAHQGPVNLNYPMYPCKCPFHKGNHLSFRQQLASIVGTSKRNHXERMPPKKVVKEKVTRRKESDVRADMATEEGAETSAPVAEDGGAPSASAPAPSLPPSAPATSVQVPNMAGMAKAAAAARALQTRAEILLTSQLLVPQAAPSXSAAAPTALTAVQAQVNPNPETQTEANMEAMRQNMTRLQDMLRQMQEQQQAYETARRSKVASAPILQYSAGYVPPQVYPQVPTQPLPPQVAQAPMYFVGQPSTAAAHPAPHVQLQAQPVAAQVQPQPPGQAPQTMAEGASALRAQLQAFLQQLSQPHSISGIAPSAHPEGNTSHDAPSWLPSNQPSLGASPWSQGPXFNFINASXAPTIRPQAPTSGFGANQAPNQVAMTRSQPTFDPSMVAQQASPIGAGQPNAMAQPHAQAMISPFATPYPQQGAVNRAGSEKGLSLSGGIKTRPIPPXFKFPPVPRYSGETDPKEFLSIYESAIEAAHGDENTKAKVIHLALDGIARSWYFNLPANNIYSWEQLRDIFVLNFRGTYEEPKTQQHLLGIRQRPGESIREYMRRFSQARCQVQDITEASVINAASTGLLEGELIRKIANKEPQTLEHLLCIIDGYARGEEDSKRWQAIQDEYHKASVAAAQAQAQVQVAEPPPLAVRQXPAIQGQPPRQGQAPPHDXRKFRTDRAGKAVMAVKEVQALRKEFDAQQASNHQQPVRKKYLNQQISFRPGDAEGVMFPHQDPLVISAEIAGFEVRRILVDGGTSADVIFAEAYAKMGLATQALTPAPASLRRFSGEAVQVLGQAQLMVAFRTAENRREEQVLFDVVDIPYNYNAIFGRATLNKFEAISHHNYLKLKMPGPTGVIVVKGLQPLAASKGDLAIXVHNVEAEPHDRAKHAPKPAPHDKIIKIQIDDADPTKLVSLGGDMGEEEAENILEVLKKNIDIFAXGPDEVGGVSTDLIMHHLAVKPDAKPRKQKLRKMSADRQEAAKAEVQKLLKAGVIQEIDHPELTILXWLENPVLVRKSNGKWRMCVDFTYLNKACPKDDFPLPRIDXLVDLIVGCELMSFLDAYSGYHXIHMNTANIPKTAFITPFGTFCHLRMPFGLRNARATFARLVYKVLYKKLGRNVEAYVDDIAVKSRKAFNHASDLQETFNNLRAAGMKLNPGKCVFGVRAGKLLGFLAAEXGLPFFKTLRGTGKFTWTPECQAAFDALKQYLQSLLALISPAPGSELLLYLAASPVVVSAALVQETESGQKPVYFVSEALQGVKIRYIEMEKLAYALVMASCKLKHYFQAHKVTVPSQYPLGEVLRGKEVTGRLSKWAAELSPFDLHFVTRTAIKSQVLTDFVAEWIPVFAAEPEPVEQPXVMYSDGSWSHKGTGAATVLTLPGGVPIQYAARLQFDITNNAAEYKAILLGLKKAKALVLWRLLSSPSSSLSAGNRME

SEQ ID NO: 149471 - protein, 34 aa, Oryza sativa
  Clone ID: PAT_MRT4530_49800C.1.pep
TVYATSAHSKKGSFGTITSIAIGFIEGANIIVGG

SEQ ID NO: 149472 - protein, 33 aa, Oryza sativa
  Clone ID: PAT_MRT4530_49801C.1.pep
WRVPSTRHMLQLPRMLHYLTLNYYTKLGLPPSQ

SEQ ID NO: 149473 - protein, 95 aa, Oryza sativa
  unsure (1)..(95): unsure at all Xaa locations
  Clone ID: PAT_MRT4530_49802C.1.pep
NPSNQKGQQFLQQEEEKGAWASRTFRARSPKEDSNSAFNKALTLELKNASLFGPWVAAPTWVVGRVFLWLKAIFNYTXKAFILSNTCFVGFFIIV

SEQ ID NO: 149474 - protein, 82 aa, Oryza sativa
  unsure (1)..(82): unsure at all Xaa locations
  Clone ID: PAT_MRT4530_49803C.1.pep
LRLCTLTVTCTSVYSNXSQTIQATFXTSLKKVTFXTGIIXACXVPTSTKACIMPSSKFPPFXQKRTAMAALRVFSTGVICHL

SEQ ID NO: 149475 - protein, 477 aa, Oryza sativa
  Clone ID: PAT_MRT4530_49804C.1.pep
LPKQFWAEAVSTACYLINRSPSYAIDKKTPIEVWSSSPANYSDLRVFGCTTYAHVDNGKLEPRAIKCIFLGYPSGVKGYKLWCPETKKVVISRNVVFHESVMLHNKPSTNVPVESQEKASVQVEHLISSGHAPEKEDVAINQDAPVIEDSYSSTIQQSPKRSIAKEQPKRNIKPPRRYIEEANIVAYALSVAEEIEAIYLLLYVDDMLIAAKDKSEIAKLKAQLSSEFDMKDLGAAKKILGMEITRERHSGKLYLSQKGYIEKVLRRFNMHDAKPVSTPLAAHFRLSSDLYPQSDYDIEYMSRVPYSSAVGSLMYAMFGRSRDGLVGYVDSDFAGDLDRRRSLTGYVFTIGGCAVSWKASLQATVALSTTEAEYMAISEACKKAIWLRGLYTELCGVTSCINIFCDSQSAICLTKYQMFHERTKHIDVRNHFIRGVIAEGDVKVCKISTHDNPADMMTKPVPTTKFELCSSLVGVTV

SEQ ID NO: 149476 - protein, 74 aa, Oryza sativa
  Clone ID: PAT_MRT4530_49805C.1.pep
VRFRQLRCNFPPPEGPVILFAGPQLSLLCQSKKRLTNLMLPQKMNELAGLALTMGCAAFNQWIYLCTISINVLG

SEQ ID NO: 149477 - protein, 780 aa, Oryza sativa
  Clone ID: PAT_MRT4530_49806C.1.pep
MYLLYIEDSDSSTVEHSPKHSIAKDNPKRNTRPPRKYIEEANIVAYALSVVEEIKESYLEIGEIVKVEETYPLQVDIQERKVYLQVMRQDKKQGRDVEYLSRVPYLSAVGSVMYAMFGRSRDGLVGYVDSDFAADLDRIRSLIGYVFTIGGCGVSWKASLQATVALSTIEAKYITISEDCKEAICLRVIIAGRRPWLFPWISGVREEPKYPMGTEPDPIQQDSPAPPRPTPAPQATPPPAIPESGPPPPPAPDMPPPPPTPAPQSSPAPPPAPDMTPPPGPGPAAAPSPHSPSPSNAPWVAPAADIPPPPPPPPNPLPVIIAVTVPVCILFMAILLYVYVKCRRKRMALSTKHQHIKAAATHESEPNELRDAEAGALEPVASSAGPNHGKEYGGDPAAAAGPRQYEYGERVVSDGPRHGAAYNELVAAGPRLYEYGELAAATRDFAEEEKLGRGGFGSVYQGRLAGGVEVAIKKFSSDSSSQGRKQFEAEVKIISSLRHRNLVRLLGWCDSSMGLLLVYELVQHGSLDKHIYNADKPLTWSERYKIILGLGSALRYLHEEWEQCVVHGDIKPSNIMLDSSYNTKLGDFGLARLVDHDKGWQTTKAVLGTAGYIDPEFITTRRPSVQSDIYSFGIVLLEIVSGRPPVLLQEGAPPFMLLKWVWSLYGRNAILDAADERLWAAGGGKEDDARQMERVLIVGLWCTQPDMADRPSIPQAMHVLQSDDAKLPDLWPQMYMASPSPAKNFAMGEYRLSGVSSFTSSGVPSSATSGTTRSSGSFAY

SEQ ID NO: 149478 - protein, 137 aa, Oryza sativa
  unsure (1)..(137): unsure at all Xaa locations
  Clone ID: PAT_MRT4530_49807C.1.pep
TSATAAYTSEIXFALFGLIALCGIATXTAITTMLFLPPTFAMGTMDPCGGAWCPTSGLGGSTAMFMSQPMALLPQPCCMPLQGVMPECHCGTSCQMMRCMLQVICAGLGPRQMVNLALLLPFLCFMAPVYXQLFFCG

SEQ ID NO: 149479 - protein, 126 aa, Oryza sativa
  Clone ID: PAT_MRT4530_49808C.1.pep
EKNSLEPLNVSNRKASKESSRSTRARGQQPPTMGPQLTDHLQWRTMILGPPQHQLSLMGKPLQQQVRSFDFVNAFDGTCRSFLVMALGYRQPTSVSTARLCLTRVQFRFSHGLTMYTSISYQDLGS

SEQ ID NO: 149480 - protein, 33 aa, Oryza sativa
  Clone ID: PAT_MRT4530_49809C.1.pep
MAGKKLTMQEMEEVPDSDCRFNNLHFLGRDGVI

SEQ ID NO: 149481 - protein, 114 aa, Oryza sativa
  unsure (1)..(114): unsure at all Xaa locations
  Clone ID: PAT_MRT4530_4980C.1.pep
FLCLCIPGHSSILSNARLPVPATLPMIARMSHFHSPDHCGLLNPLTSLHVYCIRCVISYLSPYTLRQVCTFPSFYVPCLSAAPSMYACPCIHTHPCXKSWTWPTCPLHPTLCLA

SEQ ID NO: 149482 - protein, 811 aa, Oryza sativa
  Clone ID: PAT_MRT4530_49810C.1.pep
GHLVGPTLVFTDRHLLVVQDIAAVLFPATERVLGRADDLVLLVVSLPAKLTARSTASRPSSPAPWGTRWGTGHGGGGGRARGSSPSHPLSFASPSSPSAALPAAALARRPSAAALALRCFAHCCACPPPLLCRARILHGPAVGPGRHGHDPSRAGPCLGRAKIAGFVPGRGPRAIWPSIPGVYAYELLLWARKELENLEVVTADDGGGGGGGGNNVHGDKAPVDGKGEAATPAKRADVSGGQECGVVRVEDVQRVETPAGEITNAMKDTEIMKNKDQERGGSEREEEETVAMAGTGSREEALLVIFDTAWQQGNLLIGGSGGTAGALALTRGHGGSGRQATPLVAGLWRRMESRRRGPDLIVSTHGQSTNDKCAPECQSARHLQSFSPWLCSTTRDGGSSSPSHLRVAARHSLPLVPPACAASSPTGRPDELASSLAATDSAWLAAGDGTRGAWGGGSHISLAHARRAVRRPSPRWPPAGEEGSKPRASPRPSVAAALLPSSSPSAAPSRSRSPAPPTLLPRHRGRDGRTDTLPLSELRKRHGGSAVSGGGGGGGEDKKLHLLRCLLARADVAIDPTRRRLPPAMRCPSPLRPPRGLPPPPLRRKDEGEPRGRRGRAKSGEGEVRGAGELSLGGGGSGVISVAPPTARRRSISPRCRSASSRHPPPAVTSFIAGRCAASLRRHSAPSPLRPSPPQHRRSPFSPGSVQPPAVLRSSEDAEFADTDQSWSTNYRRVPTVPIKYYGRNRFADPLTSIRMLPAGGDRDDAREDAGDGSGDKRLRAKQAAEEATCIARALAVSSDGPGRKQEASLD

SEQ ID NO: 149483 - protein, 227 aa, Oryza sativa
  Clone ID: PAT_MRT4530_49811C.1.pep
MRLRSLLHTLAAGGVLVVGLGVAGGSAVARRPHPLPFGDGRRWPLSRFYCSKGGRRSARSCDGRRLRSLPRPRLRRSPLSPLQRRPSCPGRRSEWAKQLSRSRRGLAMANGLWGELGQALREAQLVRVDALGLVSMVVQAARRWDACRRLGQHVELVGGLLRELELAELMRRDATRRPLERLHGAHPLTTRARSYRLPPAEGEEGERKREKGEREEEGKGLTCKPHT

SEQ ID NO: 149484 - protein, 675 aa, Oryza sativa
  unsure (1)..(675): unsure at all Xaa locations
  Clone ID: PAT_MRT4530_49812C.1.pep
MAAWWGLEWRLLDCRNTVITPPPSPPSPATEHQPSPSPGLLLLTAASSAPSMGSKPCPPPPRPPSGLSPIRIWDIWWAPRWPSRTSSSSSSRTSRRCSSRPPSASSAGPTTSSSSSSPCPASSRRDRRPRGLRRRRRGAPAGARRWWPASTGELPIPSTVFRFGLARPPLLCLRPRSPSAALPTAALAHHRSSAALAYCVLVAGCRKQELKNLEVVTADDGGGGGGNTVTVHGDKAPVDGKGEAASPAKRADVSGGQECGVVCVEDVQRVETPAAEITNAMKDTEIVKNKDQERGGSKREEEETVAMAGTGSREEALLNPRNQALRPQSQGRPGFEAERGGGGPPKIKCFKCGREGHHQATCPNPPLCYSCHNTGHISAHCPMNLMKRGVKLCGFGIPGHGFYSLQVEISDAEVARAPVRGILTVILGEGSVVKIVTELKHLFVGLNWEWKVKQLNDKEFLINFPFDEVRSKISTCKCFDFETSLIKASVVETGMTEEAVDELVAVWVKIFGIPKIAKTVNWLLHSIAAIVELVGEFETMDGASLRRDGPVRVRVACKDPRELHFSVHVYINKVGYMTKWEPEGYPPYENRQMPPDDDGGDDKDDKNDEELQEDMNLDDEFKNQNSPRGRQLRDADSNQGNRFGAYSXPPAYKGKSHGTQGCSIKKLVSKKSSLL

SEQ ID NO: 149485 - protein, 1185 aa, Oryza sativa
  unsure (1)..(1185): unsure at all Xaa locations
  Clone ID: PAT_MRT4530_49813C.1.pep
MASLKYDLPLLDRDTRFSLWQVKMRAVLAQQDLDDALSGFDKRTQDWSNDEKKRDRKAMSYIHLHLSNNILQEVLKEETAAGLWLKLEQICMTKDLTSKMHLKQKLFLHKLQDDGSMMDYLSAFKEIVVDLESMRDTILYSRDTLTLKEVYDALHAKEKMKKMVPSEGSNSQAEGLVVRGMQQEKNTKNQSRDKSSSSYRGRSKSRDRYKSCKYCKRDGHDISECWKLQDKDKRTGKYVPKGKKEEEGKAAVVTDEKSDVELLVAYAGCAQTSDQWILDTACTYHMCPNRDWFATYEVVQGGTVLMGDDTPCEVAGIGTVQIKMFDGCIRTLSDVRHIPNLKRSLISLCTLDCKGYKYSGGDGILKVIKGSLVVMKADIKSANLYHLRGTTILGNVATVSDSLSNSDATNLWHMRLGHMSEIGLAKLSKRGLLDGQSIRKLKFCEHCIFGKHKRVKFNTSTHTTEVWPYFLKHKYQAFNVFKEWKTMVERQTERKVKILRTDNGMEFCSKIFKSYCKSEGIVCLNXFWAEAVSTACYXRSPSYAIDKKTPIEVWSGSPANYSDLKVFGCTAYAHVDNGKLEPRAIKCIFLGYPSGVKGYQLWCPETKKVVISRNVVFHESVMLHDKPSTNVPVENHEKASVQVEHLISSGHAPEKEDVAINQDAPVIEDSDSSIVQQSPKHSIAKDKPKRNIKPPRRYIEEANIVAYALSVTEEIEGNAEPSTYSEAIVSDDCNTWITAMHDEMESLEKNYTWELVKLPKEKKPIRCKWIFKRKEGMSPSDEARYKARLVAKGYSQIPGIDFNDVFSPVVKHSSIRTLLSIVAMHDYELEQIDVKTAFLHGELEEDICMEQPEGFVVPGKENLVCRLKKSLYGLKQSPRQWYKRFDSFMLSQKFRRSNYDGCVYLKVVDGPTIYLLLYVDDMLIAVKDKSEIAKLKAQLSSEFEMKDLGAAKKILVMEITRERHSGKLYLSQKGYIEKVLHRFNMHDAKPVSIPLAAHFRLSSDLCPQSDYDIEYMSRVPYSSAVGSLMYAMFGRSKDGLVGYVDSDFAGDLDRRRSLTGYVFTIGGCAVSWKASLQATVALSTTEAEYMAISEACKEAIWLRGLYTELCGVTSCINIFCDSQGAICLTKDQMFHERTKHIDVRYHFIRGVIAEGDVKVCKISMMTKPVPATKFKLCSSLVGVTA

SEQ ID NO: 149486 - protein, 1082 aa, Oryza sativa
  Clone ID: PAT_MRT4530_49814C.1.pep
MAVRATARLGHALSHMSGGNDSLPICRRRRKAAADANRRINRSSRREECSSNSKQQLISPEEKPKPEATRESSCFGDSSVGIAAAAAGDSGRGGALDRKLQAVTTAVYGASLHSGKELLIRVTWTPNAAGATGLAVAFDDALSPSSRCAHHVLHKKRGSRSSLPPPARLWASTRTPPRPRLIPMASLKYDLPLLDRDTRFSLWQVKMRAVLAQQDLDDALSGFDKRTQDWSVDEKKKDHKEVLKEETAVGLWLKLKQICMTKDLTSKMHLKQKLFLHKLQDDESVMDHLSAFKEIVADLESMEEKNTNNKSRDKSSSSYRGRSKSRGRYKSCKYCKRDGHDIFECWKLQDKDKRTGKYIPKGKKEEEGKAAVVTDEKSDAELLVAYVGCAQTSDQWILDTACTYHMCPNRDWFATYETVQGGTVLMGDDTPCEVAGIGTVQIKMFDGCIRTLSDVRHIPNLKRSLISFCTLDRKGYKYSGGDGILKVTKGSLVVMKADIKSANLYHLRGTTILGNVAAVSDSLSNSDATNLWHMRLGHMSEIGLAELSKRGLLYGQSIGKLKFCEHCIFGKHKRVKFNTSTHTTEGILDYVHSDLWGPARKTSFGGARYIMTIVDDYSRKVWPYFLKHKYQAFDVFKEWKTMVERQTERKVKILRTDNGMEFCSKIFKSYCKSEGIVRHYTIPHTPQQNGVAERMNRTIISKARCMLSNAGLPKQFWAEAVSTACYLINRSPSYAIDKKTPIEVWSGSPVNYSDLRVFGCTAYAPVDNDSSTVQQSPKCSIAKDKPKRNIKPPRRYIEEANIVAYALSVTEEIEEQMDVKTAFLHGELGEDINMEQPEGFFVPGKENLVCRLKKSLYGLKQSPRQWYKRFDSFMLSQKFRRSNYDSCVYLKVVDGSAIYLLLYVDDMLIAAKDKSEIEKLKAQLSSEFEMKDLGAAKKILGMEITRERHSGKLYLSQKGYIEKVHHRFNMHDAKPVSTPLAAHFRLSSDLCPQSDYDIEYMFRVPYSSSVGSLMYAMFGRSRDGLVGYVDSDFAGDLDRRKSLTGDVKVCKISTHDNPADMMTKPVPATKFELCSSLVGVTV

SEQ ID NO: 149487 - protein, 88 aa, Oryza sativa
  Clone ID: PAT_MRT4530_49815C.1.pep
MAGAKRSHDFLPHSANPSPPDVTAPEREPLVHLRAQDQVSTGCNFKLVLLSSTGNNGPFNPPPANVFSNSSAVKTFKPTDGTGAGGKL

SEQ ID NO: 149488 - protein, 1003 aa, Oryza sativa
  unsure (1)..(1003): unsure at all Xaa locations
  Clone ID: PAT_MRT4530_49816C.1.pep
MASLKYDLPLLDRDTRFSLWQVKMRAVLAQQDLDDALSGFDKRTQDWSNDEKKRDRKTMSYIHLHLSNNILQEVLKEETAAGLWLKLEQICMTKDLTSKMHLKQKLFLHKLQDDGSVMDHLSAFKKIVADLESMEVKYDEEDLCLILLCSLPSSYANFRDTILYSCDTLTLKEVYDALHAKEKIKKMVPSEGSNSQAEGLVVRGRQQEKNTNSKSRDKSSSSYRGRSKSRGRYKSCKYYKRDGHDISECWKLQDKDKRAGKYVPKGKKEEEGKTAVVTDEKSDAELLVAYADCAQTSDQWILDAACAYHMCLNRDWFATYEAVQGGTVLMGDDTPCEVAGVETVQIKMFDGCIRTLSDVRHIPNLKRSLISLCTLDRKVYKYSGGDGILKVTKGSLVVMKADIKSANLYHVRGTTILGNIAAVSDSLYNSDATNLWHMRLGHMSEIGLAELSKRGLLDGQSIGKLKFCEHCIFGKHKRVKFNTSTHTTESILDYVHSDLWXPAQWKTMVERQTERKIXIDKKTPIEVWSGSPANYSDLRVFGCTAYAHVDNGKLEPRAIKCIFLGYPSGVKDYKLWCPKTKKVVISRNVVFHESVMLHDKPSTNVPVESQEKASVQVEHLISSGHAPEKEDVAINQDASVIEDSDSSAVQQSPKRSIAKDKPKRNIKPPRRYIEEANIVAYALSVAEEIEGNAEPSTYSEAIVSDGCNRWITAMHDEMESLEKNHTWELVKLPKEKKPIRCKWIFKRKKGMSPSDEARYKARLVAKGYSQIPGIDFNDVFSPVLKHSSIRTLLSIVAVHDYELEQMDVKTAFLHGELEEDIYMEQPEGFVVPGKENLVYRLKKSLYGLKQSPRQWYKRFDSFMFSQKFRRSNYDSCVYLKVVDGSSIYLLLYVDDMLIAAKDKSEIEKLKAQLSSEFEMKDLGAAKEILGMEITRERLSGKDQMFHERTKHIDVRYHFIRGVIAEGDVKVCKISTHDNPADMMTKPVPTTKFELCSSLVGVTV

SEQ ID NO: 149489 - protein, 62 aa, Oryza sativa
  Clone ID: PAT_MRT4530_49817C.1.pep
THIFLLYILNTSPPPKSSITLHFHTPKFLYNQSLKRNITLFFPFPHSASQNNTNLNNHTTHI

SEQ ID NO: 149490 - protein, 1122 aa, Oryza sativa
  unsure (1)..(1122): unsure at all Xaa locations
  Clone ID: PAT_MRT4530_49818C.1.pep
MDSTDKIIHEWHFTGLKKPMLDEQHVSSCSSFRRIKSVLHATRRLRVGLVPRLSEKIKAAAAAQAKQRETRRRSSVHTIQQHASRGEKENRAAACLPVHVIFIHVELLHAHKLVYQEVSDLRYMHTDSAPRGLILMASLKYDLPLLDRDTRFSHWQVKMRAVLAHQDLDDALSGFDKRTQDWSNDEKKRDRKAMSYIHLHLSNNILQEVLKEETAARLWLKLEQICMTKDLTSKMHLKQKLFLHKLQDDESVMDHLSTFKEIVADLESIEVKYDEEDLCLILLCSLPSLYANFRDTILYSRDTLTLKKVYDALHAKEKMKKMVPTEGSNXQAEGLVVRGRQQENNTKNQSRDKSSSSYRGRSKSRGRYKSCKYCKRDGHDISECWKLQDKDNRTGKYIPKXWILDTACTYHMCPNRDWFATYEAVQGGTVLIGDDTPCEVAGIGTVQIKMFDVCIRTLSDVRHIRNLKRSLISLCTLDCKGYKYSGGDGTLKVTKGSLVVMKADIKSANLYHLRDATNLWHMRLRHMSEIGLAELSKRGLLDGQSIGKLKFCEHCIFGKHKRVKFNTSTHTTEGLPKQFWAEAVSTACYLINRSPNYAIDKKTPIEVWSGSPANYSDLKVFDCTAYAHVDNVMLHDKPSTNVPVESQEKASVQMEHLISSGQAPKNEVVVIDQDAPVIEDTNSSTVQQSPKHSIAKDKPKRNTKPPQRYIEEANIIAYALSVAEEIEGHAKPSTYSEAIVSDDCNRWITAMHDEMESLEKNHTWELVKLPKEKKPIRCKWIFKRKEGMSPSDEARYKARLVAKGYSQIPGIDFNDVFSPVVKYSSIRTLLSIVAMHDYELEQIDVKTAFLHGELEEDIYMEQPEGFVVPGKENLVCRLKKSLYGLKQSPRQWYKRFDSFMLSQKFRRSNYDSCVYLKVVYGSAIYLLLYVDDMLIAAKDKSEIAKLKAQLSSEFEMKDLGAVKKILGMEITRERHSDKLYLSQKGYIEKVLRRFNMHDAKPMSTPLAANFRLSSNLCPRSDYDIEYMSRIPYSSAFGSLMYAMFGRSRDGLVGYVDSNFAGYLDRRRSLTGYVFTIRGCAVSWKASLQATIALSTTEVEYMAILPVPATKFELCSSLVGVTV

SEQ ID NO: 149491 - protein, 319 aa, Oryza sativa
  Clone ID: PAT_MRT4530_49819C.1.pep
MANGLWGALGQALRVAQLVGVDALGLVSMVVQAALAKYFVKYTPFSSLKITHAENEGEELGTRCTTETPILCGKPLRAVLAQQDLDDALSGFDKRTQDWSGDEKKRDRKAMSYIHFHLSNNILEEVLKEETVAGLWLKLEQICMTKDLTSKMHLKQKLFLHKLQDDASVMDHLSTFKEIVADLESMEMKKMVPSEGSNSQAEGLVVRGRQQEKNTKNQSRDKSSSSYRVRSKSRGRYKSCKYCKRDGHDISEYWKLQDKDKRTGKYIPKGKKEEEVVHKLSDQWILDTACTYHMCPNRDWFATYEAVQGGTVLMGDDTP

SEQ ID NO: 149492 - protein, 137 aa, Oryza sativa
  unsure (1)..(137): unsure at all Xaa locations
  Clone ID: PAT_MRT4530_4981C.1.pep
QLARDSTVERRHLLSPSAAVVSPPPPVPAXGIVVVHRPRPRPCQPRRRPFTVATIIVVHRPCRARLATASSTARVAHSXWSTPMRVXCPRPPHLPPHHHHHHRRRPPAAHPRHPHGSSPRSRGRNWCGWRACTPSSG

SEQ ID NO: 149493 - protein, 148 aa, Oryza sativa
  unsure (1)..(148): unsure at all Xaa locations
  Clone ID: PAT_MRT4530_49820C.1.pep
YVLYSAFVTSVCTGSVAEHLXGQSTSQXRQSSLRGSSXECRFDRLQAFEPIWSVRSQAGTTEFFDVSNEQFQCTGVSVVRRVIEPRGLLLPHYTNGASLVYIIQGRGITGPTFPGCAESYQQQFQQSGQAQLTESQSPSQKFKDEHQK

SEQ ID NO: 149494 - protein, 1228 aa, Oryza sativa
  Clone ID: PAT_MRT4530_49821C.1.pep
MSSSAMEAMDELVQLAESMRQAASLLADDDPSDEASPRRPSTFLNAVALGNVGAGKSAVLNSLIGHPVLPTGENGATRAPIVVDLQRDPGLSSKSIVLQIDSKSQQVSASALRHSLQDRLSKGASGGSGKGRNDEIYLKLRTSTGLLLGFTFTLTLHNVGKPDISEYAGHNDAILIVVIPAMQAADVASSRALRLAKDIDPDGQSVSIASAQAGSVGSENSLETAWQAEAETLKSILTGAPRKKGLKSLIKGVLEMAKEPSRLCVEEVVEIATNALDVFKSDAKKMVVALVDMERAFVPPQHFIRLVQRRMERQRREDEVKNRSSKKAQDAEQSNKGSGTGSEQSGGALKSLKEKFSQQDKDKDAKEGPNLQVAGPGGEITAGYLLKKSAKNNEWSKRWFVLNEKSGKLGYTKKQEERHFRGVIVLEECNLEEIEEEELSKSLKDSKKANGAEKGPSLVFKITNRVAYKTVLKSHSAVILKAETIADKVEWMKKIRGVIQSKGGSVKGLNTPEGGSMRQSHSDGSLDTMARKPADPEEELRWMSQEVRGYVEAVLNSLAANVPKAIVLCQVEKAKEDMLNQLYSKISAQTNAKIEELLQEDHNAKRRREKYQKQSSLLSKLTRQLSIHDNRASVASYTNDSSGAARQRPQGIVVGPAKAGLGFTHRSPPANPRLTHRCSTTTQALPTCGTPAPTSPAGQPSSAEDRATPTGSSFSHRGCLLHRRPRLSRQAGLLHRTRLSRQSGLPPSAAPLTPSRPPSPPPAPLAPSRPLLPSAAPLCAKPVSDPSSKRCRADQMQPRRSAADATCAKLRGLRLHTVSHRHCHHRCCPGCLGPQPRQPPAPPPSSLEPPSPPCCRRRSPRCRPARRHELCRPRASPRRGSHRQQPCKHRRRRVVAAASSANVAPLLPPRCAGAAVLDAPQRHGLVRHQPHTLRLDPARGWLDPAKAELDPPPPCQDGPPPSLPQPPPFAASPRLRGVAALEGAPPLPSWLARRLSGGELRSRRASSGGGEEVLKEETAAGLWLKLEQICMTKDLTSKMHLKQKLFLHKLQDDGSVMDHLSAFKEIVADLESMEDKDKRTRKYIPKGKKEEEGKAAVVTDEKSDTELLVAYAGCAQTSDQWILDTACTYHMCPNRDWFATYEAVQGGTVLMGDDTPCEVADLCPQSDYDIEYMSRVPYSNAVGSLMYAMFGRSRDELVGYVDSDFAGDLDRRRSLTCYVFTIGGCAVM

SEQ ID NO: 149495 - protein, 94 aa, Oryza sativa
  Clone ID: PAT_MRT4530_49822C.1.pep
GPDEETLNKPPKFHRAERFGLLVKQPGGILAYLNDRSNRGDKHKTSDDSLGGIKVRRPRGPDILRVFLGGFFFLNKGGGENPGTWPGTGVPRGG

SEQ ID NO: 149496 - protein, 126 aa, Oryza sativa
  Clone ID: PAT_MRT4530_49823C.1.pep
FRKKKKKKKRGGGGGGEKKKKKKKKKKKKKKKKKKKQKKKNKKGATPLKKPKFSLPFFFHWSAPLSLGGRGGKPPGPPIFKPFCFGKPPFLSPPLLPFRPLPLFPPLGFPNLGPPLGPLPFNRAFT

SEQ ID NO: 149497 - protein, 154 aa, Oryza sativa
  unsure (1)..(154): unsure at all Xaa locations
  Clone ID: PAT_MRT4530_49824C.1.pep
MASINRPIVFFTVCLFLLCNGSLAQQLLGQSTSQWQSFRXGSPRECRFDRLQSFEPILSVRSQAGTTEFFDVSNEQFQCTGVSVVQRVIEPRGLLLPHYTNGASLVYIIQGRGITRPTFPGCAESYQQQVQHSGQAPLTESQSQXSQKFKGEHQ

SEQ ID NO: 149498 - protein, 157 aa, Oryza sativa
  unsure (1)..(157): unsure at all Xaa locations
  Clone ID: PAT_MRT4530_49825C.1.pep
MASINRPIXFFTVCLFLXCNGSLAQQLLGQXTSQWQSSRRGSPRECRFDRVQAFEPIRSVRSQAGTTEFFDVSNEQFHVXGVSVVRRVIEPRGLLLPHYTNGASLVYIIXGRGITGPMFPGCPESYQQQFPQSGQAHLDRRSKHSQKFKDXHQKIHR

SEQ ID NO: 149499 - protein, 100 aa, Oryza sativa
  unsure (1)..(100): unsure at all Xaa locations
  Clone ID: PAT_MRT4530_49826C.1.pep
LESYPSLHLQQQRQVQSTDLYQQRQHPHTQYGTHCSNTXNNTFYTLRINHNINNPNRADTXQIRAERIQISTPXNITILSLAHMTAHKVNIYHNELLSPF

SEQ ID NO: 149500 - protein, 109 aa, Oryza sativa
  unsure (1)..(109): unsure at all Xaa locations
  Clone ID: PAT_MRT4530_49827C.1.pep
MASINRPIVFFTVCLFLLCNGSLAQQLLCQSTSQWQSSRRGNPRECRFDRVQAFEPIRSVRSQAGTTEFFDVSNEQFQCTXGVSVVRPVIETYXLLLPHYTNGASLVYI

SEQ ID NO: 149501 - protein, 198 aa, Oryza sativa
  unsure (1)..(198): unsure at all Xaa locations
  Clone ID: PAT_MRT4530_49828C.1.pep
MVGGGAGADAGIDRVLWTEAEIAARVSEVAAELAADLRALREPAVVVGVATGAFLFLADLVRRVDAPLAVDLVRAESYGDGTESSGRPRITSDLKVDVAGKHVVVVEDIVDTGNTVSCLIAYLEKKGASSISVCTFLDXKPARRTANFQLVGDGKFYRGFECPDSFVVGYGMDYAELYRNLPYVGVLKAEMYKKDTSN

SEQ ID NO: 149502 - protein, 153 aa, Oryza sativa
  Clone ID: PAT_MRT4530_49829C.1.pep
GPRGCRFDRLQAFEPIRSVRSQAATTEFFDASNELFQCTGVSVGRFVIEPRGLLLPHYTIVASLVYIIQGRGITGPTFPGCPETYQQQFQQSGQAQLTESQSQSHKFKDEHQKIHRFRQGDVIALPAGVAHWCYNDGEAPAVAIYATDINTGA

SEQ ID NO: 149503 - protein, 981 aa, Oryza sativa
  Clone ID: PAT_MRT4530_4982C.1.pep
MEATAVSLARSVLDVVLSSVGPAVADEVARFLGVPKEVKFIRNELEMMQAFIKTASSSLHPDAAATAGGGDNDILRTWVKQVRDLAYDIEDCLLDFALYAARISSSPTGSSWLRPGPLAARGRIADRIRELKASVEELNQLRLRYHIVVDDHHHPSRTYHERVVAMLPGGHGSSSDELAFQESEIIGRAGEKEQLKDLISRCSGSPSPSVVAVWGMGGMGKSSLVRMVHNNPAVLDVFDCSAWVTVPHPLDGADEFRRRLRKQLGLGLGAAAGDDQNVIQDYLREKRYIIMVDDLLSQEEWDQIWQVLKPLNNKGSVVIVTTRRKDVAGHCAGLAPEEHGHVYELKRLDDKQSKDLLCRKVYRTPNYTLPEDMKPHISRILKGCWGLPLAISTIGGLLANRPKTGMEWKKLHEHLGVELESDQLQDITKVLVSSYHGLPYHLKPIFLYLSIFPENNEIRRTRLLRRWIAEGYIANNRDMPVEVVGERFFNELINRSMIQSSKVSHGLKVDRCRVHGMMLHIILSKSIDENQLFVIKKHCNEVPQSKIRHLVVNRWKKRDEKLENINLSLIRSLTVFGECPASLITLEMRMLRVLDLEDMANLKNEDLKHIGKLRHLRYLGLRGTDISKLPSSLQNLLYLETLDIQDTQVTQLPDGIAKLEKLRYLLAGVNFSRDLLQKMPQFGMENHNSNLLGNLASCLYCYNTQSCEISGMDQFSVMVPEGIEKLRNLHMLSVVNVRKSKDVAGKLERLTNLQRLGVTGLGQEEGKELWNSIKNLNRLQRLEVRSESLDFLVNNKDIDATPPKYLVSLRLCGLLDELPVWIKSLNDLTKVKLIGTQLKQDDIHRLKDLRILASLGLWEKSYKEKSLIFNDGTFRKLIFLDIDGLEIIETVNIEKGAMPELQQLWVNRCQKLSDDDNGLSGVLHLLNLNELVLKKCGPKEKLVQLLQSQLSTHVKRPKFLVGKSISPTSSEASTSTATQTG

SEQ ID NO: 149504 - protein, 74 aa, Oryza sativa
  Clone ID: PAT_MRT4530_49830C.1.pep
MEIAARPSLVQPPLVLAAAQGGKERRRQRERHATSRGDRDNGGRRGDDGGALLARRSRPGSRLARDGEEIGFGE

SEQ ID NO: 149505 - protein, 147 aa, Oryza sativa
  Clone ID: PAT_MRT4530_49831C.1.pep
MASINRPIVIFTACLFLLCDSSLAQHLLGQSTSQWQSSRRGSPRGCRFDMLQAFEPLQSVRSQAGTTEFFDVSNELLQCTGVSVVRRVIEPRGLLLPHYTNGASLVYIIQGRGITGPTFPGCTETYQQQFQQSGQAQLTESQSQSHK

SEQ ID NO: 149506 - protein, 155 aa, Oryza sativa
  unsure (1)..(155): unsure at all Xaa locations
  Clone ID: PAT_MRT4530_49832C.1.pep
MSYNNMASINRPIVFXTVCLFLLCDGSLAQQLLGQSTSQWQSSRRGSPRGCRFDRLQAFEPIRSVRSQAGTTEFFDVSNELVQWTGVSVVRRVIEPXGLLLPHYTNGASLVYIIPGRGITGATFPGLAETYQQQVQQSGRAPLTGSQSPSPIVQG

SEQ ID NO: 149507 - protein, 109 aa, Oryza sativa
  unsure (1)..(109): unsure at all Xaa locations
  Clone ID: PAT_MRT4530_49833C.1.pep
MTSQAATTTTTAAAAAAWTREDDKAFENPLAGCAVPPPVGRGAPPIPNVFSPLLPQRGPRCKGPRSEVLRHYEALVEDVAVIDAGRXVPLPSSTGRESPVPPNEPGPPP

SEQ ID NO: 149508 - protein, 87 aa, Oryza sativa
  Clone ID: PAT_MRT4530_49834C.1.pep
NNTITMALPLFKCPVFVTSYGAGLCSFFWPPPIFLWGGGGGPPTFPHLKYPFLTHNFFPPLTLSSYYPSTVLSNRPFPIVIVDGGAP

SEQ ID NO: 149509 - protein, 150 aa, Oryza sativa
  unsure (1)..(150): unsure at all Xaa locations
  Clone ID: PAT_MRT4530_49835C.1.pep
MASINRPIVFLTVCLFLLGNGSLAQQLXGQSTSQWQSSRRGSPRGCKFDRLKAFEPIRSVRSKAGTTKFFDVSNELFKCTGVFVVRRVIEPRGLLLPHYTKGASYRYNIQGXGIKGPTFPGCPENYQQKFQQXGKPKLTEXKSQSHKFKG

SEQ ID NO: 149510 - protein, 496 aa, Oryza sativa
  Clone ID: PAT_MRT4530_49836C.1.pep
MKQTRSSLLADDEDRPRWSDLPSELTEDIASRLLGYDVAEYLRFRAVCKAWRECTPHPRELDSRFRPRRWILLSSTSGDMRCRFLNIATGACIQVDLPEELAAGGQIQIECRTEGLLVLRDKVTDAIRLLNPLTKAVTDLPPITAAMANVIPEKRVHAEIPWSLIAYAGISDETSPPTVAIFLRDMRLNIAYAKAGDRHWKLLDDKAWSTFPSSISRSDGQQLRYVNYLSVVTLRGRIYLVTYQGNILKLSIRPRPQLIPIVKDQTKHSMWHGRVLCPNVVSYLVPPNDDDHRMLMVRYYGDLTHLTDHEQRCIKRRKKNDLIKLPSKNPCRYNWRILQVFEVDIVRKKLVRVDGIADDRAVFVGDVACVSLSIDRFPSILGNTVYLGMNSCCAVGFGLCHLKDRTVEPRLEHVLESGRKAPLLVDISLFHLGRIVPFARPCTLEEYLATNHLKEAQQMDELVDMACSTARWSGRTPSVTISDAACWMGKNPELFM

SEQ ID NO: 149511 - protein, 140 aa, Oryza sativa
  unsure (1)..(140): unsure at all Xaa locations
  Clone ID: PAT_MRT4530_49837C.1.pep
MVSINRPIVFFTVCLFLLRNGSLAQQLLGQSTSLWQSSRRGSPRECRLDRVQVFEPIRSERSQGGTTEFFDVSNEQFQCTGVSVVRRVIAPRGLLIPHYTSGVSLVYIIQGRGITGPSFPGCCESXQQQFQQIPARPIAR

SEQ ID NO: 149512 - protein, 81 aa, Oryza sativa
  Clone ID: PAT_MRT4530_49838C.1.pep
CQPSRPLVGGCRRFQFFVIRRGGEQPRRWGGARRVGKRRGWWASCVRGAEVEEGGSTETHIVGEGGGRGDTRLRRARGRVG

SEQ ID NO: 149513 - protein, 88 aa, Oryza sativa
  Clone ID: PAT_MRT4530_49839C.1.pep
YGPTLIWPFLAPFFVKFWGGTIFNFSMGFGIFWVAPKKFFFFLGKDFGWLAIILVPKFSPRGQKMFLLIQVEKVFLTKKRQTKKNKVQ

SEQ ID NO: 149514 - protein, 36 aa, Oryza sativa
  Clone ID: PAT_MRT4530_4983C.1.pep
ESGKRRRQAGASTFLSTMHDGQSRRPLRFKTYVCMT

SEQ ID NO: 149515 - protein, 231 aa, Oryza sativa
  Clone ID: PAT_MRT4530_49840C.1.pep
CFRSYCSFLARVVAWVLRRTAKLSIGCRSFSFNYLRDITIKSPKGPVLPAWVREIRLGLRRPLTQLGFTILNHGPILQLQISDLDIVLRQPAKSAKKKKPPPRKSTSTSPAKGKGKPKGQGKWRLITNIASLLSLSIVELRFKAPKAALGIKDLKIDLSKTGGLDPILNVEIHILPLFVQALEPDGIDNSTSVFSKLDWWVSGQYCSAMDTADCSSFLFEDIVLLCDLHQR

SEQ ID NO: 149516 - protein, 152 aa, Oryza sativa
  Clone ID: PAT_MRT4530_49841C.1.pep
MATKQSLLLLLALLAAAAAVASAVTDVEYCNKGKKYPVKVSGVEIVPDPVARGEPATFKISASTDKTIGKGKLVIDVKYFFFYVHSETRELCDVTSCPASGDFLVAHQQTLPSYTPPGSYTITMKMLGDNDEELSCISFGFSIGFAASEATI

SEQ ID NO: 149517 - protein, 101 aa, Oryza sativa
  Clone ID: PAT_MRT4530_49842C.1.pep
MARAALDLAARDKELTDSLVALMPLAGRRPSPSSGKASIRDEEEGRRIGERLSGGRWRRTGGWGSGGGGSAANSNGPTLLKWHTRKILFSHAGLLRTRTSK

SEQ ID NO: 149518 - protein, 61 aa, Oryza sativa
  Clone ID: PAT_MRT4530_49843C.1.pep
KVQAIAMADYSLGKLCSSRVESFHEEKEKVIKIEERLAYGARVIIQSSPLCEESDDSTESL

SEQ ID NO: 149519 - protein, 86 aa, Oryza sativa
  Clone ID: PAT_MRT4530_49844C.1.pep
HASATSFLPSGCFRRSTSRPPNRFAPRLDLSIPRQRPFDRLEMARTSFKLEHPLGLLLLLSRPITSLPCQFVAIRLQSVIRSMVWW

SEQ ID NO: 149520 - protein, 77 aa, Oryza sativa
  Clone ID: PAT_MRT4530_49845C.1.pep
MAIVCADRQIGSQCSLPYADQAQVEGAGTGSSSEVDEASEAPELCDMASKGERCERSEERGVVRGVRVVRVERASRV

SEQ ID NO: 149521 - protein, 134 aa, Oryza sativa
  unsure (1)..(134): unsure at all Xaa locations
  Clone ID: PAT_MRT4530_49846C.1.pep
MPGPGPAPAPPPXSSSSLYARPSLLDMERGRAARRADVDAFLASLGIDPGELAGLELHATIDVMRERVEFLHSLKRVEFLHSLGLSARRDDGGDIYPRRPXRRSCPRLRASRPCRQQWRRPPLSLPSSRRPRWL

SEQ ID NO: 149522 - protein, 146 aa, Oryza sativa
  Clone ID: PAT_MRT4530_49847C.1.pep
MASGAESCGSRGGESPPPPRTRGASAGGRRRKAEAYREVLRRIRGGGGALDDDELWAHFYSLPARHAWLHALNRYALDVNVERVDDVLLHKRLLDQAREPMNGLVFDVRRSQAATAEGSTEVEQSTSFKHEVQDPQCSSFTSRDQR

SEQ ID NO: 149523 - protein, 536 aa, Oryza sativa
  Clone ID: PAT_MRT4530_49848C.1.pep
MASGAESCGSRGGESPPPPRTRGASAGGRRFVCLCYREVLRGMRGGAESCGSRGGGGALDGLPLWASTASPRYALDVNVERVDDVLLHKRLLDQAREPMNGLVFDVRRSQAATLDGSTEVEQSTSFKHEVQDPQCSSFTSRDQRCFHEIIFACDDKPKLLSQLTALLGELGLNIQEAHAFSTSDGYSLDIFVVDGWSHEVDVLRDALRRGVEKIKYKAWPLVQSMPTRTGHELMEDSPPADFVQIPADATDVWEVDPRLLKFERKLASGSFGDLYHGTYCSQDVAIKVLKPERVSVDMLREFAQEVYIMKKVRHKNVVQFIGACTRPPILCIVTEFMRGGSIFDFLYNFRGTFQLPDVLRIASDVSKGMNYLHQINIVHRDLKTANLLMDDQVVKVADFGVARVKDQSGVMTAETGTYRWMAPEVIEHLPYDQRADVFSFGIVIWELLTGKLPYEDMTPLQAAVAVVQKDLRPIIPADTHPMLAGLLQKCWQKDPALRPTFSEILDILNSIKEAVRSSGHQKRHSGRSYSRQRRSG

SEQ ID NO: 149524 - protein, 76 aa, Oryza sativa
  Clone ID: PAT_MRT4530_49849C.1.pep
KKEWFFFLFLIYTNSEKALKANVCRQKGCLTKFYLLEKRKKRSLEKGQRPAGNWPFFSHFFHNIPGLNFFSNLSPL

SEQ ID NO: 149525 - protein, 113 aa, Oryza sativa
  Clone ID: PAT_MRT4530_4984C.1.pep
MRDTGAALLLAALLLLLASELATLGCGHRMTRADVAAWKRHALVAPTKKTTTMAASRAATTTTTFPIPTVAGTGDTAAALGDGQRTTTLSRYGVKIKLYYSKSSSGTVRAERA

SEQ ID NO: 149526 - protein, 125 aa, Oryza sativa
  Clone ID: PAT_MRT4530_49850C.1.pep
MVAHTSRAPTPKPAISLDVSPSMLGCPPPTTFYFQRELRGYLSFTTGERAAEQQRGGWLSAQGQPAWARSEATPARDAAATPAEMQALDRNPLQQSYMERLRATGSEGRLTDGRGAVRGEGEAAA

SEQ ID NO: 149527 - protein, 37 aa, Oryza sativa
  Clone ID: PAT_MRT4530_49851C.1.pep
YQMPPGRGGEHPPPCRDRNIKFNPYLGSSSLRGLGYE

SEQ ID NO: 149528 - protein, 806 aa, Oryza sativa
  Clone ID: PAT_MRT4530_49852C.1.pep
MFNQGLKDFRTPLEELLSVIQNASRKEGASTCYRMLVYLKYCFQGLAFPPGHGTIPQSRLHSVREELLQFLLEESKTSSTDVYKSFKSSSEKCPNICYLLWMDTEAALEVLKCAFAHERFEPRDNPSSTPDARVSEDGDNINIGSPDSENIMLQNVVDTIVDIVGLENEAIHSIVIGAAESEIWPSEKDFGYLIEFVSFFVSHKRAKASQRVVRHILRYLTSSNILSSDDKKTPTQKEKEVLQLFDAVPQTDWNSDYVLHICLDAHFHQACGLIYMTRKQNLPALESYMKDTLEPFHAFIFINKKLSELADYEASSFRSSVISHFPELVKLSRECAFVLVIDHFHDEIQKILSELHSDHHSLFLFLKTAIEVHLSGKLNFSELNARKNSTVELQYSSRELEFYIQRLSNLPKLLDRNPVIMTDEIVELYLESIATGSVPIIEHEGFYVSTSEDYGVTDAAAFLQERVGDVGSALALILAGLDEKINLFISSVENAFSGIASKSISEIEQPDIVLKMSEAHPVLDALRAAIGLCQRNSQRLNPEESQSLWFQLLDSFSEPLKKLYGSKDVNGKGVRSNGSETSNRQPKDKGFSRKTRISAYQRCLNALRRVFSQFVGEIIEAMAGHIPLPAIMGKLLSDNRSQEFGDFKLVIHRMLSMYLYEKRILETAKSVIEDDSFYTLSLLKRGVCHGLAPQTFKVLFQQYEYSVVDMQLISNVSLNKYEILNHLQRPQSLHIETVPPLRLSPPAIYHEKIQKRTTTMGESSKHSVRTEKPQRIWQMKEPRSKRSGNRVLPKSSMWSSQNNQVR

SEQ ID NO: 149529 - protein, 43 aa, Oryza sativa
  Clone ID: PAT_MRT4530_49853C.1.pep
RIFTFIIGGCIKMVTYFITLHFSFIFLYPYKTPYGHLHLTITY

SEQ ID NO: 149530 - protein, 35 aa, Oryza sativa
  Clone ID: PAT_MRT4530_49854C.1.pep
DKLKAERERGITIHISLWKFETTKYYCTVIDAPAT

SEQ ID NO: 149531 - protein, 95 aa, Oryza sativa
  Clone ID: PAT_MRT4530_49855C.1.pep
TNNIFPQKTLFPLFSPSFYTLPFKKNFYPSSYRSEFSGLTHGFKKLKFQQFVYFSFYRNLAQAQFFFFFNVPFKFCIYPRYFCAPSTITTLGVFF

SEQ ID NO: 149532 - protein, 100 aa, Oryza sativa
  Clone ID: PAT_MRT4530_49856C.1.pep
MAAAAAAAGLEEALRPFHDRASDAETRLAKLEALLLNKDGLTSGSETNSSAVKDLQSKLDAVNTECLAEKEKNKKLIIENEKLQYRITHLIRALKEADSR

SEQ ID NO: 149533 - protein, 54 aa, Oryza sativa
  Clone ID: PAT_MRT4530_49857C.1.pep
FYLDPPHPKFQQSHMMMYDFIFNIRTIILLQFSTRHPNYYSAPRSIATVGGAWH

SEQ ID NO: 149534 - protein, 510 aa, Oryza sativa
  Clone ID: PAT_MRT4530_49858C.1.pep
MASDSESPAAAAAPAKLPATPLAGFVSLLAARRFAAAKSLLASLVTPRLLAVPFADLAAASLPRAAPRHAVTAFYDMLFRAYADSGAAARAAEAFELTVSRLGGLDPRSLTSSLLSLRRAGHLDTAADLLKQAATSCPDSVTPLSASVVVDGYCKSGRVAHARQLLDEMPRHGVKVNALCYNSLLDAYTREKDDDRVAEMLKVMENEGIEPTVGTYTILVDGLSAARDITKVEAVFEEMKSKNLSGDVYFYSSVINAYCRAGNVRRASEVFDECVGNGIEPNEHTYGALINGFCKIGQMEAAEMLVTDMQVRGVGINQIVFNTMIDGYCRKNMVDKALEIKMIMEKMGIELDVYTYNTLACDMVEARRLFREMAGNGAEPSLVTYNVMMDGYIKKGSIREAERFKNEMEKKGLVPDIYSYAALVHGHCVNGKVDVALRLFEEMKQRGSKPNLVAYTALISGLAKEGRSEEAFQLYDNMLGDGLTPDDALYSALVGSLHTDKKQNVKPRTN

SEQ ID NO: 149535 - protein, 406 aa, Oryza sativa
  unsure (1)..(406): unsure at all Xaa locations
  Clone ID: PAT_MRT4530_49859C.1.pep
MAMAMAHVLVFPAPAQGRLGASAGGGAPSNFMFSPLGLRAGLALLATGTDGETLRQLLAFLGSQHIHQLNAASAGLLAEMRAWPQLSFAAGIFVDRSLRLRPEFQSTAAAAHGAFPRSVDFQNQADAVAAEVNGFISQTTKGRLTNVIPPGTLNSDTMCVLANAMHFKAKWARTFESWNTTQAMFHRLDDTTVRVPFLSDPXDALRRQGAKFEFHGLEFKVLQLFYKMVGRDGQVDFGFGAPCFCMLVFLPIKRDGLRHLLRMAVTEPDFVTRCVPRSRQIVTPCKVPKFKFSSQLDAGGALAQLGLGAPFDPDAADLSRMAVNTPPAGLYVSTMRQKCAVEVDEEGTTAVEAMYSPSSPGYSPGYQPPRPPPMSFVAEHPFMFAIVEYKKAQVLFLGHVMDPSKE

SEQ ID NO: 149536 - protein, 157 aa, Oryza sativa
  Clone ID: PAT_MRT4530_4985C.1.pep
MTLVHLPRSRMQELRSDGCVAFLERVTLFCNRYGLEFHEMDGVYVPYGRSQRFARNQTNDDHFRREVYIGIIDQISQEFDNHFDEVNMKLLSCMAALNPTNSFASFGTQKVEMVSALKIKIVDLGGHEFKDCCRNILMPLQSASICIETSYKMPLSS

SEQ ID NO: 149537 - protein, 830 aa, Oryza sativa
  Clone ID: PAT_MRT4530_49860C.1.pep
MACAALVAVAAILFFSTLTALADEREALLCLKSHLSSPNGSAFSTWSNTISPDFCTWRGVTCSIKLQERPRVVVALDMEAGGLTGEIPPCISNLSSLARIHLPNNGLSGGLTFTADVARLQYLNLSFNAISGEIPRGLGTLPNLSSLDLTSNNLHGRIPPLLGSSSALESVGLADNYLTGEIPLFLANASSLRYLSLKNNSLYGSIPAALFNSSTIREIYLRKNNLSGAIPPVTMFTSRITNLDLTTNSLSGGIPPSLANLSSLTAFLAAQNQLQGSIPDFSKLSALQYLDLSYNNLSGAVNPSIYNMSSISFLGLANNNLEGMMPPDIGNTLPNIQVLMMSNNHFVGEIPKSLANASNMQFLYLANNSLRGVIPSFSLMTDLQVVMLYSNQLEAGDWAFLSSLKNCSNLLKLHFGENNLRGDMPSSVADLPKTLTSLALPSNYISGTIPLEIGNLSSMSLLYLDNNLLTGSIPHTLGQLNNLVVLSLSQNKFSGEIPQSIGNLNQLAELYLSENQLSGRIPTTLARKGKSNEHIDHSYMELKKLTYSDVSKATNNFSAANIVGSGHFGTVYRGILDTEDTMVAVKVFKLDQCGALDSFMAECKALKNIRHRNLVKVITACSTYDPMGSEFKALVFEYMANGSLESRLHTRFDPCGDLSLGERISIAFDIASALEYLHNQCIPPVVHCDLKPSNVLFNHDYVACVCDFGLARSIREYSSGTQSISRSMAGPRGSIGYIAPEYGMGSQISTEGDVYSYGIILLEMLTGRHPTNEIFTDGFTLRMYVNASLSQIKDILDPRLIPEMTEQPSNHTLQLHEHKTALPNLSSEVS

SEQ ID NO: 149538 - protein, 931 aa, Oryza sativa
  Clone ID: PAT_MRT4530_49861C.1.pep
MVCAAIHIAVVAMLVSLTALAIADESDNNQREALLCIKSHLSSPEGGALTTWNNTSLDMCTWRGVTCSSELPKPRLVVALDMEAQGLSGEIPPCISNLSSLTRIHLPNNGLSGGLASAADVAGLRYLNLSFNAIGGAIPKRLGTLRNLSSLDLTNNNIHGEIPPLLGSSSALESVGLADNYLTGGIPLFLANASSLRYLSLKNNSLYGSIPAALFNSSTIREIYLGENNLSGAIPPVTIFPSQITNLDLTTNSLTGGIPPSLGNLSSLTALLAAENQLQGSIPDFSKLSALRYLDLSYNNLSGTVNPSVYNMSSITFLGLANNNLEGIMPPGIGNTLPNIQVLIMSDNHFHGEIPKSLANASNMQFLYLANNSLRGVIPSFGLMTDLRVVMLYSNQLEAGDWAFLSSLKNCSNLQKLHFGENNLRGDMPSSVAELPKTLTSLALPSNYISGTIPLEIGNLSSISLLYLGRIPSTLGSCVRLESLRVGGNFLEGSIPQSLANLRGTKVLDFSQNNLSGAIPDFFGTFTSLQYLNMSYNNFEGPIPVDGIFADRNKVFVQGNPHLCTNVPMDELTVCSASASKRKNKLIIPMLAAFSSIILLSSILGLYFLIVNVFLKRKWKSNEHMDHTYMELKTLTYSDVSKATNNFSAANIVGSGHFGTVYRGILHTEDTMVAVKVFKLDQCGALDSFMAECKALKNIRHRNLVKVITACSTYDPMGSEFKALVFEYMANGSLESRLHTKFDRCGDLSLGERISIAFDIASALEYLHNQCIPPVVHCDLKPSNVLFNNDDVACVCDFGLARSIRVYSSGTQSISTKYGMGSQISTEGDVYSYGIILLEMLTGRHPTNEIFTDGLTLRMYVNASLSQIKDILDPRLIPEMTEQPSNHTLQLHEHKKTVPSRCKLGGVEGILTCTIREIASKLGGLRLSMLT

SEQ ID NO: 149539 - protein, 611 aa, Oryza sativa
  Clone ID: PAT_MRT4530_49862C.1.pep
MASTGALLLLLLFVLACGGNGGAAAAVFSGCSFESQEEAEAFEAALLQQACFNVTAFGGGGGGGGGEGGCVSRLDTARGGAGSGPVPVLRAAVRDTLGEAVGAVAAVAGLASLSNHAREEMAVRDCVELVGYSVDELGWALDAMADPDGGVAAAEEEDETEPETRRRRRRGARAEDDIHAWLSAAMGNQGTCLDGFHGTDSRLLRRVESAVTQLTQLVSNLLAMHKKLRDITPQHQHQHHHHPGNNNNKNGTADGAAAGGDDTGPSSDLPPWVTDVVNDVEEEVTATRGRGRSSSSGRKAMRVDVVVAQDGSGRWRTVSEAVARAPSHSRRRYVIYVKRGVYEENVEVRKKKTNIVIVGEGMGETVITGSRSMAAGWTTFRSATFAVSGAGFIARDMTIRNTAGPAAHQAVALRVDSDRSAFFRIAVEGHQDTLYAHSLRQFYRDCRVSGTVDFIFGNGIAVIQRTTISTLPPAAGQNAGSVTAQGRRDPNQNTGFALHACIVEAKYPTYLGRPWKPFSRVVVMESYLGAGVQPRGWLEWDGDGGELATLFYGEYRNYGPGANIGGRVRWPGYHVIMDAAVAVRFTVRRFIDGLAWLPSTGVTFTADLNRK

SEQ ID NO: 149540 - protein, 199 aa, Oryza sativa
  Clone ID: PAT_MRT4530_49863C.1.pep
SSPEGGALTTWNNTSLDMCTWRGVTCSSELPKPRLVVALDMEAQGLSGEIPPCISNLSSLTRIHLPNNGLSGGLASAADVAGLRYLNLSFNAIGGAIPKRLGTLRNLSSLTGGIPLFLANASSLRYLSLKNNSLYGSIHAVPVSGQQLFERGDSFFRLDDRFAGRHAVLKPVRSWRLGIPVILEELLQFAETLHQCSNG

SEQ ID NO: 149541 - protein, 1044 aa, Oryza sativa
  Clone ID: PAT_MRT4530_49864C.1.pep
MACAALVAVAAILFFSTLTALADEREALLCLKSHLSSPNGSAFSTWSNTISPDFCTWRGVTCSIKLQERPRVVVALDMEAGGLTGEIPPCISNLSSLARIHLPNNGLSGGLTFTADVARLQYLNLSFNAISGEIPRGLGTLPNLSSLDLTSNNLHGRIPPLLGSSSALESVGLADNYLTGEIPLFLANASSLRYLSLKNNSLYGSIPAALFNSSTIREIYLRKNNLSGAIPPVTMFTSRITNLDLTTNSLSGGIPPSLANLSSLTAFLAAQNQLQGSIPDFSKLSALQYLDLSYNNLSGAVNPSIYNMSSISFLGLANNNLEGMMPPDIGNTLPNIQVLMMSNNHFVGEIPKSLANASNMQFLYLANNSLRGVIPSFSLMTDLQVVMLYSNQLEAGDWAFLSSLKNCSNLLKLHFGENNLRGDMPSSVADLPKTLTSLALPSNYISGTIPLEIGNLSSMSLLYLDNNLLTGSIPHTLGQLNNLVVLSLSQNKFSGEIPQSIGNLNQLAELYLSENQLSGRIPTTLARCQQLLALNLSSNALTGSISGDMFVKLNQLSWLLDLSHNQFISSIPLKFGSLINLASLNISHNRLTGRIPSTLGSCVRLESLRVAGNLLEGSIPQSLANLRGTKVLDFSANNLSGAIPDFFGTFTSLQYLNMSYNNFEGPIPVGGIFSDRDKVFVQGNPHLCTNVPMDELTVCSASASKRKHKLVIPMLAVFSSIVLLSSILGLYLLIVNVFLKRKGKSNEHIDHSYMELKKLTYSDVSKATNNFSAANIVGSGHFGTVYRGILDTEDTMVAVKVFKLDQCGALDSFMAECKALKNIRHRNLVKVITACSTYDPMGSEFKALVFEYMANGSLESRLHTRFDPCGDLSLGERISIAFDIASALEYLHNQCIPPVVHCDLKPSNVLFNHDYVACVCDFGLARSIREYSSGTQSISRSMAGPRGSIGYIAPEYGMGSQISTEGDVYSYGIILLEMLTGRHPTNEIFTDGFTLRMYVNASLSQIKDILDPRLIPEMTEQPSNHTLQLHEHKTALPNLSSEVS

SEQ ID NO: 149542 - protein, 87 aa, Oryza sativa
  Clone ID: PAT_MRT4530_49865C.1.pep
MEGKSRRPEITVVPAAGGGAAAVVDAVKAENKDPFIPGSPSLASGAGMESLSRHEGVVMFLAAWKLDALCQESGSLPAVMRARLPYF

SEQ ID NO: 149543 - protein, 256 aa, Oryza sativa
  Clone ID: PAT_MRT4530_49866C.1.pep
MAQLLRRHLPVILSLILFLSKATADANFTVSRAAYYPNSDIKGTENGACEYGAFGATLNNGDVSASASLYRDGVGCGACYQVRCTNPYYCSPNGVTIVITDSGASDGTDFILSQHAFTRMAQSTDAGTALLTLGVVGIEYRRVSCTYPNKNIVFKITESSNFPNYLEFEIWYQQGNQDIIAVQLCETVNLTCQLLSRTHGAVWAAVSPPSGPLSIRMLFSSGAPRGGDTWLVPTNIVPQNWTAGATYDSGVQVQLQ

SEQ ID NO: 149544 - protein, 80 aa, Oryza sativa
  Clone ID: PAT_MRT4530_49867C.1.pep
DAWRTRGEKFNVVSAVSQPTDLSSQRGSPLPAPNPILFVSSTTYKVFHFTLFLLLAPGFLSRLLFAVGVAPLATMEVLRR

SEQ ID NO: 149545 - protein, 82 aa, Oryza sativa
  unsure (1)..(82): unsure at all Xaa locations
  Clone ID: PAT_MRT4530_49868C.1.pep
FLKCVHALYYGMERVFMFYNNGGETREATVAEARSSXARAPRRGRRRCPRWHCRRRRSXPPPAPXPPHTINFLSFSXPDPKL

SEQ ID NO: 149546 - protein, 71 aa, Oryza sativa
  unsure (1)..(71): unsure at all Xaa locations
  Clone ID: PAT_MRT4530_49869C.1.pep
LISLFFLLILDFIFNFILNIKXISYWVLYGLFSQYSLFLISNLSYFKIVLLFGLSFLFSNFGFYFIFIPIL

SEQ ID NO: 149547 - protein, 66 aa, Oryza sativa
  Clone ID: PAT_MRT4530_4986C.1.pep
MAKGKDVRIRVILQCVSCVRKGANEESAGISRYSTQKNRHNTPGQLELRKFCRYCRKHTIHAEIKK

SEQ ID NO: 149548 - protein, 101 aa, Oryza sativa
  Clone ID: PAT_MRT4530_49870C.1.pep
IITKIGLQVITCLVLVLLIQEWYDDVFCENVVGVSAEEEGEHVVDDGALGVLRLARGGPCGWGAPLGLCGAGSGASVWSSASVRRLGLRRLPIYCPRAAAA

SEQ ID NO: 149549 - protein, 73 aa, Oryza sativa
  Clone ID: PAT_MRT4530_49871C.1.pep
RYSFFLLLGHSFAPRVVSLWLQCAHVGSISQDSNHKVCCTSSRKNLSPLKISVLVRNLLNHSNYIFKSVQALL

SEQ ID NO: 149550 - protein, 164 aa, Oryza sativa
  Clone ID: PAT_MRT4530_49872C.1.pep
MDLEFGRGMRSPQRDSWKTTLLLAYQSLGVVYGDLSISPLYVFKSTFAEDIQHSETNEEIFGVLSFVFWTLTLIPLIKYVSIVLRADDNGEGGTFALYSLICRHANVSLLPNRQIADEELSTYKLECSSERTDKSCIKVWLEKHKKLHTALLIMVLIGTCMVIG

SEQ ID NO: 149551 - protein, 1101 aa, Oryza sativa
  Clone ID: PAT_MRT4530_49873C.1.pep
MESASSSLATSGRRRSSSGGGGGSWGSIGSAADPFDIPAKGAPVESLKKWRQAALVLNASRRFRYTLDLKREEQREEVISKIRAQAHVVRAAFRFKEAGQVHVQQKEVAAPPVDGALGFGIKEDQLTALTRDHNYSALQQYGGISGVARMLKTDTEKGISGDDSDLTARRNAFGSNTYPRKKGRSFLAFLWDACKDLTLIILMVAAAVSLALGITTEGIKEGWYDGASIAFAVLLVVVVTATSDYKQSLQFQNLNEEKQNIKLEVVRGGRRISVSIYDLVAGDVVPLKIGDQVPADGILISGHSLSVDESSMTGESKIVHKDQKSPFLMSGCKVADGYGTMLVTAVGINTEWGLLMASISEDSGEETPLQVRLNGVATFIGMVGLSVALAVLVVLLARYFTGHTYNPDGSVQYVKGKMGVGQTIRGIVGIFTVAVTIVVVAVPEGLPLAVTLTNLIPVLICVRLAFSMRKMMRDKALVRRLSACETMGSATTICSDKTGTLTLNQMTVVEAYFGGKKMDPPDNVQVLSASISSLIVEGIAQNTSGSIFEPENGQDPEVTGSPTEKAILSWGLKLGMRFNDTRTKSSILHVFPFNSEKKRGGVAVHLGGSESEVHIHWKGAAEIILDSCKSWLAADGSKHSMTPEKLLQISEFKKFIEDMAASSLRCVAFAYRTYEMVDVPSEDRRADWILPEDDLIMLGIVGIKDPCRPGVKDSVRLCAAAGIKVRMVTGDNLQTARAIALECGILSDPNVSEPVIIEGKAFRALSDLEREEAAEKISVMGRSSPNDKLLLVKALRKRGHVVAVTGDGTNDAPALHEADIGLSMGIQGTEVAKESSDIIILDDNFASVVRVVRWGRSVYANIQKFIQFQLTVNVAALIINVVAAVSSGNVPLNAVQLLWVNLIMDTLGALALATEPPTDHLMQRPPVGRREPLITNVMWRNLIIMALFQVIVLLTLNFRGTSLLQLKNDNQAHADKVKNTFIFNTFVLCQVFNEFNARKPDELNIFKGITGNHLFMAIVAITVVLQALIVEFLGKFTSTTRLTWQLWLVSIGLAFFSWPLAFVGKLIPVPERPLGDFFACCCPGSKQAADAKGDDADHSDV

SEQ ID NO: 149552 - protein, 64 aa, Oryza sativa
  Clone ID: PAT_MRT4530_49874C.1.pep
YTNTNNYLCELMHFKQNVNVISEVKTIWENQIYKFYRAQTRTVTLRREALLVKKNAWMDCTFWL

SEQ ID NO: 149553 - protein, 287 aa, Oryza sativa
  unsure (1)..(287): unsure at all Xaa locations
  Clone ID: PAT_MRT4530_49875C.1.pep
FTGHTYNPDGSVQYVKGKMGVGQTIRGIVGIFTVAVPIVVVAVPEGLPLAVTLTLAFSMRKMMRDKALVRRLSACETMGSATTICSDKTGTLTLNQMTVVEAYFGGKKMDPPDNVQVLSASISSLIVEGIAQNTSGSIFEPENGQDPEVTGSPTEKAILSWGLKLGMRFNDTRTKSSILHVFPFNSEKKRXXVAVHLGGSESEVHIHWKGAAEIILDSCKSWLAADGSKHSMTPEKNSEFKKFIEDMAASTFGCVAFAYRTYEMVGCPSEDRRADWILPGDDXIMLG

SEQ ID NO: 149554 - protein, 327 aa, Oryza sativa
  Clone ID: PAT_MRT4530_49876C.1.pep
MELIVSSITGDLTSRLISFLMNKFLDNLYSGEKVKRLEQLLQRVHMVVEEADGRYITNRCMLTHLKTIVAAMYSGYHVLDTIKYMKNNKGANDLVNNSSALSFATPLKRSRTTTICPETKNKFSMELQGALKNIETVIGDINEFVILLTGCERMSHRPYDTYLYIDNFMFGRHVEKQHLINFLLENNNIGPPPVLPIIGGRGVGKKTLVTHVCNDDRVRSHFFFIFHINGENLGEITENKNMSERTLVIVEFVSDVDDNDWGTFHSSLMSLNRGNKVIILTRIKKLERFGTVRPITLDRMVHEEYRYLLKTLTFGSANPMDYHNLFQ

SEQ ID NO: 149555 - protein, 384 aa, Oryza sativa
  Clone ID: PAT_MRT4530_49877C.1.pep
MEGASEGAVEGSVVGRTEVPAEDSVAHKLTRGERMIGIFLSALASAIEAMDVLDTLVVRFHIKGEFVIEVREKKYVRSVEALSYIARDKVPFGEILAHLREYYKEPKIVELCDNSYDDSDYEADMEVDSEEECEEMAADVEAEQAKGKEQEAIQNDAGGLKGKSVMECAQDERMFVAVEIEKHYKEVKKVKTVQLESLDDVLFEEQRYKPTMQASEDDGNETPYGGGEDEQSVEELGSDGEVRIRQDKQPRYKKKDGVHTFEHAMKFNCKKQFKKAITKYALVEKNAIDFVKDDQKRVLPINGELLCAIGRDGNNQMYPIAWVVAAKDNNEEWDWFIDLLCGDLQVGTGQGNSQYLCKLEETFPRQVVPEEVLYMCKGPMEDAV

SEQ ID NO: 149556 - protein, 183 aa, Oryza sativa
  unsure (1)..(183): unsure at all Xaa locations
  Clone ID: PAT_MRT4530_49878C.1.pep
GRDRRIHRREAGGDESWRRTPAARKGGNGGGTTRIQFKEVGASPGFKESISSVGWGRATPWRSGDERRPPGAGGDGGKPMAGGGEARGFVYAHSGALPSYRASXRRERASEKGERREELPSRDGHCDEQPTARXELSGIGPGKGRXRVPGVPRHASSHAPVSPVLGGGRRLREQRKGDNRAVE

SEQ ID NO: 149557 - protein, 79 aa, Oryza sativa
  Clone ID: PAT_MRT4530_49879C.1.pep
SPGCRNSARGRERELVSSFFFFFLQLKVAMRLKYFHDCICNFTRLAPMDTMGNELLPIFYKYINKTDTLMSDRPHHFIT

SEQ ID NO: 149558 - protein, 43 aa, Oryza sativa
  Clone ID: PAT_MRT4530_4987C.1.pep
QASTPVHVSKKGSTLSYVCRTKRESSNKMYRCTNRGYYIGILK

SEQ ID NO: 149559 - protein, 366 aa, Oryza sativa
  Clone ID: PAT_MRT4530_49880C.1.pep
MEALLSSPRALFSVTPTACWPASARRRRRVASPVKAAAAAAEPAGEEKKPATGGAAAAAGDGQAAAPAPKKILKKKPVYSMKKGQIVRVDKEKYLNSINGLDYIYEDRGELIKPSSKNIFVLATVIILFVITVQVLDIRIFETGEYALIWTSESHSYVWTDRLGWNPNSTGMAANLHAHQVWATVDGPLGLPLEEAEGHARRFFLWGFACLPFLWAINCCYFWPVLRSPATFPSSAAFSRIRPYVVRSAIGFTIFSVVLLTWATTFIIGGERLFGPGWNDLVMYNVADKLGITTGLITKPKQEQQIEPSNGRSTIQPSCRHGHELIVTRDRERFNSEEEARKYAGEFTCLAAGTGLFTGQPRRRRR

SEQ ID NO: 149560 - protein, 155 aa, Oryza sativa
  Clone ID: PAT_MRT4530_49881C.1.pep
VEQFQKELGALVEEKEVAAKTFDDDKEKMKMESEYLKRRLEEIHDNKDFMKTENNKLQSEALIVEKKQIMFEAEIKRLKMELGAVTEAKEVAAKAFNAQNEEITKKLEDLKRKLEEIQTNKDLVEGETNELQPEVFATEEKNSLSEARDKCLKQI

SEQ ID NO: 149561 - protein, 84 aa, Oryza sativa
  unsure (1)..(84): unsure at all Xaa locations
  Clone ID: PAT_MRT4530_49882C.1.pep
GDIVRKDPPCRLSSTPPPSRPAPXMTPPRPPPLAPPPPPRXPPPRWPHPAXPPPPSRTLLPLVSPSPSPSPLHAAAPLLSPSTG

SEQ ID NO: 149562 - protein, 994 aa, Oryza sativa
  unsure (1)..(994): unsure at all Xaa locations
  Clone ID: PAT_MRT4530_49883C.1.pep
MLPSADEEGEKPKDGKKRQGRGAMVFCHFGPNVSALPFEREEEKQDTGVNAPLLDGLRKLAQNTMHSSSSSPSSSVEIIDADAFRSRSTDPDHRRADAAAADSPFPRSVADHIASSLRTQEAVDAVCKKYGVLAEFAARPAGDLRACSAPPPGAACVYARALEAGMRLPLHPFACELLRHLGVAPSQITPNGWRVVAGFLLLSHHAAAPPSLAVFRRFFRLFLSKLNGWYHFRGKRGAGADGVLFTGLPKLKGWKGGFFFVSSPSPWPCQVRWGGPPPSKSSTAEPVLSGEEMELAGKLLHLHGGAAVDLRTYLCESNLAAVFSSNLAGAAPPQPPPPRPARAKGKFPFSGEFNAQKVKTEPESDMPWWSPLSGKKRGFEAEENNPPPSPTPTPPAPHGGSWSWSASGMCSPPPGFAAHVPDKHDGDSADWKAARQLLQAIVTPSRERRFPAAKPSDVVASSYLTLLQAANYASFSFGYALELEEKLRARERDAAAEADAVRKELEEKALRELAAAKAAAVQEYLRSDEHRRELAAHALEGAKKELKNALVELDNKTYDSGLFDSEWKIRYEMEKEMENIYIQEEIWWQRRVAEKRRGNLILQGDANTTFFYKPCKWKMVRPFSSNEVDKVMKTMKNNTASSPDGLPVGFYKQMWPHIRVLVKEMLDDLHMGELDIDMINYGVISPLPKISDANTIKQYRPIYLQNVTFRMIEVANKVISWSQTAFIPRRNILEGCFILHEVMYELKIKRDTGIILKIDFEKAYDRVKWDFLYEVMEKTNFDSIMVGWIKNITEDGRVSININSKQGHFFKTYRGLRQGDHLSPILFNLVGDALAAILDKAKEWGVLEGLVPNLVDGGLTHLQYADDTILFIKNSDENILALKFLLFCYEEMSGMKINYQKSDVYVIGVEDSEGLRIANMLNCKIGMMPFTYLSLPMGVDRIGMRDISPIFQKVEKRLXSWKSGYMTYGGREIKINSCLSSAPMYAMGFYLLLE

SEQ ID NO: 149563 - protein, 1108 aa, Oryza sativa
  unsure (1)..(1108): unsure at all Xaa locations
  Clone ID: PAT_MRT4530_49884C.1.pep
MPIKRLEIEKVTAQDAVLAFKNDGIGLLHAAACQGQLNVCKFLVEEWGGDVNMAGAQGLTPVMAAAESDAVPILKGXLDHGGDVTNADVIGGTVIHHPAETSXWMETELSLSKAIPVKIDSDLGTPLFHAANDDKDKTPNILMYHNAAXKLGIGVLHAAACQCHLIVCKFLVEELGGDVNIAGKEDITPFMAAAEFGDIPTLEYFRNHSGDVTKGDVRVXNIPERCGCGIISHAKVKDIRPMTIDHGPTTVLYTNRSICRLLMGDGEDAQSDGNRSRMMRPNWEKACYRWSAGHMLLKEYKQLWDALMDAQKLDPGSVEIEKEQREYDIQESKDVVESKVGLYDKPTASYGVKPPNVSSVMGKTQIDTCKDVVFLKEEVEKRMRLDVSGSFFVYQMSTLEAGIPLSSYAGKTWNGNIDMDGLIVVHGRVRIKKKPWKGLNSSKMNSDCTKLTSMIREMFVKKNVHPPYLKHLLGKLEALAVDVFTVRQQLAFDYHISLIPSLNRVNLVYQIKRCYDGWDDREKMYFRFVADNCTVPEDWCNTLMSKHLFRLVILEGQKRNIIYGSNGMSAFHLVRNYNTHAPEHSWIHVFVDSKIEHYQWFQCDSGIELMVPKYLGDFLAEAVFKFIEDEFDLTHVKPNITKCNSGIPTLLRHNFHEGSECNSHDKLSSPFDGMGQKVMPSETFDRSVVYVAIIYGEALDRLASSSAMCSNGDFSVCSQVTRINEFMDRPTCISKCGKSDHDVKTHGLSLILHINAVLALNKHGIGVLHAAACQGHLNVCKFLVEELGGDVNIAGKEDITPFMAAAESGDVPTVEYFLDHSGDVTKADVRGCTVLHHAAGTDLWPISFIAGCCKSNVIVNNGAGSPLMSSLIYRSLKCMKLLIKAGADVNGKGTVVTPLMLAASQGGYTNFIQFLLKAGANPNIPDDLGWLPIEHAALRDCREEVEMLFPLTSPIPNVPNWSVNGIIAHAKVKNTKPMDQHQKESRKVVLKAQADLVFKQKNYAAAAKIYDLAIAHGPTAVLYANRSICRLLMGDGEGALSDAYRCRMMRPNWAKACYRQGAAHMLLKEYKHACDALMDAQKLDSGNVEIERELRKARELMAKPPDEQ

SEQ ID NO: 149564 - protein, 101 aa, Oryza sativa
  unsure (1)..(101): unsure at all Xaa locations
  Clone ID: PAT_MRT4530_49885C.1.pep
VRHQYGIRESPFLQXXGFXXRKKKVWQKLGLGGQQFHYKDINIVXEKGQKXQLHQFGDFYFDGNLGQAQALLVFKVPFKNGIYPRDYGGPRKITTLGVNKK

SEQ ID NO: 149565 - protein, 43 aa, Oryza sativa
  Clone ID: PAT_MRT4530_49886C.1.pep
SILEWFFHHVTFSILFLACDLLYVCLARLHSSCQHSFLQFSRS

SEQ ID NO: 149566 - protein, 140 aa, Oryza sativa
  unsure (1)..(140): unsure at all Xaa locations
  Clone ID: PAT_MRT4530_49887C.1.pep
RQQRGAAARAVTAVRTELRRRLPVPHVATTSSRPATVLSLLRARGQCGSLLHPRRLCFSIAPVAAAKPEAVGTTGEAAAAPVEELAKSLQGVQGVEXFHLQKHKMFSYSTFAAPPPSQQLRTAAAAIAGLADPCRCRQWS

SEQ ID NO: 149567 - protein, 151 aa, Oryza sativa
  unsure (1)..(151): unsure at all Xaa locations
  Clone ID: PAT_MRT4530_49888C.1.pep
MNANFTLYSSYIDYTASLYRRCNGTGIVFAYVITLCHDDDIRVVSGXLGVVSKLLGMIIWXYMLRKRGESLMVTGQYGYSSACVYSPKLISWGGYSSVFSSGCMVMTTCRKELGSQGWLLEVPGGHRKEDGDEMTNMKTKLLIRSNGKCQW

SEQ ID NO: 149568 - protein, 84 aa, Oryza sativa
  unsure (1)..(84): unsure at all Xaa locations
  Clone ID: PAT_MRT4530_49889C.1.pep
PSRRRLCAAAPPPSLPRRASPSPCAAVEPEEAADPSEGQDPQDLEQGKSSLFFDHVDPNCEIXFLFTNKIACDDEHPIYDYAMP

SEQ ID NO: 149569 - protein, 455 aa, Oryza sativa
  Clone ID: PAT_MRT4530_4988C.1.pep
MAMELSFTVHRREAVLVGPSVSTPCETKRLSDIDDQESLRYHVPGLLVYRGGQPPAPCVRDNDPSGIIRAALSRALVHYYPLAGRLREVEGRKLVIDCSGEGVVFVEADADVRLEEMEAAAAGGHGLRPSFPCVDQLVPDVRSSGRGGSVLSCPLVGIQVTRLLCGGFIVGTAVNHSVCDAMGIVQFLNAVADIAGGLPAPAVHATWSRELLDARSPPAPAFPHREYDMIDILPGGGREADNIVRSFLFSSTDIAALKEEALLPHPEHRLRGGSSTATSFEVLAAFLWRARTAALEVPADEEVRLVAVVGFSRIAALGLPSGYYGNTCAYPTVVMTAGELLRGCTLGDVVRLVQEAKAAVTAEYVRSTAECLVLRRRPRLARTNLFVVTDVRRVGFDRVDFGWGDPVYGGPARALPTVSLLVNVKGSSNVVGAVVSLPSLVMGRFSAELESFLNT

SEQ ID NO: 149570 - protein, 755 aa, Oryza sativa
  Clone ID: PAT_MRT4530_49890C.1.pep
MAGLGMLVEALRDNFGAFIGSLVDFWSDCHNKVARSIKAIMSSTTCGFRSNDLIERINKDVLTTNALFVANAFLVVILVGAGSYGRRYRHIALNRYLFLGASTLVLPILSYVVSYVGRDKYYNLFHGLECVDNRAFCLLLWAALLPMVGMNTSSILTAVHNGNEELPDIIISTLLGLGFIKIILKFVAYGRARRSFAMGQNPSLIAGYMEELYRLQVSEVAEVTIQRLLALVVMGEDKQQIEKGPHGYHFKRSTFSQNGTSAMTSNGNLVTIDKVWHLAEMNDALLGPRPALKHLCMSFSLFKLLRRRFARYPLVEAGSEKAFHFVRGILLTDGADADPEAVFRVITDELSFAWDFYYSSHPISHLGKWLPIMSIMTSLFTMAFCIFIVITLAWKILPEYKDYRVMSCELTCGEQDNDRFHDIGSILFVLVPTISLLLVVLLGEVWEIISYVCSNWTKVTLVCAYTAKPSWQKSRIMRRLIACFLWCRCKLMNYWGDKMGMTSLLDPCKRKGHIRHLFRLSKAMKPTKIPKPVKAALINSLKGSNGQLSNGIASLQKCHLRDDIRWACNGEGTSDIILVWHIATCIFEIRHMHDPSERHSSPDENDDMITAIHLSKYCAYLLASCPELLPDDTPWSKELYKSAKKITDSVLGSTDMRCFEFDRMMQLLSEKSKSNEVVCKGVQLGKQLVDGIQNENKGWNMLAEFWSEMMLYVAPSDNTKAHAKAIARGGELITILWALLTHAGIIRRPEHDNVV

SEQ ID NO: 149571 - protein, 71 aa, Oryza sativa
  Clone ID: PAT_MRT4530_49891C.1.pep
FFFFLTKMTAHIYLHELGNQRGILTSSILSACVLYNAGFDLLSHATSRSLSRTPQWGESRGAGAGGGSSRG

SEQ ID NO: 149572 - protein, 34 aa, Oryza sativa
  unsure (1)..(34): unsure at all Xaa locations
  Clone ID: PAT_MRT4530_49892C.1.pep
HNNTXFISVNTLNRETHIXYLITISCNYNTVNTT

SEQ ID NO: 149573 - protein, 82 aa, Oryza sativa
  Clone ID: PAT_MRT4530_49893C.1.pep
RPQAQVASHRSRVEKERSGAPSAVGGSDPVALALSTSAAAAAAAAARALSVSFTTARGYSLFFDISDVNLLIPLFPTLFVFF

SEQ ID NO: 149574 - protein, 381 aa, Oryza sativa
  unsure (1)..(381): unsure at all Xaa locations
  Clone ID: PAT_MRT4530_49894C.1.pep
MSSTLMASCCFIISYKRPRPIIATFVPFLLLLFFFAVVVAASSSSNGTAAALHPGEELLRLERVRAQLARSPDGDVIDCVPSHLQPAFEHPRLRGQKPEEPPSARPTETTRRRRRRRRSHAHGGGGGEHREEEDDGEHGLRQAWWAAGEACPEGTIPVRRTTEADLLRASSAAAAGGRFGMKPRGVGVVGGAARRDSTSSGHEHAVGYMSGGQFYGAKASLNVWPAKVASPAEFSLSQIWLISGSFGNDLNTIEAGWQVSPQLYGDNNPRFFTYWTNDAYQETGCYNLHCSGFVQTNSRIAMGAAISPISSFAGRQFDITLLIWXDPKQGHWWLQLGSGALVGYWLSFLFSHLGARADMAQFGGEVVNTRPSGSHTPTQMG

SEQ ID NO: 149575 - protein, 612 aa, Oryza sativa
  Clone ID: PAT_MRT4530_49895C.1.pep
MASCCFIISYKRPRPIIATFVPFLLLLFFFAVVVAASSSSNGTAAALHPGEELLRLERVRAQLARSPDGDVIDCVPSHLQPAFEHPRLRGQKPEEPPSARPTETTRRRRRRRRSHAHGGGGGEHREEEDDGEHGLRQAWWAAGEACPEGTIPVRRTTEADLLRASSAAAAGGRFGMKPRGVGVVGGAARRDSTSSGHEVSATSPQLQLPLPTDSDKPYCRAGVHRRYRWPSHVPHSQPRHGPTRLGPCRDGPKARWAIHAVGYMSGGQFYGAKASLNVWPAKVASPAEFSLSQIWLISGSFGNDLNTIEAGWQVSPQLYGDNNPRFFTYWTNDAYQETGCYNLHCSGFVQTNSRIAMGAAISPISSFAGRQFDITLLIWKDPKQGHWWLQLGSGALVGYWPSFLFSHLGARADMAQFGGEVVNTRPSGSHTPTQMGSGRFPGEGYGRAAYFRNVQVVDWDNNLIPAAALRLLADHPACYDIAGGQGAAWGRSREAVAACGVGAAAGRRGGGSASSSDGKQISDTMLALSCQPLWPPDSWTTRGGAGRVMAFVALSCATVVMGGAIYGYDISTAGGVSSMESFLRDLLPEVLRRMAGAGAGARRVSNYCKFDS

SEQ ID NO: 149576 - protein, 85 aa, Oryza sativa
  Clone ID: PAT_MRT4530_49896C.1.pep
QTKDTCLRRGLMERQIRTCQKELPLGYSTRNPRCLSWIGHCSDLRAISWFQVPTSKKGALQNHEFCRAAGIAGAWTWSHYSYYMN

SEQ ID NO: 149577 - protein, 462 aa, Oryza sativa
  unsure (1)..(462): unsure at all Xaa locations
  Clone ID: PAT_MRT4530_49897C.1.pep
MQRRRAQTWAGVGKTAQAAAAHAALFCFTLLLALKVDGRTAYSWWIIFIPLWLFHGIVARGRFSMPAPSLPHGRHWAPCHSIVAAPLLIAFELLLCIYLESLRVKSKPTVDLKIVFLPLLAFEVIILADNFRMCRALMPGDEESMSDEAIWETLPHFWVAISMVFLIAATTFTLLKLSGDVGALGWWDLFINYGWFNPMIHKSPNPGEASSSSAAIRYRDWESGLLLPSLEDHEQERLCGLPDIGGHVMKIPLVIFQVLLCMRLEGTPPSAQYIPIFALFSPLFILQGAGVLFSLARLLEKVVLLLRNGPVSPNYLTISSKVRDCFAFLHRGSRLLGWWSIDEGSKEEQARLFYTESTGYTXVCGYPLEVVTNLSEARLGAGVWRLXAALGEQSEITKCTKXQEFERLQNEKVLCRICYEGEICMVLLPCRHRTLCKTCSDKCKKCPICRVPIEERMPVYDV

SEQ ID NO: 149578 - protein, 1707 aa, Oryza sativa
  Clone ID: PAT_MRT4530_49898C.1.pep
MPPKKTVKERVVRRKEGDVEDEMLAEEGAEPSASTGEAGTVPTPVAPTLPSSAPTSSIEAEAVKAEAAAKADVIFSSQVAGGPSTAVFAQPASTSTAITTSQANTNLEAQAEADMEAMRQNMTKLQDTLRQMQEQQQAYEAARQAKAHTQQFYAQPQVLSPYAMQASVYFAKPAPAIAARPTPQMIPAPVRPAAPQAQYPKPATTLFGVTPQAMMEAASTLQAQFQAFLQQLNQPHNNIPRNSSPATAEGGPSQAPPQSQAWNQAMFDPATARQATSTDQQNQAVMFGMGHQSTAQPQVQAVASLFTPPYPQLNWPSQQGATTKPGGEKGLPLSWGIKSHPIPPQFKFPPVPRYSGETDLKEFLSIYESAIEAAHGDENTKAKLYSLEQLRSVFVLNFRGTYEEPKTHQDLLGICQRPGESTREYMRRFSQARCQVQDITEASVVNATSAGLLEGELTRKLARKEPKTLKHLFRIIDGYARGEEDTKRRQEIQAEYDKAAAAAAATSQANAQAQVPPQVASSAPVLVQPTLPANQGQHPRSNQAPITWRKFRTERAGKAVMAVEEVQALRKEFDSQQAGGQQQPFHKKVKKQCNAQAPRQQQGRVEEAPREAIPNQAPQVEQRQDVRRRVIQVITRSDPPSQVSKWQKKMQLRTVHNIVSAEDGAPRYLSQPISFGPEDAEGVLFPHQDPLVVSAEMAGFEVRRILIDGGSSADVMFAGTYAKMGLPTLALSQAPTSLRGFGGETVQVLGQTLVKVAFGLQENRREEEILFDIVDIPYNYNAIFGRGTMTKFEAVSHHNYLKLKMPRSTGVIVVKGSQPSTATVAPFGREVHTVEVISLGGDLSEQEIDNTMVVLKKNIDIFAWGPDEVGGVSPDLIMHHLAVKPEARPKKQKLRKMSADRREAVKAEVNKLLKAGVIREIDHPEWLANPVLVRKSNGKWRMCVDFTDLNKMCPKDDFPLPRIDQLVDSTAGCELMSFLDAYSGYHQIHMNPADIPKTAFITPFGTFCHFRMSFGLRNAGATFVRLVYKVLGSQLGRNVEAYVDDIVVKSRKAFDHSSDLQETFDNLHAIGMKLNLDKCVFGVRVGKLLGFLVSERGIEANPKKIDAIQQMKPPSSVRQVRKLTGRIAALSQFLSKAAERGLPFFKTLRGVGKFCWTPECQKAFDEFKQYLQSPPTLVSLVAGSELWLYLAASPVAVSAALVQETEVGQKPVYFVSEALQGRRARMPVEQPWVMHLDGSWSHKGAGIAAILTSPGDVLICYAARLQFDTTNNTAEYEAVLTGLRKAKSLGVRRLLIRTDSKLVASQVDKSFEAKEEGMRKYLEAVRSMEKTFASITVEHLPRGQNEEADALAKLAACGGPHSLGVFFEVLYSPSVPTESQHIMAIDQAELGEDPDDWRTPFVKHLKEGWLPDDEPKAKQLQIRTAKYKIISGQLYRTGILQPMLRCVSFSKGEEMPIAPIWPFARWGLDIIGPFPVARNGYKFAIVAIEYFSRSVEAEPLGTITTAAVQKFVWKNIVCRFGVPKEFITDNGKQFDSEKFREMCEGLNLQIRFASVAHPQSNGAAEWANGKILEALRMTPTRPTKFSPFMLLYGEVAMTPAELGSNSPRVMFSGGENGREVLLELLQGVRVEALQHMSKYAEGTSATYNKKVRPTELWPGHLVLRKKANPVAVGKLDSKWEGPYLIKHKSLTGSFRLATLEEEEFDHS

SEQ ID NO: 149579 - protein, 105 aa, Oryza sativa
  Clone ID: PAT_MRT4530_49899C.1.pep
MAGNGRRTKQAMSSQRPGRHQRRASQSVFVLPDNFADLDDVPAGAGGAGEDGRKGAAATADAAGGQQQARPSPAARHRRAMSVAVASSRELEMIKEDMGSYKIGA

SEQ ID NO: 149580 - protein, 230 aa, Oryza sativa
  unsure (1)..(230): unsure at all Xaa locations
  Clone ID: PAT_MRT4530_4989C.1.pep
VFRYVWFRFCSCICTYWFQCLVEKTNKLYLSFSLGFALHAXHVVNELTLTKERFEKKYKVAFCACSLFNVLSAXRIKQHKYVLVSPNCSKCFLNEMRLKDALGRVEYMEDLVKADEVLSCSXLSQRTMVFWLMMKIKKEREIAFAKRQWQKQGCGLRSLVRPTLNRRLGPGRLQVQLRSDRPRGDFARNSNRIFVKRQGKFSEKNEYRILGNSIDDKAVFTVTSGQSESM

SEQ ID NO: 149581 - protein, 1940 aa, Oryza sativa
  unsure (1)..(1940): unsure at all Xaa locations
  Clone ID: PAT_MRT4530_498C.1.pep
MAKTMEQGRREVRDHVGALPSQRPLGRRMQGEEYMPKGDDFAIASSPPRGPKKLFRPIKPRGYWADDCPTXHQGPMNLNYTMYPCKCPFXKGNHLSFRQQLAPTVGTSERNHXERMPPKKVVKEKVTRRKESDAGTDMAAEEGAEPSAPVAEDGGAPSASAPAPSLPPSAPTASVQVPNAADMAKVAAVARALQTRTEILSTSQLLVPQAAPSXPAVAPTALAAAQAQVNLDPETQTEADMEAMRQNMRRLQDMLRQMQEQQQAYEAARRSKVTSAPILQYSAGYVPPQVYPQVPTQPLPPQAAQAPMYFAGQPSTAAAHPAPHVQLQAQPVAAQVHPQPPGQVPHTMAEGASALQAQLQAFLQQLSQPHNISSTAPSAHPEGNTSHGAPSWLPSNQPGLGASPWSQGLQFDSINVAQAPTVRLQTPTPGFGAKQAPNQVTMTWSQPTFDPSMAAQQTSPIGAGQPNAMAQPHAQVVILPFATPYPQQGAVNRAGGEKGLPLSGGIKTHPIPPQFKFSPVPRYLGETDPKEFLSIYESAIEAAHGDENTKAKVIHLALDGIARSWYFNLPTNSIYXWEQLRDVFVLNFRGTYEKPKTQQHLLSIRQRPGESIREYMRRFSQARCQVQDITDASIINAASAGLLEGELTRKIANKEPQTLEHLLHIIDGFARGKEDCKRRQAIQAEYDKASVAAAQAQQQVQVAEPPPLVVRQPQPAIXGQLPRQGQAPMTWRKFRTNHAGKAVMAVEGVQALRKEFDAQQASNHQQPVRKKYLNQQISFEPEDAEGLMFPHQDPLVISADIAGFEVRRVLVNGGSSADVIFAEAYAKMGLTTQAFTPAPASLRGFGGEAVQVLGQAQLMVAFGTGENRRAEQVLFDIVDIPYNXNAIFGRATLNKFEAISHHNYLKLKMPGPAGVIVVKGLQPLAASKGDLAIINRAVHNVEAEPHDRAKHVPKPAPHSKIIKIXIDDADPAKLVSLGGDMGKEEAENILEALKKNIDIFAWGSDEVGGVSTDLIMHHLAVKPDAKPRKQKLRKMSADRQQAAKAEVQKLLKAGVIQEIDHPEWLANPVLVRKSNGKWRMCVDFTDLNKACPKDDFLLPRIDQLVDLTASCELMSFLDAYSGYHQIHMNPADIPKTAFITPFGTFCHLRMPFGLRNAGATFARLVYKVLYKQLGRNVEAYVDDVVVKSRKAFDHASDLQETFDNLRAAGTKLNPEKCVFGVRAGKLLGFLAAERGLPFFKTLRGVEKFHWTPECQAAFGELKQYLQSPPALISLAPGSELLLYLAASPVAVSAALVQEIDSGQKPVYFISKALQGAKTRYIEMEKLAYALVMASCKLKHYFQTHKVIVPSQYPLGEILWGKEVTGRLSKWAAELSPFDLHFVARTAIKSQVLADFVAEWTPALAPEPEPVKQPWVMYSDGSWSHKGAGIAAVLISPSGVPIRYAARLQFDTTNNAAEYEAILLGLRKAKALGVRRLLIRTDSKLVAGHVDKSFEAKEEGMKRYLEVVRSMEKCFTGITVEHLPRGQNEEAXLAKSAACGGPHSPGTFFEVLFAPSVPVESLEVMAIDXEKLGEDPYDWRTPFVKHLETGWLPEDEAEAKRLQLRATKYKMVSGQLYRSGVLQPLLRCISFAEGEEMAREIHQGLCGAHQAARTVASKVFRQGVYWPTVLKVCVEQVKKCESCQRHGRSQTSPQYELQPIAPIWPFARWGLDIIGLFPVAXNGYKFAIVAVEYFSQWIEAEPLGAITSAAVQKFVWKNIVCRFGVPKEFITDNGKQFDSDKFREMCEGLNLEIRFASVAHPQSNGAAEHTNGKILEAXKKRLEGAAKGKWPEEMLSVLWALRTTPTRPTKFSPFMLIYGDEAMTPTELGANSPRVMFSGDEEGREVSLELLEGVRVEALEHIRKYATGTSATYNKKVRPMXAVAWSSCPKEEGEPGSRWQA

SEQ ID NO: 149582 - protein, 81 aa, Oryza sativa
  Clone ID: PAT_MRT4530_49900C.1.pep
NFLNENLDEDVYMTQPKGFVDPESAKRIGQLPKSIYGLTKASHSRNIRFDEVVRHWGFVKNEEEPCVYKKNSGNAPVFLIL

SEQ ID NO: 149583 - protein, 63 aa, Oryza sativa
  unsure (1)..(63): unsure at all Xaa locations
  Clone ID: PAT_MRT4530_49901C.1.pep
TSCSIFPLNKSYRHLLIFVQLFTNSKWQPHRYXPPMEIIALVVEGSWGFKTYSLQKHPPLFNV

SEQ ID NO: 149584 - protein, 74 aa, Oryza sativa
  Clone ID: PAT_MRT4530_49902C.1.pep
DNTCAISIARDPIKHELTKHICVDASYTRTQVHDQVVALQYVPSELQLADFFTKAQTRAQHRFYLSKLSVVDPP

SEQ ID NO: 149585 - protein, 64 aa, Oryza sativa
  Clone ID: PAT_MRT4530_49903C.1.pep
VDDQASFEHAADWVEECLEDALRGTLRKLQFSTNRPAWINLKRMLVEIVLSEMLQRILAEPGQS

SEQ ID NO: 149586 - protein, 370 aa, Oryza sativa
  unsure (1)..(370): unsure at all Xaa locations
  Clone ID: PAT_MRT4530_49904C.1.pep
FSICKSNLNYIFLVVIKSYFIYIVQKETQTAQDQYTGIPIHHRRLCSSEXKXVIEWLEKRLANWXGKLLLLRGRLTLINLVIISLSIYMMFFFEIHKGVINKIDYFQSRFFWQEDGHKRKYRLXKVRHHRKDQGGXGIQDLEIKNKILFSKXLYKLLTIDGVWQXMLRKKYLESQPSHWKTRESHFWASLMKAKPDFHIFDSFNIKDGSQVRFXEDKXLGNAYLIEQYPCLYNVVRHKHATISEIFHTSLLSFSXRRDLTGSKLVACNHLLSHIANIXISHNQDEFKWNLTTDDRFSVKSLYLVLVHTDVPXYKLXIWKIKAPXRLKIKIFLWYLYQGVVLIKDNLIKRNGRGTCSFCRKDETINHLFFD

SEQ ID NO: 149587 - protein, 74 aa, Oryza sativa
  Clone ID: PAT_MRT4530_49905C.1.pep
MAMTRVAIRGGPSLRTGEGTAHDVAPTRRPHGSHVGGRTDGPDLPSAATRGGDRPAAEGDSVTATRAAEQRLSG

SEQ ID NO: 149588 - protein, 333 aa, Oryza sativa
  Clone ID: PAT_MRT4530_49906C.1.pep
MQEALVSPVRSALELKPFNFGDQRLASSPRYLPSGDDALYRCSSPFSPSFGFSSPSPLATSVSLSPSSSASLVDDGDDGGAAADATGQRLQLARLALQYQEVADRYELCLSHLAEAAEEAAALRLENAELRVTNSDLALRLALLSGKHTAAVAVADEIRRLRLGEQKVAAATKERTPEKLAVLPKSISVRSTSYLKLNQQSQAATATSAAPNRKPRTSSNPTNPPNSQRAYDGGKKGDEQKAQPADSGAELEVYNQGMFKTELCNKWEETGDCPYGDQCQFAHGVTELRPVIRHPRYKTAVCRMVLAGDVCPYGHRCHFRHSLTPAERLLLRS

SEQ ID NO: 149589 - protein, 716 aa, Oryza sativa
  Clone ID: PAT_MRT4530_49907C.1.pep
MALDNRSEGRAPPPAAAASPPARSGEREGSSNCRRRLPSCQIWQKGGLLQLLSPSRLLREPDAYRGLPPQSRWNTATATSYQISTKVSKSQEELRALKFDRVWRPSPHRSESDGGSCSYRNSIQRVVTASVAAASTSSTTLVFPSSGSVTSSSSASFTSSAPGSEAHGTPSSGPESYRLLRGEAFRGLSEIASHMVSDRYTERLITEFSRPRLGSGSGGGGGGDEILQTWFSDLGVDWVLRVDEMNLQEKPWSGVEEMIKGWLAALTVMAEALRLTKATLSSGDGDSGGVIPVLPIEKYRPQISAPAWIDDDHAGVTLHDVSPGSGSSNLDQESSDPAPNTSRSRSIAIATVKQAITAYSQAASSRSYRYDQHGAAGPEFQFALFAKASLVKMMCFPDAIAALSRSPEKILRVIDMYAVVSGVSPSLLALLPGATKWLVSERITAVLKTLSGMMRGILHDLESLIREEDSWRTTAQGNDIHPVNQYVLNYINLLLENRDVLNPVLQNRDVLVQEGEDDDGDDELFSIGELYQLAEEKSSLTSTVARLINSVDAMIEDRSKMYAAAGGRMHIFLLNNDHFILQQAEPSLQSFMGAYWYAKRKQRVDRRIKEYLDLSWGNVVSCLGYAGQSRRRSSLFRSVSALVEFNSLLQITYHTEKLWKINSPQLRTVLRNSVCGKVISAYRAYLETQGQGGQLGTSATYTPEDLEDMLQNLFEG

SEQ ID NO: 149590 - protein, 134 aa, Oryza sativa
  Clone ID: PAT_MRT4530_49908C.1.pep
TLLLFLPTCRSPSSAGRRPCPRRWRRRQRRAAAAPRPSGGPPAAARGGAAAAPSPRRLATPTPCPCPSTRRRPTRASRSSRTASQASTPSHSSPLPQPPPPFSYPNRHLRRRYGAGASATPRPRAWLSIPPVAR

SEQ ID NO: 149591 - protein, 85 aa, Oryza sativa
  Clone ID: PAT_MRT4530_49909C.1.pep
MTSGVYALYILLPYLEICIFRSTAEFLLVCLEQRGPWGTRSTMGGSHIMVNYYTLLGHCFTFLGDDDDDDQWCCDDYEQHGEGRR

SEQ ID NO: 149592 - protein, 91 aa, Oryza sativa
  unsure (1)..(91): unsure at all Xaa locations
  Clone ID: PAT_MRT4530_4990C.1.pep
KESTLNQVLRFRGGIQMLVXALPGETISLQVDRSDPIDNVVAKIQWKEGFPSDQQSLFCSGKQLEDEGTLAESNLQKKSTLRLVYRAVVVK

SEQ ID NO: 149593 - protein, 132 aa, Oryza sativa
  Clone ID: PAT_MRT4530_49910C.1.pep
MRRRRRFLGAATTPAAAEASRREQQAGRGGSSIGHNRRFAKVQLPRLEQIVKEPTLQQVKQMAEEMLPQKSMAQLLETREVTDERQWTAKCLHVHGGEPAEDLHLGRLGRRRSPCLREVAGDRQRNWKRVET

SEQ ID NO: 149594 - protein, 136 aa, Oryza sativa
  Clone ID: PAT_MRT4530_49911C.1.pep
MAALLGRRFGMAAAALIALAALGSAASGTASKSSFVKSTVKAHDVVIFSKSYCPYCRRAKAVFKELELKKEPYVVELDQREDGWEIQDALSDMVGRRTVPQVFVHGKHLGGSDDTVEAYESGKLAKLLNIDVKEDL

SEQ ID NO: 149595 - protein, 148 aa, Oryza sativa
  Clone ID: PAT_MRT4530_49912C.1.pep
MAIEATFFPTRKRALDTGDQEGSSAVSDLVGHGFEEEDYSVVDYGMGIGRDDQERIFAVDLASVVDGDQEIDQGLFRFGPLGSVIPYSCQCVRFFVNKEISNPRETVAWATRDLPCRFKCGGGGWGATHKCAWQRPFLRLLSCDVAAE

SEQ ID NO: 149596 - protein, 166 aa, Oryza sativa
  unsure (1)..(166): unsure at all Xaa locations
  Clone ID: PAT_MRT4530_49913C.1.pep
WETRCQATRAARSIAAPRPPLASPPRRPSTSSHLHTAPAPLSSPPAPPPPLASPPXSTPSRRGAAPPPPPEAVPTPRRRPSPPHRASTPSRRGAAPPPPPEAVPTPRRLPSSLHPCRPRPAPPPRRRRTPTPXRRPRPPLPPRRPRPPTPRAARPQPPPPVTIAVI

SEQ ID NO: 149597 - protein, 50 aa, Oryza sativa
  Clone ID: PAT_MRT4530_49914C.1.pep
PTVSLRGHGHMNTTCCMHAGVTVDPEFLFLSFFFRTTGHCQCWPPAASAG

SEQ ID NO: 149598 - protein, 103 aa, Oryza sativa
  Clone ID: PAT_MRT4530_49915C.1.pep
MAPALLYPTILFLAAAAVGAAAPPHSQCLDNPPDLTTAGGGGEAGVVVHDLGGFEAYVTGAVHSRRTILLATDIFGFEAPLLRYNLLLRLYNREIAVCTINLL

SEQ ID NO: 149599 - protein, 38 aa, Oryza sativa
  Clone ID: PAT_MRT4530_49916C.1.pep
EHQLRVGGGHLWRGGGGREGEGGRLTGGGSGDDGGGDG

SEQ ID NO: 149600 - protein, 42 aa, Oryza sativa
  Clone ID: PAT_MRT4530_49917C.1.pep
WLHVPNNRTVRYVIQPLNSLDHDRSFYQLQTTALNFMHSTTR

SEQ ID NO: 149601 - protein, 747 aa, Oryza sativa
  Clone ID: PAT_MRT4530_49918C.1.pep
MDLETIKILLRYPRGSVEYLAGVDGFLEFAYKDKLEDTKIYCPCETCVHTMLLSKNDVYDHLVCNGMLQSYNQWDFHGESSEEQIRNQQPQPHNEDMRANMHELINDSLRTVYDDMPMSDSADSPCTHTDGPNLEAQAFYELVKDSKKPLWDGCELSHLSLLVLLFNMKSMNKWSDKSFGDLLDILHMAIPNGKELPKNFYEAKKVVSKFGLDYQQIHACPNNCQLFWKEKVNDDFCSTCKASRWKDKKPETKLTKKERKKATPIKVLRYFPIKERLKRLFMCRETASLPRWHDEERLVEDGVLRHPADSPAWKNFDKRFKQFASDSRNIRFGLATDGFNPYALGMLASHMVHGEFACPPCGPNVWSKRLAHGKKSCFMGHCRFLPPNHEFRFDRNSLDGTTEISTEPMTYYGRLVLDEINSIGDFKKSKTYKAEMNIRGELHPQQRTSSKFYLPPASFTMSKSEKQLFCKVLRDIKVPDGYSSNISRCVNSAEGKIHGLKTHDCHVLMQQLMPIALRGILPNEVTSVLFDLSAYFRGICSKVLHVDELDRLEEAKITLCRMEMIFPPRFFTVMVHLVVHLATECKIAGPVCYRWMYFIEREHAANLQRKKRKRLTPKNIENMQNEQFPDWFRDHILQLENQRGIDSIDEDIRWLARGPIEIEHEPFVFANQVDQVFYIEDHLNPGWSIVRKMKPRDVFELGEEWNDVECEPYHVNNLGELFDSAHDGQTWIRRDIEGTTVNNIVTN

SEQ ID NO: 149602 - protein, 652 aa, Oryza sativa
  Clone ID: PAT_MRT4530_49919C.1.pep
MDLKTIKILLRYPRGSDEYLAGVHGFLEFAYKDKSEDTKIYCPCETCVHTMLLSKNDVYDRLVCNGMLQSYDQWDFHGESSEEQTRNQQPQPHNENMRANMHELINDAFRTVYDDVPMSDHADSPCTHTDGPNLEAQAFYKLVKDSEKPLWDGCELSHLSLLVLLFNMKSMNKWSDKSFGDLLDILHMAIPNEKELPKNFYEAKKVVSKFGLDYQQIHACPNNCQLFWKDKVNDDFCSICKASRWKGKKPETKLTKERKKATPSKVLRYFPIKDRLKRLFMCRETASLPRWHDEERLEDGALQHPTDSPAWKNFDERFKQFVSDSRNIRFGLATDGFNPYEGKSKDNLQARLDLKEMNIREELHPQQRTSSKFYLPPASFTMSKSEKQLFCKVLRDIKVPDGYSANISRCVNYAEGKIHGLKTHDCHVLMQQLMPIALRGILPDDVTSVLFDLSAYFQGICSKVLHVDELDRLEEAIQITLCRMEMIIPPRFFTVMVHLVVHLATECKIAGPVCYRWMYFIERYLGKLKSYVRNKARPKGSIAESYLADECMAFCSRYLEGFPTKHNLPSRNNDKPDQFETPMSRQESTLFPPVGKPLGKPSVYSLTGREKLQAHREHAADLKRNKRKRMKPGINLTRANVPSLRDNTLAPA

SEQ ID NO: 149603 - protein, 124 aa, Oryza sativa
  Clone ID: PAT_MRT4530_4991C.1.pep
MGPFRYANIIGVVVQQDGANDINIIPLDFLSSTPFPVTPISLTPSCLRTLLRPFVSATSPSPHRDSAGTTRSAPKFHAPPNSMRCRTESEDGRPLFPILKPSRMLPLLAAVVPQRCLGNENLEE

SEQ ID NO: 149604 - protein, 864 aa, Oryza sativa
  unsure (1)..(864): unsure at all Xaa locations
  Clone ID: PAT_MRT4530_49920C.1.pep
MDLKTIKILLRYPRGSDEYLTGVHGFLEFAYKDKSEDTKIYCPCGTCVHTMLLSKNDVYDHWVCNGMLQSYDQWDFHGESSEEQTRNQQPQPHNENMRANMHELINDALRTVFDDVPMSDHADSSCTHTDGPNLEAQAFYKLVKDSEKPLWDGSDSPAWKNFDERFKQFASDSRNIQFGLATDGFNPYGMLSSTYSCWPVVLVIYNLPPWLCMKEPNLLMPLIIPGPKSPGDNIHVFLQPLLEDLRDIFFNGISTYDASRDETFNLRAAVLWTINDLPALGMLASHMVHGEFACPPCGPNVWHMGKKSCFMGHRRFLPPNHEFCFDRNSFDGTTEISVEPITXRPVLDEINAIGDFKKSKTYKAISSLFTLPYWDGNLLRHNLDVMHIEKNVCDNIYGTLLNLEGKSKDNLQAGLNLKEMNIREELHPQQRTSSKFYLPPASFTMSKRKIHGLKTHDCHVLMQQFMPIALRGILPDDVTSVLFDLSAYFXGICSKVLHVDELDRLEEAIKITLCRMEMIFPPGFFTVMVYLVVHLATECKIAGPVCYRWMYFIERYLGKLKSYVRNKARPEGSIVESYLAAECMAFCSRYLEGFPTKHNLPSRNNDKPDQFETPMSRQESTLFPPVGKPLGKPSVYSLTDREKLQAHRYVLYNCDAVVPYLKEHVADLKRNKRKRLTPKNIEDMQNEQFPNWFRDHILQLENQRGIDSIDEDIRWLARGPIEVAKRHRAFNTRGYRFRSKRYDRVTQNSGVVVTAKTSSYTSASDTNPVLGDIMYYGRIEHEPFVFTNQVDQVFYIEDHLNPGWSIVRKMKPRDIFELGEERNDVECEPYHVSNLGELFDNAHNGQTWVQRDIEGTIVDNMVTN

SEQ ID NO: 149605 - protein, 870 aa, Oryza sativa
  Clone ID: PAT_MRT4530_49921C.1.pep
MDLETIKILLRYPRGSVEYLAGVDGFLEFVYKDKLEDTKIYCPCETCVHTMLLSKNDVYDHLVCNGMLQSYDQWDFHGESSEEQIRNQQPQPHNEDMRANMHELINDALRTVYDDMPMSDSADSPCTHTDGPNLEAQAFYKLVKDSEKPLWDGTDSPAWKNFDKRFKQFASDSRNIRFGLATDGFNPYGMLSSTYSCWPVVLVIYNLPPWLCMKEPNLLMPLIIPGPKSPGDNIHVFLQPLLEDLRDIFVNGISTYDASRNETFNLRAAVLWTINDLPALGMLASHMVHGEFACPPCGPNVWSKRLAHGKKSCFMGHRRFLPPNHEFRFDRNSFDGTTEISTEPMTYYGRPVLDEINAIGDFKKSKTYKAVSSLFTLPYWDGNLLRHNLDVMHIEKNVCDNIYGTLLNLEGKSKDNLQARLDLKEMNIRGELHPQQRTSSKFYLPPASFTMSKRKIHGLKTHDCHVLMQQLMPIALRGILPDEITSVLFDLSAYFRGICSKVLHVDELDRLEEAIKITLCRMEMIFPPGFFTVMVHLVVHLATECKIAGPVCYRWMYFIERYLGKLKSYVRNKARPEGSIAESYLADECMAFCSRYLEGFPTKHNIPSRNNDKPDQFETPMSRQESTLFPPVGKPLGKPSAYSLTDREKLQAHRYVLYNCDAVVPYLKEHAADLQRKKRKRLTPKNIENMQNEQFPDWFRDHILQLENQRGIDSIDEDIRWLARGPIEVAKRHRAFNTRGYRFRSKRYDRVTQNSGVVVTAKTSSYTSASDTNPVLGDIMYYGRIEHEPFVFANQVDQVFYIEDHLNPGWSIVRKMKPRDVFELGEEWNDVECEPYHVSNLGELFDSAHDGQTWIRRDIEGTTVDNMVTN

SEQ ID NO: 149606 - protein, 92 aa, Oryza sativa
  Clone ID: PAT_MRT4530_49922C.1.pep
ILNASITNSNTAIEIRNFLGEKKVRKVDMLEGVTILRSEKVKDELVLDGNDIELVSRSAALINQKCHVKNKDIRKFLDGIYVSDKGTITEDQ

SEQ ID NO: 149607 - protein, 202 aa, Oryza sativa
  unsure (1)..(202): unsure at all Xaa locations
  Clone ID: PAT_MRT4530_49923C.1.pep
RRRGQGADVESSRGFRHMMRERQRREKLSQSYADLYAMVSSRSKGDKNSIVQSAAIYIHELKVARDQLQRRNEELKAQIMGHDEQQPCVTVQFEVDEPSSSIDSMIAALRRLKGMSVKARGIRSSMSGNRLWTEMNVETXQIAACEVEKAVEEALKEVERNQPDSDAPFPFFCPCRYNHTNNSFLSFPLPTSTLALPFSLSH

SEQ ID NO: 149608 - protein, 327 aa, Oryza sativa
  Clone ID: PAT_MRT4530_49924C.1.pep
MESYYGAFHADEAAFFFPHHVPASPELPFGLIASPEPEPEPEQAAAEARQSAFQEYGGAVHAGAPAAAGAVTTGGTNIHRRVMDVLGRMGGGGGGGEKGEGEEMEEEEEVPQRRRRGQGADVESSRGFRHMMRERQRREKLSQSYADLYAMVSSRSKLQNVRNPPLIPLKWSVYYTGADTKPFSPLQGDKNSIVQSAAIYIHELKVARDQLQRRNEELKAQIMGHDEQQPCVTVQFEVDEPSSSIDSMIAALRRLKGMSVKARGIRSSMSGNRLWTEMNVETTIAACEVEKAVEEALKEVERNQPDSDAPFPGSKGWTQTSHVQNVF

SEQ ID NO: 149609 - protein, 58 aa, Oryza sativa
  unsure (1)..(58): unsure at all Xaa locations
  Clone ID: PAT_MRT4530_49925C.1.pep
LKTFSCLKGHLANSFAPFPKGCFFSNLLGGLKVFXNPKNKGASVSAKKKKIFGATLKG

SEQ ID NO: 149610 - protein, 98 aa, Oryza sativa
  Clone ID: PAT_MRT4530_49926C.1.pep
MKPMPRQLSSSSNRDNSRFCMPPFGQALLLLLLCFVCHAGSCTEQERESLLQFLSGLSNDGGLGVSWQNGTDCCTWEGITCSGNGAVVEVISLASRGL

SEQ ID NO: 149611 - protein, 81 aa, Oryza sativa
  Clone ID: PAT_MRT4530_49927C.1.pep
NINEKKKKKKKKKKKKKKKEKKKKKKHIKLSKKKQKQKSNKKRKGTKKNIQLYKQKKDRLEPNNFYKGTAKMLRNKAIKRR

SEQ ID NO: 149612 - protein, 61 aa, Oryza sativa
  Clone ID: PAT_MRT4530_49928C.1.pep
RVIMSMASPDTSIAMAAYGDRAPLLESAGLGILEGCWGGWALGRRPKSRMSARWENGKAKE

SEQ ID NO: 149613 - protein, 731 aa, Oryza sativa
  Clone ID: PAT_MRT4530_49929C.1.pep
MPVKNCFSYNSVITSHLNSRDHHAALNIFRSMPERNTFSWNTIITGIVSTGNLDMARSLLIEMPVKDPVACNAVLHRYVRRGRADEAFALLRTVGQCSGADASSPWNDPFVLATIVGACADWMKYDFGRQAHARMVVSKIEQDLVLSCALVNMYCKCGDLDSARYVLNGLTQVDEFSLSALIYGYASCGHLHEAIRLFDRKEEPSIAMWNSLISGCAFACCGNDAFALFARMMRSDVLPDSSTYASILNVCGFSVMVNPGQQIHGCGLKCGAVNDIIVASALIDFYSKCGLWEDACRAFRELRFHDTIVLNSMITVYSNCGQIEEARRIFDMITGKSVISWNSMVVGLSQNGHARDALGLFCEMHRLGLRLDKVAIASALSASSSICSISFGEQIFSLATVLGLQSDHVVASSLIDLYCKCGSLANGCRIFEEIDKPDEVLWNSMLIGHASNGYGHEALELLELMKTKGIKPSERTFIAVLSACCHSGLVKEGLTWFHRMQADFSVSPSAEHYACVTDLLVRAGRLEESVEFIENMPFEADAVSWTTVIGGCKAQGNEAMMRKVAKKLMEMESSHPSFTLSYFHVLCCQPIPGPHVGGSAAAKDVNKWLDEIIGGYDSSIREFHGGDDQKLLISLLKILCRHYGSSVHLLGLIHRRRNIEFLSNSWLQGIAGPEMAVTKLFSSCKSSGAHKGEYGAIVHCMKNIPSENQIQATAKEVQNPLVSGRRKEALQ

SEQ ID NO: 149614 - protein, 83 aa, Oryza sativa
  Clone ID: PAT_MRT4530_4992C.1.pep
SPPSGSSSSTSKFTCPLRSNSSSPWAKTLPPGTPFPFSLTPIPLPPHGWRPNSNFFFLATPSRPINVLIISTRGINLLLVLIC

SEQ ID NO: 149615 - protein, 100 aa, Oryza sativa
  Clone ID: PAT_MRT4530_49930C.1.pep
MVGVSLALTGSGHPAATPLAWSLLAATARCRGKGRHRCHSAALLDATAVIRRAAQRRAPSAAATCDHPVRHSLCGGRERGNDEWKESCGVGGGRDGGGDR

SEQ ID NO: 149616 - protein, 727 aa, Oryza sativa
  Clone ID: PAT_MRT4530_49931C.1.pep
MAAAVSTAPRAPLPAGAVSSSCCSSSSSSASMSRRWDPSPNPSSGSGSRLFLAARRGERLRVRRLAGAAPAPAPRRRVSSVVRCGGGGGGVRSPDDADAGSGERRRGWDALFHDAFQGAVRRWSEYVGSHWPLAPAGKDAGLGKRVESRREEQVRGEVEEEEGKWSWERWKQHFALIEESERLVDELQLQLRTAVYREDFRSAHKLKLAIAATSKNDTVGRAISDLNSAIEEERYMDATYIRDHAGAGLLGWWSGISGNLSDPYGLIIRISAEHGRYVAKSYDTRQLNSDGPGFPIFEIYFAEANGGYNLQAVHLKPDDSDSQQLSNTLREKLGMDSINISSSSFGAKHEDHNEGVNMDDQNSDDSDISAGPAGFKNLPSDSTPVPRVKILKVVPMENVNQDYIIKIFDQMSDEDDENDNPEDEIESSEDIGDGDNVEEAEAASAEDNVDESGDESDIEALISIDFITEDDKDFMSPSSTKAFERMPARLERRDRFSFSFYTEQYSKRQDVEKVQGISKEKVGLRTAQQDDDDLQFDRVKLVGSNRKLSVLQLGIKQHNNKVQQKLYGVTHFSRIQIPVSSDPLTGLYMTASGFDSEILSLQRKFGQWREDDSSEEHRDLQFYEYVEAVKLTGDNLVPAGQVVFRAKVGKHYQLPHKGIIPRELGVVARYKGERRIADPGFQNPRWVDGELLILDGKFIRDGPVIAFFYWTSNFHLFEFFRRLKLPD

SEQ ID NO: 149617 - protein, 52 aa, Oryza sativa
  Clone ID: PAT_MRT4530_49932C.1.pep
PGFLFTRSRRLAYSDQVTTARQQGRDASAPAGDGTVSQCAGTHQERKASGQG

SEQ ID NO: 149618 - protein, 112 aa, Oryza sativa
  Clone ID: PAT_MRT4530_49933C.1.pep
MARGRQRPSRKEQRLERMLAMGACLHNLRLEGATKVEDGTWTTGLTHKQGNWRRGGIDDGHQMKLRRCGGGGEAVAVLDGALESCQQSWPCGVVETSPDQRLEGWQGPDLRG

SEQ ID NO: 149619 - protein, 528 aa, Oryza sativa
  unsure (1)..(528): unsure at all Xaa locations
  Clone ID: PAT_MRT4530_49934C.1.pep
LLEVLRHFGFGSWISNLFSTSSSQVLLNGSLGMRINHARGLTQGDPLSPMLFILAMEPFHRIIKAAKSANVLSXIGVRNGRFRCSLYADVVAVFALPNPDDLNALSRILSCFAQISSLHSNINKTEIFPMSCNGIDMQQLLACWPGQIKNFPCRYLGLPLHFRKLRKIDFLPLIDKIGARLPAWKGRFFTSAGHQTLVNSVLSAMPMHHLTILHAPKWVFKRIDRFRRSFLWKGEDPNHSNWKEVDKPWVGMNVPCDEMDTRLFQAATTITIGDRAKTSFWHDNWIQHRCLKDIVPSCFSLAKRKQRTVQMEMRDNRWLTSFLQXFTSVEQIHDLVQLGGLLQLVSLSQDPDDITWNWTESGVYTTKSAYLFQFEGSFATNEFDSLWKSPTEPKIKFFGWLVLHQKTLTTQNLLRXWICCLCGCAFEDTNHLFSDCVFVRQVWTLICQFQNLSSVGINPVLDVSTWWSGTKFAGSKKVVQLVRGTLLTTWWNIWLERNRRIFQNSSCSDIEVAYFIKKAIDMRCLAFK

SEQ ID NO: 149620 - protein, 181 aa, Oryza sativa
  unsure (1)..(181): unsure at all Xaa locations
  Clone ID: PAT_MRT4530_49935C.1.pep
IPWRTSESATSHAIESAYLFQFEGSFATNEFDSLWKSPTEPKIKFFGWLVLHQKTXTAQNLLHRHWPCNWICCVCGCAFEDTNHLFSDCVFVRQVXTLICQFQNLTSVGINPVLDVSTWWSGTKFAGSKKDVQLVRETLLTTCWNIWLERNRRIFQNSSCSEIEVAYFIKQAIDMRCLAFK

SEQ ID NO: 149621 - protein, 57 aa, Oryza sativa
  Clone ID: PAT_MRT4530_49936C.1.pep
WGYRLLNPNWEQLVKPRGYGAQETGGGFLAPTLICVINLVMALFNGKLSTLWANRVG

SEQ ID NO: 149622 - protein, 1336 aa, Oryza sativa
  Clone ID: PAT_MRT4530_49937C.1.pep
MAEQAKAHDLSPSVSGDDGEPNPRRRARTPPPPPRQSPKQGEALEKVDKSMASPAAGDAGERRDGERRLLVYGDGSTPQGALQATGALLRHPPVVHDPESPAQRWLEDVANLVMTAQQRLGAGGRSATTKTSGAATTGSVSSRRRARRAAAAARRSAATPSSTPPTREDQHGEPDARLDIERRRNSRRTPRATEGASSSRVSPRQGREDQPSVPPAGGVGCRAFVASLRNVRWPPRFRPTITEKYDGSVNPTEFLQVYTTGIEAAGGDDRVMANFFPMALKGQARGWLMNLPPASVHSWEDLCQQFTMNFQGTYPRPGEEADLHAVQRGDDESLRSYIQRFCQVRNTIPCIPAHAVIYAFRGGVRHNRMLEKIASKEPQTTAELFQLADRVARKEEAWTWNPSGSGVAASAAPGSAAQTGRCDRRRKKRLNQPITRRGPEGLGRRKKKLFKIGGGLGAHSDAPGSPALSSLSSAPSSPHSSSESRANANRGAVPSKLWTMWSAASRSCARAPSSVPEGNSSSAAHGEKSGSERPPSRTAAQGPRRPELALRLLVLRCQAPPTLRIASGPLREGRACRPLTPRVSAQKPRAPRAASRMKSALEMRPLAKRIGPAESLVKRVTLHATQYSTLFYPVCDRSQTGKALHEEGQTCTLLNRRVVDKNDRSDTGRISNGQPRSHVAPVSAGSGGRARLPEHLRKGFDSLVLLVSWQLWKKWNTKPFVLLAAILSFMHLNTSQLAELNSAFICLIPKKDDATDADHFRPISLMHSFAKIITKILANRLAPQLNEMISQNQSAFVRKRAIHDNFLYVQNMVQMLHRSKKQSLFIKIDIAKAFDTVNWPYLLEVLRHFGFGHRWLSWISNLFSTSSSQVLLNGSPGMRINHARGLRQGDPLSPMLFILAMEPFHRIIKAAESANVLAPIGVRSGRFRCSLYADDVAVFALPNPDDLNALSRILSCFAQISGLHSNINKTEIFPISCNGIDMQQLLAGWPGQIKNFPCRYLGLPLHFRKLRKIDFLPLIDKIGARLPAWKGRFFTSAGHQTLVNSVLSAMPMHHLTVLHAPKWVFKRIDRFRRSFLWKGEDPDHSNPSDSLVNWQTVCKPKSLGGLGLPDLDRFSRALRLRWLWFKWKEVDKPWVGMNVPCDEMDTRLFQAATIITIGDEAKTSFWHDNWIQNHCLKDIVPSCFSLAKRKQRTVQMEMRDNRWLTSFRQFSSVEQIHDLVQLGGLLQLVSLSQDPDDITWNWTESGVYTTKSAYLFQFECSFATNEFDSLWKSPTEPKIKFFGIGLAIGYVAFVVVPLKIQIICSVTPKAPCHCDYEFHIEGDLQLDSQIFKCLLD

SEQ ID NO: 149623 - protein, 162 aa, Oryza sativa
  Clone ID: PAT_MRT4530_49938C.1.pep
FFFFFFFFFFFFFFFFFFFQFFFPTRAGTRGGTPGSNREIRAGTLRGYQIFLKGGGLKVGGNKGKKGFWGKKFSPQKTPKKKRRKHKGEKRGGPKREVTHINWGGVNGQFLRGKTLRATGINKWPTPGERGAGDWAPRGVFFLPRGRGKNDWPSTTCPRRKH

SEQ ID NO: 149624 - protein, 180 aa, Oryza sativa
  unsure (1)..(180): unsure at all Xaa locations
  Clone ID: PAT_MRT4530_49939C.1.pep
MAGKMDELWIGRMEWCVLECNKNAINFYEGMGEPRRGXSGGRTTAGDGRGRRRRVARRGGRRRGGRKRKEATRGGRARRGGARRLGIAGGAADGVELPRSLEKGWQAPVPGAEPAIVLIFNASARLPSASSPSSPSMSRXVDVRLRRHRVPSLLARPPRAASLLARLPRAAPPRGGASTK

SEQ ID NO: 149625 - protein, 34 aa, Oryza sativa
  Clone ID: PAT_MRT4530_4993C.1.pep
MLKVPFPLRVWKPSRVSHRASISNSNANSVQRLR

SEQ ID NO: 149626 - protein, 72 aa, Oryza sativa
  unsure (1)..(72): unsure at all Xaa locations
  Clone ID: PAT_MRT4530_49940C.1.pep
AEEDTPKTAFRCSGAIGLYEWVVMTFWVKTAGATYQRSMNYIXHDLIGLLGEXYIDDVIVTSKSVDGHLADL

SEQ ID NO: 149627 - protein, 93 aa, Oryza sativa
  Clone ID: PAT_MRT4530_49941C.1.pep
KPGGDILITHGFSQSYLFGQKTNQRRVALLFPQKKNYFFDKNNWSTVNPRLLTTPFSFWSFWGGKPFVQYHLGEGEHLKGWCALQKLFSLFFL

SEQ ID NO: 149628 - protein, 36 aa, Oryza sativa
  Clone ID: PAT_MRT4530_49942C.1.pep
EEQVVIQFNFVLGNQLNVCLLKDLFWYFEKEKFVKC

SEQ ID NO: 149629 - protein, 139 aa, Oryza sativa
  Clone ID: PAT_MRT4530_49944C.1.pep
PPRPPGFLGRLGGVSIFHLGWAFFWKGHGAGPFFFTPPLGKGVLFQLVFIGGYPCCSSFVVFNAGRIFFFLGSHLKNFMFQGTGRLVFFSIRARPYFFFFFFFFFFFFFFVFFFFFFVFFFLHNAAYSSIHSHKISLLV

SEQ ID NO: 149630 - protein, 159 aa, Oryza sativa
  Clone ID: PAT_MRT4530_49945C.1.pep
MARREVDDSYTNGSVVEVVSIEEGSKMDKEDDHQNPQAPDGGDVVVCGMPMSFTFLQMLLAEFLATFFLMFAGLGAITVEEKKGAVTFPGVAVAWGAAVMAMVYAVGHVSGAHLNPAVTLGFTVAGRFPWRRAPAYALAQQVRNYFSIQLCTYFYNGQF

SEQ ID NO: 149631 - protein, 114 aa, Oryza sativa
  Clone ID: PAT_MRT4530_49946C.1.pep
CSCWLRVKQSAANLLKRPPCVHHIHRSTDRSRQPDNANAVRGVHARTHALTWILSHDHNTLCMSHSHSRPWTTRTYTSTTIHTRTDTIEPAEANDLATTLQQTARAEHARTAEL

SEQ ID NO: 149632 - protein, 398 aa, Oryza sativa
  unsure (1)..(398): unsure at all Xaa locations
  Clone ID: PAT_MRT4530_49947C.1.pep
MNLSGRDNVILGMNWLAQFQGVVDCARRTVTLYRGPEQPVVFFAPPTSVRSSELHQIGLSEIPIVREFGDVFPEELPGMPPKREIEFRIDLAPGTTPLHKRPYRMAANELAEVKKQLEELKEKGYIRPSTSPWGAPVIFVEKKDKTKRMCVDYRALNEVTIKNKYPLPRIDDLFDQLKGATVFSKIDLRSGYHQLRIREEDIPKTAFTTRYGLYEFTVMSFGLTNAPAFFMNLMNKVFMEYLDKFVVVFIDDILIYSQSEEDHQHHLRLVLGKVREHQLYAKLSKCEFLVFEVKFLXHVISAXGSAVDPRTVTRGTXLKEPKTVTPGRKFLCFARYLPELIENFFKNCSXPGNNWLKKEENIVWNPACQEAFPTLKEKLGSLPGLIFRVLSRDLLGFL

SEQ ID NO: 149633 - protein, 211 aa, Oryza sativa
  unsure (1)..(211): unsure at all Xaa locations
  Clone ID: PAT_MRT4530_49948C.1.pep
YDWTAEGKPWQGSILPCDETDKQLFRVSMIITLGNGGKAKFWHDRWLDGQFPKEITLSLYKLVTRKNKTVAQELKNHRWLRPLRRMSSTTEVREFILLWHLIQQVQIDEEREDDLTXKWIANGIYSVNWIYRIQFTGSIQDNRSNFIWRAKTENKCKFFGWLMVQKKILTSDKLQLLGWDNSPTCSLCGTKSETTVHLFMDCPFAKQVWTK

SEQ ID NO: 149634 - protein, 212 aa, Oryza sativa
  Clone ID: PAT_MRT4530_49949C.1.pep
MSSTGRKRRRERGKAPHSSLLRQLLKFNKLTSSFAELIVGPCRPATAIELAPALLTLSSPTPPPARTVAFGDPSPRGAAGDTSPCARLDRFRMNDAPPPNERRRPPSSPPSSAACKAAPPPLITIVLVLGSGGRGSRGRNHMSPLAAAASPSPPPWASVCGSSPSASRRPSTRAAPLLTGHHPRTRAASLLPPAGAQERTLTVAGNLVHHAR

SEQ ID NO: 149635 - protein, 121 aa, Oryza sativa
  Clone ID: PAT_MRT4530_4994C.1.pep
DAGAGVEPANRDRQAHEDHLYREGVELDLGMVIRIPGAKVKSVYNPKQQKNTNRKHKNQSRLSRKINQTNSNGVTATDRVGKRKPPVPLRKRKTPTHREKGDGYPGPGWFLPSRRKTAKSD

SEQ ID NO: 149636 - protein, 77 aa, Oryza sativa
  Clone ID: PAT_MRT4530_49950C.1.pep
LAFFSRAVAPRHAGLAAYEQELISLVQAIRHWRAYLWERAFLVRPDHGSHERRGGRPDPPHEGRRAHRLGNLRADVH

SEQ ID NO: 149637 - protein, 239 aa, Oryza sativa
  Clone ID: PAT_MRT4530_49951C.1.pep
MWYQHGKTHQNVVMGERARVVRCAVDRYFLLDGSKSHHIICLEGVIYNALTSSDQSSKESRKMALWTMEKMVGVAMCGWVGGGHKANKCSEHILSRLLEFGGEDWRAHKSVETGLKWDRTILTVIRAPPIRLLAKGHKLPSFVGCSTESEGTWYAIISCWAFMPDSKGWVLATVIDKFYATNTCINQRNKTSNIVIGLILTYSMSVGVYLYAEWARNYTQKDSKGLHSQKWIEETEKEQ

SEQ ID NO: 149638 - protein, 190 aa, Oryza sativa
  Clone ID: PAT_MRT4530_49952C.1.pep
SEFMLLLNYFNFYSACIIKHMGAAGVAAARSSTGRAPPPPIGSGRGEGVRGSRWNLRGPAVVVVWQPLLDPPRPPLFAAARTPPRHGTHHAAPRRQIHLSTTTAPLLHRPPPPATPRAARSAAHGPSRRSSRCRRTTSFVAAPRCRISFRAAVAVTTAGTLSPPLRRLERRGEGDGRVWEERRGRRLGEE

SEQ ID NO: 149639 - protein, 125 aa, Oryza sativa
  Clone ID: PAT_MRT4530_49953C.1.pep
MVLQDSAVIQGVRDVLDNSMTCEQRPEGSKGGRQASSRQRELQVQIPRKGVCSVSLRGFQAMGVVQGEVSEVGEAQVLEDFIHVKFIEVHFGYHVENSLGGATAAAGSPVGRGGGGLGHMAVLGV

SEQ ID NO: 149640 - protein, 53 aa, Oryza sativa
  Clone ID: PAT_MRT4530_49954C.1.pep
CSRVLSKISRPTYNSTQYTLHCCMQPSGLTCVSHQVVYEPPEMVISVANTGKS

SEQ ID NO: 149641 - protein, 126 aa, Oryza sativa
  Clone ID: PAT_MRT4530_49955C.1.pep
MTDELNVCNADFSPKIITKLAPKGWQSGTTGTGSDYPYPCPRGNSCPRVYPLLYDEQGTLPMPVAHRRHVPTGMPVYPSQTHSSTFQPQISTSRETLSQFKERVQLYQVQQYKHYKFINTRWWHLY

SEQ ID NO: 149642 - protein, 66 aa, Oryza sativa
  Clone ID: PAT_MRT4530_49956C.1.pep
EHTHTHTHTHTHTHTHTHTHTHTHTHTHTHTHTHTHTHIYIYIYIYIYIYTHPHTHTQTQNQLRFT

SEQ ID NO: 149643 - protein, 114 aa, Oryza sativa
  Clone ID: PAT_MRT4530_49957C.1.pep
MRREGRMHGWVYAHKLVDPMDPDGAGGKAKRRVVHDITKQMANGGFVRVSRKPTNHSKYTGRDPYEAYTKRKTCKGRNKFKHDEIKMYYLDVEGLDDDDEYEEPYTIVAVGSSP

SEQ ID NO: 149644 - protein, 76 aa, Oryza sativa
  Clone ID: PAT_MRT4530_49958C.1.pep
MHDHGFTAKKPLKKRMLALGGINGTSILWWWFLGLNSTKTGKGNTQPLMGTGTKSTDRFFSQLRSHLILSPSKLGF

SEQ ID NO: 149645 - protein, 636 aa, Oryza sativa
  Clone ID: PAT_MRT4530_49959C.1.pep
VYVDKSQLSHQDQIPPFPTRIAIRTIESQLGSRISDLFADISPEPVAAASLGQVYKAHLHSGELVAVKVQRPGMTPLLTLDALLFHMIGGQLKRFAKARKDLLVAVNEIGRNAERFARLYSHDLGGNSSGDGTSIKVPKVYWNFTRKSILTLEWIDGIKLTDAERIGKANLNRKRMIDEGLYCSLRQLLEEGFFHADPHPGNLVATEGGSLAYFDFGMMGDIPRHYRVGLIQMLVHYVNRDSLGLANDFHSLGFVPEGTDLHGVADALRVSFGDGRRQSNDFQGVMSHLYDVMYEFNFSLPPDYALVIRALGSLEGTAKALDPDFKVIESAYPFVIGRLLEDPSPDMRKILRQLLICDDGSIRWNRLERLIAAISEQSESSNKSEDRSGENAANKPGWRSFDMHSVVAATEDLFHFILSRKGWRVRVFLVQDIVKASDAFLQEATFPGIFDEEGTTGELHPERSKMIRRVVHGVQSFRQAISLAPDAWTAMLFRTLLKPESQKFILDVFLALAMHSCYKIPETSWICMSRFLNYLDRQEANMLIFVRAATDLLMPLPTSFISVRVRTAGEVVNQNLRLLVLVCLQPQLHASKTIDSAEVITDLPHDKSHKSDMGEPRTKLARDPIIYFLRYNSQIV

SEQ ID NO: 149646 - protein, 206 aa, Oryza sativa
  unsure (1)..(206): unsure at all Xaa locations
  Clone ID: PAT_MRT4530_4995C.1.pep
HQTTPVERGRTPLGPEKLAKKGRGNSPQRRGGAPRRPRVPTGNEEDGPSPPAPFALPSGRRWCCCSGPAPPAGAPEVRPPSLTWPPRRNPGCPATTPSRHRGLDDPPRHGLAPGGQAERLPAASARPPPPRPHRPRRAAAIRRPRPSLTRRLHAEPQLSAASAPVPSRPSRSRPPXRHHGRMPSRRPRPPRTAAAXIQAREGRIRP

SEQ ID NO: 149647 - protein, 74 aa, Oryza sativa
  unsure (1)..(74): unsure at all Xaa locations
  Clone ID: PAT_MRT4530_49960C.1.pep
MKTDMTTSPLLFLLLGGLTAGALCTSYDYATANTILLPTDXGSAQXACKTDDPARCCDNIXRLPTKTNPPHWRC

SEQ ID NO: 149648 - protein, 842 aa, Oryza sativa
  Clone ID: PAT_MRT4530_49961C.1.pep
DPGHGGPHLAPPPPPRRPPRWSPLPPPPPPPPPRRTRPGPLAPGRCRCRRLVATTASRLAPGQEFYSHVGPFFSSAFSSVHGERPSSEYAKIRKESLESQFGRILGSSSRTLFADRGFGPFLAMYRAAIISFHVMKLTIWHLLLSDVHKRAEKFQETLIRLGPFYIKLGQALSTRPDILPNAYCQELSKLQVYVDKSQLSHQDQIPPFPTRIAIRTIESQLGSRISDLFADISPEPVAAASLGQVYKAHLHSGELVAVKVQRPGMTPLLTLDALLFHMIGGQLKRFAKARKDLLVAVNEIVRHMFDEIDYVLEGRNAERFARLYSHDLGGNSSGDGTSIKVPKVYWNFTRKSILTLEWIDGIKLTDAERIGKANLNRKRMIDEGLYCSLRQLLEEGFFHADPHPVQSGAFLHSFASSNFELKIRNDWRFKHHLRLPWVTLVHYVNRDSLGLANDFHSLGFVPEGTDLHGVADALRVSFGDGRRQSNDFQGVMSHLYDVMYEFNFSLPPDYALVIRALGSLEGTAKALDPDFKVIESAYPFVIGRLLEDPSPDMRKILRQLLICDDGSIRWNRLERLIAAISEQSESSNKSEDRSGENAANKPGWRSFDMHSVVAATEDLFHFILSRKGWRVRVFLVQDIVKASDAFLQEATFPGIFDEEGTTGELHPERSKMIRRVVHGVQSFRQAISLAPDAWTAMLFRTLLKPESQKFILDVFLALAMHSCYKIPETSWICMSRFLNYLDRQEANMLIFVRAATDLLMPLPTSFISVRVRTAGEVVNQNLRLLVLVCLQPQLHASKTIDSAEVITDLPHDKSHKSDMGEPRTKLARDPIIYFLRYNSQIV

SEQ ID NO: 149649 - protein, 36 aa, Oryza sativa
  Clone ID: PAT_MRT4530_49962C.1.pep
RNATGEGSRSRRTRWPGSVAGLMSARVPGSFPHFGD

SEQ ID NO: 149650 - protein, 200 aa, Oryza sativa
  Clone ID: PAT_MRT4530_49963C.1.pep
MEHKDRQRHAAAAVAKPRQRSASFHGRGEAEQRHSLLKQRPRTQPDLLAGLRGQSFRRGGGEGRAPARPSRVLLTVAVRQSMWPLHVMARAEWSVADLVAAAVELYIREGRRPLLPSADPAAFGLHFSQFSLQSLNPEEKLMELGSRSFFLCPKAAAAAVAAVSSGEDTGGLSGEDEANSAKKPSVLAPWLGFLHFWPLL

SEQ ID NO: 149651 - protein, 106 aa, Oryza sativa
  Clone ID: PAT_MRT4530_49964C.1.pep
CSSFFLHVAELFFAASSLRSSHGGSIMIRGPVLPLWMERIRGCLPVCSYGLRISGSGKAHVRAHRAAVLDSPSPPLNLSPPLGALANHPIACGCFRRRLLAHASAH

SEQ ID NO: 149652 - protein, 820 aa, Oryza sativa
  Clone ID: PAT_MRT4530_49965C.1.pep
MVYFLMFLLLLSIPLCKTDDQLTLGKPIFPSEMLISKGGIFALGFFSPANFSNSLYVGVWFHNIPQRTVVWVANRDNPITTPSSATLAITNSSGMVLSDSQGHILWTTKISVTGASAVLLDTGNFVLRLPNGTDIWQSFDHPTDTILAGMMFLMSYKSEIVGRLTAWRSHDDPSTGDFSFSLDPSSDLQGMTWNGTKPYCRNGVRTSVTVSGAQYPSNSSLFMYQTLIDSGNKLYYSYTVSDSSIYTRLTLDSTGTMMFLSWDNSSSSWMLIFQRPAAGSCEVYGSCGPFGYCDFTGAVPACRCLDGFEPVDPSISQSGCRRKEELRCGEGGHRFVSLPDMKVPDKFLQIRNRSFDQCAAECSSNCSCKAYAYANLSSGGTMADPSRCLVWTGELVDSEKKASLGENLYLRLAEPPVGKKNRLLKIVVPITVCMLLLTCIVLTWICKHRGKQNKEIQKRLMLEYPGTSNELGGENVKFPFISFGDIVAATDNFCESNLLGRGGFGKVYKRFPIYIDDNMKGILEGGTEVAVKRLNEGSGQGIEEFRNEVVLIAKLQHRNLVRLLGCCIHEDEKLLIYEYLPNKSLDAFLFDATRKYVLDWPTRFKIIKGIAKGLLYLHQDSRLTIIHRDLKASNILLDTEMNPKISDFGIARIFHGNQQQANTTRVVGTYGYMSPEYVLGGAFSVKSDTYSFGVLLLEIVSGLKISSSKLTPNFFSLTAYAWRLWKDGNATELLDKFFVDSYPLHEAFRCIHVGLLCVQDHPNDRPSMSSVVFMLENESTLLPAPKQPVYFEMKNHGTQEATEESVYSVNTMSTTTLEGR

SEQ ID NO: 149653 - protein, 116 aa, Oryza sativa
  Clone ID: PAT_MRT4530_49966C.1.pep
RLNEGSGQGIEEFRNEVVLIAKLQHRNLVRLLGCCIHEDEKLLIYEYLPNKSLDAFLFDATRKYVLDWPARFKIIKGIAKGLLYIHQDARLTIIHRDLKASNILLDTEMNPKISDF

SEQ ID NO: 149654 - protein, 35 aa, Oryza sativa
  Clone ID: PAT_MRT4530_49967C.1.pep
MLDLGRSSDYHGWRASLSLPLGLQASTTRAAKEIR

SEQ ID NO: 149655 - protein, 178 aa, Oryza sativa
  unsure (1)..(178): unsure at all Xaa locations
  Clone ID: PAT_MRT4530_49968C.1.pep
VIDAKNFRLQIDEHNKSSSFPEAFHQIAFADVVILNKIDLVEGSLEDLERQIHEVNALVTVVQSVRCQVDLNKIFDQQAYGAKNSSQLQELLEYSKSVPPNLRHDNSISTLCICEQDPISLSKVESWLEDLLWERKLDMDIYRCKGILHVHNSDQVHTLXGRNLDINILQDSFSRCKH

SEQ ID NO: 149656 - protein, 124 aa, Oryza sativa
  Clone ID: PAT_MRT4530_49969C.1.pep
MDLLPSKLLRTPLHSSPRHAKEPTGTSTAIIHDTPDETLVGHCVAAPDEVVAIILELVLLMNSLRYEHDDEGVIDIGKPATIHSSNATSKELEQELVFTDKLKDVVAYLKTLKERYLLAILVAG

SEQ ID NO: 149657 - protein, 119 aa, Oryza sativa
  unsure (1)..(119): unsure at all Xaa locations
  Clone ID: PAT_MRT4530_4996C.1.pep
AAPPAGAPEVRPLRLTXPPRRHPGCPATTPSHHRGLDDPPRHGLALGGQGERVSRGTAAALGRLSXPAASARPPPLRPSRPRRAAAIRCPRPPRMPSRRPRPPRAAATQIQAREGRIRP

SEQ ID NO: 149658 - protein, 187 aa, Oryza sativa
  Clone ID: PAT_MRT4530_49970C.1.pep
QAGEEVEQTIGSGAAPRECNTHHQDRHTSGNPSKQRRRLIFPGTIGNFLGMRSMKKGEGQGCKSRMRPLLAIASPPPMRLSSQVVAIILELVLLMNSLRYEHDDEGVIDIGKPATIHSSNATSKVFNCYLGTKERRGLLKGVRQPTKQAKDKSRRATRPNDHRGPSAPQGRDIGRGSSRVDLQACKL

SEQ ID NO: 149659 - protein, 100 aa, Oryza sativa
  Clone ID: PAT_MRT4530_49971C.1.pep
WHLHCRPSPPPPPPPRPASTPCQPSRRPPRRHRHEERKPRGGGGPLGERPPPCRGRIVIKGGGPLGERPPPRRGRIVIKGGGPLGERPPPRRGGRHPTPC

SEQ ID NO: 149660 - protein, 142 aa, Oryza sativa
  unsure (1)..(142): unsure at all Xaa locations
  Clone ID: PAT_MRT4530_49972C.1.pep
MKIIFRCALLGIVVXNASRRIDALYLSYRSYQLRSYLLIQXPVLTPCCECERQHXTITATPFCQTTTVSXLNNQVMPYPCCQQLRVGALLSHYHAISSGLAIVPQLQVQQDAAGYFDPTQAXQAPALLALNSPSICGIYPNY

SEQ ID NO: 149661 - protein, 73 aa, Oryza sativa
  unsure (1)..(73): unsure at all Xaa locations
  Clone ID: PAT_MRT4530_49973C.1.pep
WGFLSRQIELKPTIGNXHPPEHFYAKQQADYVITQADTNKDGQLSLXEMIENPYVFYSALFTEDDYGFHDELR

SEQ ID NO: 149662 - protein, 66 aa, Oryza sativa
  Clone ID: PAT_MRT4530_49974C.1.pep
KVLSHVLMSVSKLFLDKIYKYCRTRTAPSPPMYPIRKQSPSPYFKNPSTRPIYMPNCQLPKQSSRQ

SEQ ID NO: 149663 - protein, 104 aa, Oryza sativa
  Clone ID: PAT_MRT4530_49975C.1.pep
GRVGLRWLANRTRRRRRGRRRGGWMAAAASRGPPHRPASAALGTWLSFPPPPATATSTGAYLPGVVDAPQTPTGSFDPLGSTYHCHLLLVSEPGLSPHFAMTTH

SEQ ID NO: 149664 - protein, 59 aa, Oryza sativa
  Clone ID: PAT_MRT4530_49976C.1.pep
MADGVGAAAVMCRNSYTFSSFLFGFLDVDSSLIPVEAHYPCYAIAYDVIDFTDHFFSSS

SEQ ID NO: 149665 - protein, 201 aa, Oryza sativa
  Clone ID: PAT_MRT4530_49977C.1.pep
MRRGSRRRKAAIGRRMGKSGTRRSRRCSRCVAAAAGVKANGDRRRKKAAGRVVWRGGGSGGGGEKGIGGRACPRGGKAGCGGGRARERLRRRRHAAGGGLGWWRLGCMVEGEFRRRLGEEKSWPDMADLKRQRPATWATSWAKWGSIWHQKLVKSGGFGGGGRGEPILCGLGARARAGGAGIGGDVGGNGGNGGFGSGGRR

SEQ ID NO: 149666 - protein, 1786 aa, Oryza sativa
  Clone ID: PAT_MRT4530_49978C.1.pep
MGSISGIDDLVFPPGQTFRFGSLDFVTSNFGKISLLDSESDQSGENQISAPFGLPNAAESYFKTISTESASNHSGEIAPSPTSPDQDDGAYPPILMKLPDDLTAVSITTASLSRRPRRNSPTVDSRPTDIVEYDEFSSRYHDPDLDDFDGSLDDNYTPLYFGVFMANNETEEQRQARETEARRETERRRLEEEHQAQEQERLRHEQQERERTAKEAEDRRQRALEAGRRARDLIGQQDVEGTPTKTMIAASVPVNSESVHTPTGSRVPHFRSHDYRHPSLSITGAGSNRRSRGHDERSVHSPPDHHRERRVERPRSPPRRRPVDLRDTIIQRRAARGYHHSPDRHDDDLDGVAAFTDDLRRVDWPAGFKPTGIEKYDGTTNPESWLTVYGLAIRAAGGDSKAMANYLPVALADSARSWLHGLPRGTIGSWAELRDHFIANFQGTFERPGTQYDLYNVIQKSGESLRDYIRRFSEQRNKISDITDDVIIAAFTKGIRHEELVGKFGRKPPRTVKLMFEKANEYAKAEDAVTASKQSGPSWKPKKDTPASGGGGSNNHKDRKRKPAELVATASHSSRQHSRVNTFDKIMNSQCPHHPNSNHVAKDCFVYKQFADQYTKTTRKNSDEEQSTSRKKDDGDTPAGFQDHRKELNHIFGGPLAYESKRKQKLTEREINAVQPDTPQYLRWSEIAIKFDRSDHPDRVVHPGRYPLVLDPVVRNVKLRRTLIDGGSALNILFAKTLDDMQIPRSELKPSNAPFHGVIPGLSATPLGQITLPVTFGTRENFRTENISFEVADFETAYHAILGRPALAKFMAVPHYTYMMMKMPGPRGVLSLRSDIKQAVTCDKESCDMAQTREMASAREDIRLAAATASEGEIPATKTSKSGESEAKTKKIPLDPSDPAKTAVIGAEEVIEHSLHVKEDAKPIKQRLRRFAQDRKDAIKEELTKLLAAGFIKEVLHPDWLANPVLVRKKTGQWRMCVDYTDLNKSCPKDPFGLPRIDQVVDSTAGCELLSFLDCYSGYHQIRLKESDCLKTSFITPFGAYCYVTMPFGLKNAGATYQRMIQRCFSTQIGRNVEAYVDDVVVKTKQKDDLISDLEETFASIRAFRMKLNPEKGIQANPEKVTAILNMKPPSTQKDVQKLTGCMAALSRFVSRLGERGMPFFKLLKKTDDFQWGPEAQKAFEDFKKLLTEPPVLASPHLQEPLLLYVSATSQVVSTVLVVEREEEGHVQKVQRPIYFVSEVLADSKTRYPQVQKLLYGILITTRKLSHYFQGHPVTVVTSFPLGDILHNREANGRIAKWALELMSLDISFKPRISIKSQALADFVAEWTECQEDTPAEKMEHWTMHFDGSKRLSGTGAGVVLISPTGERLSYVLWIHFSASHNVAEYEALLHGLRIAISLGIKRLIVRGDSQLVVNQVMKEWSCLDDNMMAYRQEVRKLEDKFDGLELSHVLRHNNEAADRLANFGSKREVAPSDVFVEHLYTPTVPHKDTAQIAGTHDVAMIEADWREPLIRFLTSQELPQDKDEAERISRRSKLYVMHEAELYKKSPSGVLQRCVSLEEGRQLLKDIHSGICGNHAAARTIVGKAYRQGFFWPTAVSDADKIVRTCEGCQFFARQIHLPAQELQTIPLSWPFAVWGLDMVGPFKKAVGGYTHLFVAIDKFSKWIEAKPVVTITADNARDFFINIVHRFGVPNRIITDNGTQFTGGVFKDFCEDFGIKICYASVAHPMSNGQVERANGMILQGIKARVFDRLKPYAGKWVQQLPSNATKRTEWMTCTDWKKSVKQL

SEQ ID NO: 149667 - protein, 222 aa, Oryza sativa
  Clone ID: PAT_MRT4530_49979C.1.pep
MDLADVSKGRPAPTGGSQASAAQGGSVHHGPGSGGAQRGKRREETEAVREREVAELTEGHGDGESSRRREAAALHRSTRRRGSRRRKAATGRRMGKSGTRRSWRCSRCVAAAAGVKVNGDRRRKKAAGRGSGSGGDDMRLEARGSGYGDGGVQPELAGKQRSAGSRGEHGRAATAGDVGDIVGEVGLDSAPVLEGESGGGEWRRWGDAVPRAQRILPNIPGQ

SEQ ID NO: 149668 - protein, 216 aa, Oryza sativa
  unsure (1)..(216): unsure at all Xaa locations
  Clone ID: PAT_MRT4530_4997C.1.pep
MAAEISAADSSPSGPSLSPPALYNCSPCLSPPFPPLAARSPRRNQARTVAPSLRRRRRAPVSRRRRSGPSPASASLPSASPRRRRPRPRLRFTRRPPEHRRPRRPEPRRRFPPLRSSFPPSSSSRGEPWTAPFASLSSPLSRAPLRRAGGRRRXPSGRGRAASRRPCRRGRLRARPAAAMWGPAVSRPRPRXRLTRGTHGAGRRQPRAPGPPWTER

SEQ ID NO: 149669 - protein, 103 aa, Oryza sativa
  Clone ID: PAT_MRT4530_49980C.1.pep
MRWRMNWLACLFFFPVLLLVARLVRQDREKSLRLPGYPVGWSRWLVKPITRFRKNLVHTKIICLPVVTKHSRYIHAMQGTKNHISGALSHLSAYCYTTFLESV

SEQ ID NO: 149670 - protein, 534 aa, Oryza sativa
  unsure (1)..(534): unsure at all Xaa locations
  Clone ID: PAT_MRT4530_49981C.1.pep
FKRRAACRTGFGKSGGSLRGSSVVGEEIGNSLPPIPRVYSMRWRALVFQLHLQLRSTTLLKKGNNSKAEYNHRTQQATPTMQTCKGIQEWVSPPLLKRQWAVPSCAAVNLATGQPDTPADPTPSRPPSPPVPRKGSSYTSDQAVTHSRLWQALKRPPLTSSXRSAPTGRPHTSARRGXVHRGPGPQGRSTAGPRVGRPRSXQADRAAEESDGRARAQSGLARPTTEGGGAQSLATAGGGXTGSNGAQRGKRREETEAVREREVAELTEGHGDGESSRRREAAALHRSTMRRGSRQRKAATGRRVGKSGTRRSRRYGRCVAAAAGVKANGDRRRKKAAGRVAWRGGGSGGGGEKGMGGRACPRGGGSNRGSGAAXRWLRXRLEAAGGGRRWCTRRRCSGGREGKWSRXPGCGTAPRSRRWWRIGAAVGGAAVAGGRSLPESGGARERRGEGERERGAPTWGGGGSAGAGFVGRAGEMVXGRGGDRAHVVGCELGCGRAPDFAATWAAMAVGVGRREVGGGADRWGSRSHLSAGWR

SEQ ID NO: 149671 - protein, 1384 aa, Oryza sativa
  unsure (1)..(1384): unsure at all Xaa locations
  Clone ID: PAT_MRT4530_49982C.1.pep
MGSVSGIDDLIFPPGQAFRFGSLDFVTNNFGKISLLDSESDQSGESRISVPFGVPNAAEIYSKSISIESASNHSGEIASSPTSSDRDDGAYPPILMKLPDDLAAFFTTTASPSRRPRRKSASTPISPSSREVGVILQPLGSVSTDQLDGYWSSPGVDSRPTEIVEYNEFGFRNNDPDLDDFDESLEDNYTPLYFGVFMADNETEEQRQARETEARREAERRRLEEERQISDITDDVTIAAFTKGIRHEELVGKFGRKPPKTVKLMFKKANEYAKAEDAVIASKQSGSSWKPKKDTPATGGGGSNNHKDRKRKPEELVATATHSSRQHSRVNTFDKIMNSQCPHHPNSNHAAKDXQSTSKKKDDGDPPAGFQNHRKELNHIFGGPLAYESKRKQKLTEREINAVQPDTPQYLRWSETAIKFDRSDHPDRVVHPGRYPLVLDPVVRNVKLRRTLIDGGSALNILFAKTLDDMQIPRSKLKPSNAPFHGVIPGLSSTPLGQITLPVTFGTRENFRTENICFEVADFETAYHAILGRPALAKFMAVPHYTYMMMKMPGPRGVLSLRSDIKQAVTCDKENCEMAQTREMASAREDIRLAATTASEGEVPATKESALVTFLQNNKDIFAWKPSDMPGIPREVIEHSLHVKEDAKPIKQRLRRFAQDRKDAIKEELTKLLAAGFIKEVLHPDWLANPVLVRKKTGQWRMCVDYTDLNKSCPKDPFGLPRINQVVDSTAGCELLSFLDCYSRYHQIRLKESDCLKTSFITPFGAYCYITMPFGLKNAGATYQRMIQRCFSMQIGRNVEAYVDDVVVKTKQKDDLISDLEETFASIRAFRMKLNPEKCTFGVPSGKLLGFMVVSTVLVVEREEESHVQKVQRPIYFVSEVLADSKTRYPQVQKLISPQKRWSTGPCXFDGSKRLSGTGAEVVLISPAGERLSYVLWIHFSASHNVAEYEALLHGLRIAISLGIKRLIVRGDSQLVVNQVMKERSCLDDNMTAYRQEERKLEDKFDGLELSHVLRHNNEAADRLANFGSKREAAPSDVFVEHLYEPTEGRQLLKDIHSGICGNHAAARTIVGKAYRQGFFWPTAVSDADKILQTIPLSWPFAVWGLDMVGPFKKAVGGYTHLFVAIDKFSKWIEAKPVVTITADKARDFFINIVHRFGVPNRIITDNGTQFTSGVFKDFCEDFGIKICYASVAHPMSNGQVERANGMILQGIKARVFDRLKPYAGKWVEQLPSVLWSLRTTPSRATGQSPFFLVYGAEAMLPSEVEFESLRFRNFREERYEEDRVDDLHRLEEVRDAALIQSARYLQGLRRYHNRNVRSRAFLVGDLVLRKIQTTRDRHKLSPLWEGPFIISEVTRPGSYRLKREDGTLVDNSWNIKHLRRFYA

SEQ ID NO: 149672 - protein, 1735 aa, Oryza sativa
  unsure (1)..(1735): unsure at all Xaa locations
  Clone ID: PAT_MRT4530_49983C.1.pep
MGSVSGIDDLVFPPGQTFRFGSLDFVTNNFGKISLLDSVSDQSGENRISVPFGLPNAAESYFKTISIELASNHSGEIASSPTSPDQDDGAYPPILMKLPDDLAAVSITTASPSRRPRQKSASTPISPSFREVGVILQPXPTGSRVPHFRSHDYRHPSLSITGAGSNRRSRGHDERXGFKPTGIEKYDGTTNPESWLTVYGLAIRAAGGDSKAMANYLPVALADSARSWLHGLPRGTIRSWAELRDHFIANFQGTFERPGTQYDLYNVIQKSGESLRDYIRRFSEQRNKISDITDDVIIAAFTKGIRHEELVGKFGRKPPRTVKLMFEKANEYAKAEDAVTASKQSGPSWKPNKGTPATGGGGSNNHKDRKRKPEELVATATHSSRQRSRVNTFDKIMNSQCPHHPNSNHVAKDCFVYKQFAEQYTKTTRKNSDEEQSTSRKKDDGDTPAGFQDHRKELNHIFGGPLAYESKRKQKLTEREINAVQPDTPQYLRWSEIAIKFDRSDHPDRVVHPGRYPLVLDPVVRNVKLRRTLIDGGSALNILFAKTLDDMQIPRSELKPSNAPFHGVIPGLSATPLGQITLPVTFGTRENFRTENISFEVADFETAYHAILGRPALAKFMAVPHYTYMMMKMPGPRRVLSLRSDIKQAVTCDKESCDMAQTREMASAREDIRLAVATASEGEVPATKISKSGESEAKTKKIPLDPSDSTKTANNKDIFAWKPSDMPGIPREVIEHSLHVKEDAKPIKQRLRRFVQDRKDAIKEELTKLLAAGFIKEVLHPDWLANPVLVRKKTGQWRMCVDYTDLNKCCPKDPFGLPRIDQIRLKESDCLKTSFITPIGAYCYVTMPFGLKNAGATYQRMIQRCFSTQIGRNVEAYVDDVVIKTKQKDDLISDLEETFASIRAFRMKLNPEKCTFGVPSGKLLGFMVSHRGIQANPEKVTAILNMKPPSTQKDVQKLTGCMAALSRFVSRLGERGMPFFKLLKKTDDFQWGPEAQKAFEDFKKFLTEPPVLASPHPQEPLLLYVSATSQVVSTVLVVEREEEGHVQKVQRPIYFVSEVLADSKTRYPQVQKLLYGILITTRKLSHYFQGHSVTVVTSFPLGDILHNREANGRIAKWALELMSLDISFKPRISIKSQALADFVAEWTECQEDTPAEKMEHWTMHFDGSKRLSGTGAGVVLISPTGERLSYVLWIHFSASHNVAEYEALLHGLRIAISLGIKRLIVRGDSQLVVNQVMKEWSCLDDNMMAYRQEVRKLEDKFDGLELSHVLRHNNEAADRLANFGSKREVAPSDVFVEHLYTPTVPHKDTTQIAGTHDVALVEADWREPFIRFLTSQELPQDKDEAERISRRSKLYVMHEAELYKKSPSGILQRCVSLEEGRQLLKDIHSGICGNHAAARTIVGKAYRQGFFWPTAVSDADKIVRTCEGCQFFARQIHLPAQELQTIPLSWPFAVWGLDMVGPFKKAVGGYTHLFVAIDKFSKWIEAKPVVTITADNARDFFINIVHRFGVPNRIITDNGRQFTGGVFKDFCEDFGIKICYASVAHPMSNGQVERANGMILQGIKARVFDRLKPYAGKWVKQLPSVLWSLRTTPSRATGQSPFFLVYGAEAMLPSEVEFESLRFRNFREERYEEDRVDDLHRLEEVREAALIQSARYLQGLRRYHNRNVRSRAFLVGDLVLRKIQTTRDRHKLSPLWEGPFIISEVTRPGSYRLKREDGTLVDNSWNIEHLRRFYA

SEQ ID NO: 149673 - protein, 96 aa, Oryza sativa
  Clone ID: PAT_MRT4530_49984C.1.pep
MGPFSGIDDLVFPPGQTFRFGSLDFITDNFGKISLLDSESNQSGENRISVPFGFPNAVESYFKTISPNQDDGAYPPVLMKLPDDLAAVFTTTASSS

SEQ ID NO: 149674 - protein, 1430 aa, Oryza sativa
  Clone ID: PAT_MRT4530_49985C.1.pep
MPPRTRHGRREPTPDPVSENEDSSGDEYVQSDDDNMENVEGDEMEVSDDGDDNESGNGEDDEASDDRSPLDSTIQFVLNLRNAQQYTILRHHNQFRRPNDCNDPRFHTRFQKSVYAQVYANKAFAEHKWISWKHIGETPEFENLQEMFRTVGIDRIVTMKQPFDEDLIRQFYATVWVSGDCDAMKWMSRTLRCSINRRESKELLHIRFNNGDDLHDEHTHNPFPIDHFSQFYEEGGRHTYGKVAGLRALPSVINRIVRATILPRCGNNDDIRGVAWHVIDAIMDGRRFDVINLMMKEIAISKGTLGQGIYYAPYIMRLIQSKLGQIGHNLKEHKEYKPRLQLSSPRAPRVRQPTFDQGASSSAAPPSPQGYDPSAFFHLQYAYFGMQPNDFFNPVLGAIHTLSESIQRLSTGHEALHEDVRGLCTDVGNLNTSVGRLHTRGRSDRPHSGGLTGVPWPVVCEASQILVAHYECPKVYTLHNCTVHYTDGVCNCARCEFCPKKTAFGYNAKEKAKTGVLRNAAALLDEMQLMGETQGAKKVINSELWHACAGPLVCLPQRGSLVYYFPQGHSEQVAATTRKIPNSRIPNYPNLPSQLLCQVHNITLHADKDTDEVYAQMTLQPVNSETDVFPIPTLGAYTKSKHPTEYFCKNLTASDTSTHGGFSVPRRAAEKLFPQLDYSMQPPNQELIVRDLHDNMWTFRHIYRGQPKRHLLTTGWSLFVGAKRLKAGDSVLFISMHIGVLAAAAHAASSGSSFTIYYNPRTSPSPFVIPVARYNKATYMQPSVGMRFAMMFETEESSKRRYTGTVVGISDYDPMRWPNSKWRNLQVEWDEHGYGERPERVSIWDIETPENTLVFPSSTLNSKRQCLPGYGVSVPGMEIGSANMSSFPRAQGNPYGSLQHIPAVGSELAIMLLNQSGQTLGSPLSFHQSSYSSIIQNVKQNYIPPLTVSTSACLTKQESLPSDDAQHQFHMANMQNGDLEGSEVQPVIDSISESKLNATSRDPRNTDSYTSRSTSEQNSKGEPRGKTRRSKKGLPHKTVSEKSDLSSAPSWICDNQQVGLESKLVGCDEQVNCGNIEDSSGALTQGNFVGQPHGHQVEQKGVLSPPKVESSKSPDGGKSVNSFPNQGCFSQFIDGLDWMTQPSYYQDSNVIQPAGVSENIFSSSADIPPSMIADTMETFQASCLSDCLPNSIQEFISSPDLNSLTFLSPDMQNLEVQLQHDGSNLPSTSNSFVQMSFSEESASQSANLSGLHMESTHRSINTTSCSQPMSTGGFDAGMYSKLPRLKESQILSLPEIHTNSMGTSACSMDATEYSLDRSAKPMKPPVRTYTKVQKQGSVGRSIDVTGFRNYHELRSAIACMFGLQGKLEHPGSSEWKLVYVDYENDVLLVGDDPWEEFINCVRCIRILSPSEVQQMSENGMHVLNDCIQAA

SEQ ID NO: 149675 - protein, 955 aa, Oryza sativa
  Clone ID: PAT_MRT4530_49987C.1.pep
MASSQEKAKTGVLRNAAALLDEMQLMGETQGAKKVINSELWHACAGPLVCLPQRGSLVYYFPQGHSEQVAATTRKIPNSRIPNYPNLPSQLLCQVHNITLHADKDTDEVYAQMTLQPVNSETDVFPIPTLGAYTKSKHPTEYFCKNLTASDTSTHGGFSVPRRAAEKLFPQLDYSMQPPNQELIVRDLHDNMWTFRHIYRGQPKRHLLTTGWSLFVGAKRLKAGDSVLFIRDEKSQLLLGVRRATRQQTMLSSSVLSTDSMHIGVLAAAAHAASSGSSFTIYYNPRTSPSPFVIPVARYNKATYMQPSVGMRFAMMFETEESSKRRYTGTVVGISDYDPMRWPNSKWRNLQVEWDEHGYGERPERVSIWDIETPENTLVFPSSTLNSKRQCLPGYGVSVPGMEIGSANMSSFPRAQGNPYGSLQHIPAVGSELAIMLLNQSGQTLGSPLSFHQSSYSSIIQNVKQNYIPPLTVSTSACLTKQESLPSDDAQHQFHMANMQNGDLEGSEVQPVIDSISESKLNATSRDPRNTDSYTSRSTSEQNSKGEPRGKTRRSKKGLPHKTVSEKSDLSSAPSWICDNQQVGLESKLVGCDEQVNCGNIEDSSGALTQGNFVGQPHGHQVEQKGVLSPPKVESSKSPDGGKSVNSFPNQGCFSQFIDGLDWMTQPSYYQDSNVIQPAGVSENIFSSSADIPPSMIADTMETFQASCLSDCLPNSIQEFISSPDLNSLTFLSPDMQNLEVQLQHDGSNLPSTSNSFVQMSFSEESASQSANLSGLHMESTHRSINTTSCSQPMSTGGFDAGMYSKLPRLKESQILSLPEIHTNSMGTSACSMDATEYSLDRSAKPMKPPVRTYTKVQKQGSVGRSIDVTGFRNYHELRSAIACMFGLQGKLEHPGSSEWKLVYVDYENDVLLVGDDPWEEFINCVRCIRILSPSEVQQMSENGMHVLNDCIQAA

SEQ ID NO: 149676 - protein, 499 aa, Oryza sativa
  unsure (1)..(499): unsure at all Xaa locations
  Clone ID: PAT_MRT4530_49988C.1.pep
LRSTTLLKRGNNSKAEYNHRTQQATPTMQTCKGNTRTVSPPPLKRQWAVPSCAAVNPAAGQPDTPADPTPSRPPSPPVPRKGSSYTSDQAVTHSRLWQALKGLPLTSXKGPAPTGGPHTSASQRGRALVHGXHSAAAQGGARLPAGRPXKAAARACDRQRRRAREEGGGARGKKKEGKEGEGDLTGGAAMAGGEKRGRRRRPAMPRCGRATATPREXRGEELGRRKTPTATIHAGRSRRGERTHRRREGNGVSVVFRRRRAAAGKGLAAAVGPRGKGERRRRLGGDDDRWGLGSTCRRGEEGGGGREGSCGGEASGGGGLVRRRLXRRRHTAGXGDGRRRKWRRCELGRGHGMERXERKTREEGMGSIWRSXWWRWLSAAAALATAAHGRSAATGGGVSGGGASSXGARDGAVRAGRRGVGAAKAEEVGAAAVSARRRTXSAGGGGRTRQVGPRGKGERRRRLGGDDDRWGLGSTCRRGEEGGGWGLCGLGGGGAKKIE

SEQ ID NO: 149677 - protein, 480 aa, Oryza sativa
  Clone ID: PAT_MRT4530_49989C.1.pep
MPPRTRHGRRAPTPDPVSENEESSEDEYVESDEDNMENVEGDEMEVSDDGDDNESGNGEDDEASDDGSPLDSSIQFVLNLRNAQQYTILCHHDQFRRPNDCNDPRFHTRFQKSVYAQVYANKAFAEHKWISWRHIGETPEFENLQEMFRTVGIDRIVTMKQPFDEDLIRQFYATVWVSGDCDAMKWMSGTLRCSINCREFKEFLHIRFNNGDDLHDEHTHNPFPIDHFSQFYEEGGRHTYGKVAGLRALPSVINSIVRATILPRCGNNDDIRGVAWHVIDAIMDGRRFDVINLMMKEIVISKGTLGQGIYYAPYIMRLIQSKLGQIGHNLKKHKEYKPRLQLSSPRAPRVRQPTFDQGASSSAAPPPPQGYDPSAFFHPQYAYFGMQPNDFFNPVLGAINTLSESIQRLSTGHEALHEDVRGLRTDVGNLNTSVGRLHTRVGVLDSRVQTLESTQAFVYHRRRDASHPSTSARPPSPPQE

SEQ ID NO: 149678 - protein, 1343 aa, Oryza sativa
  Clone ID: PAT_MRT4530_4998C.1.pep
MATSIMITLLLYLWFLASIAIASIAIASTPDSVTAGNGSDTDVTALLAFKAQLADPRGVLSNWTTATSFCHWFGVSCSRRRARVVALVLHDVPLQGSISPHLGNLSFLTVLNLTSTGLTGAIPADLGKLHRLEVLVFRRNSLSGVIPPVVGNLTRLEVVDMGHNSISGQIPLELQKLHNLTHIDFITNYLTGPLPNDLFSNNSKLQYLDFGNNSLTGTLPYSVGSLGMLQHLDFQANHFSGPVPTTILNMSKLQILSLGGNWGLTGTIPGNNNTFNLPMLQMISLFANRFTGQIPLGLANCKYIQIISIGENSFEGPVPTWLSKLPDLLLLDLGYNNLIGQIPSALGNITNLVSLGLQSCTLSGLIPQELGQLQQLNALYLDHNHFTGSIPTFFANFSELQVFLIGANSFTGSVPTALGSSRSIEWFNIGGNYQEGSLDFLATLSNCQNIWEVGFDLNDFTGKLPDYVGNFSSTLINFFAEGNKLSGELPSTLSNLSNLVWLDISNNQLTGTIPESIKLMDKLQLLNLSGNSLSGSIPRQIGQLWNLQTLILNNNNFSAGFCAAVTSQSYAAASWRSHPSRSKAARRRRWPGQAWSQRMRPTVSPLRRRSLLSQNVGYNSLSGQIPRELQNLRNLRYIDLLVNYLTGPLPNDLFNNTPKLKYLNFRNNSLSGTIPVGIGTLPILQHLEIAYNHFSGPVPELIFNMSKLEMLHLGGNGYLDGSIPGNKSFNLPMLQKICLYENRFMGQIPLGLADCKYLQWIFIGHNLFEGPVPAWLGKLPDLVLLDLESNNLVGPIPSALGNLSNLDTLGLQSCNLTGQIPQELAQLRKIKGLFLDHNHFTGSIPTFFANFSELAVFLIGANSFTGAVPTAIGSTGSVEWFNIGDNYLQGSLDFLATLSNCQNIWEVGFDLNYFTGELPNYVGNFSSTLINFFAVGNRLSGDLPSTLLNLSNLVWLDLSNNQLTGTIPESIMLMDKLQVLNLSGNIMSGTIPRQIGHLRNLQTLILNNNNFSGVLPNDLGNLSNLQYLVLSKNHMSSTIPASLFHMNSLITVDLSQNSLEGALPVDIGQLNHIDRIDLSSNRLFGRIPESFGQFLMTTYLNLSHNSLNGSFPNSFDKLINLKSLDVSYNDLSGTIPQYLANFTDLSSLNLSFNNLHGPIPEGGIFANITLQSLMGNPALCGGVPRLGFMPCKSNNNSNKRQILKFLLPSVIIVVGVIATCMYMMMRKKAKQQDRIISPDMEDVLNNRLISYHDIVRATDNFSETKLLGAGSFGKVFKGQLNDGTMVAIKVLNMELEQAIRSFDSECHALRMARHRNLIRILTTCSNLDFFFSPGRPKEANRVY

SEQ ID NO: 149679 - protein, 1036 aa, Oryza sativa
  Clone ID: PAT_MRT4530_49990C.1.pep
MMQLTTTWPWRFFFCLFFHLLFLFPTNSLNQSYCDPGDASALLGFMQGLSGSGSGWTVPNATSETANCCAWLGVKCNDGGRVIGLDLQGMKLRGELAVSLGQLDQLQWLNLSSNNLHGAVPATLVQLQRLQRLDLSDNEFSGEFPTNVSLPVIEVFNISLNSFKEQHPTLHGSTLLAMFDAGYNMFTGHIDTSICDPNGVIRVLRFTSNLLSGEFPAGFGNCTKLEELYVDLNSITGSLPDDLFRLSSLRDLSLQENQLSGRMTPRFGNMSSLSKLDISFNSFSGYLPNVFGSLGKLEYFSAQSNLFRGPLPSSLSHSPSLKMLYLRNNSFHGQIDLNCSAMSQLSSLDLGTNKFIGTIDALSDCHHLRSLNLATNNLTGEIPNGFRNLQFLTYISLSNNSFTNVSSALSVLQGCPSLTSLVLTKNFNDGKALPMTGIDGFHNIQVFVIANSHLSGSVPSWVANFAQLKVLDLSWNKLSGNIPAWIGNLEHLFYLDLSNNTLSGGIPNSLTSMKGLLTCNSSQQSTETDYFPFFIKKNRTGKGLRYNQVSSFPPSLILSHNMLIGPILPGFGNLKNLHVLDLSNNHISGMIPDELSGMSSLESLDLSHNNLTGSIPSSLTKLNFLSSFSVAFNNLTGAIPLGGQFSTFTGSAYEGNPKLCGIRSGLALCQSSHAPTMSVKKNGKNKGVILGIAIGIALGAAFVLSVAVVLVLKSSFRRQDYIVKAVADTTEALELAPASLVLLFQNKDDGKAMTIGDILKSTNNFDQANIIGCGGFGLVYKATLPDGATIAIKRLSGDFGQMEREFKAEVETLSKAQHPNLVLLQGYCRIGNDRLLIYSYMENGSLDHWLHEKPDGPSRLSWQTRLQIAKGAARGLAYLHLSCQPHILHRDIKSSNILLDEDFEAHLADFGLARLICPYDTHVTTDLVGTLGYIPPEYGQSSVANFKELLTGKRPVDMCKPKGARELVSWVLHMKEKNCEAEVLDRAMYDKKFEMQMVQMIDIACLCISESPKLRPLTHELVLWLDNIGGSTEATK

SEQ ID NO: 149680 - protein, 98 aa, Oryza sativa
  Clone ID: PAT_MRT4530_49991C.1.pep
AEQPLPPILPPTLREPSSPASPCAAATGVPSLPAEPPPPHRSPPPPRRLRRPLEPDPSHVRLGATGSVASSPSLCRIHPVGVAPPPPRRATAATPSPR

SEQ ID NO: 149681 - protein, 1525 aa, Oryza sativa
  Clone ID: PAT_MRT4530_49992C.1.pep
MGPFSGIDDLVFPPGQTFRFGSLDFVTDNFGKISLFDSESDQSGENRISVPFGFPNAAETYFKTISIESASNHSAEIASSPTTPDQDDGAYPPVLMKLPDDLAAVSTATASSSRRPRRKSVSTPISPSFREVGVILQPLGTVSTDQLDDHYSSPTVDSRPTDIVEYDEFSSRYHDPDLDDFDGSLDDNYTPLYFGVFMANNETEEQRQARETEERRRLEEEHQAQEQERLRREQQDRERIAKEAEDRRQRALEAGRRARDLIGQQDVEGTPVFRTPQQNAVAAITLLDTLLNQSELNRSDHVVNILNQTKTMIAASVPVNSESVHTPTGSRVPHFRSHDYRHPSLSITGPPGAIPRSELKPSNAPFHGVIPGLSATPLGQITLPVTFGTRENFRTENISFEVADFETAYHAILGRPALAKFMAVPHYTYMMMKMPGPRGVLSLRSDIKQAVTCDKESCDMAQTREMASAREDIRLAAATASEGEIPATKTSKSGESEAKTKKIPLDPSDSTKTANNKDIFAWKPSDMPGIPREVIEHSLHVKEDAKPIKQRLRRFAQDRKDAIKEELTKLLAAGFIKEVLHPDWLANPVLVRKKTGQWRMCVDYTDLNKSCPKDPFGLPRIDQVVDSTAGCELLSFLDCYSGYHQIQLKESDCLKTSFITPFGAYCYVTMPFGLKNAGATYQRMIQRCFSTQIGRNVEAYVDDVVVKTKQKDDLISDLEETFASIRAFRMKLNPEKCTFGVPSGKLLGFMVSHRGIQANPEKVTAILNMKPPSTQKDVQKLTGCMAALSRFVSRLGERGMPFFKLLKKTDSFRWGPEAQKAFEDFKKLLTEPPVLASPHPQEPLLLYVSATSQVVSTVLVVEREEEGHVQKVQRPIYFVSEVLADSKTRYPQVQKLLYGILITTRKLSHYFQGHSVTVVTSFPLGDILHNREANGRIAKWALELMSLDISFKPRISIKSQALADFVAEWTECQEDTPAENMEHWTMHFDGSKRLSGTGAGVVLISPTGERLSYVLWIHFSASHNVAEYEALLHGLRIAISLGIKRLIVRGDSQLVVNQVMKEWSCLDDNMMAYRQERETAPSDVFVEHLYTPTVPHKDTIQDADTHDVAMVEADWREPFIRFLISQELPQDKDEAERISRRSKLYVMHESELYKKSPSGILQRCVSLEEGRQLLKDIHSGICGNHAAARTIVGKAYRQGFFWPTAVSDADKIVRTCEGCQFFARQIHLPAQELQTIPLSWPFAVWGLDMVGPFKKAVGGYTHLFVAIDKFSKWIEAKPVVTITADNARDFFINIVHRFGVPNRIITDNGTQFTGGVFKDFCEDFGIKICYASVAHPMSNGQVERANGMILQGIKARVFDRLKPYAGKWVQQLPSVLWSLRTTPSRATGQSPFFLVYGAEAMLPSEVEFESLRFRNFREDRYEEDRVDDLHRLEEVREAALIRSARYLQGLRRYHNRNVRSRAFLVGDLVLRKIQTTRDRHKLSPLWEGPFIISEVTRPGSYRLKREDGTLVDNSWNIEHLHRFYA

SEQ ID NO: 149682 - protein, 201 aa, Oryza sativa
  Clone ID: PAT_MRT4530_49993C.1.pep
MMPNHTGPSPHNKNSSITSLRLTPFGRGHNGGLYKNPRRKCSNGLMNKERDKWPEQINAIKYTPHFHRSTRMDAGFDTLWPMVRAGFARSLLLHFVCVVCALQCLCAHHIPLGSASAPSMGSRDGWRLLLLLLGFLLVAPTCRAREAQPLPVLEEEEGGASMLAPSSCHVEVPPTISGSAAVLLYDPPAASHINIYDASTN

SEQ ID NO: 149683 - protein, 476 aa, Oryza sativa
  Clone ID: PAT_MRT4530_49994C.1.pep
MKLNPEKCTFGVPSGKLLGFMVSHRGIQANPEKVTAILNMKPPSTQKDVQKLTGCMAALSRFVSRLGERGMPFFKLLKKTDDFQWGPEAQKAFEDFKKLLTEPPVLASPHPQEPLLLYVSATSQVVSTVLVVEREEEGHVQKVQRPIYFVSEVLADSKTRYPQTECQEDTPAEKMEHWTMHFDGSKRLSGTGAGVVLISPTGERLSYVLWIHFSASHNVAEYEALLHGLRIAISLGIKRLIVRGDSQLVVNQVMKEWSCLDDNMMAYRQEVRKLEDKFDGLELSHVLRHNNEAADRLANFGSKREVAPSDVFVEHLYTPTVPHKDTTQVAGTHDVAMVSADWREPLIRFLTSQELPQDKDEAERISRRSKLYVMHEAELYKKSPSGILQRCVSLEEGRQLLKDIHSGICGNHAAARTIVGKAYRQGFFWPTAVSDADKIVRTCEGCQFFARQIHLPAQELQTIPLSWPFAVWGLDM

SEQ ID NO: 149684 - protein, 144 aa, Oryza sativa
  Clone ID: PAT_MRT4530_49995C.1.pep
MGSETGSASTSAQPSPDRSSNLDLSPSNDHDSTDACTDPTATPPVGATHLPLISSLHTAPTLTTIATPLVGAQHTRHHAAQNLHHLGAVHRYNVHGRHDEKRKVQPLPDEKKSNTSRRFGVGGYFVMFLSPLMMPSLLGSDGLR

SEQ ID NO: 149685 - protein, 52 aa, Oryza sativa
  unsure (1)..(52): unsure at all Xaa locations
  Clone ID: PAT_MRT4530_49996C.1.pep
MIIHENGGQDNMEGENMNAQEGTTSPGYIGADARHPNLHKKIXIPQGGGGTG

SEQ ID NO: 149686 - protein, 75 aa, Oryza sativa
  unsure (1)..(75): unsure at all Xaa locations
  Clone ID: PAT_MRT4530_49997C.1.pep
HIVVFMIPLRPEEYRQRFLLLQILHKVCSNNSFPLRQXXGXPXXFXKGNSRINLVXTDHWIXLXASASPARSXLY

SEQ ID NO: 149687 - protein, 108 aa, Oryza sativa
  unsure (1)..(108): unsure at all Xaa locations
  Clone ID: PAT_MRT4530_49998C.1.pep
WGCGLRRRGVSMEGRPDLASSSLLEVHHEGPSAGPTETKNIGERLRPEASGKGREKNHMGESHMAKAVARXYADFARQRPRQKAARAKTVRRKPWHEGTGFAKYRTPP

SEQ ID NO: 149688 - protein, 119 aa, Oryza sativa
  Clone ID: PAT_MRT4530_49999C.1.pep
MHWRLPESGWIKLKSDGGFAADEQMGSGGVIVRNDRGEFMGANRIFFGEVLSATHAEALACLEATRVGARLAATRVVFETDSVEVVSLVMNKSFDRFEIGPVIQELKRGIQSFQDFKLI

SEQ ID NO: 149689 - protein, 2025 aa, Oryza sativa
  unsure (1)..(2025): unsure at all Xaa locations
  Clone ID: PAT_MRT4530_4999C.1.pep
SQHNPHSLQNPCTNVPQYPLYPVYGYHPSTVARQVGGLDTQGSTTMSSSFVDNNVNTSLSQALPASTMLVWTQVGEIVFLVYTTTPISTGPPMTGNENTVATNQGDSMSKNPPVKTENGSSTTSKLGKDSDTAKPCPSDMNHEPAKMTSETXIHKTKKHTLQDCWVFLNVRAEIRACKERGIQRTSPTRDVYCPIHKTNNHDLSSCKVFLGAMKDPSPKSYVPVRDNGKEQGATLASDRFVGVIDIDPHEPSVLHLLEDYGSSTTSVPREVLAIDDVGTSAQANAEAANQSTTPAQHIRAIQAILRETPYDPVLNDDLERWTERLRESVTNLSNAFEEAATAAHQDQPPTGDANGEDPERRESPQRATPPPHGAGDLRDQINGRREARRTRDNVNRSRRHVSSRRHDNGNRGDRSNEDRDHDNHHDRNDRERRGPDNTGHGRRRNDDDNGDRRRDNSERQRQDSRDPGCHPRNRTLEPSDPSSSSSSASSSSSDRHPQRTHDHRQPTAPNAGCRAFGRSLRDVRXSTDPEEFLQVYSTVLYVAGADDNALANYLPTTLKGSARSWLMHLPPYSISSWAGLWQQFVANFQGTYKRHAIEDDLHALTQNSGESLREYVRRFNECRNTIPEITDASVIRAFKSGVRDRYTTQELATRRITTTRRLFEIVERCAHVDVAVRRKNDKPKTGGEKKSATDASESSKKKNRKNGKRKAQAEVLAAEYANPPKRPDPQGNDTKKSWCPIHKTDRHSLEDCLVFKKSLEKHMAFEKGKRVRVVEKNEETAPHESDSAYPDSDLHVSHIXAAPQRRYPIVVEPTIWNIKVARVLIDGGSSINLLFASTLGAMGHPQSELTPTDQPFHGITPXSSSRPLGKITLPVTFGRANNFRTEQITFDVAEFDTAYNAIIGRTALAKFMAAPHYAYQVLKMPRLKGTITIQGNAKLAVQYDKRSLDIVEQTPSPPATTEPPKKVSKTNKTPKPDGAIKIVPLSSANLDKTELALVTFLRDNADVFAWQPSDMPGVPREVIEYKLMVRPDAKPVKQRLRRFAPDQKQAIREELDKLLKAGFIREVLHPEWLANPVMVRKANGNWRMCVYFTDLNKACPKDHFPLPRIDQLVDSTAGCELLSFLDAYSGYHQISMPKEDEEKTSFITRFGVFCYVKMPFGLITARNTFXCTVQGALSNQLGNNDEAYVDDIIVKTKTSDSLIDDLRETFDNLRRYRLMLNPEKCTFGVPSGKLLGFLVYGRGIEVNPEKIKAIENMNXPTRLKEVQKLTGCMTSLSRLVARMGERAQPFYALLKKQDKFIWTQEAEEAFIALKRYLSNPPVLVAPQPTEELFLYIAATPYSVSTVIIVEREKVQRSVYYVSEALHDAKTRYPQIQKLLYAVIMTSRKLRHYFXAHRVKVVSSFPLGEVVRNKDVVGRIAKWVVELSQFDVHFLPRTAIKSXVLADFVADWTMPDNKSDNQGDNETWTMAFDGALNSQGPGAGFILTSPSGDQFKHAIHLNFRATNNTAEYEGLLAGIRAAAALGAKRLIVKGDSELVANQVHKDYKCSNPELSKYLAEVRKLEKRFDGIEVRHVYRKDNVEPDDLARRASRREPLEPGTFLDILTKPSVKEVSGEVSPNTPDISSEVTEAERAIADIETTDDWHIQLIKFISSKELPEDDTEAEKITRKAKIYCMVGNDLYKKALNGVLLKCVSPDDGRHLLLDIHEGICGSHAAGRTLVGKAFRQGFFWPTALKDACDMXTHKATRASAPDYPSDLVVLVLGARYTWAIPTRTGRLQIPIXVAIDKFTKWIEAVPTREIKADNAIKFIRGIFCRYGVPHRIITDNGSQFISADFQDYCIGLGVKICFASVSHPQSNGQVERANGIVLQGMKTLLWAVRTTPTTSNKETPFFLVYGSEAMLPGELRHQSTRVQKYSDENQEEQXDIDANLLEEHRERVAVRAASYQQSLRRYHEKHIRARILSIGNYVLRRVQAQAGXNKLSPKWKGPYTITQVLRPGAFKIADGDGRELANFWNIDQLRKFYV

SEQ ID NO: 149690 - protein, 62 aa, Oryza sativa
  Clone ID: PAT_MRT4530_499C.1.pep
LCCALVLGACTFLPMLIVHFFIAHAYMKSNVLCKVRKKYSQKGHAQNMGFVVTKKGIQLRKI

SEQ ID NO: 149691 - protein, 80 aa, Oryza sativa
  Clone ID: PAT_MRT4530_49C.1.pep
RRKLIETAKQMDNPSDRDTSNIVSNPLHLRNPNFGVLYHLYSIYILDLFCSRNYITSSVRPPATTPWTKRMESRQVGQDV

SEQ ID NO: 149692 - protein, 84 aa, Oryza sativa
  Clone ID: PAT_MRT4530_4C.1.pep
RRRPQRQRQARIEDGRTTVSSSCGLLIFTDDRYIQVIKLAGIRMHLVAFCLVSRSPAVCAARYVISFRCFSDVVINYVVPTCTL

SEQ ID NO: 149693 - protein, 78 aa, Oryza sativa
  unsure (1)..(78): unsure at all Xaa locations
  Clone ID: PAT_MRT4530_50000C.1.pep
PXKSKILFKKTSPHPXXPLXLSHIPYKKTSNQPSLQPLFTYYNKTSHQIHSFFSILNSQHFHTKHNLFNYQLISSLYI

SEQ ID NO: 149694 - protein, 155 aa, Oryza sativa
  Clone ID: PAT_MRT4530_50001C.1.pep
RRPRRRTMARAAGRPSRRRSETGSSSGRRRLGSSAAAPPRRRASAPARVGRQRRRQTARQWWPTTSRRRRSTIRGRAGADRRPPGTPLQRTRPPSRQPHTPPPRPHLPPRSATGSGSASRRRRRAARTTAAACRARRRRRRAARSEATSAGSPSG

SEQ ID NO: 149695 - protein, 345 aa, Oryza sativa
  Clone ID: PAT_MRT4530_50002C.1.pep
TRPRAEFGMGTPSQGSAAVAAAGVDLCVLDLVPVFAKEMIAGGVAGAFSKTAIAPLERLKILLQTRTNEFSSLGVLKSLKKLKQHDGILGFYKGNGASVLRIVPYAALHYMAYERYRCWILNNCPSLGTGPLVDLLAGSASGGTAVLCTYPLDLARTKLAFQVNSSDQISSGLKRTNFQPKYGGIKDVFRGVYSEGGVRALYRGVGPTLMGILPYAGLKFYIYEGLKAHVPEDYKNSVTLKLSCGAAAGLFGQTLTYPLDVVRRQMQVQSQQYHDKFGGPQIRGTFQGLMIIKQTQGWRQLFAGLSLNYIKVVPSVAIGFTAYDTMKSLLKIPPREKKMSGHGSN

SEQ ID NO: 149696 - protein, 129 aa, Oryza sativa
  unsure (1)..(129): unsure at all Xaa locations
  Clone ID: PAT_MRT4530_50003C.1.pep
FPQGGQQLLRARGGGVPPPPGGNTSFLTEKNRELQREEKDPLFDPQRGFPPGTKSPNPKPPKRGAKRGKRRKKKRGNEGPPMGIPPRGDGGYERLTXANSGGGPGPRAPTSRGPGPPPGRGLWGPPGGG

SEQ ID NO: 149697 - protein, 128 aa, Oryza sativa
  unsure (1)..(128): unsure at all Xaa locations
  Clone ID: PAT_MRT4530_50004C.1.pep
LAYKRAHHNNHYDGAINNMHRDEEERYYPXSHAPLRHAPPTPITPRPEVGRRQKATIHKQNEHSQXGERHRSRAPDRQGRKKRRFAGELAHPKVSARDCSTYRVNYLSQSDELVKAKTEARDAVKPSM

SEQ ID NO: 149698 - protein, 83 aa, Oryza sativa
  Clone ID: PAT_MRT4530_50005C.1.pep
MGNTELTASTPSWKELKKSAPTGRVEAGQGHRGAPAAGSQELAFDAIEEGIEEVGADGEGSRSMPPPPATRAASASASASASA

SEQ ID NO: 149699 - protein, 197 aa, Oryza sativa
  Clone ID: PAT_MRT4530_50006C.1.pep
MKRPPPREDGAGSGGGDGAKKGKGRWGGGGRRRNEQRLGSGGGGALSLAAFAYAKSRNTGYNPALIKKQKEFYKNAKLISKYKRSKKQQNQSSNPPPFPIPKEGGDDANNASKLHSKKKKRVAPSLNEEYEKKRAEDEKAKKEREAIIQAKREERERSEARRRDLREKMFKKTRSGQPVMKYRIQHLLETALESSNK

SEQ ID NO: 149700 - protein, 95 aa, Oryza sativa
  Clone ID: PAT_MRT4530_50007C.1.pep
PSHRHRRPSSSSTSERRPSAATAKPPPVVLLVTEPTPPVVASGSPPRRRAAAPPPPLLRIHRQRRPSASRRQAAAPPQPQLPPALLVAESPPLLR

SEQ ID NO: 149701 - protein, 65 aa, Oryza sativa
  Clone ID: PAT_MRT4530_50008C.1.pep
MDLGGTNRVQELPDNDTEWEAAVAVKLMCSGYKELASSLRNKKFCKGARVHTFSPPRHHEVYVVG

SEQ ID NO: 149702 - protein, 199 aa, Oryza sativa
  Clone ID: PAT_MRT4530_50009C.1.pep
MPRRTSATAPFAQTSAETPLPPCTRVACRRRLSRSRALPPPQPASPPRGQARPPIPFSPPPPEPPPRHTTLPAAFFRLRSPFAFTPAAAATHRLHRRLRRVPLFPIRRPVAAFRRWEPLLLVDLWSAAASLRRLLSPSPCPSVSSTTSLSLTAPVSSRRFPRCAPPLPATPGLCAAVALVPAAAAASLVCAPLLTSAMT

SEQ ID NO: 149703 - protein, 125 aa, Oryza sativa
  Clone ID: PAT_MRT4530_5000C.1.pep
MPSRRRHADPGEEGPDPAIGAPDPPPPLHLAAVAAMDHAGRELRRLRPSRRGGRRYEEKKASPPPSLPAAGFAAGGLQRRRGGGREGEKAQAARVFRPRAARRESDAGGGFHLRRRRGRAAVGRA

SEQ ID NO: 149704 - protein, 999 aa, Oryza sativa
  Clone ID: PAT_MRT4530_50010C.1.pep
MAVPHYTYMMMKMPGPRGVLTLRSDIKQAVTCDKESCDMAQTREMASAREKIRLAATTESALITFLQNNKDIFAWKPSDMPGIPREVIEHSLHVKEDAKPIKQRLRRFAQDRKDAIKEELTKLLAAGFIKEVLHPDWLANPVLVRKKTGQWRMCVDYTDLNKSCPKDPFGLPRIDQVVDSTASCELLSFLDCYSGYHQIRLKESDCLKTSFITPFGAYCYVTMPFGLKNAGATYQRMIQRCFSTQIGRNVEAYVDDVVVKTKQKDDLISDLEETFASIRAFRMKLNPEKCTFGVPSGKLLGFMVSHRGIQANPEKVTAILNMKPPSTQKDVQKLTGCMAALSRFVSRLGERGMPFFKLLKKTDNFQWGPEAQRAFEDFKQLLTKPPVLASPHPQEPLLLYVSATSQVVSTVLVVEREEEGHVQKVQRPIYFVSEVLADSKTRYPQVQKLLYGILITTRKLSHYFQGHSVTVVTSFPLGDVLHNREANGRIAKWALELMSLDISFKPRTSIKSQALADFVAEWTECQEDTPVEKIEHWTMHFDGSKRLSGTGAGVVLISPTGERLSYVLWIHFSASHNVAEYEALLHGLRIAISLGIKRLIVRGDSQLVVNQVMKEWSCIDDNMMAYRQEVRKLEDKFDGLELSHVLRHNNEAADRLANFGSKREAAPSDVFRRTPLFPDMSDADKIVRTCEGCQFFARQIHLPAQELQTIPLSWPFRVWGLDMVGQFKKAVGGYTHLFVAIDKFSKWIEAKPVVTITADNARDFFINIVHRFGVPNRIITDNGTQFTGGVFKDFCEDFGIKICYASVAHPMSNGQVERANGMILQGIKARVFDRLKPYAGKWVQQLPSVLWSLRTTPSRATGQSPFFLVYGAEAMLPSEVEFESLRFRNFREERYEEDRVDDLHRLEEVREAALIQSARYLQGLRRYHNRNVRSRAFLVGDLVLRKIQTTRDRHKLSPLWEGPFIISEVTRPGSYRLKREDGTLVDNSWNIEHLRRFYV

SEQ ID NO: 149705 - protein, 1170 aa, Oryza sativa
  Clone ID: PAT_MRT4530_50011C.1.pep
MGSVSGIDDLVFPPGQAFRFGSLDFITNDFGKISLLDSESDQSGESQISAPFGVPNAAKIYFKSISIESASNHSDEIASSSTSSDRDDGAYPPILMKLPDDLAAVFTTTTSPPREPRRSHDQDLDDFDESLEDNYTPLYFGVFMADNETEEQRQAREAEARREAERRRLEEERQAQEQEWLRREQQECERAAKEAEDRRQRALDAGRRARDLIGQQDVEGTLVFRTPQQNVVAAITLLDTLLKENELNQSDHVVNILNQTNTMIAASVPVNSESVRTPTGSRVPHLRSHDYCQPSLSIAGARSNRRSRGHDERSIHSPPDHHRERRVERPHRRPVDLRDTIIQRRAARGHHHSPDRYDDDLDGVAAFTNDLRRVDWPAGFKPTGIEKYDGTTNPESWLTVYGLAIRAAGGDSKAMANYLPVALADSARSWLHGLPRGTIGSWAKLRDHFIANFQGTFERPGTQFDLYNVIQKSGESLRDYIRRFSEQRNKISDITDDVIIAAFTKGIRHEELVGKFGRKPPKTVKLMFEKANEYTKAEDAVIASKQSGSNWKQKKDTPATGGGGSNNHKDRKRKPEELVATTTHSSRQRSCVNTFDKIMNSQCPHHPNSNHVAKDCFVYQQFAEKYAKTTRKNSDEDQKYEALLHGLRIAVSLGIKRLIVRGDSQLVVNQVMKEWSCLDDNMTAYRQEVRKLENKFDGLELSHVLRHNNEAADRLANFGSKREMAPSDVFVEHLYEPTVPQKETTQVADTQDIAMIEADWREPLLRFLTSQELPQDKDEAVRISRRSRLYVIHEAELYKKSPSGILQRCVSLEEGRQLLKDIHSGICGNHAAARTIVGKAYRQGFFWPTVVSDADKIVRTCEGCQFFARQIHLPAQELQTIPLSWLFAVWGLDMVGPFKKAVGGYTHLFVAIDKFSKSIEAKPVVTITADKVRDFFINIVHRFGVPNQIITDNGTQFTGGVFKDFCEDFGIKICYASVAHPMSNGQVERANGMILQGIKARVFDRLKPYAGKWVEQLPSVLWSLRTTPSRATGQSPFFLVYGAEAMLPSEVEFESLRFRNFREERYEEDRVDDLHRLEEAREAALIQSARYLQGLRRYHNRNVRSRAFLVGDLVLRKIQTTRDRHKLSPLWEGPFIISEVTRSGSYQLKREDGTLVDNSWNIEHLRRFYA

SEQ ID NO: 149706 - protein, 2005 aa, Oryza sativa
  unsure (1)..(2005): unsure at all Xaa locations
  Clone ID: PAT_MRT4530_50012C.1.pep
MGPISGIDDLVFPPGQTFRFGSLDFVTNNFGKISLLDSESDQSGENRISVPFGFPNAAETYFKTISIESASNHSAEIASSPTTPDQDDGAYPPVLMKLPDDLAAVSTTTASSSRRPRRKSASTPISPSFREVGVILQPLGTVSTDQLDDYNSSPTVDSRPTDIVEYDEFSSRYNDFDDFDGSLDDNYTPLYFGVFMANNETEEQRQARETEERRRLEEEHQAQEQERLRREQQDRERTAKEAEDRRHRALEAGRRARDLIGQQDVEGTPVFRTPQQNAVAAITLLDTLLNQNELNQSDHVVNILNQTKTMIAASVPVNSESVHTPTGSRVPHFRSHDYRHPSLSITGAGSNRRSRGHDERSVHSPPDLRRERRVERPRSPPRRRPIDLRDTIIQRRAARGYHHSPDRHDDDLDGVAAFTDDLRRVDWPAGFKPTGIEKYDGTTNPESWLTVYGLAIRAAGGDNKAMANYLPVALADSARSWLHGLPRGTIGSWAELRDHFIANFQGTFERPGTQYDLYNVIQKSGESLRDYIRRFSEQRNKISDITDDVIIAAFTKGIRHEELVGKFGRKPPRTVKLMFEKANEYAKAEDAVTASKQSGPSWKQNKGTPATGGGGSNNHKDRKRKPAELVATASHSSRQRSRVNTFDKIMNSQCPHHPNSNHVAKDCFVYKQFADQYTKTARKNSDEEQSTSRKKDDGDTPAGFQDHRKELNHIFGGPLAYESKRKQKLTEREINAVQPDTPQYLRWSEIAIKFDRSDHPDRVVHPGRYPLVLDPVVRNVKLRRTLIDGGSALNILFAKTLDDMQIPRSELKPSNAPFHGVIPGLSATPLGQITLPVTFGTRENFRTENISFEVADFETAYHAILGRPALAKFMAVPHYTYMMMKMPGPRGVLSLRSDIKQAVTCDKESCDMAQTREMTSAREDIRLAAATASEGEIPATKTSKSGETEAKTKKIPLDPSDPTKTAESALITFLQNNKDIFAWKPSDMPGIPREVIEHSLHVKEDAKPIKQRLRRFAQDRKDAIKEELTKLLAAGFIKEVLHPDWLANPVLVRKKTGQWRMCVDYTDLNKSCPKDPFGLPRIDQVVDSTAGCELLSFLDCYSGYHQIRLKESDCLKTSFITPFGAYCYVTMPFGLKNAGATYQRMIQRCFSTQIGRNVEAYVDDVVVKTKQKDDLISDLEETFVSIRAFRMKLNPEKCTFGVPSGKLLGFMVSHRGIQANPEKVTAILNMKPPSTQKDVQKLTGCMAALSRFVSRLGERGMPFFKLLKKTDNFQWGPEAQKAFEDFKKLLTEPPVLASPHPQEPLLLYVSATSQVVSTVLVVEREEEGHVQKVQRPIYFVSEVLADSKTRYPQVQKLLYGHSVTVVTSFPLGDILHNREANGRIAKWALELMSLDISFKPRISIKSQALADFVAEWTECQEDTPAENMEHWTMHFDGSKRLSGTGAGVVLISPTGERLSYVLWIHFSASHNVAEYEALLHGLRIAISLGIKRLIVRGDXQLVVNQVMKEWSCIDDNMMAYRQEVRKLEDKFEGLELSHVLRHNNEAADRLANFGSKRETAPSDVFVEHLYTPTVPHKDTTQDADTHDVAMVEADWREPFIRFLTSQELPQDKDEAERISRRSKLYVMHESELYKKSPSGILQRCVSLEEGRQLLKDIHSGICGNHAAARTIVGKAYRQGFFWPTAVSDADKIVRTCEGCQFFARQIHLPAQELQTIPLSWPFAVWGLDMVGPFKKAVGGYTHLFVAIDKFSKWIEAKPVVTITADNARDFFINFVHRFGVPNRIITDNGTQFTGGVFKDFCEDFGIKICYASVAHPMSNGQVERANGMILQGIKARVFDRLKPYAGKWVQQLPSVLWSLRTTPSRATGQSPFFLVYGAEAMLPSEVEFESLRFRNFREERYEEDRVDDLHRLEEAREAALIRSARYLQGLRRYHNRNVRSRAFLVGDLVLRKIQTTRDRHKLSPLWEGPFIISEVTRPGSYRLKREDGTLVDNSWNIEHLRRFYA

SEQ ID NO: 149707 - protein, 1733 aa, Oryza sativa
  Clone ID: PAT_MRT4530_50013C.1.pep
MGSVSGIDDLVFPPGETFRFGSLDFVTNNFGKISLLDSVSAQSGENRLSVPFGLPNAAESYFKTISIELASNHSGEIASSPPDQDDGAYPPILMKLPDDSAAASITTASSSRRPRRKSASTPISPSFREVGVILQPLGTVSTDQLNGYYSSPTVDSCPTDIVEYDEFSSRYNEPDLDDFDESLDDNYTPLYFGVFMADNETEEQRQARETEARREAERLRLEEERQAQEQERLRREQQERERTAKEAEDRRQRALEAGRRARDLIGQQDVEGTPVFRTPQQNAVAAITLLDTLLKENELNQSDHVVNILNQTKTMIAASVPVNSESVHTPTGSRVPHFRSHDYRHPSLSITGAGSNRRSRGHDGRSVHSPPDHHGERRVERPRSPPRRRPVDLRDTIIQRRATRGHHHSPDRHDDDLDGVAAFTDDLRRVDWPAGFKPTGIEKYDDSARSWLHGLPRGTIGSWAELRDHFIANFQGTFERPSTQYDLYNVIQKSGESLRDYIRRFSEQRNKISDITDDVIIAAFTKGIRHEELVGKFGRKPPRTVKLMFEKANEYAKAEDAVTASKQSGPSWKPNKGTPATGGGGSNNHKDRKRKPAELVATASHSSRQRSRVNTFDKIMNSQCPHHPNSNHVAKDCFVYKQFADQYTKTTRKNSDEEQSTSMKKDDGDTPAGFQDHRKELNHIFGGPLAYESKRKQKLTEREINAVQPDTPQYLRWSEIAIKFDRSDHPDRVVHPGRYPLVLDPVVRNVKLRRTLIDGGSALNILFAKTLDDMQIPRSELKPSNAPFHGVIPGLSATPLGQITLPVTFGTRENFRTENISFEVADFETAYHAILGRPTLAKFMAVPHYTYMMMKMPGPRGVLSLRSDIKQAVTCDKESCDMAQTREMASVREDIRLAAATASEGEVPATKTSKSGESEAKTKKIPLDPSDPTKTAVIGAEEVIEHSLYVKEDAKPIKQRLRRFAQDRKDAIKEELTKLLAVGFIKEVLHPDWLANPVVDSTAGCELLSFLDCYSGYHQIRLKESDCLKTSFITPFGAYCYVTMPFGLKNAGATYQQETFASIRAFRMKLNPEKCTFGVPSGKLLGFMVSHRGIQANPEKVTAILNMKPPSTQKDVQKLTGCMAALSRFVSRLGERGMPFFKLLKKTDDFQWGPEAQKALEDFKKLLTEPPVLASPHPQEPLLMYVSATSQVVSTVLVVEREEEGHVQKVQRPIYFVSEVLADSKTRYPQVQKLLYGILITTRKLSHYFQGHSVTVVTSFPLDDILHNREANGRIAKWALELMSLDISFKPRISIKSQALADFVAEWTECQEDTPAEKMEHWTMHFDGSKRLSGTGAGVVLISPTGERLSYVLWIHFSASHNVAEYEALLHGLRIAISLGIKRLIVRGDSQLVVNQVMKEWSCLDDNMMAYRQEIRKLEDKFDGLELSHVLRHNNEAADRLANFGSKREAAPFDVFVEHLYTPTVPHKDATQVAGTHDVAMVEADWREPLIRFLISQELPQDKDEAERISRRSKLYVMHEAELYKKSPSGILQRCVSLEEGRQLLKDIHSGICGNHAAARTIVGKAYRQGFFWPTAVSDADKIVRTCEGCQFFARQIHLPAQELQTIPLSWPFAVWGLDMVGPFKKVVGGYTHLFVAIDKFSKWVEAKPVVTITADNARDFFINIVHRFGVPNRIITDNGRQFTGGVFKDFCEDFGIKICYASVAHPMSNGQNATKRTEWMTCTDWKKSAKQL

SEQ ID NO: 149708 - protein, 1986 aa, Oryza sativa
  Clone ID: PAT_MRT4530_50014C.1.pep
MGPISGIDDLVFPPGQTFRFGSLDFITDNFGKISLLDSESDQSGENRISVPFGFPNAAETYFKTISIESASNHSAEIASSSTSPDQDDGAYPSVLMKLPDDLAAVFTTTASSSRRPRRKSASTPISPSFREVGVILQPLGTVSTDQLDDYNSSPTVDSRPTDIVEYDEFSSRYNDFNDFDDFDGSLDDNYTPLYFGVFMANNETEEQRQARETEERRRLEEEHQAQEQERLRREQQDRERTAKEAEDRRQRALEAGRRARDLIGQQDVEGTPVFRTPQHNAVAAITLLDTLLNQNELNRSDHVVNILNQTKTMIAASVPVNSESVHTPTGSRVPHFRSHDYRHPSLSITGAGSNRRSRGHDERSVHSPPDLHRERRVERPRSPPRRRPIDLRDTIIQRRAARGYHHSPDRHDDDLDGVAAFTDDLRRVDWPAGFKPTGIEKYDGTTNPESWLTVYGLAIRAAGGDNKAMANYLPVALADSARSWLHGLPRGTIGSWAELRDHFIANFQGTFERPGTQYDLYNVIQKSGESLREYIRRFSEQRNKISDITDDVIIAAFTKGIRHEELVGKFGRKPPRTVKLMFEKANEYAKAEDAVTASKQSGPSWKPKNTPATGGGGSNNHKDRKRKPEELVATTTHSSRQRSRVNTFDKIMNSQCPHHPNSNHVAKECFIYKQFAEQYTKSTRKNSDEEQSTSRKKDDGDTPAGFQDHRKELNHIFGGPMAYESKRKQKLTEREINAVQPDTPQYLRWSEIAIRFDRSDHPDRVVHPGRYPLVLDPVVRNVKLRRTLIDGGSALNILFAKTLDDMQIPRSELKPSNAPFHGVIPGLSATPLGQITLPVTFGTRENFRTENISFEVADFETAYHAILGRPALAKFMAVPHYTYMMMKMPGPRGVLTLRSDIKQAVTCDKESCDMAQTREMASAREEIRLAATTESALITFLQNNKDIFAWKPSDMPGIPREVIEHSLHVKEDAKPIKQRLRRFAQDRKDAIKEELTKLLAAGFIKEVLHPDWLANPVLVRKKTGQWRMCVDYTDLNKSCPKDPFGLPRIDQVVDSTAGCELLSFLDCYSGYHQIRLKESDCLKTSFITPFGAYCYVTMPFGLKNAGATYQRMIQRCFSTQIGRNVEAYVDDVVVKTKQKDDLISDLEETFASIRAFRMKLNPEKCTFGVPSGKLLGFMVSHRGIQANPEKVTAILNMKPPSTQKDVQKLTGCMAALSRFVSRLGERGMPFFKLLKKTDNFQWGPEAQKAFEDFKQLLTKPPVLASPHPQEPLLLYVSATSQVVSTVLVVEREEEGHVQKVQRPIYFVSEVLADSKTRYPQVQKLLYGILITTRKLSHYFQGHPVTVVTSFPLGDVLHNREANGRIAKWALELMSLDISFKPRTSIKSQALADFVAEWTECQEDTPAENMEHWTMHFDGSKRLSGTGAGVVLISPTGERLSYVLWIHFSASHNVAEYEALLHGLRIAISLGIKRLIVRGDSQLVVNQVMKQWSCLDDNMMAYRQEVRKLEDKFDGLELSHVLRHNNEAADRLANFGSKREAAPSDVFVEHLYTPTVPHKDTTQVAGTHDVAMVEADWREPFMRFLTSQELPQDKDEAERISRRSKLYVMHESELYKKSPSGILQRCISLEEGRQLLKDIHSGICGNHAAARTIVGKAYRQGFFWPTAVSDADKIVRTCEGCQFFARQIHLPAQELQTIPLSWPFAVWGLDMVGPFKKAVGGYTHLFVAIDKFSKWIEAKPVVTITADNARDFFINIVHRFGVPNRIITDNGTQFTGGVFKDFCEDFGIKICYASVAHPMSNGQVERANGMILQGIKARVFDRLKPYAGKWVQQLPSVLWSLRTTPSRATGQSPFFLVYGAEAMLPSEVEFESLRFRNFREERYEEDRVDDLHRLEEVREAALIQSARYLQGLRRYHNRNVRSRAFLVGDLVLRKIQTTRDRHKLSPLWEGPFIISEVTRPGSYRLKREDGTLVDNSWNIEHLRRFYA

SEQ ID NO: 149709 - protein, 1942 aa, Oryza sativa
  Clone ID: PAT_MRT4530_50015C.1.pep
MGSISGIDDLVFPPGQTFRFGSLDFVTNNFGKISLLDSESDQSGENQISAPFGLPNAAESYFKTISTESASNHSGEIASSPTSPDQDDGAYPPILMKLPDDLAAVSITTASLSRRPRRKSASTPISPSFREVGVILQPLGTVSTDQLDGDYSSPTVDSRPTDIVEYDEFSSRYHDPDLDDFDGSLDDNYTPLYFGVFMANNETEEQRQARETEARRETERRRLEEEHQAQEQERLRHEQQERERTAKEAEDRRQRALEAGRRARDLIGQQDVEGTPIFRTPQQNAVAAITLLDTLLRESELNQSDHVVNILNQTKTMIAASVPVNSESVHTPTGSRVPHFRSHDYRHPSLSITGAGSNRRSRGHDERSVHSPPDHHRERRVERPRSPPRRRPVDLRDTIIQRRAARGYHHSPDRHDDDLDGVAAFTDDLRRVDWPAGFKPTGIEKYDGTTNPESWLTVYGLAIRAAGGDSKAMANYLPVALADSARSWLHGLPRGTIGSWAELRDHFIANFQGTFERPGTQYDLYNVIQKSGESLRDYIRRFSEQRNKISDITDDVIIAAFTKGIRHEELVGKFGRKPPRTVKLMFEKANEYAKAEDAVTASKQSGPSWKPKKDTPASGGGGSNNHKDRKRKPAELVATASHSSRQRSRVNTFDKIMNSQCPHHPNSNHVAKDCFVYKQFADQYTKTTRKNSDEEQSTSRKKDDGDTPAGFQDHRKELNHIFGGPLAYESKRKQKLTEREINAVQPDTPQYLRWSEIAIKFDRSDHPDRVVHPGRYPLVLDPVVRNVKLRRTLIDGGSALNILFAKTLDDMQIPRSELKPSNAPFHGVIPGLSATPLGQITLPVTFGTRENFRTENISFEVADFETAYHAILGRPALAKFMAVPHYTYMMMKMPGPRGVLSLRSDIKQAVTCDKESCDMAQTREIASAREDIRLAAATADEGEVPATKTSKSGESEAKTKKIPLDPSDPTKTANNKDIFAWKPSDMPGIPREVIEHSLHVKEDAKPIKQRLRRFAQDRKDAIKEELTKLLAAGFIKEVLHPDWLANPVLVRKKTGQWRMCVDYTDLNKSCPKDPFGLPRIDQVVDSTAGCELLSFLDCYSGYHQIRLKESDCLKTSFITPFGAYCYVTMPFGLKNAGATYQRMIQRCFSTQIGRNVEAYVDDVVVKTKQKDDLISDLEETFASIRAFRMKLNPEKCTFGVPSGKLLGFMVSHRGIQANPEKVTAILNMKPPSTQKDVQKLTGCMAALSRFVSRLGERGMPFFKLLKKTDDFQWGPEAQKAFEDFKKLLTEPPVLASPHPQEPLLLYVSATSQVVSTVLVVEREKEGHVQKVQRPIYFVSEVLADSKTRYPQVQKLSYGILITTRKLSHYFQGHPVTVVTSFPLGDILHNREANGRIAKWALELMSLDISFKPRISIKSQALADFVAEWTEFQEDTPAEKMEHWTMHFDGSKRLSGTGAGVVLISPTGERLSYVLWIHFSASHNVAEYEALLHGLRIAISLGIKRLIVRGDSQLVVNQVMKEWSCLDDNMMAYRQEVRKLEDKFDGLELSHVLRHNNEAADRLANFGSKREVAPSDVFVEHLYTPTEGRQLLKDIHSGICGNHAAARTIVGKAYRQGFFWPTAVSDADKIVRTCEGCQFFARQIHLPAQELQTIPLSWPFAVWGLDMVGPFKKAVGGYTHLFVAIDKFSKWIEAKPVVTITADNARDFFINIVHRFGVPNRIITDNGTQVTGGVFKDFCEDFGIKICYASVAHPMSNGQVERANGMILQGIKTRVFDRLKPYAGKWVQQLPSVLWSLRTTPSRATGQSPFFLVYGAEAMLPSEVEFESLRFRNFREERYEEDRVDDLHRLEEVREAALIRSARYLQGLRRYHNRNVRSRAFLVGDLVLRKIQTTRDRHKLSPLWEGPFIISEVTRPGSYRLKREDGTLVDNSWNIEHLRRFYA

SEQ ID NO: 149710 - protein, 178 aa, Oryza sativa
  unsure (1)..(178): unsure at all Xaa locations
  Clone ID: PAT_MRT4530_50016C.1.pep
MWAPRAAAQGGGSGRRHARHGSSRPAMARRRRRTTAGGDRRRGETAAAGAKAAAAAEDDGARAEGGGAHGGEERKEERGFLTEAMAATGETTTTAAXIAGRRWRGGKNSPAREGRGAPVGFRRREAAAGKALAAAKLTAAAVWRGGDSSGGGSRPKAAASGGASNKRRERDRRHGRAR

SEQ ID NO: 149711 - protein, 28 aa, Oryza sativa
  Clone ID: PAT_MRT4530_50017C.1.pep
PISLNNFFFFFFFFFFFFFFFFFFFFFF

SEQ ID NO: 149712 - protein, 1956 aa, Oryza sativa
  Clone ID: PAT_MRT4530_50018C.1.pep
MGSVSGIDDLVFPPGQTFRFGSLDFVTNNFGKISLLDSESNQSGENRISVPFGFPNAAESCFKTISIESASNHSAEIASSPTSPDQDDGAYPPILMKLPDDLAAVSITTASPSRRPRRKSASTPISPSFREVGVILQPLGTVSTDQLDGYNSSPTVDSRPTDIVEYDEFSSRYNDLDLDDFDGSLDDNYTPLYFGVFMAGNETEEQRQARETEARRETERRRLEEEHQAQEQERLRREQQERERTAKEAEDRRQRALEAGRRARDLIGQQDVEGTPVFRTPQQNAVAAITLLDTLLRENELNQSDHVVNILNQTKTMIAASVPVNSESVHTPTGSRVPHFRSHDYRHPSLSITGAGSNRRSRGHDERSVHSPPDHHRERRVERPRSPPRRRPVDLRDTIIQRRAARGYHHSPDCHDDDLDGVAAFTDDLRRVDWPAGFKPTGIEKYDGTTNPESWLTVYGLAIRAAGGDSKAMANYLPVALADSARSWLHGLPRGTIGSWAELRDHFIANFQGTFERPGTQYDLYNVIQKSGESLRDYIRRFSEQRNKISDITDDVIIAAFTKGISPEELVGKFGRKPPRTVKLMFEKANEYAKAEDAVTASKQSGPNWKPKKDTPASGGGGSNNHKDRKRKPAELVATASHSSRQRSRVNTFDKIMNSQCPHHPNSNHVAKDCFVYKQFADQYTKTTRKNSDEEQSTSRKKDDGDAPAGFQVHRKELNHIFGGPLAYESKRKQKLTEREINAVQPDTPQYLRWSEIAIKFDRSDHPDRVVHPGRYPLVLDPVVRNVKLRRTLIDGGSALNILFAKTLDDMQIPRSELKPSNAPFHGVIPGLSATPLGQITLPVTFGTRENFRTENISFEVADFETAYHAILGRPALAKFMAVPHYTYMMMKMPGPRGVLSLRSDIKQAVTCDKESCDMAQTREMASAREDIRLAAATASEGEVPATKTSKSGESEAKTKKIPLDPSDPTKTANNKDIFAWKPSDMPGIPREVIEHSLHVKEDAKPIKQRLRRFAQDRKDAIKEELTKLLAAGFIKEVLHPDWLANPVLVRKKTGQWRMCVDYTDLNKSCPKDPFGLPRIDQVVDSTAGCELLSFLDCYSGYHQIRLKESDCLKTSFITPFGAYCYVTMPFGLKNAGATYQRMIQRCFSTQIGRNVEAYVDDVVVKTKQKDDLISDLEETFASIRAFRMKLNPDKCTFGVPSGKLLEFMVSHRGIQANPEKVTAILNMKPPSTQKDVQKLTGCMAALSRFVSRLGERGMPFFKLLKKTDDFQWGPEAQKAFEDFKKLLTEPPVLASPHPQEPLLLYVAATSQVVSTVLVVEREEEGHVQKVQRPIYFVSEVLADSKTRYPQVQKLLYGILITTRKLSHYFQGHSVTVVTSFPLGDVLHNREANGRIAKWALELMSLDISFKPRISIKSQALADFVAEWTECQQDTPAEKMEHWTMHFDGSKRLSGTGAGVVLISPTGERLSYVLWIHFSASHNVAEYEALLHGLRIAISLGIKRLIVRGDSQLVVNQVMKEWSCLDDNMMAYRQEVRKLEDKFDGLELSHVLRHNNEAADRLANFGSKREVAPSDVFVEHLYMPTVPHKDTTQFAGTHDEGRQLLKDIHSGICGNHAAARTIVGKAYRQGFFWPTAVSDADKIVRTCEGCQFFARQIHLPAQELQTIPLSWPFAVWGLDMVGPFKKAAGGYTHLFVAIDKFSKWIEAKPVVTITANNARDFFINIVHRFGVPNRIITDNGTQFTGGVFKDFCEDFGIKICYASVAHPMSNGQVERANGMILQGIKARVFDRLKPYAGKWVQQLPSVLWSLRTTPSRATGQSPFFLVYGAEAMLPSEVEFESLRFRNFREERYEEDRMDDLHRLEEVREAALIQSARYLQGLRRYHNRNVRSRAFLVGDLVLRKIQTTRDRHKLSPLWEGPFIISEVTRPGSYRLKREDGTLVDNSWNIEHLRRFYA

SEQ ID NO: 149713 - protein, 83 aa, Oryza sativa
  Clone ID: PAT_MRT4530_50019C.1.pep
GSSPRLGEEGGGLRRPGEERRRAAARRGEAARGGQARRGDARWPGEEGGGARWPRNEGQLQPRCDHQGRRRRWPGEEGGGAGG

SEQ ID NO: 149714 - protein, 69 aa, Oryza sativa
  Clone ID: PAT_MRT4530_5001C.1.pep
MGFWVTTLIFLLAGFVASLFSLLCCNRGPSTNLFHLTLVITATVCCWMMWAIVYLAQLKPLINPILSGE

SEQ ID NO: 149715 - protein, 2289 aa, Oryza sativa
  Clone ID: PAT_MRT4530_50020C.1.pep
MPLAHVSVAFDVGHCLAARSYFAFTLTLLTFVAPLWHCIIANFRKGDGIVSTLEVDDLKSVATALSESLPVNSNSGDAESSQIDAPTSFQLLVPRTIHMLRHHVKEFHEKYLGSSVMEAVTDKSSLVSGDNVKTGCSVNRLCLVRVLIRAFKEGSFEEGAVVCAPLPSDLSAWNQKTRSEEDEEERLEKWELQLPQSHVTSYFSWLDPSTSNLQLPNDDSTRKAFRWPIVEIMGIPYLHGDGIRTGYRIPNFRQLARQVGVASSFSPISAMGPSSGIDDLVFPPGQTFRFGSLDFVTNNFGKISLLDSESDQSGENRISVPFGFPNAAETYFKTISIESASNHSAEIASSPTTPDQDDGAYPPVLMKLPDDLAAVFTTTASSSRRPRRKSASTPISPSFREVGVILQPLGTVSTDQLDDYNSSPTVDSRPTDIVEYDEFSSRYHDFDDFDDFDDFDGSLDDNYTPLYFGVFMANNETEEQRQARETEERRRLEEEHQAQEQERLRREQQDRERIAKEAEDRRQRALEAGRRARDLIGQQDVEGTPVFRTPQQNAVAAITLLDTLLNQNELNRSDHVVNILNQTKTMIAASVPVNSESVHTPTGSRVPHFRSHDYRHPSLSITGAGSNRRSRGHDERSVHSPPDLHRERRVERPRSPPRRRPIDLRDTIIQRRAARGYHHSPDRRDDDLDGVAAFTDDLRRVDWPAGFKPTGIEKYDGTTNPESWLTVYGLAIRAAGGDNKAMANYLPVALADSARSWLHGLPRGTIGSWAELRDHFIANFQGTFERPGTQYDLYNVIQKSGESLREYIRRFSEQRNKISDITDDVIIAAFTKGIRHEELVGKFGRKPPRTVKLMFEKANEYAKAEDAVTASKQSGPSWKPKNTPATGGGGSNNHKDRKRKPEELVATAAHSSRQRSRVNTFDKIMNSQCPHHPNSNHVAKECFIYKQFAEQYTKSTRKNSDEEQSTSRKKDDGDTPVGFQDHRKELNHIFGGPLAYESKRKQKLTEREINAVQPDTPQYLRWSEIAIKFDRSDHPDRVVHPGRYPLVLDPVVRNVKLRRTLIDGGSALNILFAKTLDDMQIPRSELKPSNAPFHGVIPGLSATPLGQITLPVTFGTRENFRTENISFEVADFETAYHAILGRPALAKFMAVPHYTYMMMKMPGPRGVLSLRSDIKQAVTCDKESCDMAQTREMASAREEIRLAATTVSEGEVPAAKISKSGETEAETKKIPLDPSDPTKTAVIGAELDYIFAWKPSDMPGIPREVIEHSLHVKEDAKPIKQRLRRFAQDRKDAIKEELTKLLAAGFIKEVLHPDWLANPVLVRKKTGQWRMCVDYTDLNKSCPKDPFGLPRIDQVVDSTAGCELLSFLDCYSGYHQIRLKESDCLKTSFITPFGAYCYVTMPFGLKNAGATYQRMIQRCFSTQIGRNVEAYVDDVVVKTKQKDDLISDLEETFASIRAFRMKLNPEKCTFGVPSGKLLGFMVSHRGIQANPEKVTAILNMKPPSTQKDVQKLTGCMAALSRFVSRLGERGMPFFKLLKKTDNFQWGPEAQKAFEDFKQLLTKPPVLASPHPQEPLLLYVSATSQVVSTVLVVEREEEGHVQKVQRPIYFVSEVLADSKTRYPQVQKLLYGILITTRKLSHYFQGHPVTVVTSFPLGDVLHNREANGRIAKWALELMSLDISFKPRTSIKSQALADFVAEWTERQEDTPVEKIEHWTMHFDGSKRLSGTGAGVVLISPTGERLSYVLWIHFSASHNVAEYEALLHGLRIAISLGIKRLIVRGDSQLVVNQVMKEWSCLDDNMMAYRQEVRKLEDKFDGLELSHVLRHNNEAADRLANFGSKREPAPSDVFVEHLYTPTVPHKDTTQDADTHDVAMVEADWREPLIRFLTSQELPQDKDEAERISRRSKLYVMHESELYKKSPSGILQRCVSLEEGRQLLKDIHSGICGNHAAARTIVGKAYRQGFFWPTAVSDADKIVRTCEGCQFFARQIHLPAQELQTIPLSWPFAVWGLDMVGPFKKAVGGYTHLFVAIDKFSKWIEAKPVVTITADNARDFFINIVHRFGVPNRIITDNGTQFTGGVFKDFCEDFGIKICYASVAHPMSNGQVERANGMILQGIKARVFDRLKPYAGKWVQQLPSVLWSLRTTSSRATGQSPFFLVYGAEAMLPSEVEFESLRFRNFREERYEEDRVDDLHRLEEVREAALIQSARYLQGLRRYHNRNVRSRAFLVGDLVLRKIQTTRDRHKLSPLWEGPFIISEVTRPGSYRLKREDGTLVDNSWNIEHLRRFYA

SEQ ID NO: 149716 - protein, 621 aa, Oryza sativa
  Clone ID: PAT_MRT4530_50021C.1.pep
MGAAVAEAEPSGRQLSDGDLLEELLSTANAARAFHEFRQSQRKECFNLLRWLQLLLPLVQELRESAPALSDDAYRRLALLGRAFQAARRLLRCCHDGSKIYLTLESEAVMGRFRGVYEKMNMALEGMPYAELGVSDEVKEQVELISAQLKKRSKKRTETQDMELAMDLMMILQSKEQDANNADRPILDRLAKRLQLQSLADLRAETMAIKKLINDHQSDSTNQIVDLLHRLKAIAGVDEKNILGDVFIPKYLEKCPSLMIPNDFLCPISLEIMTDPTYERRSIQKWLDAGQRTCPKTQQPLGHLSLAPNYALKNLIMQWCDKNKVEIHSGDPPPEPPEDPKVVIPTLVKDLSSPNLDVQRKAVKKIRTLSKENPENRLLVTDNAGIPALIGLLPYPDKKMQENTVTSLLNLSIDEANKLLIARGGAIPLIIDVLRNGSVEGQENSAAALFSLSMVDENKVAIGTLGGIPPLVDLLQNGTVRGKKDASTAIFNLMLNNGNKLRAIEAGILPTLLKLLDDKKAAMVDEALSIFLLLASNPTCRGEVGTEHFVEKLVQIIKEGTPKNKECAVSVLLELGSSNNALMAHALGFDLHDHLADIAKNGTSRAQRKANSLIQLARKCS

SEQ ID NO: 149717 - protein, 63 aa, Oryza sativa
  Clone ID: PAT_MRT4530_50022C.1.pep
NPCWHLTCKVPQFHVSTHFCWFHPLVGGLCFCCLMFMNRFGQVFWSFSICRVDKHLERICIKV

SEQ ID NO: 149718 - protein, 101 aa, Oryza sativa
  Clone ID: PAT_MRT4530_50023C.1.pep
PGRCPDPLSTPDPFMGGGFCGFNFTSGPAAGSFCWDRQPDYSAYRESSFGHGILEVKNETHALWRWHRNQDLYGSVGDEIYIVREPDKCLIKSSRNRIAYY

SEQ ID NO: 149719 - protein, 84 aa, Oryza sativa
  Clone ID: PAT_MRT4530_50024C.1.pep
IASVHLSMRNLHFIPVNLGNKENPGLVKFAHHVCVPNDDLLGTIKKQVIRRKSKMLKQSMVLGKLSVWFVRKKEGAVYRSHGEG

SEQ ID NO: 149720 - protein, 59 aa, Oryza sativa
  unsure (1)..(59): unsure at all Xaa locations
  Clone ID: PAT_MRT4530_50025C.1.pep
GKDRHSKVYTAKGIXDXRVXXSVSTAIQFYDLXDRXGYDQPSKAIEWLIKAAAXXSASS

SEQ ID NO: 149721 - protein, 102 aa, Oryza sativa
  Clone ID: PAT_MRT4530_50026C.1.pep
MPSPPGNSCQPPGSSQPTRLSHHSQIRFQQLSTRGGNGRVGCSTASFRMTPNLAVEAVPAIPHRHYHWSYPSRSCAEATSCPHSLQLDRRRGETTQSAMAPL

SEQ ID NO: 149722 - protein, 243 aa, Oryza sativa
  Clone ID: PAT_MRT4530_50027C.1.pep
MKMIEERSNFKKDHEAIQHYATTQAIETDPWCDVCGGDDHSGNHCPETKEDVNFIIIVINNNGYRSQQQQGWNSHPFCQGNGGKIPSKPKEPIKSVNLVTTRFGKPPLRSRYGHPRRETMVIQQSRALLDLKNSTMPPGTLAQVSASCPSLNLKESVQKEEEGGGQTHEASTSPSHVLHFELVFDLVLLKRTFVEVAYIPQEQFVKDEPIQQDIQEGARGHNQELIKALLLLSWLLSRRNLLS

SEQ ID NO: 149723 - protein, 58 aa, Oryza sativa
  Clone ID: PAT_MRT4530_50028C.1.pep
CWRGWDRLGQVAYVHRRKFREPPLVVHKQGGYIESDGELEEGNMGPPGILRQRRKKKK

SEQ ID NO: 149724 - protein, 319 aa, Oryza sativa
  unsure (1)..(319): unsure at all Xaa locations
  Clone ID: PAT_MRT4530_50029C.1.pep
MKMIEERSNFKKDHEAIQHYATTQAIETDPWCDVCGGDDHSGNHCPETKEDVNFIIIVINNNGYRSQQQQGWNSHPFCQGNGGNNFNNFNNQPLLKDLVLGQAKINKNINKKLFANDKILDNLNAKMDSFSSALKTQSSSNKMLETXLAQLAIVVPSFEQGKIPSKPKEPIKSVNLVTTRFGXASTKIEVWSSKKGDNGHPTITCSVGSQEFYNATWDLGSSVGIMSKVTYDNLLCGPLSTTCIGLQLVNQTIPYPKGIAKDIMVKLHEDYVPTDFIVLDMGNNSDTPPILGRPFLNTMNACIYVXSRQIHFHFVGRKE

SEQ ID NO: 149725 - protein, 50 aa, Oryza sativa
  Clone ID: PAT_MRT4530_5002C.1.pep
AMRSVSEGGNNGTNMDLCVGELQDLHDARERCINTDLGIQGDRKNSCGNE

SEQ ID NO: 149726 - protein, 161 aa, Oryza sativa
  Clone ID: PAT_MRT4530_50030C.1.pep
CTFYGNESGDALRDVELLNAVANNSHVIKFLTVMTLCNTVIPIKSSSGAILYKAQSQDEDALVNAASNLHMVLVNKNGNTAEIHFNRRVVQYEILDILEFTSDRKRMSVVVLDCESGKIFLLSKGADEAIIPCAYSGQRIKTFVDAVDKYAQLGLRTLCLG

SEQ ID NO: 149727 - protein, 124 aa, Oryza sativa
  Clone ID: PAT_MRT4530_50031C.1.pep
MVMAGLLSHSKTRPMVGHRGNRANVTLRRSGPPRPDLAMRLASGRKDKGEPELDGAHVAMAMTVGKGRGAVVTLAKCGGEVAVVNAKHNGLEDLLNFSAGPNLWVQEHVSWFDPTTNKKDNSKN

SEQ ID NO: 149728 - protein, 81 aa, Oryza sativa
  unsure (1)..(81): unsure at all Xaa locations
  Clone ID: PAT_MRT4530_50032C.1.pep
RLVTAAMPSSAMAVDTTAPEYWLNWRFMLCAXEGPSSQDGNGDGGGDSEDARLPWSASGVLYLEDCWKPCLEQIHPGGHLH

SEQ ID NO: 149729 - protein, 78 aa, Oryza sativa
  Clone ID: PAT_MRT4530_50033C.1.pep
DPNPPKRGNFLGGPIIIGGNPKYGWGGEGKQIGGLPGPGGPPGNTCPVPGGGPGFPIGGPFRPRGNPGHYLFPGGKRD

SEQ ID NO: 149730 - protein, 65 aa, Oryza sativa
  Clone ID: PAT_MRT4530_50034C.1.pep
MLRWIGYNEGHQINSSNVAREDLSGRHHLVVMEGEGLPPQDKSIALVDPNTSEKPHNNHPDSMSH

SEQ ID NO: 149731 - protein, 84 aa, Oryza sativa
  Clone ID: PAT_MRT4530_50035C.1.pep
MASSLPRPHNPSPSRSSVPPQSTSSLHSCNATSMCCRAVAIGRAGMAGVAGGRSLHACRSTLEDPRVPSSNSPLALPNLIALQH

SEQ ID NO: 149732 - protein, 953 aa, Oryza sativa
  Clone ID: PAT_MRT4530_50036C.1.pep
METTVSLLPHLLVKPSSSFSCCFTMFISISAHVHINLISGIGRRYGRIKVYAVLGDDEAQHAKNNMRGALFHVDNPGPMAPIAKGNFLDVNQALEVVRFGIQYCDWRARQDLLTIMVLHNKVVEVLKSLAIEFKSNGTLRKELAELQEELAKAHNQVHLSETRASSALDKLAQADNLVNDRLLQDGGSSASIDNYVSLASRTSSASRFVNKKTLRPSLDVSGPVQPYNPNLKNFWYPVVFSGDLKDDTMVPIDCFEEQWVIFRGKDGRPGCVQNTCAHRACPLHLGSVSEGRIQCPFHGWEYSTDGKCEKMPATKLLNVRIRSLPCFEQEGMVWIWPGDGTPESTIPSLQPPSGFTIHAEMVMELPVEHGLLLDNLLDIAHAPFAHTSTFAKGWSVPSLVKFLTPASGLQGYWDPYPIDMEFRPPCMVLNEDLRLVLGQQERMINGANVWNWPVSYDKLGIRYRLWRDAIERGANRLPFNNQSHSLGARSASILSRRSSRQGSRGSISLSREMGDSILSSMRHSLQSADQLLGDVDGSVLAQVIDSGDRGLAFENDVDEEEENNVEDHQAVPLPDDTSMRIHGRSSQGTSVVAPVSAMKPKDTNVNGPASSSIKVEPYKLSWMQDYASYLIHLAVFGFLGVFTRYGLQKLFGPSCLALTSDQSPLYLDLPSNMLGSFLMGWFGIIFKADIRHISDHLIVGITTGYMGSLTTFSGWNQKMVGLSSKGHWVYAVAGIVLGMFIVNESITVGAETGERLRGWILKCIIEKNSIGSKCGWEDWRVDTRTKHYALLGVMVILMSLIWILSIVLAIVKVHSLGHGAVLWLGCSVAPPGVWLRWYLARLNGGGIGIGKRRHLKWLPVGTLAANVLAAAIMAALAVTAKAENTRRLTTVLNGIQLGFLGCLSTVSTFAAEVYTMRRSGQIARAFVYAAATFVLSFVLGTLIYSVPVWVEHY

SEQ ID NO: 149733 - protein, 102 aa, Oryza sativa
  Clone ID: PAT_MRT4530_50037C.1.pep
QLIRSDLILVIDMVVANDAATTQKKAPHFSLSSTSSLPSSCCSSTAAKSKQPHRGGEWNGAEPSPRPTRVAAAAGEQVWSGGDAAVNSRSCVRFESKGRSQC

SEQ ID NO: 149734 - protein, 3438 aa, Oryza sativa
  Clone ID: PAT_MRT4530_50038C.1.pep
MGPSSGIDDLVFPPGQTFRFGSLDFVTDNFGKISLLDLESDQSGENRISVPFGFPNAAETYFKTISIESASNHSAEIASSPTTPDQDDGAYPPVLMKLPDDLAAVSTTTASSSRRPMRKSVSTPISPSFREVGVILQPLGTVSTDQLDDHYSSPTVDSRPTDIVEYDEFSSRYHDFDDFDDFDGSLDDNYTPLYFGVFMANNETEEQRQARETEERRRLEEEQQAQEQERLRREQQDRERIAKEAEDRRQRALEAGRRARDLIGQQDVEGTPVFRTPQQNAVAAITLLDTLLNQNELNRSDHVVNILNQTKTMIAASVPVNSESVHTPTGSRVPHFRSQDYRHPSLSITGAGSNRRSRGHDERSVHSPPDYRGERRVERPRSPPRRRPIDLRDTIIQRRAARGRHHSPDRYDDDLDGVAAFTDDLRRVDWPAGFKPTGIEKYDGTTNPESWLTVYGLAIRAAGGDNKAMANYLPVALADSARSWLHGLPRGTIGSWAELRDHFIANFQGTFERPGTQYDLYNVIQKSGESLREYIRRFSEQRNKISDITDDVIIAAFTKGIRHEELVGKFGRKPPRTVKLMFEKANEYAKAEDAVTASKQSGPSWKPKNTPATGGGGSNNHKDRKRKPEELVATAAHSSRQRSRVNTFDKIMNSQCPHHPNSNHVAKECFIYKQFAEQYTKSTRKNSDEEQSTSRKKDDGDTPAGFQDHRKELNHIFGGPMAYESKRKQKLTEREINAVQPDTPQYLRWSEIAIRFDRSDHPDRVVHPGRYPLVLDPVVRNVKLRRTLIDGGSALNILFAKTLDDMQIPRSELKPSNAPFHGVIPGLSATPLGQITLPVTFGTRENFRTENISFEVADFETAYHAILGRPALAKFMAVPHYTYMMMKMPGPRGVLTLRSDIKQAVTCDKESCDMAQTREMASAREEIRLAATTVSEGEVPAAKISKSGETEAETKKIPLDPSDPTKTAVIGAELDYIFAWKPSDMPGIPREVIEHSLHVKEDAKPIKQRLRRFAQDRKDAIKEELTKLLAAGFIKEVLHPDWLANPVLVRKKTGQWRMCVDYTDLNKSCPKDPFGLPRIDQVVDSTAGCELLSFLDCYSGYHQIRLKESDCLKTSFITPFGAYCYVTMPFGLKNAGATYQRMIQRCFSTQIGRNVEAYVDDVVVKTKQKDDLISDLEETFASIRAFRMKLNPEKCTFGVPSGKLLGFMVSHRGIQANPEKVTAILNMKPPSTQKDVQKLTGCMAALSRFVSRLGERGMPFFKLLKKTDNFQWGPEAQKAFEDFKQLLTKPPVLASPHPQEPLLLYVSATSQVVSTVLVVEREEEGHVQKVQRPIYFVSEVLADSKMRYPQVQKLLYGILITTRKLSHYFQGHSVTVVTSFPLGDILHNREANGRIAKWALELMSLDISFKPRISIKSQALADFVAEWTECQEDTPAEKMEHWTMHFDGSKRLSGTGAGVVLISPTGERLSYVLWIHFSASHNVAEYEALLHGLRIAISLGIKRLIVRGDSQLVVNQVMKEWSCLDDNMMAYRQEVRKLEDKFDGLELSHVLRHNNEAADRLANFGSKREVVPSDVFVEHLYTPTVPPKDTTQVAGTHDVAMVEADWREPLIRFLTSQELPQDKDEAERISRRSKLYVMHEAELYKKSPSGILQRCVSLEEGRQLLNDIHSGICGNHAAARTIVGKAYRQIVRTCEGCQFFARQIHLPAQELQTIPLSWPFAVWGLDMVGPFKKAVGGYTHLFVAIDKFSKWIEAKPVATITADNARDFFINIVHRFGVPNRIITDNGTQFTGGVFKDFCEDFGIKICYASVAHPMSNGQVERANAARGYHHSPDRHDDDLDGVAAFTDDLRRVDWPAGFKPTGIEKYDGTTNPESWLTVYGLAIRAAGGDSKAMANYLPVALADSARSWLHGLPRGTIGSWAELRDHFIANFQGTFERPGTQYDLYNVIQKSGESLRDYIRRFSEQRNKISDITDDVIIAAFTKGIRHEELVGKFGRKPPRTVKLMFEKANEYAKAEDAVTASKQSGPSWKPNKGTPATGGGGSNNHKDRKRKPEELVATATHSSRQRSRVNTFDKIMNSQCPHHPNSNHVAKDCFVYKQFAEQYTKTTRKNSDEEQSTSRKKDDGDTPAGFQDHRKELNHIFGGPLAYESKRKQKLTEREINAVQPDTPQYLRWSEIAIKFDRSDHPDRVVHPGRYPLVLDPVVRNVKLRRTLIDGGSALNILFAKTLDDMQIPRSELKPSNAPFHGVIPGLSATPLGQITLPVTFGTRENFRTENISFEVADFETAYHAILGRPALAKFMAVPHYTYMMMKLPGPRGVLSLRSDIKQAVTCDKESCDMAQTREMASAREDIRLAAATASEGEVPATKISKSGESEAKTKKIPLDPSDSTKTANNKDIFAWKPSDMPGIPREVIEHSLHVKEDAKPIKQRLRRFAQDRKDAIKEELTKLLAAGFIKEVLHPDWLANPVLVRKKTGQWRMCVDYTDLNKCCPKDPFGLPRIDQVVDSTAGCELLSFLDCYSGYHQIRLKESDCLKTSFITPFGAYCYVTMPFGLKNAGATYQRMIQRCFSTQIGRNVEAYVDDVVVKTKQKDDLISDLEETFASIRAFRMKLNPEKCTFGVPSGKLLGFMVSHRGIQANPEKVTAILNMKPPSTQKDVQKLTGCMAALSRFVSRLGERGMPFFKLLKKTDDFHWGPEAQKAFEDFKKLLTEPPVLASPHPQEPLLLYVSATSQVVSTVLVVEREEDGHVQKVQRPIYFVSEVLADSKTRYPQVQKLLYGILITTRKLSHYFQGHLVTVVTSFPLGDILHNREANGRIAKWALELMSLDISFKPRISIKSQALADFVAEWTECQEDTPAEKVEHWTMHFDGSKRLSGTGAGVVLISPTGERLSYVLWIHFSASHNVAEYEALLHGLRIAISLGIKRLIVRGDSQLVVNQVMKEWSCLDDNMMAYRQEVRKLEDKFDGLELSHVLRHNNKAADRLANFGSKREVAPSDVFVEHLYAPTVPHKDTTQVAGTHDVAMVEADWREPLIRFLTSQELPQDKDEAERISRRSRLYVMHEAELYKKSPSGILQRCVSLEEGRQLLKDIHSGICGNHAAARTIVGKAYRQGFFWPTAVSDADKIVRTCEGCQFFARQIHLPAQELQTIPLSWPFAVWGLDMVGPFKKAFGGYTHLFVAIDKFSKWIEAKPVVTITADNARDFFINIVHRFGVPNRIITDNGRQFTGGVFKDFCEDFGIKICYASVAHPMSNGQVERANGMILQGIKARVFDRLKPYAGKWVEQLPSVLWSLRTTPSRATGQSPFFLVYGAEAMLPSEVEFESLRFRNFREERYEEDRVDDLHRLEEVREAALIQSARYLQGLRRYHNRNVRSRAFLVGDLVLRKIQTTRDRHKLSPLWEGPFIISEVTRPGSYRLKREDGTLIDNSWNIEHLRRFYA

SEQ ID NO: 149735 - protein, 213 aa, Oryza sativa
  unsure (1)..(213): unsure at all Xaa locations
  Clone ID: PAT_MRT4530_50039C.1.pep
GASSSHDRRLLRLRRRTTVVGFSGDSQGXPAAPPCVAPPAAVAFLRASCASTLYRLTCYDALIPSGCAFQTSTVKLARAAADVNAASLKNLTARAKELVAHGVPGEAPAIAAEIRDCASASSSASGHAKETAAELARLDAMGDAAKGSQARWAVSNAKTWLSAAMTNEANCADALSSTGAAVSPAARELIAGVVMAKQYTSIALSFVNTIPVS

SEQ ID NO: 149736 - protein, 176 aa, Oryza sativa
  Clone ID: PAT_MRT4530_5003C.1.pep
MRRKEEDDDRQGGDEGSRQQLHGGEDGVGHAAAMPTTVAAQPDDEPGDRRDVDDENERRRRRWIAEGFGQRGGEAEGDLAAAMPGVVVAQRADEPGRRKGRPKGRRRRRGWRGRRGDGGLRTNQRAGRGGGRRGDAEGGDGAAGTHLSGAAGAAGGGTVVAMPLDNGGNAPPAVTA

SEQ ID NO: 149737 - protein, 1977 aa, Oryza sativa
  Clone ID: PAT_MRT4530_50040C.1.pep
MLDFLQIIQSITHSADSSPDRSRFRQLARQVGVASSFSPISAIGSVSGIDDLVFPPGQTFRFGSLDFVTNNFGKISLLDSESDQSGENRLSVPFGLPNAAESYFKTISTESASNHSAEIASSPTTPDQDEGAYPPVLMKLPDDLAAVSTTTASSSRRPRRKSASTPISPSFREVGVILQPLGTVSTDQLDDYNSSPTVDSRPTDIVEYDEFSSRYNDFDDFDGSLDDNYTPLYFGVFMANNETEEQRQARETEERRRLEEEHQAQEQERLRREQQDRERTAKEAEDRRQRALEAGRRARDLIGQQDVEGTPVFRTPQQNAVAAITLLDTLLNQNELNQSDHVVNILNQTKTMIAASVPVNSESVHTPTGSRVPHFRSHDYRHPSLSITGAGSNRRSRGHDERSVHSPPDLHRERRVERPRSPPRRRPIDLRDTIIQRRAARGYHHSPDRHDDDLDGVAAFTDDLRRVDWPAGFKPTGIEKYDGTTNPESWLTVYGLAIRAAGGDSKAMANYLPVALADSARSWLHGLPRGTIGSWAELRDHFIANFQGTFERPGTQYDLYNVIQKSGESLRDYIRRFSEQRNKISDITDDVIIAAFTKGIRHEELVGKFGRKPPRTVKLMFEKANEYAKTEDAVTASKQSGPSWKQNKGTPATGGGGSNNHKDRKRKPAELVATASHSSRQRSRVNTFDKIMNSQCPHHPNSNHVAKDCFVYKQFADQYTKTARKNSDEEQSTSRKKDDGDTPAGFQDHRKELNHIFGGPLAYESKRKQKLTEREINAVQPDTPQYLRWSEIAIKFDRSDHPDRVVHPGRYPLVLDPVVRNVKLRRTLIDGGSALNILFAKTLDDMQIPRSELKPSNAPFHGVIPGLSATPLGQITLPVTFGTRENFRTENISFEVADFETAYHAILGHPALAKFMAIPHYTYMMMKMPGPRGVLSLRSDIKQAVTCDKESCDMAQTREMASAREDIRLAAATASEGEIPATKTSKSGESEAKTKKIPLDPSDPTKTANNKDIFAWKPSDMPGIPREVIEHSLHVKEDDKPIKQRLRRFAQDRKDAIKEELTKLLAAGFIKEVLHPDWLANPVLVRKKTGQWRMCVDYTDLNKSCPKDPFGLPRIDQVVDSTAGCELLSFLDCYSGYHQIRLKESDCLKTSFITPFGAYCYVTMPFGLKNAGATYQRMIQRCFSTQIGRNVEAYVDDVVVKTKQKDDLISDLEETFASIRAFRMKLNPEKCTFGVPSGKLLGFMVSHRGIQANPEKVTAILNMKPPSTQKDVQKLTGCMAALSRFVSRLGERGMPFFKLLKKTDDFQWGPEAHRAFEDFKKLLTEPPVLASPHPQEPLLLYVSATSQVVSTVLVVEREEEGHVQKVQRPIYFVSEVLSDSKTRYPQVQKLLYGILITTRKLSHYFQGHSVTVVTSFPLGDILHNREANGRIAKWALELMSLDISFKPRISIKSQALADFVAEWTECQEDTPAENMEHWTMHFDGSKRLSGTGAGVVLISPTGERLSYVLWIHFSASHNVAEYEALLHGLRIAISLGIKRLIVRGDSQLVVNQVMKEWSCLDDNMMAYRQEVRKLEDKFDGLELSHVLRHNNEAADRLANFGSKREVAPSDVFVEHLYTPTEGRQLLQDIHSGICGNHAAARTIVGKAYRQGFFWPTAVSDADKIVRTCEGCQFFARQIHLPAQELQTIPLSWPFAVWGLDMVGPFKKAVGGYTHLFVAIDKFSKWIEAKPVVTITADNARDFFINIVHRFGVPNRIITDNGTQFTGGVFKDFCEDFGIKICYASVAHPMSNGQVERANGMILQGIKARVFDRLKPYAGKWVQQLPSVLWSLRTTPSRATGQSPFFLVYGAEAMLPSEVEFESLRFRNFREERYEEDRVDDLNRLEEVREAALIRSARYLQGLRRYHNRNVRSRAFLVGDLVLRKIQTTRDRHKLSPLWEGPFIISEVTRPGSYRLKREDGTLVDNSWNIEHLRRFYA

SEQ ID NO: 149738 - protein, 507 aa, Oryza sativa
  Clone ID: PAT_MRT4530_50041C.1.pep
MAPMAGGGGVPWGDRARVVGAQIRSRFRVGVAPVDRRWLWRRGDGRVASEAVRQWTERVRSLWQREKSTDQISSSPGTSQVAAAAKPSSSALRFYRKKVGKEVDGIEDSVIFRSLQALAVPLIGNACHIFMHGLNSVQIYGAEKLQQALQERPKGKPLLTVSNHVAAMDDPFVIASILPPSVMLEAQKLRWTLCASDRCFTNPILSTFFRSVKVLPVSRGDGIYQKGMDMALSKLNNGGWVHIFPEGSRSKDGGKTVAPAKRGVGRLVMDADSLPVVIPFVHTGMQDIMPVGKRIPRAGKRVIVVVGDPINFNDLIIDNSDETQHISRGILYDKATERIGQRLQELKAEVDRLAAEQKSELQHHHARDTVNYGTRLWQQVDWEAFGMESSMLSPEPSDVQEPLKKAKPVLHLESEHAKPELHLEPEQAKHELHTEQCVPAAPSAEICSNFGVPLFFRQHTDPSELMGFAARGLLKNGRFMEEEGYRELQRQGAMNMFWGSQANNTVL

SEQ ID NO: 149739 - protein, 411 aa, Oryza sativa
  Clone ID: PAT_MRT4530_50042C.1.pep
MLSLSPAAAPPPPPAAAAAEASWECDPCACAATAGSPCGSCGAPPPWACARCTLLNPSGSGVCSACEAARPVEVDAENDGDDPASSPPPPRARKKRVREACADEEEEEEGEGADGAGSPRPSDAAAAKKKKFENNLNKKTFKIMTYNVWIREDIELHRRLGALGDLIQLHNPDFICFQVPGNKENEKIEPLPVVVLHPPARGLPPNLEAKLAGRMSKLPVSESNPIPFSKSIMKRELCVAVVKTGEIHLAVGTSHLESPCPLPPLWDLKYSEKRVAQAKQSLEILGQLRNAIFCGDMNWEDKVDGPFPLPDGWIDAWVELKPGDNGWTYDTKANAMLSANFKQQKRPDQFVCKLSDFKIDDIEMIGKEAIPGVVYYKEKIVRKEFHKLELPVLPSKHFGLVLTITLQDDIL

SEQ ID NO: 149740 - protein, 1995 aa, Oryza sativa
  Clone ID: PAT_MRT4530_50043C.1.pep
MGSVSGIDDLVFPPGQMFRFGSLDFVTNNFGKISLLDSESDQSGENWISVPFGLPNAAESYSKTISIESASNHSAEIASSPTSPDQDDGAYPPILMKLPDDLAAISITTASPSRRPRRKSASTPISPSFREVGVILQPLGTVSTDQLDSHYSSPTVDSRPTDVVEYDEFCSRYHDPDLDDFDGSLDDNYTPLYFGVFMANNETEEQRQARETEARRETERRRLEEEHQAQEQERLRREQQERERTAKEAEDRRQRALEAGRRARELIGQQDVEGTPVFRTPQQNAVAAITLLDTLLKENELNQSNHVVNILNQTKTMIAASVPVNSESVHTPTGSRVPHFRSHDYRHPSLSITGAGSNRRSRGHDERSVHSPPDHHRERRVERPRSPPRRRPVDLRDTIIQRRAARGLHHSPDRHDDDLDGVAAFTDDLRRADWPAGFKPTGIEKYDGTTNPESWLTVYGLAIRAAGGDSKAMANYLPVALADSARSWLHGLPRGTIGSWAELRDHFIANFQGTFERPGTQYDLYNVIQKSGESLRDYIRRFSEQRNKISDITDDVIIAAFTKGIRHEELVGKFGRKPPRTVKLMFEKVNEYAKAEDAVTASKQSGPGWKPNKGTPATGGGGSNNHKDRKRKPEELVATATHSSRQRPRVNTFDKIMNSQCPHYPNSNHVAKDCFVYKQFAEQYTKSTRKNSDEEQSTSRKKDDGDTPAGFQDHRKELNHIFGGPLAYESKRKQKLTEREINAVQPDTPQYLRWSEIAIKFDRSDHPDRVVHPGRYPLVLDPVVRNVKLRRTLIDGGSALNILFAKTLDDMQIPRSELKPSNAPFHGVIPGLSATPLGQITLPVTFGTRENFRTENISFEVADFETAYHAILGRPALAKFMAVPHYTYMMMKMPGPRGVLSLRSDIKQAVTCDKESCDMAQTREMASAREDIRLAAATASEGEVPATKTSKSGESEAKTKKIPLDPSDPTKTANNKDIFAWKPSDMPGIPREVIEHSLHVQEDAKPIKQRLRRFAQDRKDAIKEELTKLLAAGFIKEVLHPDWLANPVLVRKKTGQWRMCVDYTDLNKSCPKDPFGLPRIDQIRLKESDCLKTSFITPFGAYCYVTMPFGLKNAGATYQRMIQRCFSTQIGRNVEAYVDDVVVKTKQKDDLISDLEETFTSIRAFRMKLNPEKCTFGVPSGKLLGFMVSHRGIQANPEKVTAILNMKPPSTQKDVQKLTGCMAALSRFVSRLGERGMPFFKLLKKTDDFQWGPEAQKAFEDFKKLLTEPPVLASPHPQEPLLLYVSATSQVVSTVLVVEREEEGHVQKVQRPIYFVSEVLADSKTRYPQVQKLLYGILITTRKLSHYFQGHSVTVVTSFPLGDILHNREANGRIAKWALELMSLDISFKPRISIKSQALADFVAEWTECQEDTPAEKMEHWTMHFDGSKRLSGTGAGVVLISPTGERLSYVLWIHFSASHNVAEYEALLHGLRIAISLGIKRLIVRGDSQLVVNQVMKEWSCLDDNMMAYRQEVRKLEDKFDGLELSHVLRHNNEAADRLVNFGSKREVAPSDVFVEHLYTPTVPHKDTTQAAGTHDVAMVEADWREPLIRFLTSQELPQDKDEAERISRRSKLYVMHEAELYKKSPSGILQRCVSLEEGRQLLKDIHSGICGNHAAARTIVGKAYRQGFFWPTAVSDADKIVRTCEGCQFFARQIHLPAQELQTIPLSWPFAVWGLDMVGPFKKAVGGYTHLFVAIDKFSKWIEAKPVVTITADNARDFFINIVHRFGVPNRIITDNGTQFTGGVFKDFCEDFGIKICYASVAHPMSNGQVERANGMILQGIKARVFDRLKPYAGKWVQQLPSVLWSLRTTPSRATGQSPFFLVYGAEAMLPSEVEFESLRFRNFHEDRYEEDRVDDLHRLEEVREAALIRSARYLQGLRRYHNRNVRSRAFLVGDLVLRKIQTTRDRHKLSPLWEGPFIISEVTRPGSYRLKREDGTLVDNSWNIEHLRRFYA

SEQ ID NO: 149741 - protein, 1982 aa, Oryza sativa
  Clone ID: PAT_MRT4530_50044C.1.pep
MGSISGIDDLVFPPGQTFRFGSLDFITNNFGKISLLDSESDQSGENRLSVPFGFPNAAESYFKTISTESASNHSAEIASSPTTPDQDGGAYPPVLMKLPDDLAAVSTTTASSSRRPRRKSSSTPISPSFREVGVILQPLGTVSTDQLDDYNSSPTVDSRPTDIVEYDEFSSRYNDFNDYDDFDGSLDDNYTPLYFGVFMANNETEEQRQARETEERRRLEEEHQAQEQERLRREQQDRERTAKEAEDRRQRALEAGRRARDLIGQQDVEGTPVFRTPQQNAVAAITLLDTLLNQNELNRSDHVVNILNQTKTMIAASVPVNSESVHTPTGSRVPHFRSHDYRHPSLSITGAGSNRRSRGHDERSVHSPPDLHRERRVERPRSPPRRRPIDLRDTIIQRRAARGYHHSPDRHDDDLDGVAAFTDDLRRVDWPAGFKPTGIEKYDGTTNPESWLTVYGLAIRAAGGDNKAMANYLPVALADSARSWLHGLPRGTIGSWAELRDHFIANFQGTFERPGTQYDLYNVIQKSGESLRDYIRRFSEQRNKISDITDDVIIAAFTKGIRHEELVSKFGRKPPKTVKLMFEKANEYAKAEDAVTASKQSGPNWKQNKGTPATGGGGSNNHKDRKRKPTELVATASHSSRQHSRVNTFDKIMNSQCPHHPNSNHVAKDCFVYKQFADQYTKTARKNTDEEQSTSRKKDDGDTPAGFQDHRKELNHIFGGPLAYESKRKQKLTEREINAVQPDTPQYLRWSEIAIKFDRSDHPDRVVHPGRYPLVLDPVVRNVKLRRTLIDGGSALNILFAKTLDDMQIPRSELKPSNAPFHGVIPGLSATPLGQITLPVTFGTRENFRTENISFEVADFETAYHAILGRPALAKFMAVPHYTYMMMKMPGPRGVLSLRSDIKQAVTCDKESCDMAQTREMASAREDIRLAAATASEGEIPATKTSKSGESEAKTKKIPLDSSDPAKTANNKDIFAWKPSDMPGIPREVIEHSLHVKEDAKPIKQRLRRFAQDRKDAIKEELTKLLAAGFIKEVLHPDWLANPVLVRKKTGQWRMCVDYTDLNKSCPKDPFGLPRIDQVVDSTAGCELLSFLDCYSGYHQIRLKESDCLKTSFITPFGAYCYITMPFGLKNAGATYQRMIQRCFSTQIGRNVEAYVDDVVVKTKQKDDLISDLEETFASIRAFRMKLNPEKCTFGVPSGKLLGFMVSHRGIQANPEKVTAILNMKPPSTQKDVQKLTGCMAALSRFVSRLGERGMPFFKLLKKTDDFQWGPEAQKAFEDFKKLLTEPPVLASPHPQEPLLLYVSATSQVVSTVLVVEREEEGHVQKVQRPIYFVSEVLADSKTRYPQVQKLLYGILITTRKLSHYFQGHSVTVVTSFPLGDILHNREANGRIAKWALELMSLDISFKPRISVKSQALADFVAEWTECQEDTPAENMEHWTMHFDGSKRLSGTGAGVVLISPTGERLSYVLWIHFLASHNVAEYEALLHGLRIAISLGIKRLIVRGDSQLVVNQVMKEWSCLDDNMMAYRQEVRKLEDKFDGLELSHVLRHNNEAADRLANFGSKREAAPSDVFVEHLYTPTVPHKDITQDADTHDVAMVEVDWREPLIRFLTSQELPQDKDEAERISRRSKLYVLHEAELYKKSPSGILQRCVSLEEGRQLLKDIHSGICGNHAAARTIVGKAYRQGFFWPTAVSDADKIVRTCEGCQFFARQIHLPAQELQTIPLSWPFAVWGLDMVGPFKKAVGGYTHLFVAIDKFSKWIEAKPVVTITADNARDFFISIVHRFGVPNRIITDNGTQFTGGVFKDFCEDFGIKICYASVAHPMSNGQVERANGMILQGIKARVFDRLKPYAGKWVQQLPSVLWSLRTTPSRATGQSPFFLVYGAEAMLPSEVEFESLRFRNFREERYEEDRVDDLHRLEEAREAALIRSARYLQGLRRYHNRNVRSRAFLVKQAQTRTPRHKNFAPGSPFTSHHHSTSRA

SEQ ID NO: 149742 - protein, 77 aa, Oryza sativa
  unsure (1)..(77): unsure at all Xaa locations
  Clone ID: PAT_MRT4530_50045C.1.pep
EEMASSSFGVGGGLKLMRARGLLVFSEMMALLLICLVMMSSSVNTCQGRSLLAVSVGEKXVAAFLSNLVGCFEPPCR

SEQ ID NO: 149743 - protein, 106 aa, Oryza sativa
  unsure (1)..(106): unsure at all Xaa locations
  Clone ID: PAT_MRT4530_50046C.1.pep
MGGMGWKRAPAGGEEAGGELLLRGRELRVKGXCGKPLQHGAVARGQAPEKKATMAAAAAAEQIARRIDADGAPGESTALRARSYGCIRVFLVLSLLLLAVEVAAYL

SEQ ID NO: 149744 - protein, 262 aa, Oryza sativa
  unsure (1)..(262): unsure at all Xaa locations
  Clone ID: PAT_MRT4530_50047C.1.pep
MIPSTVQSCTHGIREVASLDGSDETNFVRTAPTRKIFSSGVEEKRARLSTTHCTQQVIPEEQILGGPLLRCGESGSXTTGHPGRPNSITPTLATGAXERVELYFRSSSYPLPLVVGPARQRLKXEREGAPACEPHGSXHKAAGPPWTGTTRVVYRRSTGPTVQIGREADRTARRRLGTARLQNRXGRPWGAAAASGRRRRQAAAREAXADGAKGGGAHGRDERKKERGSLTEAMTATGAGRDERQRRFGERWTGSGTTWERR

SEQ ID NO: 149745 - protein, 261 aa, Oryza sativa
  Clone ID: PAT_MRT4530_50048C.1.pep
MANDCNTISSAIVAEAVSGSHVMKIDGYSKTKALIKNEECLSSTPFSVAGYTWTIRYYPNGQSTECREYLSLYLFLDSFARDVKAIYSFKLLDKNGRPLLLNSIASPVKTFKLRGTGWGYPMFIKSKDLKASESLRDDSFSIRCDVTVMKPICSKETPAMPKPSVEVPPGDLHQHLGDLLKNMDGADVTFDVGQERFSAHKCVLAARSSVFEAMFFGATRAKPRRSNIKIEDMEAGVFRSFLHFVYTDLLPDTSQDVVMAQ

SEQ ID NO: 149746 - protein, 199 aa, Oryza sativa
  unsure (1)..(199): unsure at all Xaa locations
  Clone ID: PAT_MRT4530_50049C.1.pep
MPLSLVSLFSRLLLLLSPLRALLVEAGEVHSVSQARGLAFSYTAWPTTMTQKVTLKVTAHIHSIKEKVHRRAPAGGEEAGGELLLRGRELRVKGWWVLPVKAYHAAGRLTGAASAMLAVATCGMPLQHGAVARGQAPEEKAAMAAAAVAGGAXEQIARRTDADAAPGESTALRARSYGCIRVFLVLSLLLLAVEIAAYL

SEQ ID NO: 149747 - protein, 92 aa, Oryza sativa
  unsure (1)..(92): unsure at all Xaa locations
  Clone ID: PAT_MRT4530_5004C.1.pep
MGFWVTTLIFLLAGFVASLFSLLCCNRGPSTNLKEKRGINDIEYXFHLTLVITATVCCWMMWAIVYLAQLKPLINPILSGELSWKLNTPLIF

SEQ ID NO: 149748 - protein, 225 aa, Oryza sativa
  Clone ID: PAT_MRT4530_50050C.1.pep
MPRSITMILQRGKSQWAVPSCAAVNPAAGQPDTPADPTPSRPPSPPVPRKGSSYTSDQAVTHSRLCPGLTSAEGGRAPTGGPHWSAALREGEGAAGKRAHWAVAQGGGSGWLAARHGSSRPASHGAAAAARVVTGGDRRRGRRRRPARRRRRRPKTMAHARRAAALMGERGKEGGEGIPHLRARRPARRKKAAAATGDAEARTGGGDTLGEDGEALGEETTTTAA

SEQ ID NO: 149749 - protein, 148 aa, Oryza sativa
  unsure (1)..(148): unsure at all Xaa locations
  Clone ID: PAT_MRT4530_50051C.1.pep
MWAPRAVAQGGRSTVDRDHAGGPPPVHGTDGPDRPGGRSDGTAAARHGFKTDRPAMATGCXRARSPATAIGGAGSNGGRGTGRRRRPKVTASAWREAAQTRERGRGRRGGSSPASMAAGAEDEGGGDDLAMRRGGRVAAAPTEGVEKD

SEQ ID NO: 149750 - protein, 1775 aa, Oryza sativa
  Clone ID: PAT_MRT4530_50052C.1.pep
MGSVSSIDDLVFPPGQAFRFGSLDFITNDFGKISLLDSESDQSGESRISVPFGVPNAAEIYFKSISIESASNHSDEIASSPTSSDRDDGAYPPILMKLPDDLAAVFTTTTSPSRRPRRRSASTPISPSSREVGVILQPLGSVSTDQLDGYWSSPGIDSRPTEIMEYNEFGFRNNDPDLDDFDESLEDNYTPLYFGVFMADNETEEQRQARETEARREAERRRLEEERQAQEQERLRREQQERERAAKEAEDRRLRALEAGRRARDLIGQQDVEGTPVFRTPQQNAVAAITLLDTLLKENELNQSDHVVNILNQTKTMIASSVPVNSGSVRTPSGSRVPHLRSHDYHQPSLSITGAGSNRRSRGHDERSVHSPPDHHRERRVERPRSPPRRRPVDLRDTIIQRRAARGHHHSPDRHDDDLDVVAAFTNDLRRVDWPAGFKPAGIEKYDGTTNPELWLTVYGLAIRAAGGDSKAMANYLSVALADSARSWLHGLPRGTIGSWAELRDHFIANFQGTFERPGTQFDLYNVIQKSGESLRDYIRRFSEQRNKISDITDDVIIAAFTKGIHHEELVGKFGRKPPKTVKLMFEKANEYAKAEDAVIASKQSGSSWKPKKDTPATGGGGSNNHKDRKRKPEELVATTTHSSRQRSLVNTFDKIMNSQCPHHPNSNHAAKDCFVYKHFAEQYTKTTRKNSDEEQSTSKKKDDGDPPAGFQDHRKELNHIFGGPLAYESKRKQKLTEREINAVQPDTPQYLRWSETAIKFDRSDHPDRVVHPGRYPLVLDPVVRNVKLRRTLIDGGSALNILFAKTLDDMQIPRSELRPSNAPFHGAIPGLSATPLGQITLPVTFGTRENFRTENICFEVTDFETAYHAILGRPALAKFMAVPHYTYIMMKMPGPRGVLSLRSDIKQAVTCDKESCEMAQTREMASAREDIRLAATTASEGEVPATKVSKSGESEAKTKKIPLDPSDPTKTAVIGTEEVIEHSLHVKEDAKPIKQRLRRFAQDRKYAIKEELTKLLAAGFIKEVLHPDWLANPVLVRKKTGQWRMCVDYTDLNKSCPKDPFGLPRIDQIRLKESDCLKTSFITPFGANCYITMPFGLKNAGATYQRMIQRCFSTQIGRNVEAYVDDVVVKTKQKDDLISDLEETFASIRAFRMKLNPEKCTFGVPSGKLLGFMVSHRGIQANPEKVTAILNMKPPSSQKDVQKLTGCMAALSRFVSRLGERGMPFFKLLKKTDNFQWGPEAQKTFEDFKKLLTEPPVLASPHLQEPLLLYVSATSQVVSTVLVVEREEEGHIQKVQRPIYFVSEVLADSKTRYPQVQKLLYSILITTRKLSHYFQGHSPRTSIKSQALADFVAEWTECQEDIPGEKMEHWTMHFDGSKRLSGTGAGVVLISPTGERLSYVLWIHFSASHNVAEYEALLHGPRIAISLGIKRLIVRGDSQLVVNQVMKEWSCLDDNMTAYRQEVRKLEDKFDGLELSHVLRHNNEAADRLANFGSKREVAPSDVFVEHLYEPTVPQKETIQVADTQDIAMIEADWREPLIRFLTSQELPQDKDEAERISRRSRLYVIHEAELYKKSPSGILQRCVSLEEGRQLLKDIHSGICGNHAAARTIVGKAYRQGFFWPTAVSDADKIVRTCEGCQFFTRQIHLPAQELQTIPLSWPFAVWGLDMVGPFKKAVGGYTHLFVAIDKFSKWIEAKPVVTITADKARDFFINIVHRFGVPNRIITDNGTQFTSGVFKDFCDDFGIKIFYASVAHPMSNGQVERANGMILQGIKA

SEQ ID NO: 149751 - protein, 38 aa, Oryza sativa
  Clone ID: PAT_MRT4530_50053C.1.pep
ARSPGAASEDVSAAGHRGEIWGFALLLIFYPVRVGRGR

SEQ ID NO: 149752 - protein, 955 aa, Oryza sativa
  Clone ID: PAT_MRT4530_50054C.1.pep
MPGIPREVIEHSLHVKEDAKPIKQRLRRFAQDRKDAIKEELTKLLAAGFIKEVLHPDWLANPVLVRKKTGQWRMCVDYTDLNKSCPKDPFGLPRIDQVVDSTAGCELLSFLDCYSGYHQIRLKESDCLKTSFITPFGAYCYVTMPFGLKNAGATYQRMIQRCFSTQIGRNVEAYVDDVVVKTKQKDDLILDLEETFASIRAFRMKLNPEKCTFGVPSGKLLGFMVSHRGIQANPEKVTAILNMKPPTTSQVVSTVLVVEREEEGHVQKVQRPIYFVSEVLADSKTRYPQVQKLLYGILITIRKLSHYFQGHSVTVVTSFPLGDVLHNREANGRIAKWALELMSLDISFKPRTSIKSQALADFVAEWTECQEDTPVEKIEHWTMHFDGSKRLSGTGAGVVLISPTGERLSYVLWIHFSASHNVAEYEALLHGLRIAISLGIKRLIVRGDSQLVVNQVMKEWSCIDDNMMAYRQEVRKLEDKFDGLELSHVLRHNNEAADRLANFGSKREAAPSDVFVEHLYSPTVPRKDATQVADTHDIAMVEADWREPLIRFLTSQELPQDKDEAERISRRSKLYVMHEAELYKKSPSGILQRCVSLEEGRQLLKDIHSGICGNHAAARTIVGKAYRQGFFWPTAVSDADKIVRTCEGCQFFARQIHLPAQELQTIPLSWPFAVWGLDMVGPFKKAVGGYTHLFVAIDKFSKWIEAKPVVTITADNARDFFINIVHRFGVPNRIITDNGTQFTGGVFKDFCEDFGIKICYASVAHPMSNGQVERANGMILQGIKARVFDRLKPYAGKWVSQLPSVLWSLRTTPSRATGQSPFFLVYGAEAMLPSEVEFESLRFRNFREDRYEEDRVDDLHRLEEVREAALIRSARYLQGLRRYHNCNVRSRAFLVGDLVLRKIQTTRDRHKLSPLWEGPFIISEVTRPGSYRLKREDGTLVDNSWNIEHLRRFYA

SEQ ID NO: 149753 - protein, 1995 aa, Oryza sativa
  Clone ID: PAT_MRT4530_50055C.1.pep
MGSVSGIDDLVFPPGQTFRFGSLDFVTNNFGKISLLDSESDQSGENRISVPFGLPNAAGSYFKTISIESASNHSGEITSSPTSPDQDDGAYPPILMKLPDDLAAVSIATAPPSRRPRRKSASTPISPSFREVGVILQPLGTVSTDQLDGYYSSPTVDSRPTDIVDYDEFSSRYNDLDLDDFDGSLDDNYTPLYFGVFMADNETEEQRQARETEARREIERRRLEEESQAQEQERLRREQQERERTAKEAEDRRQRALEAGRRARDFIGQQDVEGTPVFRTPQQNAVAAITLLDTLLKENELNQSDHVVNILNQTKTMIAASVPVNSESVHTPTGSRVPHFRSHDYRHPSLSTTGAGSNRRSRGHDERSVHSPPDHYRERRVERPRSPPRRRPVDLRDTIIQRRAARGHHHSPDRHDDDLDGVAAFTDDLRRVDWPAGFKPTGIEKYDGATNPESWLTVYGLAIRAAGGDSKAMANYLPVALADSARSWLHGLPRGTIGSWAELRDHFIANFQGTFERPGTQYDLYNVIQKSGESLRDYIRRFSEQRNKISDITDDVIIAAFTKGIRHEELVGKFGRKPPRTVKLMFEKANEYAKAEDAVTASKQSGPSWKPNKGTPATGGGGSNNHKDRKRKPEELVATATHSSRQRSRVNTFDKIMNSQCPHHPNSNHVPKDCFVYKQFAEQYTKTTRKNSDEEQSTSRKKDDGDTQAGFQDHRKELNHIFGGPLAYESKRKQKLTEREINAVQPDTPQYLRWSEIAIKFDRSDHPDRVVHPGRYPLVLDPVVRNVKLRRTLIDGGSALNILFAKTLDDMQIPRSELKPSNAPFHGVIPGLSATPLGQITLPVTFGTRENFRTENISFEVADFETAYHAILGRPALAKFMAVPHYTYMMMKMPGPRGVLSLRSDIKQAVTCDKESCDMAQTREMASAREDIRLAAATASEGEVPATKISKNGESEAKTKKIPLDPSDSTKTANNKNIFAWKPSDMPGIPREVIEHSLHVKEDAKPIKQRLRRFAQDRKDAIKEKLTKLLAAGFIKEVLHPDWLANPVLVRKKTGQWRMCVDYTDLNKSCPKDPFGLPRIDQIRLKESDCLKTSFITPFGAYCYVTMPFGLKNAGATYQRMIQRCFSTQIGRNVEAYVDDVVVKTKQKDDLISDLEETFASIRAFKMKLNPEKCTFGVPSGKLLGFMVSHRGIQANPEKVTAILNMKPPSTQKDVQKLTGCMAALSRFVSRLGERGMPFFKLLKKTDDFQWGPEAQKAFEDFKKLLTEPPILASLHPQEPLLLYVSATSQVVSTVLVVEREEEGHVQKVQRPIYFVSEVLADSKTRYPQVQKLLYGILITTRKLSHYFQGHSVTVVTSFPLGDILHNREANGRIAKWALELMSLDISFKPRISIKSQALADFVAEWTECQEDTPAEKMEHWTMHFDGSKRLSGTGAGVVLISPTGERLSYVLWIHFSASHNVAEYEALLHGLRIAISLGIKRLIVRGDSQLVVNQVMKEWSCLDDNMMAYRQEVRKLEDKFDGLELSHVLRHNNEAADRLANFGSKREVAPSDVFVEHLYAPTVPHKDTTQVAGTHDVAMIEADWREPLIRFLTSQELPQDKDEAERISRRSKLYVMHEAELYKKSPSGILQRCVSLEEGRQLLKDIHSGICGNHAAARTIVGKAYRQGFFWPTAVSDADKIVRTCEGCQFFARQIHLPAQELQTIPLSWPFAVWGLDMVGPFKKAVGGYTHLFVAIDKFSKWIEAKPVVTITADKARDFFINIVHRFGVPNRIITDNGRQFTGGVFKDFCEDFGIKICYASVAHPMSNGQVERANGMILQGIKARVFDRLKPYAGKWVEQLPSVLWSLRTTPSRATGQSPFFLVYEAEAMLPSEVEFESLRFRNFREERYEEDRVDDLHRLEEVREAALIQSARYLQGLRRYHNRNVRSRAFLVGDLVLRKIQTTRDRHKLSPLWEGPFIISEVTRPGSYRLKREDGTLVDNSWNIEHLRRFYA

SEQ ID NO: 149754 - protein, 99 aa, Oryza sativa
  unsure (1)..(99): unsure at all Xaa locations
  Clone ID: PAT_MRT4530_50056C.1.pep
FAATNDTAAQVLQYLRPNSNLEELIMKGYNGSSFPSWVGSLPLDRLASIELKDXQNCEELPPPGRFPSLKHDVIQSLPSVKLVGPEFLGNVGDINYFFF

SEQ ID NO: 149755 - protein, 137 aa, Oryza sativa
  Clone ID: PAT_MRT4530_50057C.1.pep
MGAQGGARVAPDNGAWARGGGRATPTGGGSEAGGGGASLPGVHQENMGLQRKIKILAKRTIQEAQAVTLHPAKTKRPRSEEEEEAAASTPTALCGGGGGLEGALHCPPAPKKPRLVMGCSLNGFKVLSVVDLRFFLR

SEQ ID NO: 149756 - protein, 121 aa, Oryza sativa
  Clone ID: PAT_MRT4530_50058C.1.pep
MRAPQPASICLVAVRVAEVAPCKDEEKNNFASRVSEIKTYEVHKTWLQPRKKKEKKTWLQSAGPVDPSPPTVAGPRLWLGDCDGGGSGTIVKQEPEPRPLSYLRLDSHARAAAVRRMASAE

SEQ ID NO: 149757 - protein, 277 aa, Oryza sativa
  unsure (1)..(277): unsure at all Xaa locations
  Clone ID: PAT_MRT4530_50059C.1.pep
MGKAGRWLRSFLAGGKKGGKKGEAMAAALPGEAAKEKRWSFRRPVHGEKAAAEAAAAADGVVXMQVFSAAQSQLRAQAQREMDRSCEENAKIVEVDSGAGEPARRXGEYGHHGRWSPAPSAMTEVMSPRAYSGHFEDMAFAATAHSSPHHASASSELLCCPSYMANTESSRAKARSQSAPRQRTDALERQPSRRKSGGGGGGAKMQRSSSSHAAAAQRGAQFPWPVIKLDTSSASLKDSECGSTSSVLTAATVYSRTRSLVGFEVSYDFRDIVHVFF

SEQ ID NO: 149758 - protein, 449 aa, Oryza sativa
  Clone ID: PAT_MRT4530_5005C.1.pep
MDNTGNKGYGNDGSDDSRTQANGNEKSINETSPELIQIVVNQTNMLATAFQLLQNWNNPAGATNVQVPTVQQQCKLSEFLKTEPPTFAIAVDPMEASDWLRTIEKKLGLIQCTDQERVGFATHQLVGPASEWWDRYEASRPEGHTITWNEFSSVFRRSHVPAGTITLRKREFRYLKQGDLTVTEYLHEFYRLAHYAPEDVETDEDKQEKFLQGLKDELAVQLLLEDYENFEKLVDKAMQLESEHNRMTNCKRRMVNNPVFPGGNQRQRTEPLQITGSSVVYQEFLPQEDERNADNNNSTTNADNTTNHHGSCPIHDHLDQACNVNSIHQDIDDSINEGTQNDNPSNFDSEKDSNGDSNYGTTDANVSKDFQPPTPTPSQNDRPQTDSSAKKTLICYNCKEPGHYSRDCLQPRQNRPPHYRQFTRSRHSNRIVVTGANAVPVRPRVNQNP

SEQ ID NO: 149759 - protein, 109 aa, Oryza sativa
  Clone ID: PAT_MRT4530_50060C.1.pep
APGVSPWAKGTPPLFSRFFVHPLTLDPFFFSQKGIRRQVLVLKKMVGGFFFWEQGLLDFKGGGPSPSFLDPSVRELSCVLNPTIFFLVGTNLVSCRVKLAPPPPLLAPS

SEQ ID NO: 149760 - protein, 150 aa, Oryza sativa
  Clone ID: PAT_MRT4530_50061C.1.pep
MPPSPPVSRQSKDGGTAIVEGGGGGSDAQGSATGGPCKCNCLYYFPTLKTENVLIIPKYYNGLILGNYDGLHSELDKLKREVEEMKKLYKELFESLARKDKDVNAILKKSSAAKIDEVTTSDLLWTGTSSTTEKQIAVNTSSRVKFRGST

SEQ ID NO: 149761 - protein, 544 aa, Oryza sativa
  Clone ID: PAT_MRT4530_50062C.1.pep
MADTPTSRMIHPFSNIPSQNLKQFQYSDNPQHPCHPYRAPSDTHVVPHHYGLKSHSPDAGYESQATPNKYTLDSSEGAGCMRHDSPSSQSFTTRSGSPLSQEDSHSDSTDGSPVGASCVTEDPNDLKQKLKDLEAVMLGPDSEIVNSLENSVANQLSLEPEKWVRMMGIPRGNLKELLIACARAVEEKNSFAIDMMIPELRKIVSVSGEPLERLGAYMVEGLVARLASSGISIYKALKCKEPKSSDLLSYMHFLYEACPYFKFGYMSANGAIAEAVKGEDRIHIIDFHISQGAQWISLLQALAARPGGPPTVRITGIDDSVSAYARGGGLELVGRRLSHIASLCKVPFEFHPLAISGSKVEAAHLGVIPGEALAVNFTLELHHIPDESVSTANHRDRLLRMVKSLSPKVLTLVEMESNTNTAPFPQRFAETLDYYTAIFESIDLTLPRDDRERINMEQHCLAREIVNLIACEGEERAERYEPFGKWKARLTMAGFRPSPLSSLVNATIRTLLQSYSDNYKLAERDGALYLGWKSRPLVVSSAWH

SEQ ID NO: 149762 - protein, 181 aa, Oryza sativa
  Clone ID: PAT_MRT4530_50063C.1.pep
MASTPPPPPVIGKAGNLTVFITPPSPAEAEAEGSPDSPRSEFTTPSGSPRAAEDSTPPPSPPRAGAAAGQGGGAGGLPAAGHPAAGEDGLTAAARREALLRRRPSASAAGAAHASLDEYISNWFGLDQSKYQWALNEYYESNGKRNCGDLSVSLAKIHLSCGSALGVGMQLSLILYWSGIL

SEQ ID NO: 149763 - protein, 134 aa, Oryza sativa
  Clone ID: PAT_MRT4530_50064C.1.pep
MMRMEGVIRGNVDGGGSGPTVVAGMGATAVLLGLCEDPTSPAHTTVLATLLRTHSLDDFFVLHRSHIISDSPMPHSPPPPHLAFLDWHGNGSTRLRVRPRAPAPPVRPRAPPLAASRARRRRLGAEAGASSRCP

SEQ ID NO: 149764 - protein, 112 aa, Oryza sativa
  Clone ID: PAT_MRT4530_50065C.1.pep
TPSPYPPFSLLSSLPPLFSLPPPARRPLPSDRRLPRPPSHNRPPPPSPSAPRSQQPPPPDPLAPPPLDPPRRLVPPRLRPSRRSTRSPPPGPPCHLAPPPPLDPLAAWRPAP

SEQ ID NO: 149765 - protein, 78 aa, Oryza sativa
  Clone ID: PAT_MRT4530_50066C.1.pep
YLYGVYQYMLVADVSSPGCPHRGSHRGWRHHSGFTVHTDRHTPSTAHTPHTHHTRSWVINSPEYVVNVAYGHMAVGLQ

SEQ ID NO: 149766 - protein, 130 aa, Oryza sativa
  unsure (1)..(130): unsure at all Xaa locations
  Clone ID: PAT_MRT4530_50067C.1.pep
KLSFFTXRSVTPVLFACTFLSRSMLHRSTMRQQPRRNLAGGERAPQEXREPLHXSAXPQHLLVPEEEDLLXXSGSPPSTRGRGATAAQRFRPSQNRSNTCSIXLAAAAAAGWCSSVVVVTPFTMLLMVNS

SEQ ID NO: 149767 - protein, 45 aa, Oryza sativa
  Clone ID: PAT_MRT4530_50068C.1.pep
VIYNARSQHLIWECQRPWGRRFRVRANRQRRMRIHTKHTVTEAYG

SEQ ID NO: 149768 - protein, 1928 aa, Oryza sativa
  Clone ID: PAT_MRT4530_50069C.1.pep
MGSVSGIDDLVFPPGQTFRFGSLDFVTNNFGKISLLDSVSDQSGENRISAPFGLPNAAESYFKTISIELASNHSGEIASSPTSPDQDDGAYPPILMKLPDDLAAVSITTASPSRRPRRKSASTPISPNFREVGVILQPLGTVSTDQLDGYYSSPTVDSRPTDIVEYDEFSSRYNDPDLDDFDGSLDDNYTPLYFGVFMADNETEEQRQARETEARCETERRRLEEEHQAQEQERLRREQQERERTAKEAEDRRQRALEAGRRARDLIGQQDVEGTPVFRTPQQNAIAAITLLDTLLKENELNQSDHVVNILNQTKTMIAASVPVNSESVHTPTGSRVPHFRSHDYRHPSLSITGAGSNRRSRGHDERSVHSPPDHHRERRVERPRSPPRRRPVDLRDTIIQRRAARGHHHSPDRHDDDLDGVAAFTDDLRRVDWPAGFKPTGIEKYDGTTNPESWLTVYGLAIRAAGGDSKAMANYLPVALADSARSWLHGLPRGTIGSWAELRDHFIANFQGTFERPGTQYDLYNVIQKSGESLRDYIRRFSEQRNKISDITDDVIIAAFTKGIRHEELVGKFGRKPPKTVKLMFEKANEYAKAEDAVTASKQSGPSWKPNKGTPAKGGGGSNNHKDRKRKPEELVATATHSSRQRSRVNTFDKIMNSQCPHHPNSNHVAKDCFVYKQFAEQYTKTTRKNSDEEQSTSRKKDDGDTPAGFQDHRKELNHIFGGPLAYESKRKQKLTEREINAVQPDTPQYLRWSEIAIKFDRSDHPDRVVHPGRYPLVLDPVVRNVKLRRTLIDGGSALNILFAKTLDDMQIPRSELKPSNAPFHGITLPVTFGTRENFRIENISFEVADFETAYHAILGRPALAKFMAVPHYTYMMMKMPGPRGVLSLRSDIKQAVTCDKESCDMAQTREMTSAREDIRLAAATASEGEVPATKISKSGESEAKTKKIPLDPSDSTKTANNKDIFAWKPSDMPGIPREVIEHSLHVKEDAKPIKQRLRRFAQDRKDAIKEELTKLLAAGFIKEVLHPDWLANPVLVRKKTGQWRMCVDYTDLNKSCPKDPFGLPRIDQVVDSTAGCELLSFLDCYSGYHQIRLKEFDCLKTSFITPFGAYCYVTMPFGLKNAGATYQRMIQRCFSTQIGRNVEAYVDDVVVKTKQKDDLISDLEETFASIRAFRMKLNPEKCTFGVPSGKLLGFMVSHRGIQANPEKITAILNMKPPTTSQVVSTVLVVEREEEGHVQKVQRPIYFVSEVLADSKTRYPQVQKLLYGILITTRKLSHYFHSHSVTVVTSFPLGDILHNREANGRIAKWALELMSLDISFKPRISIKSQALADFVAEWTECQEDTPAEKMEHWTMHFDGSKRLSGTGAGVVLISPTGQRLSYVLWIHFSASHNVAEYEALLHGLRIAISLGIKRLIVRGDSQLVVNQVMKEWSCLDDNMMAYRQEVRKLEDKFDGLELSHVLRHNNEAADRLANFGSKREVAPSDVFVEHLYTPTVPHKDTTQIAGTHDVALVEADWREPLIRFLTSQELPQDKDEAERISRRSKLYVMHEAELYKKSPSGILQRCVSLEEGRQLLKDIHSGICGNHAAARTIVGKAYRQGFFWPTAVSDADKIVRTCEGCQFFARQIHLPAQELQTIPLSWPFAVWGLDMVGPFKKAVGGYTHLFVAIDKFSRWIEAKPVVTITADNARDFFINIVHRFGVPNRIITDNGRQFTGGVFKDFCEDFGIKICYASVAHPMSNGQVERANGMILQGIKARVFDRLKPYAGKWVKQLPSVLWSLRTTPSRATGQSPFFLVYGAEAMLPSEVEFESLRFRNFREERYEEDRVDDLHRLEEVREAALIQSARYLQGLRRYHNRNVRSRAFLVGDLVLRKIQTTRDRHKLSPLWEGPFIISEVTRPGSYRLKREDGTLVDNSWNIEHLRRFYA

SEQ ID NO: 149769 - protein, 61 aa, Oryza sativa
  Clone ID: PAT_MRT4530_5006C.1.pep
EMMKSIVADQSHGTKNVLCNGLHEGYGANVIGALMLDHNTNDVSPTRKVHSRNKFYWGLSV

SEQ ID NO: 149770 - protein, 1986 aa, Oryza sativa
  unsure (1)..(1986): unsure at all Xaa locations
  Clone ID: PAT_MRT4530_50070C.1.pep
MGSVSGIDDLVFPPGQTFRFGSLDFITNNFGKISLLDSESNQSGENRISVPFGFPNAAESYFKTISTESASNHSAEIASPPTEPDQDDGAYPPVLMKLPDDLAAVFTTTTSSSRRPRRKSASTPISPSFREVGVILQPLGTVSTDQLDDYNSSPTVDSRPTDIVEYDEFSSRYHDPDLDDFDGSLDDNYTPLYFGVFMANNETEEQRQARETEERRRLEEEHQAQEQERLRREQQDRERIAKEAEDRRQRALEAGRRARDLIGQQDVEGTPVFRTPQQNAVAAITLLDTLLNQNELNRSDHVVNILNQTKTMIAATVPVNSESVHTPTGSRVPHFRSHDYRHPSLSITGAGSNRRSRGHDERSVHSPPELHRERRVERPRSPPRRRPIDLRDTITQRRAARGYHHSPDRRDDDLDGVAAFTDDLRRVDWPAGFKPTGIEKYDGTTNPESWLTVYGLAIRAAGGDNKAMANYLPVALADSARSWLHGLPRGTIGSWAELRDHFIANFQGTFERPGTQYDLYNVIQKSGESLRDYIRRFSEQRNKISDITDDVIIAAFTKGIRHEELVGKFGRKPPRTVKLMFEKANEYAKAEDAVTASKQSGPSWKPKNTPATGGGGSNNHKDRKRKPEELVATAAHSSRQRSRVNTFDKIMNSQCPHHPNSNHVAKECFIYKQFAEQYTKSTRKNSDEEQSTSRKKDDGDTPAGFQDHRKELNHIFGGPLAYESKRKQKLTEREINAVQPDTPQYLRWSEIAIKFDRSDHPDRVVHPGRYPLVLDPVVRNVKLRRTLIDGGSALNILFAKTLDDMQIPRSELKPSNAPFHGVIPGLSATPLGQITLPVTFGTRENFRTENISFEVADFETAYHAILGRPALAKFMAVPHYTYMMMKMPGPRGVLSLRSDIKQAVTCDKESCDMAQTREMALAREEIRLAATTESALITFLQNNKDIFAWKPSDMPGIPREVIEHSLHVKEDAKPIKQRLRRFAQDRKDAIKEELTKLLAAGFIKEVLHPDWLANPVLVRKKTGQWRMCVDYTDLNKSCPKDPFGLPRIDQVVDSTAGCELLSFLDCYSGYHQIRLKESDCLKTSFITPFGAYCYVTMPFGLKNAGATYQRMIQRCFSTQIGRNVEAYVDDVVVKTKQKDDLISDLQETFASIRAFRMKLNPEKCTFGVPSGKLLGFMVSHRGIQANPEKVTAILNMKPPSTQKDVQKLTGCMAALSRFVSRLGERGMPFFKLLKKTDNFQWGPEAQKAFEDFKQLLTKPPVLASPHPQEPLLLYVSATSQVVSTVLVVEREEEGHVQKVQRPIYFVSEVLADSKTRYPQVQKLLYGILITTRKLSHYFQGHSVTVVTSFPLGDVLHNREANGRIAKWALELMSLDISFKPRTSIKSQALADFVAEWTECQEDTPVEKIEHWTMHFDGSKRLSGTGAGVVLISPTGERLSYVLWIHFSASHNVAEYEALLHGLRIAISLGIKRLIVRGDSQLVVNQVMKEWSCIDDNMMAYRQEVRKLEDKFDGLELSHVLRHNNEAADRLANFGSKREAAPSDVFVEHLYTPTVPHKDATQITGTHDVAMVEADWREPFIRFLTSQELPQDKDEAERISRRSKLYVMHESELYKKSPSGILQRCVSLEEGRQLLKDIHSGICGNHAAARTIVGKAYRQGFFWPTAVSDADKIVRTCEGCQFFARQIHLPAQELQTIPLSWPFAVWGLDMVGPFKKAVGGYTHLFVAIDKFSKWIEAKPVVTITADNARDFFINIVHRFGVPNRIITDNGTQFTGGVFKDFCEDFGIKICYASVAHPMSNGQVERANGMILQGIKARVFDRXLKPYAGKWVSQLPSVLWSLRTTPSRATGQSPFFLVYGAEAMLPSEVEFESLRFRNFREERYEEDRVDDLHRLEEVREAALIQSARYLQGLRRYHNRNVRSRACLVGDLVLRKIQTTRDRHKLSPLWEGPFIISEVTRPGSYRLKREDGTLVDNSWNIEHLRRFYA

SEQ ID NO: 149771 - protein, 1975 aa, Oryza sativa
  unsure (1)..(1975): unsure at all Xaa locations
  Clone ID: PAT_MRT4530_50071C.1.pep
MGPFSGIDDLVFPPGQTFRFGSLDFITNNFGKISLLDSESDQSGENRLSVPFGFPNAAESYFKTISPESASNHSAEIASSPTIPDQDDGAYPPVLMKLPDDLAAVFTTTAPSSRRPRRKSASTPISPSFREVGVILQPLGTVSTDQLDDYNSSPTVDSRPTDIVEYDEFSSRYNDFNDFDDFDGSLDDNYTPLYFGVFMANNETEEQRQARETEERRRLEEEHQAQEQERLRREQQDRERTAKEAEDRRQRALEAGRRARDLIGQQDVEGTPVFRTPQQNAVAAITLLDTLLNQNELNQSDHVVNILNQTKTMIAATVPVNSESVHTPTGSRVPHFRSHDYRHPSLSITGAGSNRRSRGHDERSVHSPPELHRERRVERPRSPPRRRPIDLRDTIIQRRAARGYHHSPDRRDDDLDGVAAFTDDLRRVDWPAGFKPTGIEKYDGTTNPESWLTVYGLAIRAAGGDNKAMANYLPVALADSARSWLHGLPRGTIGSWAELRDHFIANFQGTFERPGTQYDLYNVIQKSGESLREYIRRFSEQRNKISDITDDVIIAAFTKGIRHEELVGKFGRKPPRTVKLMFEKANEYAKAEDAVTASKQSGPSWKPKNTPATGGGGSNNHKDRKRKPEELVATATHSSRQRSRVNTFDKIMNSQCPHHPNSNHVAKECFIYKQFAEQYTKSTRKNSDKEQSTSRKKDDGDTPAGFQDHRKELNHIFGGPLAYESKRKQKLTEREINAVQPDTPQYLRWSEIAIRFDRSDHPDRVVHPGRYPLVLDPVVRNVKLRRTLIDGGSALNILFAKTLDDMQIPRSELKPSNAPFHGVIPGLSATPLGQITLPVTFGTRENFRTENISFEVADFETAYHAILGRPALAKFMAVPHYTYMMMKMPGPRGVLTLRSDIKQAVTCDKESCDMAQTREMASAREEIRLAATTESALITFLQNNKDIFAWKPSDMPGIPREVIEHSLHVKEDAKPIKQRLRRFAQDRKDAIKEELTKLLAAGFIKEVLHPDWLANPVLVRKKTGQWRMCVDYTDLNKXCPKDPFGLPRIDQFXLDCYSGYHQIRLKESDCLKTSFITPFGAYCYVTMPFGLKNAGATYQRMIQRCFSTQIGRNVEAYVDDVVVKTKQKDDLILDLEETFASIRAFRMKLNPEKCTFGVPSGKLLGFMVSHRGIQANPEKVTAILNMKPPSTQKDVQKLTGCMAALSRFVSRLGERGMPFFKLLKKTDNFQWGPEAQKAFEDFKQLLTKPPVLASPHPQEPLLLYVSATSQVVSTVLVVEREEEGHVQKVQRPIYFVSEVLADSKTRYPQVQKLLYGILITTRKLSHYFQGHSVTVVTSFPLGDVLHNREANGRIAKWALELMSLDISFKPRTSIKSQALADFVAEWTECQEDTPVEKIEHWTMHFDGSKRLSGTGAGVVLISPTGERLSYVLWIHFSASHNVAEYEALLHGLRIAISLGIKRLIVRGDSQLVVNQVMKEWSCIDDNMMAYRQEVRKLEDKFDGLELSHVLRHNNEAADRLANFGSKREAAPSDVFVEHLYTPTVPHKDTAQVAGTHDIAMVEADWREPFIRFLTSQELPQDKDEAERISRRSKLYVMHEAELYKKSPSGILQRCVSLEEGRQLLKDIHSGICGNHAAARTIVGKAYRQGFFWPTAVSDADKIVRTCEGCQFFARQIHLPAQELQTIPLSWPFAVWGLDMVGPFKKAVGGYTHLFVAIDKFSKWIEAKPVVTITADNARDFFINIVHRFGVPNRIITDNGTQFTGGVFKDFCEDFGIKICYASVAHPMSNGQVERANGMILQGIKARVFDRLKPYAGKWVSQLPSVLWSLRTTPSRATGQSPFFLVYGAEAMLPSEVEFESLRFRNFREERYEEDRVDDLHRLEEAREAALIQSARYLQGLRRYHNRNVRSRAFLVGDLVLRKIQTTRDRHKLSPLWEGPFIISEVTRPGSYRLKREDGTLVDNSWNIEHLRRFYA

SEQ ID NO: 149772 - protein, 848 aa, Oryza sativa
  Clone ID: PAT_MRT4530_50072C.1.pep
MASAREEIRLAATTVSEGEVPAAKISKSGETEAETKKIPLDPSDPTKTAVIGAEEVIEHSLHVKEDAKPIKQRLRRFAQDRKDAIKEELTKLLAAGCIKEVLHPDWLANPVLVRKKTGQWRMCVDYTDLNKSFPKDPFGLPRIDQIGRNVEAYVDDVVVKTKQKDDLISDLEETFASIRAFRMKLNPEKCTFGVPSGKLLGFMVSHRGIQANPEKVTAILNMKPPSTQKDVQKLTGCMAALSRFVSRLGERGMPFFKLLKKTDNFQWGPEAQKAFEDFKQLLTKPPVLASPHPQEPLLLYVSATSQVVSTVLVVEREEEGHVQKVQRPIYFVSEVLTDSKTRYPQVQKLLYGILITTRKLSHYFQGHSVTVVTSFPLGDVLHNREANGRIAKWALELMSLDISFKPRTSIKSQALADFVAEWTECQEDTPVEKIEHWTMHFDGSKRLSGTGAGVVLISPTGERLSYVLWIHFSASHNVAEYEALLHGLRIAISLGIKRLIVRGDSQLVVNQVMKEWSCIDDNMMAYRQEVRKLEDKFDGLELSHVLRHNNEAADRLANFGSKREAAPSDVFVEHLYSPTVPHKDATQVADTHDIAMVEADWREPLIRFLTSQELPQDKDEAERISRRSKLYVMHEAELYKKSPSGILQRCVSLEEGRQLLKDIHSGICGNHAAARTIVGKAYRQGFFWPTAVSDADKIVRTCEGCQFFARQIHLPAQELQTIPLSWPFAVWGLDMVGPFKKAVGGYTHLFVAIDKFSKWIEAKPVATITADNARDFFINIVYRFGVPNRIITDNGTQFTGGVFKDFCEDFGIKICYASVAHPMSNGQNAMKKTEWTTCTDWKRSAKQL

SEQ ID NO: 149773 - protein, 161 aa, Oryza sativa
  unsure (1)..(161): unsure at all Xaa locations
  Clone ID: PAT_MRT4530_50073C.1.pep
MASATLLXSSFLPXKSEWGATRQAAAPXXVTVSXVVRXGAYXHKLVXTAKTXASXRKGFLAXDXSNXTCGXKLAXIGXXKHXXXPXGLPXPPCLRTXLXXXHLPCYPLPXXLFXSTVYXXKIVXIXPXXKILXRFXVXKGLXPXAXSHNNLCCXGLXXAFL

SEQ ID NO: 149774 - protein, 68 aa, Oryza sativa
  Clone ID: PAT_MRT4530_50074C.1.pep
YKLVKDIFPLPCLYPNRLIVFREIPELKMLSRLWLKEFDFGRIYKREQKNIHFTKVVCVHVSAHRHFF

SEQ ID NO: 149775 - protein, 2010 aa, Oryza sativa
  Clone ID: PAT_MRT4530_50075C.1.pep
MGFVSGIDDLVFPPGQTFRFGSLDFVTNNFGKISLLDSESDQSGENRISVPFGFPNAAESYFKTISTESASNHSAEIASSPTTPDQDDGAYPPVLMKLPDDLAAVSTTTTSSSRRPRRKSASTPISPSFREVGVILQPLGTVSTDQLDDYNSSPTVDSRPTDIVEYDEFSSRYNDFDDFDGSLDDNYTPLYFGVFMANNETEEQRQAWETEERRRLEEEHQAQEQERLRREQQDRERTAKEAEDRRQRALEAGRRARDLIDQQDVEGTPVFRTPQQNAVAAITLLDTLLNQNELNQSDHVVNILNQTKTMIAASVPVNSESVHTPTGSRVPHFRSHDYRHPSLSITGAGSNRRSRGHDERSIHSPPDQYRERRVERPRSPPRRRPVDLRDTIIQRRAARGHHHSPNRHDDDLDGVAAFTDDLRRVDWPAGFKPTGIEKYDGTTNPESWLTVYGLAIRAAGGDNKAMANYLPVALADSARSWLHGLPRGTIGSWAELRDHFIANFQGTFERPGTQYDLYNVIQKSGESLRDYIRRFSEQRNKISDITDDVIIAAFTKGIRHEELVGKFGRKPPMTVKLMFEKANEYAKAEDAVTASKQSGPSWKQNKGTPATGGGGSNNHKDRKRKPAELVATASHSSRQRSRVNTFDKIMNSQCSHHPNSNHVAKDCFVYKQFADQYTKTARKNSDEEQSTSRKKDDGDTPAGFQDHRKELNHIFGGPLAYESKRKQKLTEREINAVQPDTPQYLRWSEIAIKFDRSDHPDRVVHPGRYPLVLDPVVRNVKLRRTLIDGGSALNILFAKTLDDMQIPHSELKPSNAPFHGVIPGLSATPLGQITLPVTFGTRENFRTENISFEVADFETAYHAILGRPALAKFMAVPHYTYMMMKMPGPRGVLSLRSDIKQAVTCDKESCDMAQTREMASAREDIRLAAATASEGEEPATKISKSGESEAKTKKIPLDPSDPAKTANNKDIFAWKPSDMPGIPREVIEHSLHVKEDAKPIKQRLRRFAQDRKDAIKEELTKLLAAGFIKEVLHPDWLANPVLVRKKTGQWRMCVDYTDLNKSCPKDPFGLPRIDQVVDSTAGRELLSFLDCYSGYHQIRLKESDCLKTSFITPFGAYCYVTMPFGLKNAGATYQRMIQRCFSTQIGRNVEAYVDDVVVKTKQKDDLISDLEETFASIRAFRMKLNPEKCTFGVPSGKLVGFMVSHRGIQANPEKVTAILNMKPPSTQKDVQKLTGCMAALSRFVSRLGERGMPFFKLLKKTDNFQWGPEAQKAFEDFKKLLTEPPVLASPHPQEPLLLYVSATSQVVSTVLVVEREEEGHVQKVQRPIYFVSEVLADSKTRYPQVQKLLYGILITTRKLSHYFQGHSVTVVTSFPLGDILHNREANGRIAKWALELMSLDISFKPRISIKSQALADFVAEWTECQEDTPAENMEHWTMHFDGSKRLSGTGAGVVLISPTGERLSYVLWIHFSASHNVAEYEALLHGLRIAISLGIKRLIVRGDSQLVVNQVMKEWSCLDDNMMAYRQEVRKLEDKFDGLELSHVLRHNNEAADRLANFGSKREVAPSDVFVEHLYTPTVPHKDTTQVAGTHDVAMVETDWREPLIRFLTSQELPQDKDEAERISRRSKLYVMHEAELYKKSPSGILQRCVSLEEGRQLLQDIHSGICGNHAAARTIVGKAYRQGFFWPTAVSDADKIVRTCEGCQFFARQIHLPAQELQTIPLSWPFAVWGLDMVGPFKKAVGGYTHLFVAIDKFSKWIEAKPVVTITADNARDFFINIVHRFGVPNRIITDNGTQFTGGVFKDFCEDFGIKICYASVAHPMSNGQVERANGMILQGIKARVFDRLKPYAGKWVQQLPSVLWSLRTTPSRATGQSPFFLVYGAEAMLPSEVEFESLRFRNFREERYEEDRVDDLHRLEEVREAALIRSARYLQGLRRYHNRNVRSRAFLVGDLVLRKIQTTRDRHKLSPLWEGPFIISEVTRPGSYRLKREDGTLVDNSWNIEHLRRFYA

SEQ ID NO: 149776 - protein, 191 aa, Oryza sativa
  Clone ID: PAT_MRT4530_50076C.1.pep
MAVARRRGGGGDDGKVDPAKARSGGSAKAVRRWRGSAGREGAPAAAVHGETTMAREGSEQRSRWVEGGVVAAAAPHIWAREFANGSTGILLLDILRMESIKTQSQGSASSVPKNPAMSSCRKKKSDDATFLEDLKDHIDEFIHASMDEHKHCFKNTIQKMFGMSKVVAERSAEAKEAEVESALPLQTSVSQ

SEQ ID NO: 149777 - protein, 1818 aa, Oryza sativa
  Clone ID: PAT_MRT4530_50077C.1.pep
MGSVSGIDDLVFPPGQTFRFGSLDFVTNNFGKISLLDSVSAQSGENRLSVPFGLLNAAESYFKTISIELASNHSGEIASSPTTPDQDDGAYPPILMKLPDDSAAASITTASSSRRPRRKSASTPISPSFREVGVILQPLGTVSTDQLDGYYSSPTVDSRPTDIVEYDEFSSRYNEPDLDDFDESLDDNYTPLYFGVFMADNETEEQRQARETEARREAERLRLEEERQAQEQERLRREQQERERTAKEAEDRRQRALEAGRRARDLIGQQDVEGTPVFRTPQQNAVAAITLLDTLLKENELNQSDHVVNILNQTKTMIAASVPVNSESVHTLTGSRVPHFRSHDYRHPSLSITGAGSNRKSRGHDGRSVHSPPDHHGERRVERPRSPPRRRPVDLRDTIIQRRAARGHHHLPDRHDDDLDGVAAFTDDLRRVDWPAGFKPTRIEKYDGTTNPELWLTVYGLAIRAAGGDSKAMANYLPVALADSARSWLHGLPRGTIGSWAELRDHFIANFQGTFERPGTQYDLYNVIQKSGESLRDYIRRFSEQRNKISDITDDVIIAAFTKGIRHEELVGKFGRKPPRTVKLIFEKANEYAKAEDAVTASKQSGPSWKPNKGTPATGGGGSNNHKDRKRKPAELVATASHSSRQRSRVNTFDKIMNSQCPHHPNSNHVAKDCFVYKQFADQYTKTTRKNSDEEQSTSRKKDDGDAPAGFQDHRKELNHIFGGPLAYESKRKQKLTEREINAVQPDTPQYLRWSEIAIKFDRSDHPDRVVHPGRYPLVLDPVVRNVKLRRTLIDGGSALNILFAKTLDDMQIPRSELKPSNAPFHGVIPGLSATPLGQITLPVTFGTRENFRTENISFEVADFETAYHAILGRPALAKFMAVPHYTYMMMKMPGPRGVLSLRSDIKQAVTCDKESCDMAQTREMASVREDIRLAAATASEGEVPATKTSKSGESEAKTKKIPLDPSDPTKTANNKDIFAWKPSDMPGIPREVIEHSLYVKEDAKPIKQRLRRFAQDRKDAIKEELTKLLAAGFIKEVLHPDWLANPVLVRKKTGQWRMCVDYTDLNKSCPKDPFGLPRIDQVVDSTAGCELLSFLDCYSGYHQIRLKESDCLKTSFITPFGAYCYVTMPFGLKNAGATYQRMIQRCFSTQIGRNVEAYVDDVVVKTKQKDDLILDLEETFASIRAFRMKLNPEKCTFGVPSGKLLGFMVSHRGIQANPEKVIAILNMKPPSTQKDVQKLTGCMAALSRFVSRLGERGMPFFKLLKKTDDFQWGPEALKAFEDFKKLLTEPPVLASPHPQEPLLLYVSATSQVVSTVLVVEREEEGHVQKVQRPIYFVSEVLADSKTRYPQVQKLLYGILITTRKLSHYFQGVVLISPTGERLSYVLWIHFSTSHNVAEYEALLHGLRIAISLGIKRLIVRGDSQLVVNQVMKEWSCLDDNMTAYRQEVRKLEDKFDGLELSHVLRHNNEAADRLANFGSKREAAPSDVFVEHLYTPTVPHKDATQVAGTHDVAMVEADWREPLIRFLISQELPQDKDEAERISRRSKLYVMHEAELYKKSPSGILQRCISLEEGRQLLKDIHSGICGNHAAARTIVGKAYRQGFFWPTAVSDADKIVRTCEGCQFFARQIHLPAQELRTIPLSWPFAVWGLDMVGPFKKAVGGYTHLFVAIDKFSKWVEAKPVVTITADNARDFFINIVHRFGVPNRIITDNGRQFTGGVFKDFCEDFGIKICYASVAHPMSNGQVERANGMILQGIKARVFDRLKPYAGKWVQQLPSVLWSLRTTPSRATGQSPFFLVYGAEAMLPSEVEFESLRF

SEQ ID NO: 149778 - protein, 70 aa, Oryza sativa
  Clone ID: PAT_MRT4530_50078C.1.pep
MEFMGMKVRNGMFDLPDLRIDQLRFTNYEVALHAIMKWPMTSLTSYIEAKAATQRSNGIKCQPMHTIVNP

SEQ ID NO: 149779 - protein, 1964 aa, Oryza sativa
  Clone ID: PAT_MRT4530_50079C.1.pep
MGPISGIDDLVFPPGQTFRFGSLDFITDNFGKISLLDSESDQSGENRISVPFGFPNAAETYFKTISIESASNHSAEIASSSTSPDQDDGAYPSVLMKLPDDLAAVFTTTASSSRRPRRKSASTPISPSFREVGVILQPLGTVSTDQLDDYNSSPTVDSRPTDIVEYDEFSSRYNDFNDFDDFDGSLDDNYTPLYFGVFMANNETEEQRQARETEERRRLEEEHQAQEQERLRREQQDRERTAKEAEDRRQRALEAGRRARDLIGQQDVEGTPVFRTPQHNAVAAITLLDTLLNQNELNRSDHVVNILNQTKTMIAASVPVNSESVHTPTGSRVPHFRSHDYRHPSLSITGAGSNRRSRGHDERSVHSPPDLHRERRVERPRSPPRRRPIDLRDTIIQRRAARGYHHSPDRHDDDLDGVAAFTDDLRRVDWPAGFKPTGIEKYDGTTNPESWLTVYGLAIRAAGGDNKAMANYLPVALADSARSWLHGLPRGTIGSWAELRDHFIANFQGTFERPGTQYDLYNVIQKSGESLREYIRRFSEQRNKISDITDDVIIAAFTKGIRHEELVGKFGRKPPRTVKLMFEKANEYAKAEDAVTASKQSGPSWKPKNTPATGGGGSNNHKDRKRKPEELVATTTHSSRQRSRVNTFDKIMNSQCPHHPNSNHVAKECFIYKQFAEQYTKSTRKNSDEEQSTSRKKDDGDTPAGFQDHRKELNHIFGGPMAYESKRKQKLTEREINAVQPDTPQYLRWSEIAIRFDRSDHPDRVVHPGRYPLVLDPVVRNVKLRRTLIDGGSALNILFAKTLDDMQIPRSELKPSNAPFHGVIPGLSATPLGQITLPVTFGTRENFRTENISFEVADFETAYHAILGRPALAKFMAVPHYTYMMMKMPGPRGVLTLRSDIKQAVTCDKESCDMAQTREMASAREEIRLAATTESALITFLQNNKDIFAWKPSDMPGIPREVIEHSLHVKEDAKPIKQRLRRFAQDRKDAIKEELTKLLAAGFIKEVLHPDWLANPVLVRKKTGQWRMCVDYTDLNKSCPKDPFGLPRIDQIRLKESDCLKTSFITPFGAYCYVTMPFGLKNAGATYQRMIQRCFSTQIGRNVEAYVDDVVVKTKQKDDLISDLEETFASIRAFRMKLNPEKCTFGVPSGKLLGFMVSHRGIQANPEKVTAILNMKPPSTQKDVQKLTGCMAALSRFVSRLGERGMPFFKLLKKTDNFQWGPEAQKAFEDFKQLLTKPPVLASPHPQEPLLLYVSATSQVVSTVLVVEREEEGHVQKVQRPIYFVSEVLADSKTRYPQVQKLLYGILITTRKLSHYFQGHPVTVVTSFPLGDVLHNREANGRIAKWALELMSLDISFKPRTSIKSQALADFVAEWTECQEDTPAENMEHWTMHFDGSKRLSGTGAGVVLISPTGERLSYVLWIHFSASHNVAEYEALLHGLRIAISLGIKRLIVRGDSQLVVNQVMKQWSCLDDNMMAYRQEVRKLEDKFDGLELSHVLRHNNEAADRLANFGSKREAAPSDVFVEHLYTPTVPHKDTTQVAGTHDVAMVEADWREPFMRFLTSQELPQDKDEAERISRRSKLYVMHESELYKKSPSGILQRCISLEEGRQLLKDIHSGICGNHAAARTIVGKAYRQGFFWPTAVSDADKIVRTCEGCQFFARQIHLPAQELQTIPLSWPFAVWGLDMVGPFKKAVGGYTHLFVAIDKFSKWIEAKPVVTITADNARDFFINIVHRFGVPNRIITDNGTQFTGGVFKDFCEDFGIKICYASVAHPMSNGQVERANGMILQGIKARVFDRLKPYAGKWVQQLPSVLWSLRTTPSRATGQSPFFLVYGAEAMLPSEVEFESLRFRNFREERYEEDRVDDLHRLEEVREAALIQSARYLQGLRRYHNRNVRSRAFLVGDLVLRKIQTTRDRHKLSPLWEGPFIISEVTRPGSYRLKREDGTLVDNSWNIEHLRRFYA

SEQ ID NO: 149780 - protein, 1172 aa, Oryza sativa
  unsure (1)..(1172): unsure at all Xaa locations
  Clone ID: PAT_MRT4530_5007C.1.pep
MPPPIAGNARVFLGRPPLPPAVNPLFAFYRFGLLPSSPVVSSHLPTVALSLPRCRPASSRLSRLARASSGRAVASSSVAATSSTPACPPLRAVTAGGALPPSPFSFLLAGHLQPHLPPHPCTLRLRRHLSRRRSCPLSLVASPPLLRLRPPLPRPRSAGRRRHHLPRLHDAALIPGITSSSPELRRNTVARAGFSFLLGGISPGCPFRHAHASAGAAISPLRGGVALHLVHSSVSPERHRREPLHPPRRSCSATCPSSPCTGRPHLHHLRHRSGKVALGLASPPSKPLRGPSSSSPIVLVDDVPSVARLVVSRRRLRRRHRSGVVLVVLVPVQPLPAVLVASSPVPVVVVVVVLSSFPVVVAPVLVSALGSASPSLVPAASRLCPRIAAEVVPSPFASVVPELSSPVPFVVVVPKPRRVVLSSFRRFQKRGSRSSPKNRNNPAGATNVQVPTVQQQCKLSEFLKTGPPTFAMAVDPMEASDWLRTIEKKLGLIQCTDQERVGFATHQLVGPASEWWDSYEASWPEGHTITWNEFSSVFKRSHVPAGMITLRKREFRYLKQGDLTVTEYLHEFYRLAQYAPEDVETDEDKQEKFLQGLKDELAVQLLLEDYEDFEKLVDKAMQLESEHNRMTNCKRRIVNIPVFPGGNQRQRTEPLQITGSSVAPQEFPPQEDGRNADNNTSNTNDDDTTNNHGSCPISDHSNKACHVSSIHQDVNDSINDGTQNDNPSNWDSGQDSNGDSNNGTTDANXHFSRDCPQPKRNLRHHSGHYARRRQVTRLVVTGANAVPPPLPPRQSVVRPRRRLLQRRRHLLHPGLPSASRGDRRRRTPAVALLIPPCRPPPAAPPASPVHPPAAPPPLPASQLPPLPRGVATTSPPPAASATSPERRPTSPPPSSAPRRRSHPRHHLLLARTSPEHRXRAGFSFLLGGISPGCPFRHAHASAGAAISPLRGGVALHLVHSSVSPERHRREPLHPPRRSCSATCPSSPCTGRPHLHHLRHRSGKVALGLASPPSKPLRGPSSSSPIVLVDDVPSVARLVVSRRRLRRRHRSGVVLVVLVPVQPLPAVLVASSPVPVVVVVVVLSSFPVVVAPXSSSPPSAPRRQASCRPRLAFVQGSPPKSFPRRSPPSSPSCXAGPVRRCRSQASSRGAFVVPEVPEAWFAVVAEGSEGRSL

SEQ ID NO: 149781 - protein, 1863 aa, Oryza sativa
  Clone ID: PAT_MRT4530_50080C.1.pep
MGSVSGIDDLVFPPGQTFRFGSLDFVTNNFGKISLLNSESDQSGENRISVPFGLPNAAESYFKTISIESASNYSGEIASSPTTPDQDDGAYPPILMKLPDDLAAVSITTASPSRRPRRKSASTPISPSFREVGVILQPLGTVSTDQLDGYYSSPTVDSRPTDIVDLDDNYTPLYFGVFMADNETEEQRQARETEARRETERRRLEEERQAQEQERLRREQQERERTAKEAEDRRQRALEAGRRARDFIGQQDVEGTPVFRTPQQNAVAAITLLDTLLKENELNQSDHVVNILNQTKTMIAASVPVNSESIRTPTGSRVPHFRSHDYCHPSLSITGAGSNRRSRGHDERSVHSPPDHHRERRVERPRSPPRRRPVDLRDTIIQRRAARGYHHSPDRHDDDLDGVAAFTDDLRRVDWPAGFKPTGIEKYDGTTNPESWLTVYGLAIRAAGGDSKAMANYLPVALADSARSWLHGLPRGTIGSWAELRDHFIANFQGTFERPGTQFDLYNVIQKSGESLRDYIRRFSEQRNKISDITDDVIIAAFTKGIRHEELVGKFGRKPPRTVKLMFEKANEYAKAEDAVTASKQSGPSWKPNKGTPATGGGGSNNHKDRKRKPEELVATVTHSSRQRSRVNTFDKIMNSQCPHHPNSNHVAKDCFVYKQFAEQYTKTTRKNSDEEQSTSRKKDDGDTPAGFQDHRTELNHIFGGPLAYESKRKQKLTEREINAVQPDTPQYLRWSEIAIKFDRSDHPDRVVHPGRYPLVLDPVVRNVKLRRTLIDGGSALNILFAKTLDDMQIPRSELKPSNAPFHGVIPGLSATPLGQITLPVTFGTRENFRTENISFEVADFETAYHAILGRPALAKFMAVPHYTYMMMKMPGPRGVLSLRSDIKQAVTCDKESCDMAQTREMASAREDIRLAAATASEGEVPATKISKSGESEAKTKKIPLDPSDSTKTANNKDIFAWKPSDMPGIPREVIEHSLHVKEDAKPIKQRLRRFAQDRKDAIKEELTKLLAAGFIKEVLHPDWLANPVLVRKKTGQWCMCVDYTDLNKSCPKDPFGLPRIDQIGRNVEAYVDDVVVKTKQKDDLISDLEETFASIRAFRMKLNPEKCTFGVPSGKLLGFMVSHRGIQANPEKVTAILNMKPPSTQKDVQKLTGCMAALSRFVSRLGERGMPFFKLLKKTDDFQWGPEAQKAFEDFKKLLTEPPVLASPHPQEPLLLYVAATSQVVSTVLVVEREEEGHVQKVQRPIYFVSEVLADSKTRYPQSQALADFVAEWTECQEDTPAEKMEHWTMHFDGSKRLSGTGAGVVLISPTGERLSYVLWIHFSASHNIAEYEALLHGLRIAISLGIKRLIVRGDSQLVVNQVMKEWSCLDDNMMAYRQEVRKLEDKFDGLELSHVLRHNNEAADRLANFGSKREVAPSDVFVEHLYTPTVPHKDTTQVAGTHDVAMVEADWREPLIRFLTSQELPQDKDEAERISRRSKLYVMNEAELYKKSPSGILQRCVSLEEGRQLLKDIHSGICGNHAAARTIVGKAYRQGFFWPTAVSDADKIVRTCEGCQFFARQIHLPAQELQTIPLSWPFAVWGLDMVGPFKKAVGGYTHLFVAIDKFSKWIEAKPVVTITADNARDFFINIVHRFGVPNRIITDNGRQFTGGVFKDFCEDFGIKICYASVAHPMSNGQVERANGMILQGIKARVFDWLKPYAGKWVKQLPSVLWSLRTTPSRATGQSPFFLVYGAEAMLPSEVEFESLRFRNFREERYEEDRVDDLHRLEEVREAALIQSARYLQGLRRYHNRNVRSRAFLVGDLVLRKIQTTRDRHKLSPLWEGPFLISEVTRPGSYRLKREDGTLVDNSWNIEHLRRFYA

SEQ ID NO: 149782 - protein, 1975 aa, Oryza sativa
  Clone ID: PAT_MRT4530_50081C.1.pep
MGSVSGIDDLVFPPGQTFRFGSLDFVTNNFGKISLLDSVSAQSGENRLSVPFGLPNAAESYFKTISIELASNHSGEIASSPTTPDQDDGAYPPILMKLPDDSAAASITTASSSRRPRRKSASTPISPSFREVGVILQPLGTVSTDQLDGYYSSPTVDSRPTDIVEYDEFSSRYNEPDLDDFDESLDDNYTPLYFGVFMADNETEEQRQARETEARREAERLRLEEERQAQEQERLRREQQERERTAKEAEDRRQRALEAGRRARDLIGQQDVEGTPVFRTPQQNAVAAITLLDTLLKENELNQSDHVVNILNQTKTMIAASVPVNSESVHTPTGSRVPHFRSHDYRHPSLSITGAGSNRRSRARGHHHSPDRHDDDLDGVAAFTDDLRRVDWPAGFKPTGIEKYDGTTNPESWLTVYGLAIRAAGGDSKAMANYLPVALADSARSWLHGLPRGTIGSWAELRDHFIANFQGTFERPGTQYDLYNVIQKSGESLRDYIRRFSEQRNKISDITDDVIIAAFTKGIRHEELVGKFGRKPPRTVKLMFEKANEYAKAEDAVTASKQSGPSWKPNKGTPATGGGGSNNHKDRKRKPAELVATASHSSRQRSRVNTFDKIMNSQCPHHPNSNHVAKDCFVYKQFADQYTKTTRKNSDEEQSTSRKKDDGDAPAGFQDHRKELNHIFGGPLAYESKRKQKLTEREINAVQPDTPQYLRWSEIAIKFDRSDHPDRVVHPGRYPLVLDPVVRNVKLRRTLIDGGSALNILFAKTLDDMQIPRSELKPSNAPFHGVILGLSATPLGQITLPVTFGTRENFRTENISFEVADFETAYHAILGRPALAKFMAVPHYTYMMMKMPGPRGVLSLRSDIKQAVTCDKESCDMAQTREMTSVREDIRLAAATASEGEVPATKTSKSGESEAKTKKIPLDPSDSTKTANNKDIFAWKPSDMPGIPREVIEHSLHVKEDAKPIKQRLRRFAQDRKDAIKEELTKLLAAGFIKEVLHPDWLANPVLVRKKTGQWRMCVDYTDLNKSCPKDPFGLPRIDQVVDSTAGCELLSFLDCYSGYHQIRLKESDCLKTSFITPFGAYCYVTMPFGLKNAGATYQRMIQRCFSTQIGRNVEAYVDDVVVKTKQKDDLILDLEETFASIRAFRMKLNPEKCTFGVPSGKLLGFMVSHRGIQANPEKVIAILNMKPPSTQKDVQKLTGCMAALSRFISRLGERGMPFFKLLKKTDDFQWGPEAQKAFEDFKKLLTEPPVLASPHPQEPLLLYVSATSQVVSTVLVVEREEEGHLQKVQRPIYFVSEVLADSKTRYPQVQKLLYGILITTRTLSHYFQGHSVTVVTSFPLGDILHNREANGRIAKWALELMSLDISFKPRISIKSQALADFVAEWTECQEDTPAEKMEHWTMHFDGSKRLSGTGAGVVLISPTGERLSYVLWIHFSTSHNVAEYEALLHGLRIAISLGIKRLIVRGDSQLVVNQVMKEWSCLDDNMMAYRQEVRKLEDKFDGLELSHVLRHNNEAADRLANFGSKREAAPSDVFVEHLYTPTVPHKDATQVAGTHDVAMVEADWREPLIRFLTSQELPQDKDEAERISRRSKLYVMHEAELYKKSPSGILQRCVSLEEGRQLLKDIHSGICGNHAAARTIVGKAYRQGFFWPTAVSDADKIIRTCEGCQFFARQIHLPAQELQTIPLSWPFAVWGLDMVGPFKKAVGGYTHLFVAIDKFSKWIEAKPVITITADNARDFFINIVHRFGVPNRIITDNGRQFTGRVFKDFCEDFGIKICYASVAHPMSNGQVERANGMILQGIKARVFDRLKPYAGKWVKQLPSVLWSLRTTPSRATGQSPFFLVYGAEAMLPSEVEFESLRFRNFREERYEEDRVDDLHRLEEVREAALIQSARYLQGLRRYHNRNVRSRAFLVGDLVLRKIQTTRDRHKLSPLWEGPFIISEVTRPGSYRLKREDGTLVDNSWNIEHLRRFYA

SEQ ID NO: 149783 - protein, 1302 aa, Oryza sativa
  Clone ID: PAT_MRT4530_50082C.1.pep
MGSISGIDDLVFPPGQTFRFGSLDFVTNIFGKISLLDSESDQSGENQISAPFGLPNAAESYFKTISTESASNHSGEIASSPTSPDQDDGVYPPILMKLPDDLAAVSITPASLSRRPRRKSASTPISPSFREVGVILQPLGTVSTDQLDGDYSSPTVDSRPTDIVEYDEFTSRYHDPDLDDFDGSLDDNYTPLYFGVFMANNETEEQRQARETEARRETERRRLEEEHQAQEQERLRHEQQERERTAKEAEDRRQRALEAGRRARDLIGQQDVEGTPTKTVIAASVPVNSESVHRPTGSRVPHFRSHDYRHPSLSITGAGSNRRSRGHDERSVHSPPDHHRERRVERPRSPPRRRPVDLRDTIIQRRAARGYHHSPDRHDDDLDGVAAFTDDLRRVDWPAGFKPTGIEKYDGTTNPESWLTVYGLAIRAAGGDSKAMANYLPVALADSARSWLHGLPRGTIGSWAELRDHFIANFQGTFERPGTQYDLYNVIQKSGESLRDYIRRFSEQRNKISDITDDVIIVAFTKGIRHEELVGKFGRKPPRTVKLMFEKANEYAKAEDAVTTSKQSGPSWKPKKDTPASGGGGSNNHKDRKRKPAELVATASHSSRQRSRVNTFDKIMNSQCPHHPNSNHVAKDCFVYKQFADQYTKTTRKNSDEEQSTSRKKDDGDTPAGFQDHRKELNHIFGGPLAYESKRKQKLTEREINAVQPDTPQYLRWSEIAIKFDRSDHPDRVVHPGRYPLVLDPVVRNVKLRRTLIDGGSALNILFAKTLDDMQIPRSELKPSNAPFHGVIPGLSATPLGQITLPVTFGTRENFRTENISFEVADFETAYHAILGRPALAKFMAVPHYTYMMMKMPGPRGVLSLRSDIKQAVTCDKESCDMAQTREIASAREDIRLAAATADEGEVPATKTSKSGESEAKTKKIPLDPSDPTKTAVIGAEEVIEHSLHVKEDAKPIKQRLRRFAQDRKDAIKEELTKLLAAGFIKEVLHPDWLANPVLVRKKTGQWRMCVDYTDLNKSCPKDPFGLPRIDQVVDSTAGCELLSFLDCYSGYHQIRLKESDCLKTSFITPFGAYCYVTMPFGLKNAGATYQRMIQRCFSTQIGRDVEAYVDDVVVKTKQKDDLISDLEETFASIRAFRMKLNPEKCTFGVPSGKLLGFMVSHRGIQANPEKVTAILNMKPPSTQKDVQKLTGCMAALSRFVSRLGERGMPFFKLLKKTDDFQWGPEAQKAFEDFKKLLTEPPVLASPHPQEPLLLYVSATSQVVSTVLVVEREEEGHVQKVQRPIYFVSEVLADSKTRYPQV

SEQ ID NO: 149784 - protein, 102 aa, Oryza sativa
  Clone ID: PAT_MRT4530_50083C.1.pep
FFFFFFLRCTILNIVWDPIKQYRYNISISYFTIYNMHAAIAVIIHLRQHPFILASFVLSITITIHCHHCILGHGHLTSSGPPKHASSSRSTVTHVSRGIAPP

SEQ ID NO: 149785 - protein, 312 aa, Oryza sativa
  Clone ID: PAT_MRT4530_50084C.1.pep
MSDSFCPDCKKHTEVAFDHSAGDTVCTECGLVLEAHSVDETSEWRTFANESSDNDPVRVGGPTNPLLTDGGLSTVIAKPNGAQGEFLSSSLGRWQNRGSNPDRSLILAFRTIANMADRLGLVATIKDRANEIYKKVEDLKSIRGRNQDAILAACLYIACRQEDRPRTVKEICSVANGATKKEIGRAKEFIVKQLEVEMGQSMEMGTIHAGDFLRRFCSTLGMNNQAVKAAQEAVQRSEELDIRRSPISIAAAVIYMITQLSDDKKPLKDISLATGVAEGTIRNSYKDLYPYASRLIPNTYAKEEDLKNLCTP

SEQ ID NO: 149786 - protein, 222 aa, Oryza sativa
  Clone ID: PAT_MRT4530_50085C.1.pep
RRQSSVRESTGSEPPISRLRRRPTGVQNPNPNPSEEEGGGGGRRGEMVYYALYWWADLDNLTNLQPRYGCDDPTYPYYFKLRCENCGEVSAKATCVSLGEVVDLPNGRSTANLVQKCKLCGRDASIVMIPGQGTPLTMEQSQKGDRTCLMVFDCRGCEPIDFAFGNGWKAESLEGTSFDIDCSEGEFADYDEKGECPVGVGKLRSEFRVVKKQESRGKTKYV

SEQ ID NO: 149787 - protein, 51 aa, Oryza sativa
  Clone ID: PAT_MRT4530_50086C.1.pep
MALLWKLSDMVALSETTLDSYDPIRYSYLPSSVEATIDNSAQLPTYWCNRL

SEQ ID NO: 149788 - protein, 68 aa, Oryza sativa
  Clone ID: PAT_MRT4530_50087C.1.pep
LFITIASPSTSAHAHRSSLRAVCVLQFDSVELAPIYPFPAFDQKQSALMEAELAGSSCKEKIIYLLWN

SEQ ID NO: 149789 - protein, 54 aa, Oryza sativa
  Clone ID: PAT_MRT4530_50088C.1.pep
GNEIHKALYHEYHYDFRRAIINHTLDTSIVSKQSMTISKATSMAEKSKKRTNNM

SEQ ID NO: 149790 - protein, 116 aa, Oryza sativa
  Clone ID: PAT_MRT4530_50089C.1.pep
FFFSSQQHCNISIIATHKQPPIKPPHACTFTPNGHQHCLGAIFFFHHGNKCHNTIIHHSPFTFPPAFPTHTHNSNPQSLGHSGTITSSHHPHGHPRASSPAFHVPYIPNFTSAYQV

SEQ ID NO: 149791 - protein, 37 aa, Oryza sativa
  unsure (1)..(37): unsure at all Xaa locations
  Clone ID: PAT_MRT4530_5008C.1.pep
LEWRDRVRERRNRGGNWXEVGHQRGGNGSRVLRGKWG

SEQ ID NO: 149792 - protein, 60 aa, Oryza sativa
  Clone ID: PAT_MRT4530_50090C.1.pep
KKNKKGILNPPTDKKKKKNGQILKKKKKKKKKKKKKKKKKKKKKKKKKKKKKKKKKKKKN

SEQ ID NO: 149793 - protein, 54 aa, Oryza sativa
  Clone ID: PAT_MRT4530_50091C.1.pep
ISHQYGVFPLTNKGLPEAFPLLGVSGLKLNQKKSSYVKKKVTHLHVGLLKLRVK

SEQ ID NO: 149794 - protein, 49 aa, Oryza sativa
  Clone ID: PAT_MRT4530_50092C.1.pep
MRFVQMQPWRGGKFGRCFYGCNDGSAHMLDCCGMWPRRRGPCMIGAHPK

SEQ ID NO: 149795 - protein, 114 aa, Oryza sativa
  unsure (1)..(114): unsure at all Xaa locations
  Clone ID: PAT_MRT4530_50093C.1.pep
MSAPRLLPRADVSHASMPPDLAEARFGPPPLPPPPGRSRRIWWRRGPAARPAAASPAPPNRSGLHAAGSGGGEVRPTSAAXPSDRSRASMPPDLAEARSGPPPLLPPPGHSHLH

SEQ ID NO: 149796 - protein, 110 aa, Oryza sativa
  Clone ID: PAT_MRT4530_50094C.1.pep
MAESRRRWWGGFYTEATPPPPTCSRCRLRPVRPHAGACQSQLGEHLGFSALPRASSSSLRPRSSATLTFGGRGVVACLRPSVRSGWCGCGWVGILLRCVAEARRVCAGLA

SEQ ID NO: 149797 - protein, 218 aa, Oryza sativa
  Clone ID: PAT_MRT4530_50095C.1.pep
MPPDLAEARFGPPPLPPPPGRSRRIWWRRGPAARLHAVRPTTSMTERERDDAAASPAPPDRSRLHAAGSGRGEVRPTSAATAAAPPHHEQRERERERDPAAASPAPPNRSGLHAAGSGGGEVRPTSAATATAPPHHEHTQRERDDDVASPTPSDRSRASMPPDLAEARSGPPPLLPPPGHSHLHAAPPAAAAERERGEKWRESGRRSGLLAGGKRPAG

SEQ ID NO: 149798 - protein, 52 aa, Oryza sativa
  Clone ID: PAT_MRT4530_50096C.1.pep
SSRSFRSKTSQFIAHQLRVLISSSVSRWHCNICCSVYPFVGGSALLLRMAWR

SEQ ID NO: 149799 - protein, 142 aa, Oryza sativa
  Clone ID: PAT_MRT4530_50097C.1.pep
MAAATAAAAAELERRVMAAVKASAARGDPPLLQAAEAARCAREASSSISVDGGAGAALAAALVSNLCFAHNTGAMWKVLDQAMASRLVSPLLALALLTPRVVPNRQAQPEAYRLYLELLGQYTVAPVCTESVETKAMVGLMV

SEQ ID NO: 149800 - protein, 157 aa, Oryza sativa
  Clone ID: PAT_MRT4530_50098C.1.pep
DAWEKKKKKKKKKKKKKKKKERVKKKKKKIKKKKKNKGGGLFRGPDFPSPGCRGFVFFLGPPNSNFWAGVFLRLAWQTPAVPHFNPFAFHPPFSGWRFSKEAPPCCLSQLLPPPYGHLGPAPCAGPLIRRGGLWCFPPFFPPFPLPALLAPGPLPFF

SEQ ID NO: 149801 - protein, 85 aa, Oryza sativa
  Clone ID: PAT_MRT4530_50099C.1.pep
AGSTCTTSPPTVASCPSVRSSSTYRTRHPRPLARLPRTAPTTHILRFAPTRPRHGTVPTRAFCVRPHRAIARGRSPFRGDSGHYR

SEQ ID NO: 149802 - protein, 608 aa, Oryza sativa
  Clone ID: PAT_MRT4530_5009C.1.pep
MAGGSFDTGSFEVIATAFSFPVIDGPAEIGTVNLEHQVPVPGAPLSTGDTRRPDIEGIGVRWYEDLRSTTSSPNLVGSGSVGCGGCVGSNLRCLRSFPRASLIYCGSVDIQVGLRDIGPLTIWWFYLQIENSDPVLVVPEEQPEKIPEWTTKPTLTPSLQSFIDIIDDLRRRGLSGYEVAADFVGRRIQPLQARAHPAFDYSGPEDTTRVSPDLPSFRSRFIGLNSDIVGRHVGQIMISALSGALPLTDVIGPLVDHQAAASLKESVTKEASDAVTATTSGSNVPKRGRKFSSVLGTRRKATNSVPHEEKENLRWKARAKVVHGGTDAVSSASPTATSTEVVVATKDQEATPSSPVVGLMPTRGLSTDALTWGELQVEMERILQAGARGIGHEIEEARAVALSANQRADQLARDLAEAREDLLKMRELVAGNEMQRRGLEDWMSELKGHMINIRGSLRTSFTSLHQLARECGVTTTIPAHPDEFSLTSSLTELATAMEEIPSKHSAMIGEETSNACDPEYFSRCRYAVFKDVQQRGQPDVPVVIPLLTLEPHTPLVEGDKSPSVETNMAMTSLDFENMLADRDRRIQYWKTKLDVTKLERAMVEVKKD

SEQ ID NO: 149803 - protein, 693 aa, Oryza sativa
  Clone ID: PAT_MRT4530_500C.1.pep
MATEEGAEPSAPVAEDGGAPSASAPAPSLPPSALATSVQVPNAADMAKAAAAARALQTRAEILSTSQLLVPQATPSQPAAAPTTLAAVQVQVNPDPETQTEADMEGIRQNMTRLQDMLRQMQGQQQAYEAARRSKAQLQAFLQQLSQPHNISSTAPSALPEGNTSQDAPSWLPSNQPANSIYSWEQLRDVFVLNFRCTYEEPKMQQHLLGIRQRLGESIREYMRRFSQARCQVQDITEASVINAASASLLESELTRKIANKELQTLEHLLHIIDGFVRGEEDSKRRQAMQAEYDKASVAAAQAQAQVQIAEPPPLTVRQPQPAIQGQPSRQGQAPMTWRKFRTDRAGKAVMTVEEVQALRKEFDAQEASNHQQPARKKARKDLYCAFHRRSSHTTEQCRNIRQRGNEQDSRPQQGAAVEAPREVAQEQAPPAEQRQDAQRRVIQVITRADPPIQLSKRQKKMQLRTIHNITSAGEGSPQYLNQQISFGPEDAEGVMFPHQDPLASAEKQFKLMIAFGSGENRREEQVLFDVVDIPYSYNAIFGRATLNKFEAISHHNYLKLKMPGPKGVIVVKGLQLSPASKCVLAIIKRAVRNVEAEPHDRAKHASKPAPHGKIVKMQIDDADPTKLVSLGGDMGEEEAKNILEVLKKNIDIFAWGPDEVGGVSADLIMHHLAVKPDAKPRKQKLCKMSADR

SEQ ID NO: 149804 - protein, 52 aa, Oryza sativa
  Clone ID: PAT_MRT4530_50100C.1.pep
QGEFTNWSPSILSFFFCASTHNGSIITLPLCNTYNQTSLNRATCLYCTAVYT

SEQ ID NO: 149805 - protein, 73 aa, Oryza sativa
  Clone ID: PAT_MRT4530_50101C.1.pep
VTGVSVNVLCSSTLTTHILVDVLQWSSIICIYLRSWCLCYVYPSLVSINKAGWAFKVKLKKKRAARPLIGPSY

SEQ ID NO: 149806 - protein, 529 aa, Oryza sativa
  Clone ID: PAT_MRT4530_50102C.1.pep
MTAGAWPAAAAAATSAPLSAAVRGAMRTLGHLLPRPQPSAAAAAAFSSSPHTLHDYNRLLDAFARDGDGDAALRVLRRMRHSSPACAPTAASYTSAMSALAKAGRPADAAALFDDMLANGVAPDRCAFSFLLQVYSSHLHLPSAAHSVLVWMSRFGLPPTPIDYADLVFSFCRAGRLPDALQLLDEMRALNYPLTLHSYTPILQVYCANADMQSADALISSMRSTGCHPDVVFYNIYVNGLCKVGDFDAVQRTIDESGRNGWVPDAVTYSTYIAGLCRFGYVEEALRQLEIMVTMGLQPTVVGLNILLDYVAQDLDMWAGKEVLERCQELGFVVDVVTYNTVMDHFCKKRKWLRVLKLFTDLLKKPITPNVQTWKVSVCQVCVQQQGVHGRHCDLYILIHAFYEAGKEDELGFLFADVNAGKIAPDTITYNTLVDCLFRSGRRAEAVNLIRHIDDGYPVEPVARLAYWLVRSGNVREALRLFDDMLEKGLLLDSRIFANVIKAFCRKGPGECTEMLQLCSVLDRMLGIG

SEQ ID NO: 149807 - protein, 905 aa, Oryza sativa
  Clone ID: PAT_MRT4530_50103C.1.pep
MENSSIMLVCNPATKEIAELPAFGCEVLSLGSPAWRPLADPPYLALNKASPCILGGIYWIVALPSPPTGSCTTPGMLRFDVCSEEFTSFLSPPFMGRQVIRDVSGALTELAGKLCYMHAPTDGKVELWTTSAAADDDEGGGGPRWSLHCTVVLPHPFQTIFPFTHDYQGSVFFNVDCAVIYRYDVERGVVERVVDMLEEMTYFNCSTHKLYRRPGDWKLRTIQYSESLVAVNASYSIPTALVRVTMSISSVTLPVSLASRVPSTRGTLWTVFLLAPPPLRVRLPDGPFLPFGHTDTKYPCPYYESHPVLTRMIELSEAQATQHDLLLEAYRSLARRYAALEARLVEEGVSSVDTISWDSDRLCHASHLSFHSSRGSTRTPSGPRSPSLRVPYSPAHRRGESGGRRGARRDGYGSGLSVPRRPQFDGFVPFVDSHGDQASVVFDDYVSRGMPNAMLDCVACFPVTSKATRSASERLPSISTNTSCASRTERQKRRTRPVAATVNGSSRGPNSGSGHRSTPTCVLRRADLARLRRRSGFGVSNSEPGTHRDGEPPDGFVTSWYQSTILERPTFKTRLQGQVDAMEKQHEGFGKMLSSIQEAIGAMSVKQGEVQETMNKMEKSISSWRPQVDAAVQSLQRDMELLRNQVGVGGAGGNCSSHISVADVANHVSASIAGVGGAGGNCSSRTSVADAANRVYASLDWRNWSGWPPHFNSVPGEGIGGSHYSRPTSGQGKFDRNRHLQLVRQIDQLKQSGSVNEYYERFDDLWSQLLVYDPTLSTEELGEAGGSLVSKDGKKLGDHAARIKSAYPLPLPPPKFVHAGKGDDKRTAEVPKVANSSDKLVALKAYRRAQGLCYVCAEKWSPTHKCSGSVQLHAVQELFSVLAADVSEAVAQSRSCGVLGSAHCQ

SEQ ID NO: 149808 - protein, 1232 aa, Oryza sativa
  unsure (1)..(1232): unsure at all Xaa locations
  Clone ID: PAT_MRT4530_50104C.1.pep
MEKQHEGFGKMLSSIQEAIGALSVKQGEVQETMNKMEKSISSWRPQVDAAVQSLQRDMELLRNQVGAVERHQAEADKSSNTSQALEEREEIARRTSLLPTPPTTSLPVSQALEEREEIARHAPLLPTPPTASMPASTGEIGLDGHRISTQFRGRAPGVVTTLVPPPGKGTHSLPFPPRVHSNFSEFVGREESGGSEGRGYNHRLPKLDFPQFDDSDPQNWRLRCEHYFGVYGTHPDLWVRVATIYFIGRAASWLRSSRAHLLCGSWGVFCDTVDRKFDRNRHLQLVRQIDQLKQSGSVNEYYERFDDLWSQLLVYDPTLSTVSCVHRFTEGLRSDIKNAVLMHFPQDLETALALAILQEELGEAGGSLVSKDGKKLGDHAARIKGAYPLPLPPPKFVHAGKGDDKRAAEVPKVASSSDKLVALKAYRRAQGLCYVCAEKWSPTHKCSGPVQLHAVQELFSVLAADVSHAQLVNIRPYRYPDQKNEIEKQVQMLKKAQLRQSVLVFVDDILVYSRSLEEHKNHLRQVLSTLTHHQLKVKLSKCSFAQQSLAYLGHIISAQGVATDEEKIIAVKDWPTPLSVKDLRSFLGLTGYYRKFVRNYGVICKPLTNLLRKGVLFQWTSVTQEAFVALKTALIEAPVLALPNFQQPFVVETDASDKGIGAVLMQNSHPIAFLSKALGPRTQGLRYKICYKKGLENGAADALSRRQSDGLEELSAISICLPDWLQELIAGYQSDSEAQKLLQALSVSGAGPSNFEVLNGILYFKHRIWIGHNKLLQQKILANLHTAAVGGHSGILVTYQRVKQLFSWPGLRKDVQEFVQHCDIFQRAKSGHVKYPGLLQPLXGLPRSASFDCILVIVDKFSKFAHFXLPLKHPFTAFGVAQLFMEHIHSIHGLPQAIVSDRDRVFTSSLWKELFRRAGTQLRMSSSYHPQSDGQTERVNQCVEMFLRCFVHSCPSRWKHWLALAQYWYNTSFHSALGMTPFEVLFGHKPRYFGLSTSSVDAPGDLASWLSERNDMNTLIHHHLLRAQQRMKSQADSKRSERCFAVGDWVFMKLQPYIQQSVMTRSNRKLSFKYYGPFQVLQRIGLVAYRLQLPAHSLIHPVVHVSQLKKALAPSEAVQPSLPVLNPDAGHLAIPIKILDHRSIRRGSKMIKQVLIRWSGVSSSADTWESLDEMQAKFPAAPAWGQAETQGGRNVTASIQSTTHNSSIIGPRRSKREVHTNPKYMGCDWSNS

SEQ ID NO: 149809 - protein, 1265 aa, Oryza sativa
  unsure (1)..(1265): unsure at all Xaa locations
  Clone ID: PAT_MRT4530_50105C.1.pep
MEKQHEGFGKMLSSIQEAIGALSVKQGEVQETMNKMEKSISSWRPQVDAAVQSLQRDMELLRNQVGVGGAGGNCSSHISAADAANHVSASIAGVGGAGGNCSSRTSVADAANRVYASLDWRNWSGWPPHFNSVPGEGTGGSHYSRPTSGQGTHSLPFPPRVHSNFSEFVGREESGGSEGRGYNHRLPKLDFPQFDGSDPQNWRLRCEHYFGVYGTHPDLWVRVATIYFIGRAASWLRSSRAHLLCGSWGVFCDMVDRKFDRNRHLQLVRQIDQLKQSGSVNEYYERFDDLWSQLLVYDPTLSTMSCVHRFTEGLRSDIKNAVLMHFPQDLETALALAILQEELGEAGGSLVSKDGKKLGDHVARIKGAYPLPLPPPKFVHAGKGDDKRAAEVPKCSGPVQLHAVQELFSVLAADVSDGEQDADSTSSLMAISLQAIQGTVSAHTLRLQGSIQGFDVLILVDSGSSCSFLSSVVLPHLTGVKSLLTPIQVKVANGTVLYCTSELPAAKWEVQGHQFSTNFKLLPLDNYDMILGMDWLEKYSPMDINWQAKTIQFCLHDKSVELKGVVPELDKCDLVSIHQLQLLHNQGAVESLVQLTASDGSSSSQNVPSSIQSILDEFADIFTEPEGLPPSRSYDHTIPLIAGAQLVNIRPYRYTPDQKNEIEKQVQEMLKKGIIRPSSSPFSSPVLLVKKKDGTWRFCVDYRHLNAITIKNKYPLPVIDELLDELAGACWFSKLDLRSGYHQIRMAPQDEHKTAFKTHNGHFEFRVLPFGLTSAPATFQGVMNSVLAAQLRQSVLVFVDDILVYSRSLEEHKNHLRQVLSTLTHHQLKVKLSKCSFAQQSLAYLGHIISAQGVATDEEKIIAVKDWPTPLSVKDLRSFLGLTGYYRKFVRNYGVICKPLTNLLRKGVLFQWTSVTQEAFVALKTALIEAPVLALPNFQQPFVVETDASDKGIGAVLMQNSHPIAFLSKALGPRTQGLSTYEKESLAIMLAIDHWRSYLQHDEFVIRTDHRSLSFLINQRLSTPWQQKALTKLLGLRYKICYKKGLENGAADALSRRQSDGLEELSAISICLSDWLQELIAGYQSDSEAQKLLQALSVSGAGPSNFEVLNGILYFKHRIWIGHNKLLQQKILANLHTTAVGGHSGILVTYQRVKQLFSWPGLRKDVQEFVQHCDICQRAKSEHVKYPGLLQPLEVPSQSWQVITMDFIEGLPRSASFDCILVIVDKFSKFAXFLPLKHPFTAFGVAQLFMEHIHSIHGLPQAIVS

SEQ ID NO: 149810 - protein, 1633 aa, Oryza sativa
  unsure (1)..(1633): unsure at all Xaa locations
  Clone ID: PAT_MRT4530_50106C.1.pep
MEKQHEGFGKMLSSIQEAIGALSVKQGEVQETMNKMEKSISSWRPQVDAAVQSLQRDMELLRNQVGAVERHQAEADKSSNTSQALEEREEIARRTSLLPTPPTTSLPVSQALEEREEIARHAPLLPTPPTASMPASTGEIGLDGHRISTQFRGRAPGVVTTLVPPPGKGTHSLPFPPRVHSNFSEFVGREESGGSEGRGYNHRLPKLDFPQFDDSDPQNWRLRCEHYFGVYGTHPDLWVRVATIYFIGRAASWLRSSRAHLLCGSWGVFCDTVDRKFDRNRHLQLVRQIDQLKQSGSVNEYYERFDDLWSQLLVYDPTLSTVSCVHRFTEGLRSDIKNAVLMHFPQDLETALALAILQEELGEAGGSLVSKDGKKLGDHAARIKGAYPLPLPPPKFVHAGKGDDKRAAEVPKVASSSDKLVALKAYRRAQGLCYVCAEKWSPTHKCSGPVQLHAVQELFSVLAADVSDGEQDADSTSSLMAISLQAIQGTVSAHTLRLQGSIQGFDVLILVDSGSSCSFLSSVVLPHLTGVKSLLTPIQVKVANGTVLYCTSELPAAKWEVQGHQFSTNFKLLPLDNYDMILGMDWLEKYSPMDINWQAKTIQFCLHDKSVELKGVVPELDKCDLVSIHQLQLLHNQGAVESLVQLTASDGSSSSQNVPSSIQSILDEFADIFTEPEGLPACRSYDHTIPLIAGAQLVNIRPYRYTPDQKNEIEKQVQEMLKKGIIRPSSSPFSSPVLLVKKKDGTWRFCVDYRHLNAITIKNKYPLPVIDELLDELAGACWFSKLDLRSGYHQIRMAPQDEHKTAFKTHNGHFEFRVLPFGLTSAPATFQGVMNSVLAAQLRQSVLVFVDDILVYSRSLEEHKNHLRQVLSTLTHHQLKVKLSKCSFAQQSLAYLGHIISAQGVATDEEKIIAVKDWPTPLSVKDLRSFLGLTGYYRKFVRNYGVICKPLTNLLRKGVLFQWTSVTQEAFVALKTALIEAPVLALPNFQQPFVVETDASDKGIGAVLMQNSHPIAFLSKALGPRTQGLSTYEKESLAIMLAIDHWRSYLQHDEFVIRTDHRSLSFLINQRLSTPWQQKALTKLLGLRYKICYKKGLENGAADALSRRQSDGLEELSAISICLPDWLQELIAGYQSDSEAQKLLQALSVSGAGPSNFEVLNGILYFKHRIWIGHNKLLQQKILANLHTAAVGGHSGILVTYQRVKQLFSWPGLRKDVQEFVQHCDIFQRAKSGHVKYPGLLQPLXGLPRSASFDCILVIVDKFSKFAHFXPLKHPFTAFGVAQLFMEHIHSIHGLPQAIVSDRDRVFTSSLWKELFRRAGTQLRMSSSYHPQSDGQTERVNQCVEMFLRCFVHSCPSRWKHWLALAQYWYNTSFHSALGMTPFEVLFGHKPRYFGLSTSSVDAPGDLASWLSERNDMNTLIHHHLLRAQQRMKSQADSKRSERCFAVGDWVFMKLQPYIQQSVMTRSNRKLSFKYYGPFQVLQRIGLVAYRLQLPAHSLIHPVVHVSQLKKALAPSEAVQPSLPVLNPDAGHLAIPIKILDHRSIRRGSKMIKQVLIRWSGVSSSADTWESLDEMQAKFPAAPAWGQAETQGGRNVTASIQSTTHNSSIIGPRRSKREVHTNPKYMGCDWSNS

SEQ ID NO: 149811 - protein, 144 aa, Oryza sativa
  unsure (1)..(144): unsure at all Xaa locations
  Clone ID: PAT_MRT4530_50107C.1.pep
IVLHSKDRLSVLCSTLDYSHHLYKEFLIILQYAYNYYKFXGGEQTQTREKLLYHKQPRGIVLCRYYACEFLRVNGRYRVNAEDLPRIELRTSFDDTGITNVQRDLCHFIHRECCHVRGEFFNPEGARATSDEFKQLQEWNTAMP

SEQ ID NO: 149812 - protein, 121 aa, Oryza sativa
  unsure (1)..(121): unsure at all Xaa locations
  Clone ID: PAT_MRT4530_50108C.1.pep
ITNNNRKQTPCCLSRFVSRLGERGMPFFKLLKKTDDFQWGPEAQKAFEDFKKLLTEPPVLASPHPQEPRVXLYVSTTSQXVSTXWVVERQEXGHVHKVQRTIYFVNEVLPTQNQSPQVQSW

SEQ ID NO: 149813 - protein, 224 aa, Oryza sativa
  unsure (1)..(224): unsure at all Xaa locations
  Clone ID: PAT_MRT4530_50109C.1.pep
LEDNYTPLYFGVFLADNETEEQRQAREAEARREAERRRLGEERQAQEQERLRREQQERERAAEAEDRRQRALDAGRRARDLIGQQDVEGTPVFRTPQQNAVAAITLLDTLLKENELNQSDHVVNILNQTKTMIAASVPVNSGSVRTPTGSRVPHLRSHDYHQPSLSITGAGSNRRSRGHDERSVHSPPEHHRERRVEXPRSPPRRRPVDLRDTIIQRRAARGHH

SEQ ID NO: 149814 - protein, 199 aa, Oryza sativa
  Clone ID: PAT_MRT4530_5010C.1.pep
MALAVGIVLAPCSSLSAVAAKISSAAAAAQDLLPTRRHLRPLRRVAADPVRRSASSADCRSTVALVIPTRAAAFLRSGRRSRRRRCPGVSRVPPFAFPLPSSLSGAAPPRRWSPAVTIGARARHSRRPRRRGRPRARPRGCQVGPAVSRPRPRVRLTRGTHGADRRQPRAPGPPWTVGLTRGPHFPWTRSARPLPRLTQ

SEQ ID NO: 149815 - protein, 87 aa, Oryza sativa
  Clone ID: PAT_MRT4530_50110C.1.pep
TNTPIGVVTIRYATTNRPTKPSNHPNLFFFFFCTPNVKLDIHHRCFAAPTPSSIRLNKTKKKEAEKKKRKQTMQQQFNRSVSSKKLS

SEQ ID NO: 149816 - protein, 1444 aa, Oryza sativa
  Clone ID: PAT_MRT4530_50111C.1.pep
MASEPKKQPELVDGPGGDIQVVQDPVWQQEDIEEAFALAEHEQANAEQAHVLAEQHNPVVEQQDDALAKQNNNPVVEQQGDALAEQNNNPVVEQQEQNNNPVVEQQDDDQARLSLETLIGENRWEEALRRLERMVRDGEANNGPVPTAPSHDIYRAHPELVLLLRGEEYLRIKRLPNAAADATCFYHEHIQNLYRSGATGSSFVDTGVLKDIQDWENGSRATPSGHQSEIHMQETRQAVNDYLKLYFPAYSAMGSVSGIDDLVFPPGQTFRFGSLDFVTNNFGKISLLDSVSDQSGENRISAPFGLPNAAESYFKTISIELTSNHSAEIASSPTSPDQDDGAYPPILMKLPDDLAAVSITTASPSRRARRKSASTPTSPSFREVGVILQPLGTVSTDQLDGYYSSPTVDSRPTDIVEYDEFSSRYNDPDLDDFDGSLDDNYTPLYFGVFMADNETEEQRQARETEARRETERRRLEEEHQAQEQERLRREQQERERTAKEAEDRRQRALEAGRRARDLIGQQDVEGTPVFRTPQQNAVAAITLLDTLLKENELNQSDHVVNILNQTKTMIAASVPVNSESVHTPTGSRVPHFRSHDYRHPSLSITGAGSNRRSRGHDERSVHSPPDHHRERRVERPRSPPRRRPVDLRDTIIQRRAARGHHHSPDRHDDDLDGVAAFTDDLRRVDWPAGFKPTGIEKYDGTTNPESWLTVYGLAIRAAGGDNKAMANYLPVALADSARSWLHGLPRGTFERPGTQYDLYNVIQKSGESLRDYIRRFSEQRNKISDITDDVIIAAFTKGIRHEELVGKFGRKPPKTVKLMFEKANEYAKAEDAVTASKQSGPSWKPNKGTPAKGGGGSNNHKDRKRKPEELVATATHSSRQRSRVNTFDKILNSQCPHHPNSNHVAKDCFVYKQFAEQYTKTTRKNSDEEQSTSRKKDDGDTPAGFQDHRKELNHIFGGPLAYESKRKQKLTEREINAVQPDTPQYLRWSEIAIKFDRSDHPDRVVHPGRYPLVLDPVVRNVKLRRTLIDGGSALNILFAKTLDDMQIPRSELKPSNAPFHGVIPGLSATPLGQITLPVTFGTRENFRTENISFEVADFETAYHAILGRPALAKFMAVPHYTYMMMKMPGPRGVLSLRSDIKQAVTCDKESCDMAQTREMASAREDIRLAAATASEGEVPATKISKSGESEAKTKKIPLDPSDSTKTAVIGAGEVIEHSLYVKEDAKPIKQRLRRFAQDRKDAIKEELTKLLAAGFIKEVLHPDWLANPVLVRKKTGQWRMCVDYTDLNKSCPKDPFGLPRIDQIVDSTAGCELLSFLDCYSGYHQIRLKESDCLKTSFITPFGAYCYVTMPFGLKNAGATYQRMIQRCFSTQIGRNVEAYVDDVVVKTKQKDDLISDLEETFASIRAFTMKLNPEKRARPPPSLTGGAHLSSPTSRRARRPPVP

SEQ ID NO: 149817 - protein, 82 aa, Oryza sativa
  Clone ID: PAT_MRT4530_50112C.1.pep
QDPSYNPPLTIHTTLRFHPHPLPRRWAVPLCAAVNPAARQPDTPADLTPSRPPLPPMPRKGLSYTSDQAVTHSRLWQALYVF

SEQ ID NO: 149818 - protein, 280 aa, Oryza sativa
  unsure (1)..(280): unsure at all Xaa locations
  Clone ID: PAT_MRT4530_50113C.1.pep
MGSISGIDDLVFPPGQTFRFGSLDFITNNFGKISLLDSESDQSGENRLSVPFGFPNAAESYFKTTSTESASNHSAEIASSPXIPDQDDGPYPPXVGVILQPLGTVSTDQLDDYNSSPTVDSRPTDIVEYDEFSSRYNDFDDFDDFDGSLDDNYTPLYFGVFMANNETEEQRQARENEERRRLEEEHQAQEQERLRREQQDRERTAKEAEDRRQRALEAGRRARDLIGQQDVEGTPVFRTPQQNAVAAITLLDALLNQNELNQSDHVVNILTQTKTMIAAT

SEQ ID NO: 149819 - protein, 1955 aa, Oryza sativa
  Clone ID: PAT_MRT4530_50114C.1.pep
MGSISGIDDLVFPPGQTFRFGSLDFVTNNFGKISLLDSVSDQSGENRISVPFGLPNTAESYFKTISIELASNHSGEIASSPTSPDQDDGAYPPIMMKLPDDLAAISITTASPSRRPRRKSASTPISPSFREVGVILQPLGTVSTDQLDGYYSSPTVDSRPTDIVEYDEFCSRYNDPDLDDFDESLDDNYTPLYFGVFMADNETEEQRQARETEARRETERRRLEEERQAQEQERLRREQQERERTAKEAEDRRQRALEAGRRARDLIGQQDNAVAAITLLDTLLKENELNQSDHVINILNQTKTMIAASVPVNSESVHTPTGSRVPHFRSHDYRHPSLSITGAGSNRRSRGHDERSVHSPPDYHRERRVERPRSPPRRRPVDLRDTIIQRRAARGHHHSPDRHDDDLDGVAAFTDNLRRVDWPAGFKPTGIEKYDGTTNPESWLTVYGLAIRAAGGDSKAMANYLPVALVDSARSWLHGLPRGTIGSWAELRDHFIANFQGTFERPGTQYDLYNVVQKSGESLRDYIRRFSEQRNKISDITDDVIIAAFTKGIRHEELVGKFGRKPPRTVKLMFEKANEYAKAEDAVTASKQSGPSWKPKKDTPASGGGGNCFVYKQFAEQYTKITRKSSDEEQSTSRKKDDGDPPAGFQDHRKELNHIFGGPLAYESKRKQKLTEREINAVQPDTPQYLRWSEIAIKFDRSDHPDRVVHPGRYPLVLDPVVRNVKLRRTLIDGGSALNILFAKTLDDMQIPRSELKPSNVPFHGVIPGLSATPLGQITLPVTFGTRENFRTENISFEVADFETAYHAILGRPVLAKFMAVPHYTYMMMKMPGPRGVLSLRSDIKQAVTCDKESCDMAQTREMASAREDIRLAAATASEGEVPATKISKSGESEAKTKKIPLDPSDSTKTANNKDIFAWKPSDMPGIPREVIEHSLHVKEDAKPIKQRLRRFAQDRKDAIKEELTKLLAAGFIKEVLHPDWLANPVLVRKKTGQWRMCVDYTDLNKCCPKDPFGLPRIDQVVDSTAGCELLSFLDCYSGYHQIRLKESDCLKTSFITPFGAYCYVTMPFGLKNAGATYQRMIQRCFSTQIGRNVEAYVDDVVVKTKQKDDLVSDLEETFASIRAFRMKLNPEKCTFGVPSGKLLGFMVSHRGIQANPEKVTAILNMKPPSNQKDVQKLTGCMAALSRFVSRLGERGMPFFKLLKKTDDFQWGPEAQKAFEDFKKLLTEPPVLASPHPQEPLLLYVSATSQVVSTVLVVEREEEGHVQKVQRPIYFVSEVLADSKTRYPQVQKLLYGILITTRKLSHYFQGHSVTVVTSFPLGDILHNREANGRIAKWALELMSLDISFKPRISIKSQALADFVAEWTECQEDTPAEKMEHWTMHFDGSKRLSGTGAGVVLISPTGERLSYVLWIHFSASHNVAEYEALLHGLRIAISLGIKRLIVRGDSQLVVNQVMKEWSCLDDNMMAYRQEVRKLEDKFDGLELSHVLRHNNEAADRLANFGSKREAAPSDVFVEHLYTPTVPHKDTTQVAGTHDVAMVEADWREPLIRFLTSQELPQDKDEAERISRRSKLYVMHEAELYKKSPSGVLQRCVSLEEGRQLLKDIHSGICGIHAAARTIVGKAYRQGFFWPTAVSDADKIVRTCEGCQFFARQIHLPAQELQTIPLSWPFAVWGLDMVGPFKKAVGGYTHLFVAIDKFSKWIEAKPVVTITADNARDFFINIVHRFGVPNRIITDNGRQFTGGVFKDFCEDFGIKICYASVAHPMSNGQVERANGMILQGIKARVFDRLKPYAGKWVKQLPSVLWSLRTTPSRATGQSPFFLVYGAEAMLPSEVEFESLRFRNFREERYEEDRVDDLHRLEEVREAALIRSARYLQGLRRYHNRNVRSRAVLVGDLVLRKIQTTRDRHKLSPLWEGPFIISEVTRPGSYRLKREDGTLVDNSWNIEHLRRFYA

SEQ ID NO: 149820 - protein, 78 aa, Oryza sativa
  unsure (1)..(78): unsure at all Xaa locations
  Clone ID: PAT_MRT4530_50115C.1.pep
KSSNSQTSLTQKVKRNFGRTKINSTATYVVLSKSSYTVQSVVQLLEGFDNDVQLYLFHKAGPLLRSSPYVXTLKAKHS

SEQ ID NO: 149821 - protein, 802 aa, Oryza sativa
  Clone ID: PAT_MRT4530_50116C.1.pep
MGSVSGIDDLVFPPGQAFRFGSLDFITNDFGKISLLDSESDQSGESRISAPFGVLNAAKIYSKSISIESASTSPDRDDRAYPPILMKLPDDLAAVFTTTTSPSRKPRRRSASTPISPSSRKVGVILQPLGTVSTDQLEGYWSSLGVDSRPTEILEYDEFGFRSNDPDLDNFDESLEDNYTPLYFGVFMADNETEEQRQARETEARREAERRRLEEERQAQEQERLRCEQQERERAAKEAEDRRLRALEAGRRARYLIGQQDVEGTPVFRTPQQNVVAAITLLKENELNQSDHVVNILNQTKTMIAASVPVNSGSVRTPSGSQVPHLRSHDHHQPSLSITGAGSNRRSRGHDERSVHLPPEHHRESRVERPRSPPRRRPVDLRDTIIQRRAARGHHHSSDRYDDDLDGVAAFTNDLCRVDWPAGFKPTGIEKYDGTTNPESWLTVYGLAIRSAGGDNKAMANYLPVALADSARSWLHGLPCGIRHEELVGKFGRKPPKTVKLMFEKANEYAKAEDAVIASKQSGSSWKPKKDTPATGGGGSNNHKDRKHKPEELIATTTHSSRQRSRINTFDKIMNSQCPHHLNSNHAAKDCFVYKQFAEQYTKTTWKNSDEEQSTSKKKEDGDPPAGFQDHRKELNHIFGGPLAYESKRKQKLTEREINAVQPDKPQYLRCLETAIKFDRSDHPDRVVHPGRYPLELDPVVRNVKLLRTLIDGGSALNILFAKTLDDMQIPRSELKPSNAPFHGVISGLSATPLRQITLPVTFGTRENFRTENMCFEVADFETAYHAILERPALAKFMAVPH

SEQ ID NO: 149822 - protein, 39 aa, Oryza sativa
  Clone ID: PAT_MRT4530_50117C.1.pep
PVLTFQPCRVALLAPIILIHQLVQVYSYGTTLSNSYLLE

SEQ ID NO: 149823 - protein, 1969 aa, Oryza sativa
  Clone ID: PAT_MRT4530_50118C.1.pep
MGPVTGIDDLVLPPGQTFRFGSLDFVTNNFGKISLLDSESDQSGESRISVPFGFPNAAESYFNTISTESASNHSAEIASSPMSPDQDDGAYPPILMKLPDDLTAVSITTASPSRRPRRKSASTPISPSFREVGVILQPLGTISTDQLDGDYSSPTVDSRPTDIVEYDEFSSRYHDPDLDDFDGSLDDNYTPLYFGVFMANNETEEQRQARETEARRETERRRLEEEHQAQEQERLRREQQDRERTAKEAEDRRQRALEAGRRARDLIGQQDVEGTPVFRTPQQNAVAAITLLDTLLRENELNQSDHVVNILNQTKTMIAASVPVNSESVHTPTGSRVPHFRSHDYRHPSLSITGAGSNRRSRGHDERSVHSPPDHHRERRVERPRSPPSRRPVDLRDTIIQRRAARGYLHSPDRHDDDLDGVAAFTDDLRRVDWPAGFKPTGIEKYDAGGDSKAMANYLPVALADSARSWLHGLPRGTIGSWAELRDHFIANFQGTFERPGTQYDLYNVIQKSGESLRDYIRRFSEQRNKISDITDDVIIAAFTKGIRHEELVGKFGRKPPRTVKLMFEKANEYAKAEDAVTASKQSGPSWKPKKDTPAPGGGGSNNHKDRKRKPAELVATASHSSRQRSRVNTFDKIMNSQCPHHPNSNHVAKDCFVYKQFADQYTKTARKNSDEEQSTSRKKDDGDAPTGFQDHRKELNHIFGGPLAYESKRKQKLTEREINAVHPDTPQFLRWSEIAIKFDRSDHPDRVVHPGRYPLVLDPVVRNVKLRRTLIDGGSALNILFAKTLDDMQIPRSELKPSNAPFHGVIPGLSATPLGQITLPITFGTRENFRTENISFEVADFETAYHAILGRPALAKFMAVPHYTYMMMKMPGPRGVLSLRSDIKQAVTCDKESCDMAQTREMTSAREEIRLAAATASEGEVPATKTSKSGESEAKTKKIPLDPSDPTKTANNKDIFAWKPSDMPGIPREVIEHSLHVKEDAKPIKQRLRRFAQDRKDAIKEELTKLLAAGFIKEVLHPDWLANPVLVRKKTGQWRMCVDYTDLNKSCPKDPFGLPRIDQIRLKESDCLKTSFITPFGAYCYVTMPFGLKNAGATYQRMIQRCFSTQIGRNVEAYVDDVVVKTKQKDDLISDLEETFASIRAFRMKLNPEKCTFGVPSGKLLGFMVSHRGIQANPEKPPSTQKDVQKLTGCMAALSRFVSRLGERGMPFFKLLKKTDDFQWGPEAQKAFEDFKKLLTEPPVLASPHPQEPLLLYVSATSQVVSTVLVVEREEEGHVQKVQRPIYFVSEVLADSKTRYPQVQKLLYGILITTRKLSHYFQGHSVTVVTSFPLGDILHNREANGRIAKWALELMSLDISFKARISIKSQALADFVAEWTECQEDTPAEKMEHWTMHFDGSKRLSGTGAGVVLISPTGERLSYVLWIHFSASHNVAEYEALLHGLRIAISLGIKRLIVRGDSQLVVNQVMKEWSCLDDNMMAYRQEVRKLEDKFDGLELSHVLRHNNEAADRLANFGSKRETAPSDVFVEHLYTPTVPQKDTTQVAGTRDVAMVETDWREPLIRFLTSQELPQDKDEAERISRRSKLYVMHEAELYKKSPSGILQRCVSLEEGRQLLKDIHSGICGNHAAARTIVGKAYRQGFFWPTAVSDADKIVRTCEGCQFFARQIHLPAQELQTIPLSWPFAVWGLDMVGPFKKAVGGYTHLFVAIDKFSKWIEAKPVVTITADNARDFFINIVHRFGVPNRIITDNGTQFTGGVFKDFCEDFGIKICYASVAHPMSNGQVERANGMILQGIKARVFDRLKPYAGKWVQQLPSVLWSLRTTPSRATGQSPFFLVYGAEAMLPSEVEFESLRFRNFREERYEEDRVDDLHRLEEVREAALIRSARYLQGLRRYHNRNVRSRAFLVGDLVLRKIQTTRDRHKLSPLWEGPFIISEVTRPGSYRLKREDGTLVDNSWNIEHLRRFYA

SEQ ID NO: 149824 - protein, 524 aa, Oryza sativa
  unsure (1)..(524): unsure at all Xaa locations
  Clone ID: PAT_MRT4530_50119C.1.pep
LRLQLRSTTLLKXGNNSKAEYNHRTQEATPTMQTCKGIQEXVSPPLLARQRAVPSCAAVNPAAGQPDTPADPTPSRPPSPPVPRKGSSYTSDQAVTHSRLWXSTGMGRLTSSRGRXAPASGTHTSARQGXVHRGPGPQGRSIAGPRVGRPRSXQANRAAEGEAAGWGTGAAETGPAERRRGGGTRPPAATAGDGAGSGGTRGRRRRIEKAMGRRPVARNSDGRPLGRATWWSFNNHWRTRKGMDLRWVSGGLEQRSGHSRAQRHCGRXVVRREVIGSRAKWRPEAAKTVVXWACGGGGGSGDEWVEXGGGRACPCSGEAGGGCRVARXRLGRRRGAAGGGRGXGGSGVVVVVVLRRWNGDTERGPGYGEARRSRLWRRHSTATAIAAVASSGESPGEAESAGRSGGAAWVRGGRSGAGFGGKEGEGVEEWAATMSAWSDVCARGXGGGFGSGVGQQWWLRQLKPAGWRNGVKLTHGALGPCRSEREDPGGKSRLFCKGGPRASSTHETKIILVQAPHEVIVLIQ

SEQ ID NO: 149825 - protein, 308 aa, Oryza sativa
  unsure (1)..(308): unsure at all Xaa locations
  Clone ID: PAT_MRT4530_5011C.1.pep
PREGTRGPGPRGVGPTRQPHGPRWTGRTRLAAVGAVGPARQPHPRARAADGRAHLAAARARPRAASPARPTGATRPRPDGHRRRPSARRSGARERGGKGEGERRSSAHPGTTTTTRTAAGAEGDGGAARDDDDDGAPTVGERNGGADEVDGDAAMPREVSPSREEDRSDVGGEPERRETTARFGMTTTTVLRRSAGETETRTRSTAMRRCRGRWRRAGRKTGATAAANRSSEGKEGESGEGNAGGTGGDGRGGRRKMTGGPHPSARVAGGPACQRRARXGEADGPRGRRERXEKWAEPAQEGRRGRKR

SEQ ID NO: 149826 - protein, 131 aa, Oryza sativa
  Clone ID: PAT_MRT4530_50120C.1.pep
MGCQLARAPTTLLLLMLLLSDCVCAIVLSKTKSNSKPKRSNNHGVGLDNEEPEAAQPTTMEENTMAAPVIARRGAQMCCHHNTVTAKGEWEKALEVVWLRRHQELSFHRVIILIAIVVESDVWSRVRSLLA

SEQ ID NO: 149827 - protein, 82 aa, Oryza sativa
  Clone ID: PAT_MRT4530_50121C.1.pep
VNEASFHQWMCDSRMVLSESHRRGFDTVVTLIAWTIWKERNGQIFNQQYRSWMDVARGMVDEASLWRKANPTIPALELHQYS

SEQ ID NO: 149828 - protein, 62 aa, Oryza sativa
  Clone ID: PAT_MRT4530_50122C.1.pep
SCSRLILTFPLFFLTLPPILIQRNYIITNHLTLIIYYLNLTQTLPPLYNTTTPSHITSPSKN

SEQ ID NO: 149829 - protein, 180 aa, Oryza sativa
  unsure (1)..(180): unsure at all Xaa locations
  Clone ID: PAT_MRT4530_50123C.1.pep
METTRTTRIVSIFVSLVLLGQWDTYGYKYKPPXEDKGTLTMRRSTGSTXQQTSTSINTPTAIYGTTYKPTYAKTRRRRISTXIGMAIPLRCPWIPSGETKALSLISLGTDSRRKATLLSTTSQTFRPTYRQQLDRLPHILYCLVYILAPTVPILCKYQNYDTKRRHQNPNPNPPHPSPPP

SEQ ID NO: 149830 - protein, 254 aa, Oryza sativa
  unsure (1)..(254): unsure at all Xaa locations
  Clone ID: PAT_MRT4530_50124C.1.pep
RKETRKKEEXEVKKEERKEHRARKREKRGREAQEGKERRSRTHGEEARKKRDEEQXERERRREASRAKRDTIRGEKKKREKEXRRRKERQKEKRKRAEKKGRDKGRRSEKEKKGEGRREEEKEGREEEREKKKRQKKAAARPRRRRRIGRRVPGGGPRRGAPELLPRAAADTPSAVVGRGHGHPNRTTGDANLHEIAPNPHGDSHAIPHPPKKFQKKSEKKTKGGAWGRADREIEASSEVAGERRREERRGGEV

SEQ ID NO: 149831 - protein, 86 aa, Oryza sativa
  Clone ID: PAT_MRT4530_50125C.1.pep
SSPSFLETIPESKQEKPGPARFPFSSRSPGRLPLSPSGTDRWGPPVSPFPNLQPLPEPATAAPRARHPPSPPSPCPTPARPVFPAP

SEQ ID NO: 149832 - protein, 198 aa, Oryza sativa
  Clone ID: PAT_MRT4530_50126C.1.pep
SIVVTERERESQSFDVLEHRCEKTKKKRSKKPPRPPRPPTPTPLDVSDQKLLNELSELAILKRARIERMKALKKMKNAKHGSSSGNLFPLIITIIFCLVILWQGFFSRTGSAVSFHGSPESSVRAHSSLISIRFYKNNNSNSRSREAISAAPKRDLSVDGFQICTVYSTRVWSDVNSHMALLADRPATLLSWTGLDSA

SEQ ID NO: 149833 - protein, 157 aa, Oryza sativa
  Clone ID: PAT_MRT4530_50127C.1.pep
RRTHVRQMGATLLLQHQNSPGSDGDRRARPRQSPVEQVSCDPGGGGGARGRWSEVPEEHEAVAAAPTASSMDARDLEEEVEAGVVGVGIGGGSSRSRCRPSMAFGFYPEVLPLLRGLSVAAKKLAYGCHGACLHLCARRRGARPRLSLHTHRRGAPP

SEQ ID NO: 149834 - protein, 132 aa, Oryza sativa
  unsure (1)..(132): unsure at all Xaa locations
  Clone ID: PAT_MRT4530_50128C.1.pep
IXKRLALFSLSLLLQWIKHLAIPPLPRETTAQILPANSTIILTNKSSAAALPWRSIPPHHRIKKRPQHQSPIRKWKKEREPSSRGNLGPAASEARDRGGRWWGWWGLEASRFASRXTHSRMPWHQSNLWMVE

SEQ ID NO: 149835 - protein, 128 aa, Oryza sativa
  Clone ID: PAT_MRT4530_50129C.1.pep
NSHNLHQPDVMRFQNGQVGRHCGDGNHGWRIMLGAQCSSRDLSCFAMDLQPRWCLSILGSCRYGLSRSAIRIIALVEPNGDQTAMRSNGRFRVIHGKLTADPVREKKPCQSMTRQKIMVMIRGNKLPL

SEQ ID NO: 149836 - protein, 382 aa, Oryza sativa
  unsure (1)..(382): unsure at all Xaa locations
  Clone ID: PAT_MRT4530_5012C.1.pep
TNRVPTSWSFVYSRVNKPGERXARTGSTGVGPTRQPLGPRWTRCTRLTPAGAVGPTRQPHPRARAADGRXPPGSRGARPKAASPARPTEGGAPTPRWSPPATNGAAERRPRERREGGSEXAVLGSPRVDEDGGNDDRSGGRRRRGSGRRGRRCSGGRRAKRRSGRGRRRRGEAEGGDAETGGSPRRRRRRTEARRRRWRERTTARARIRRGERAASGGNGGERHGEQLYSTGRGRKRPEGEESAAEIXGSINDAGEDCGNKXRTNPRERERGKRGKRERESRGIIPPTLMRAGTAGCGGFGGGGGARARAXRRARREVGDDRWAPPVSEGGGRARLSAARARGGGRWAAGRXREREGIGPSRPKKGRGEKXSFRVFLFINPF

SEQ ID NO: 149837 - protein, 60 aa, Oryza sativa
  Clone ID: PAT_MRT4530_50130C.1.pep
TNLLLSLRFMKYEWTSQFFYVHNSSHVPTPVKSFTVNKYVVLGCLVMLEAPFLQFSFDGP

SEQ ID NO: 149838 - protein, 65 aa, Oryza sativa
  Clone ID: PAT_MRT4530_50131C.1.pep
MATVALGSDGSVRSLGDVSPRCKRGAGRFQVKASPFGLEAATPLGAVTLLRAMSIGLPPLFDEIL

SEQ ID NO: 149839 - protein, 73 aa, Oryza sativa
  Clone ID: PAT_MRT4530_50132C.1.pep
MEGESVLGSFALNGVFVVVLLSWAGPSFYRERLFNIDNMSSPLALAQRARVYVGSVHPGMRRQRLRGYGPGLG

SEQ ID NO: 149840 - protein, 61 aa, Oryza sativa
  unsure (1)..(61): unsure at all Xaa locations
  Clone ID: PAT_MRT4530_50133C.1.pep
EIGSLYGDCIFVGLGGCKSFGGGLYDGVEEDRYXYVPDDXKHYDAFVYSMFDRQHGGGKLA

SEQ ID NO: 149841 - protein, 855 aa, Oryza sativa
  Clone ID: PAT_MRT4530_50134C.1.pep
MPLSFYFDLFYPYSVSYGNDSDMLALLEFKDAIGDDPAGVLSSWNKTTPFCRWNGVKCGRREHRVTALELAGQNLTGRLAAASLGNLSYLHLLDLSGNRFSGQIPRLNSLRKLQVLNLSNNILDGIIPDTLTNCSSLTQLDLSINLFQGQIPLGIGLLSELSDLVLSRNYLSGHIPSELGKLSKLSSLDLSVNIISGEIPRALYNLSSLRMLFLEMNFLGKSLPSNIGYALPNLQWLLLGVNMFQGNIPGSLGNISQLHLIYLSENNFSGQIPSSLGKLSNLSVNLQYLLLDGNNLSGHIPSNMGNLQQLTQLDLSYNNLKGKMPPSLGNLQRLVSFNLSNNNLQGDIPSKFGDLQQLVWLNLGNNYLHGEVPSSVANLQQLVLLDLSHNNLSGKVPRSLGNLPKLRQLDLSHNNFGGKIPSSLANLRQLSRLDLSYNSLKGFYASSLGNLTFLKALNFSSNHFSGKLPPLNHLHRLKVLDLRHNSLRDTIPEGLANCSRLRVLDLSSNSLVGEIPTKLGLLTNLSSLCLSNNSFTGTIPPTLGNITGLNYLSLQINHLEGSIPRELGKLSDLLSLNIFMNNISGRLPHELFNLSSLQTLWLSDNMLGKEALPPNIGDVLPNLQFLSLARNMFEGHIPTSLINASGLWLIDLTNNNFYGQVPSYLSELANLSDLYLARNQIKGDIPSSIGNLSTNLQYLNLGVNHFVGVVPPSIGNLHGLTSLWLSKNNLIGTIEEWVGKLRNLELLYLQENNFTGSIPSSIGDLTNLIQFSLGKNSLDGQIPANLGNLRQLDRLNFSYNNLHGSIPYNVGKLRNLVQLDLSHNNLDGNIPSSFIKLQKLKHLDLSDNNFQGIIP

SEQ ID NO: 149842 - protein, 83 aa, Oryza sativa
  unsure (1)..(83): unsure at all Xaa locations
  Clone ID: PAT_MRT4530_50135C.1.pep
MVSSRCAVGVEVVTALKITKVLPVRSSPNLAIPDFALLQHFHTGLDKESALYLNITAGGXFMHKTPVEGKEILDRISKNTFGQ

SEQ ID NO: 149843 - protein, 66 aa, Oryza sativa
  Clone ID: PAT_MRT4530_50136C.1.pep
ASQSFSTWCSHQPSFSCMPHHGLKLRLKILPGFSSNHIPRHSSEHFACHFCALQSAPQISFPVSHL

SEQ ID NO: 149844 - protein, 71 aa, Oryza sativa
  Clone ID: PAT_MRT4530_50137C.1.pep
SSGTRGQGGPPRDAIDVLFRDTSDELTDELISDTMIDLMIPAGDSVPVLITLTVKFLSECLLALHQLEVSL

SEQ ID NO: 149845 - protein, 312 aa, Oryza sativa
  unsure (1)..(312): unsure at all Xaa locations
  Clone ID: PAT_MRT4530_50138C.1.pep
MEPQYIFQLSAPRGKFYEPPPSSEPIXTPGYEIRPEFIITVREKSFSSLDQEISYHHLREFEHLCSCLLIQGMPRETIKWKLFPFSLQERAKQWYIYTVGSVSGSWNELRDRFCXLTFFPVSRITFLRIEVLSFRXNNKKSIGAAWARFVTLVQSSPNLAIPDFALLQHFHTGLDKESALYLNITAGGXFMHKTPVEGKEILDRISKNTFGQXFEPPPEASVSGTEEPEPSTSSDLTEESSRELSPDIEEIHDPGCAPKFRDDLLEYYGHLFSSQLSIQLLKSSSKQDALDFIQEKEESVEIFELHSIKPPS

SEQ ID NO: 149846 - protein, 630 aa, Oryza sativa
  Clone ID: PAT_MRT4530_50139C.1.pep
MAGGAMTDTDGAHKNYPGKMTIFVFLACLVASSGGLIFGYDIGISGGVTSMDSFLIKFFPSVYAKEKEMVETNQYCKFDSELLTLFTSSLYLAALIASLFASVITRKFGRRITMLGGGVIFLVGAILNGAAADVAMLIIGRILLGIGVGFSNQAVPLYLSEMAPARMRGMLNISFQLMITVGILAANLINYFTDKIAGGWGWRVSLGLAAVPAVIMAGGSLFLPDTPNSLLSRGKENEARAMLRRIRGTDDVGPEYDDLVAASEASKAIENPWRTLLERRYRPQLVMSVLIPTLQQLTGINVVMFYAPVLFKTIGFGGTASLMSAVITGLVNMFATFVSIATVDRLGRRKLLLQGGVQMIFAQFILGTLIAVKFGTAGVANISRGYAIVVVLCICVFVSAFAWSWGPLGWLVPSEIFPLEIRSAAQSVVVVFNMAFTFIIAQIFLMMLCHLKFGLFYFFGAMELIMTGFVFFFLPETKGIPIEEMDRIWGKHWYWRRFVGARAGGEAICMTRLRPAPTKRLQYQCSPQILSISSMGIPLVSGRKTKTNPVMISSMAPKKKKSPNLRRHSIIRKICAMKKVNAMLNTTTTLCAADLISSGKISLGTSHPRGPHDHANADTNRQMNSTTTMA

SEQ ID NO: 149847 - protein, 449 aa, Oryza sativa
  Clone ID: PAT_MRT4530_5013C.1.pep
MGVPAFYRWLADRYPQTVSDAVEEEPVELEPGAFVPVDLRRPNPNGLEFDNLYLDMNGIIHPCFHPEGRPAPTTYDEVFKSIFAYIDHLFGLVRPRKLIYMAIDGVAPRAKMNQQRSRRFRAAKDAADAAAEEERLRKEFEAEGRTLVAKEKSEAIDSNVITPGTPFMFVLSSALQYYIQLRLNHTPGWQSVKVMLSDSNVPGEGEHKIMSYIRLQRNLPGFDPNTRHCLYGLDADLIMLSLATHEVHFSILREVITMPGQHEKCFLCGQVGHLAAECRGSGQADKTVELPPIHKKKYQFLNIWVLREYLEKDLEIVDPPFKINFERVVDDFVFMCFFVGNDFLPHMPTLEIREGAINLLMNIYRREFTSMGGYLTDGGEVLLDRVEHFIQSVAVHEEQIFQKRARIQKAIQNNEERNRVQTENSEDNQYVDKSMIYCPTVTVKYYKND

SEQ ID NO: 149848 - protein, 342 aa, Oryza sativa
  Clone ID: PAT_MRT4530_50140C.1.pep
MASPANLACWGSLPAALATWEDADVVRTRFPDAVPWGQAPIPGGATVMPMPDELLATTEGGVLQSNESSAKVDEPVATENSDAAPAEASVDAVNGKIPPTKLIPQHPLEGVTLTERTVRITGNKKQIEAAKDIIKQAMSQVLVEANGVTRTLVLNRPKQLNALSSAMITCFLRCFTAYEEDDGVKLLIVKGKGRAFCAGGDVAAVVRSINNDSWKYGAHFFRNEFLLNYIIATYSKPQVSLLTGIVMGGGAGVSIHGRFRVVTDSTVFAMPETALGLFPDIGASYFLSRLLGFYGKIQPQILQILDHWMCFTIRALLQLQRPPLLLRRQRRRNPNSGRGPTN

SEQ ID NO: 149849 - protein, 486 aa, Oryza sativa
  unsure (1)..(486): unsure at all Xaa locations
  Clone ID: PAT_MRT4530_50141C.1.pep
LHLQLRSTTLLKRGNNSKAEYNHRTQQATPTMQTCKGNTRTVSPPPLKRQWAVPSCAAVNPAAGQPDTPADPTPSRPPSPPVPRKGSSYTSDQAVTHSRLWQALKGLPLTSXKGPAPTGGPHTSASQRGRALVHGPTRQRLKGGHGWQAGPTAPAPRADVPARPGIKPAGRPXKAAARACDRQRRRAREEGGGARGKKKEGKEGEGDLTGGAAMAGGEKRGRRRRPAMPRCGRATATPREXRGEELGRRKTPTATIHAGRSRRGERTHRRREGNGVSVVFRRRRAAAGKGLAAAKLVVAVAXAAAALATAAHGRSAATGGGVSGGGASSVGGTGWSGESGKRERRXGEHFIGGGGGGRGREALRFRRRRGGGEREGGGEIQNRIPPLSCAGAAGRRGERAATWRGRGESGGSGCGGGFGAAAHRDRREVGEGPDRWGLGGKERGGDGWGETMTGGASGPPVGEGRREEAGGYVDLEEGELRKSSER

SEQ ID NO: 149850 - protein, 469 aa, Oryza sativa
  Clone ID: PAT_MRT4530_50142C.1.pep
MTTAPVLVLPDFTKPFTIETDACSSGIGAVLCQEGHPVAFYSKALGVNNQKLSIYEKEFLTIMMAVDKWRPYLLGAVLLSKLTSVLCHLDDLILGSELQRKAMTKLIVVQPVWVQEVVNSYVVDSQAQSLLTELAVASSNAQGYSLSHGLIRKKGRIWLGTNSALHTKIISAIHDSAIGGHFGIQATYQRVKKLFVWRDLKQSVEEFVQQCTVCQKAKHEHCSYPRLLQPLPIPSGVWQDISMDFIESLPVSKAICSALAFMYFGSFEILQAIGSVAYKLKLPDDSLIHPVFHVSQLKQFVPDNKPMCSQLPTAAQLDIADFIPSEVLDRRMVKKRNAAVVQNLACWGSLPAALATWEDADVVRTRFLDAVPWGQAPIPGGNCVAQAGESSAKVDEPVATENSDAAPAEASVDAVNGKIPPTKVTSYAGKADAYINLGLIVVINVHVVDSPTSSGRCYIDRKNCTYYWE

SEQ ID NO: 149851 - protein, 2008 aa, Oryza sativa
  Clone ID: PAT_MRT4530_50143C.1.pep
MGSISGIDDLVFPPGQTFRFDSLDFITNNFGKISLLDSESDRSGENRISVPFGFPNAAESYFKTILTESASNHSAEIASSSTTPDQDDGAYPPVLMKLPDDLAAVFTTTASSSRRPRRKSASTPISPSFREVGVILQPLGTVSTDQLDDYNSSPTVDSRPTDIVEYDEFSSRYNDFDDFDDFDGSLDDNYTPLYFGVFMANNETEEQRQARETEERHRLEEEHQPQEQERLRREQQDRERTAKEAEDRRQRALEAGRRARDLIGQQDVEGTPVFRTPQQNAVAAITLLDTLLNQNELNQSDHVVNILNQTKTMIAASVPVNSESVHTPTGSRVPHFRSHDYRHPSLSITGAGSNRRSRGHDERSVHSPPDLHKERRVERPRSPPRRRPVDLRDTIIQRRAARGYHHSPNRHDDDLDEVAAFTDDLRRVDWPAGFKPTGIEKYDGTTNPGSWLTVYGLAIRAAGGDNKAMANYLPVALADSARSWLHGLPRGTIGSWAELRDHFIANFQGTFERPGTQYDLYNVIQKSGESLRDYIRRFSEQRNKISDITDDVIIAAFTKGIRHEELVGKFGRKPPRTVKLMFEKANEYAKAEDAVTASKQSGPSWKQNKGTPATGGGGSNNHKDRKRKPAELVATASHSSRQRSRVNTFDKIMNSQCPHHPNSNHVAKDCFVYKQFADQYTKTARKNSDEEQSTSRKKDDGDAPAGFQDHRKELNHIFGGPLAYESKRKQKLTEREINAVQPDTPQYLRWSEIAIKFDRSDHPDRVVHPGRYPLVLDPVVRNVKLRRTLIDGGSALNILFAKTLDDMQIPRSELKPSNAPFHGVIPGLSATPLGQITLPVTFGTRENFRTENISFEVADFETAYHAILGRPALAKFMAVPHYTYMMMKMPGPRGVLSLRSDIKQAVTCDKESCDMAHTHEMASAREDIRLAAATASEGEIPVTKTSKSGESEAKTKKIPLDPSDPTKTAESALITFLQNNKDIFAWKPSDMPGIPREVIEHSLHVKEDAKPIKQRLRRFAQDRKDAIKEELTKLLAAGFIKEVLHPDWLANPVLVRKKTGQWRMCVDYTDLNKSCPKDPFGLPRIDQVVDSTAGCELLSFLDCYSGYHQIRLKESDCLKTSFITPFGAYCYVTMPFGLKNAGATYQRMIQRCFSTQIGRNVEAYVDDVVVKTKQKDDLISDLEETFVSIRAFRMKLNPEKCTFGVPSGKLLGFMVSHRGIQANPEKVTAILNMKPPSTQKDVQKLTGCMAALSRFVSRLGERGMPFFKLLKKTDNFQWGPEAQKAFEDFKKLLTEPPVLASPHPQEPLLLYVSATSQVVSTVLAVEREEEGHVQKVQRPIYFVSEVLADSKTRYPQVQKLLYGHSVTVVTSFPLGDILHNREANGRIAKWALELMSLDISFKPRISIKSQALADFVAEWTECQEDTPAENMEHWTMHFDGSKRLSGTGAGVVLISPTGERLSYVLWIHFSASHNVAEYEALLHGLRIAISLGIKRLIVRGDSQLVVNQVMKEWSCLDDNMMAYRQEVRKLEDKFDGLELSHVLRHNNEAADRLANFGSKREVAPSDVFVEHLYTPTVPHKDTTQVAGTHDVAVVETDWREPLIRFLTSQELPQDKDEAERISRRSKLYVMHEAELYKKSPSGILQRCVSLEEGRQLLKDIHSGICGNHAAARTIVGKAYRQGFFWPTAVSDADKIVRTCEGCQFFARQIHLPAQELQTIPLSWPFAVWGLDMVGPFKKAVGGYTHLFVAIDKFSKWIEAKPVVTITADNARDFFINIVHRFGVPNRIITDNGTQFTGGVFKDFCEDFGIKICYASVAHPMSNGQVERANGMILQGIKARVFDRLKPYAGKWVQQLPSVLWSLRTTPSRATGQSPFFLVYGAEAMLPSEVEFESLRFRNFREERYEEDRVDDLHRLEEAREAALIRSARYLQGLRRYHNRNVRSRAFLVGDLVLRKIQTTRDRHKLSPLWEGPFIISEVTRPGSYRLKREDGTLVDNSWNIEHLRRFYA

SEQ ID NO: 149852 - protein, 53 aa, Oryza sativa
  Clone ID: PAT_MRT4530_50144C.1.pep
NTGKKNHRVRSMLDLGESTEARGGLAMEMTYGGMKQMPSFHGIIFCTIRKPSQ

SEQ ID NO: 149853 - protein, 172 aa, Oryza sativa
  Clone ID: PAT_MRT4530_50145C.1.pep
MQSLQDKASEWSGVAAGDAFAIDDGNVFEALGGTTQPFVDLSTNFYTRVYEDEEEWFRQIFAGSKKEDAIRNQYEFLVQRMGGPQLFSQRRGHPALIARHRPFPVTHQAAERWLHHMQQAVDTTDSIDAATKTKMMYFFRHTAYFLVAGNEMTRQGHGTSCKCKHGESKPAE

SEQ ID NO: 149854 - protein, 56 aa, Oryza sativa
  Clone ID: PAT_MRT4530_50146C.1.pep
GNLFREISKLRVGPGEQTLKHTVTNGTSHLFKKGHLNPQLGGPGPIRLKRGPFFFF

SEQ ID NO: 149855 - protein, 1911 aa, Oryza sativa
  Clone ID: PAT_MRT4530_50147C.1.pep
MGSVSGIDDLVFPPGQTFRFGSLDFVTNNFGKISILDSESDQSGENRISVPFGLPNAAESYFKTISIELASNHSGEIASSPTTPDQDDGAYPPILMKLPDDLAAVSITTASPSRRPRRKSASTPISPSFREVGVILQPLGTVSTDQLDGYYSSPTVDSRPTDIVEYDEFSSRYNDPDLDDFDGSLDDNYTPLYFGVFMADNETEEQRQARETEARRETERRRLEEERQAQEQERLRREQQERERTAKEAEDRRQRALEAGRRARDFIGQQDVEGTPVFRTPQQNAVAAITLLDTLLKENELNRSDHVVNILNQTKTMIAASVPVNSESVCTPTGSRVPHFRSHDYRHPSLSITGAGSNRRSRGHDERFKPTGIEKYDGTTNPESWLTVYGLAICAAGGDSKAMANYLPVALADSARSWLHGLPRGTIGSWAELRDHFIANFQGTFERPGTQFDLYNVIQKSGESLRDYIRRFSKQRNKISDITDDVIIAAFTKGIRHEQLVGKFGRKPPRTVKLMFEKANEYAKAEDAVTASKQSGPSWKPNKGTPATGGGGSNNHKDRKRKPEELVATATHSSRQRSRVNTFDKIMNSQCPHHPNSNHVAKDCFVYKQFAEQYTKTTRKNSDEEQSTSRKKDDGDTPAGFQDHRKELNHIFGGPLAYESKRKQKLTEREINAVQPDTPQYLRWSEIAIKFDRSDHPDRVVHPGRYPLVLDPVVRNVKLRRTLIDGGSALNILFAKTLDDMQIPRSELKPSNAPFHGVIPGLSATPLGQITLPVTFGTRENFRTENISFEVADFETAYHAILGRPALAKFMAVPHYTYMMMKMPGPRGVLSLRSDIKQAVTCDKESCDMAQTREMASAREDIRLAAATASEGEVPATKISKSGESEAKTKKIPLDPSDSTKTAVIGAELDYRKDAIKEELTKLLAAGFIKEVLHPDWLANPVLVRKKTGQWRMCVDYTDLNKSCPKDPFGLPRIDQVVDSTAGCELLSFLDCYSGYHQIRLKESDCLKTSFITPFGAYCYVTMPFGLKNAGATYQRMIQRCFSTQIGRNVEAYVDDVVVKTKQKDDLISDLEETFASIRAFRMKLNPEKCTFGVPSGKLLGFMVSHRGIQANPEKVTAILNMKPPSTQKDVQKLTGCMAALSRFVSRLGERGMPFFKLLKKTDDFQWGPEAQKAFEDFKKLLTEPPVLASPHPQEPLLLYVSATSQVVSTVLVVEREEEGHVQKVQRPIYFVSEVLADSKTRYPQVQKLLYGILITTRKLSHYFQGHSVTVVTSFPLGDILHNREANGRIAKWALELMSLDISFKPRISIKSQALADFVAEWTECQEDTPAEKMEHWTMHFDGSKRLSGTGAGVVLISPTGERLSYVLWIHFSASHNVAEYEALLHGLRIAISLGIKRLIVRGDSQLVVNQVMKEWSCLDDNMMAYRQEVRKLEDKFDGLELSHVLRHNNEAADRLANFGSKREVAPSDVFVEHLYTPTGPHKDTTQVAGTHDVAMVEADWREPLIRFLTSQELPQDKDEAERISRRSKLYVMHEAELYKKSPSGILQRCVSLEEGRQLLKDIHSGICGNHAAARTIVGKAYRQGFFWPTAVSDADKIVRTCEGCQFFARQIHLPAQELQTIPLSWPFAVWGLDMVGPFKKAVGGYTHLFVAIDKFSKWIEAKPVVTITADNARDFFINIVHRFGVPNRIITDNGRQFTGGVFKDFCEDFGIKICYASVAHPMSNGQVERANGMILQGIKARVFDRLKPYAGKWVKQLPSVLWSLRTTPSRATGQSPFFLVYGAEAMLPSEVEFESLRFRNFREERYEEDRVDDLHRLEEVREAALIQSARYLQGLRRYHNRNVRSRAFLVGDLVLRKIQTTRDRHKLSPLWEGPFIISEVTRPGSYRLKREDGTLVDNSWNIEHLRRFYA

SEQ ID NO: 149856 - protein, 1718 aa, Oryza sativa
  Clone ID: PAT_MRT4530_50148C.1.pep
MGSVSGIDDLVFPPGQTFRFGSLDFVTNNFGKISLLDSESNQSGENRISVPFGFPNAAESYFKTISIESASNHSAEIASSPTSPDQDDGAYPLILMKLPDDLAAVSITTASPSRRPRRKSASTPISPSFREVGVILQPLGTVSTDQLDGYNSSPTVDSRPTDIMEYDEFSSRYNDLDLDDFDGSLDDNYTPLYFGVFMAGNETEEQRQARETEARRETERRRLEEEHQAQEQERLRREQQERERTAKEAEDRRQRALEAGRRARDLIGQQDVEGTPVFRTPQQNAVAAITLLDTLLRENELNQSDHVVNILNQTKTMIAASVPVNSESVHTPTGSRVPHFRSHDYRHPSLSITGAGSNRRSRGHDERSVHSPPDHHRERRVERPRSPPRRRPVDLRDTIIQRRAARGYHHSPDRHDDDLDGVAAFTDDLRRVDWPAGFKPTGIEKYDGTTNPESWLTVYGLAIRAAGGDSKAMANYLPVALADSARSWLHGLPRGTIGSWAELRDHFIANFQGTFERPGTQYDLYNVIQKSGESLRDYIRTVKLMFEKANEYAKAEDAVTASKQSGPSWKPKKDTPASGGGGSNNHKDRKRKLRNLLQPPQFADQYTKTTWKNSDEEQSTSRKKDDGDAPAGFQDHRKELNHIFGGPLAYESKRKQKLTEREINAVQPDTPQYLRWSEIAIKFDRSDHPDRVVHPGRYPLVLDPVVRNVKLRRTLIDGGSALNILFAKTLDDMQIPRSELKPSNAPFHGVIPGLSATPLGQITLPVTFGTRENFRTENISFEVADFETAYHAILGRPALAKFMAVPHYTYMMMKMPGPRGVLSLRSDIKQAVTCDKESCDMAQTREMASAREDIRLAAATASEGEVPATKTSKSGESEAKTKKIPLDPSDPTKTAVIGAEEVIEHSLHVKEDAKPIKQRLRRFAQDRKDAIKEELTKLLAAGFIKEVLHPDWLANPVLVRKKTGQWRMCVDYTDLNKSCPKDPFGLPRIDQVVDSTAGCDLLSFLDCYSGYHQIRLKESDCLKTSFITPFGAYCYVTMPFGLKNAGATYQRMIQRCFSTQIGRNVEAYVDDVVVKTKQKDDLISDLEETFASIRAFRMKLNPEKCTFGVPSGKLLGFMVSHRGIQANPEKVTAILNMKPPSTQKDVQKLTGCMAALSRFVSRLGERGMPFFKLLKKTDDFQWGPEAQKAFEDFKKLLTEPPVLASPHPQEPLLLYVAATSQVVSTVLVVEREEEGHVQKVQRPIYFVSEVLADSKTRYPQVQKLLYGILITTRKLSHYFQGHSVTVVTSFPLGDILHNREANGRIAKWALELMSLDISFKPRISIKSQALADFVAEWTECQEDTPAEKMEHWTMHFDGSKRLSGTGAGVVMKEWSRLDDNMMAYRQEVRKLEDKFDGLELSHVLRHNNEAADRLANFGSKREVAPSDVFVEHLYTPTVPHKVTTQVAGTHDVAMIEADWREPLIRFLTSQELPQDKDEAERISRRSKLYVMHEAELYKRSPSGILQRCVSLEEGRQLLKDIHSGICGNHAAARTIVGKAYRQGFFWPTAVSDADKIVRTCEGCQFFARQIHLPAQELQTIPLSWPFAVWGLDMVGPFKKAAGGYTHLFVAIDKFSKWIEAKPVVTITADNARDFFINIVHRFGVPNRIITDNGTQFTGGVFKDFCEDFGIKICYASVAHPMSNGQVERANGMILQGIKARVFDRLKPYAGKWVQQLPS

SEQ ID NO: 149857 - protein, 2170 aa, Oryza sativa
  Clone ID: PAT_MRT4530_50149C.1.pep
MAKLAVLLTLLALVGSVTCQGYTGNASPPTPITYPSPPSLSPSMPPTYPPPSSTPPSPAPVSPSPPTTYPPPSTTPPNPAPTSPSPPAPGLRVGYYSSSCPKAEQIVKDTVKNAVYANRGIGAGLVRLFFHDCFVEFRQLARQVGVASSFSPISAMGPISGIDDLVFPPGQTFRFGSLDFITNNFGKISLLDSESDQSGENRLSVPFGFPNAAESYFQTISTESASNHSAEIASFPTIPDQDDGAYPPVLMKLPDDLAAVFTTTAPSSRRPRRKSASTPISPSFREVGVILQPLGTVSTDQLDDYNSSPTVDSRPTDIVEYDEFSSRYHDPDLDDFDGSLDDNYTPLYFGVFMANNETEEQRQARETEERRRLEEEHQAQEQERLRREQQDRERIAKEAEDRRQRALEAGRRARDLIGQQDVEGTPVFRTPQQNAVAAITLLDTLLNQNELNRSDHVVNILNQTKTMIAATVPVNSESVHTPTGSRVPHFRSHDYRHPSLSITGAGSNRRSRGHDERSVHSPPELHRERRVERPRSPPRRRPIDLRDTITQRRAARGYHHSPDRRDDDLDGVAAFTDDLRRVDWPAGFKPTGIEKYDGTTNPESWLTVYGLAIRAAGGDNKAMANYLPVALADSARSWLHGLPRGTIGSWAELRDHFIANFQGTFERPGTQYDLYNVIQKSGESLRDYIQRFSEQRNKISDITDDVIIAAFTKGIRHEELVGKFGRKPPRTVKLMFEKANEYAKAEDAVTASKQSGPSWKPKNTPATGGGGSNNHKDRKRKPEELVATAAHSSRQRSRVNTFDKIMNSQCPHHPNSNHVAKECFIYKQFAEQYTKSTRKNSDEEQSTSRKQDDGDTPAGFQDHRKELNHIFGGPLAYESKRKQKLTEREINAVQPDTPQYLRWSEIAIKFDRSDHPDRVVHPGRYPLVLDPVVRNVKLRRTLIDGGSALNILFAKTLDDMQIPRSELKPSNAPFHGVIPGLSATPLGQITLPVTFGTRENFRTENISFEVADFETAYHAILGRPALAKFMAVPHYTYMMMKMPSPRGVLSLRSDIKQAVTCDKESCDMAQTREMALAREEIRLAATTVSEGEVPAAKTSKSGETEAATKKIPLDPSDPTKTAVIGAELDYIFAWKPSDMPGIPREVIEHSLHVKEDAKPIKQRLRRFAQDRKDAIKEELTKLLAAGFIKEVLHPDWLANPVLVRKKTGQWRMCVDYTDLNKSCPKDPFGLPRIDQVVDSTAGCELLSFLDCYSGYHQIRLKESDCLKTSFITPFGAYCYVTMPFGLKNAGATYQRMIQRCFSTQIGRNVEAYVDDVVVKTKQKDDLILDLEETFASIRAFRMKLNPEKCTFGVPSGKLLGFMVSHRGIQANPEKVTAILNMKPPSTQKDVQKLTGCMAALSRFVSRLGERGMPFFKLLKKTDNFQWGPEAQKAFEDFKQLLTKPPVLASPHPQEPLLLYVSATSQVVSTVLVVEREEEGHVQKVQRPIYFVSEVLADSKTRYPQVQKLLYGILITTRKLSHYFQGHSVTVVTSFPLGDVLHNREANGRIAKWALELMSLDISFKPRTSIKSQALADFVAEWTECQEDTPVEKIEHWTMHFDGSKRLSGTGAGVVLISPTGERLSYVLWIHFSASHNVAEYEALLHGLRIAISLGIKRLIVRGDSQLVVNQVMKEWSCIDDNMMAYRQEVRKLEDKFDGLELSHVLRHNNEAADRLANFGSKREAAPSDVFVEHIYTPTVPHKDATQITGTHDVAMVEADWREPFIRFLTSQELPQDKDEAERISRRSKLYVMHESELYKKSPSGILQRCVSLEEGRQLLKDIHSGICGNHAAARTIVGKAYRQGFFWPTAVSDADKIVRTCEGCQFFARQIHLPAQELQTIPLSWPFAVWGLDMVGPFKKAVGGYTHLFVAIDKFSKWIEAKPVVTITADNARDFFINIVHRFGVPNRIITDNGTQFTGGVFKDFCEDFGIKICYASVAHPMSNGQVERANGMILQGIKARVFDRLKPYAGKWVSQLPSVLWSLRTTPSRATGQSPFFLVYGAEAMLPSEVEFESLRFRNFREERYEEDRVDDLHRLEEVREAALIQSARYLQGLRRYHNRNVRSRAFLVGDLVLRKIQTTRDRHKLSPLWEGPFIISEVTRPGSYRLKREDGTLVDNSWNIEHLRRFYA

SEQ ID NO: 149858 - protein, 383 aa, Oryza sativa
  unsure (1)..(383): unsure at all Xaa locations
  Clone ID: PAT_MRT4530_5014C.1.pep
MNRVPTSWGFVFXRVNKPGERXARTGSTGVGPTRQPLGPRWTGCTRLAAAGAVGTKRQPHPRARAADGRAPPGSRGARPKAASPAQPTGGGAPAPPWSPPATNGAAERRPREGREEGSEAAVLGSPRDDEDGGNDNRSGGKRRRGSGRRGRRCSGGRRAKRRSGRGRRXRGEADGGDAETGGGPERRRRRTGAWRRRRRESTTARARIRRKERAASGGNGGGRHGERLYSAGREREGPEGKETAAAISGAIDAPTKIAGAXRTNPREREREKWGERGREXRGVISPSLWRAGTAGCGGFGGGGSARARAXRRERRKVGDDRWAPPVSEGGGRARLSAARARGGGRRAAEERREREGIGPGRPKREKGGGEKKTFRXFLFIKPF

SEQ ID NO: 149859 - protein, 157 aa, Oryza sativa
  Clone ID: PAT_MRT4530_50150C.1.pep
GYKPKFFFSCVMAKAQAAARIMTEVAPPQLVSVMRRRKQVARSLDTIAEDDRELMHQVPYAGDGHHHGVKKQAAATSSASTFATPTLAFERQPPPAPAPAPASGFMRGLSKWFSNNGVHGQEGWPEIGREGHRRAIYSQQAHIRGRATGLNSSSLTS

SEQ ID NO: 149860 - protein, 54 aa, Oryza sativa
  Clone ID: PAT_MRT4530_50151C.1.pep
MGPEEEENPYLQMSGGARIGWTRKRVGRGPFLFNLHPIRPVAISIYEIVVTWMC

SEQ ID NO: 149861 - protein, 533 aa, Oryza sativa
  unsure (1)..(533): unsure at all Xaa locations
  Clone ID: PAT_MRT4530_50152C.1.pep
LRLQLRSTTLLKRGNNSKAKYNHRTQQAIPMMQTCKGIRGWVSPALLARQPAVPSCAAVNPAAGQPDTPADPTPXRPPSPPVPRKGSSYTPDQAVTHSRLWXALKGPPLTSAREAGADRRVPHVSDTRGRAHGGHGPLRPGRHHGPRPRVVHGRPQGRAPRARARLRAGPAETXTCDGARPPAVSGGARGRAKGDGKERRKGDAARRREXGERRTGARRRGNGARRRDGGAVTRDRARGVGPGKAARGDGTTARRRDGRRRAARQRRQNATASARGAQGAWRRDSDGDGARRHGAQSDDTTGGSATRRRAARGSGRPGACGRGGVRARERDRTPRGDAGGGHGMARDXLGAAVNGGRGGESGGGLRLAVRREFWWGIWGKEMGDDVRRATAQHGGGGSVGGARLESAAAAKRATGGEIVAERGRIGRQPAGDVGWRRGARGRSNRRNFWGKVGENEEEWXGNHVHTVGRACGRQEAGGGGFGSGVGGMAVARGRLEVGGGSDMWSLGSHMSAREREELGGNSKNIELAVNLIS

SEQ ID NO: 149862 - protein, 1968 aa, Oryza sativa
  Clone ID: PAT_MRT4530_50153C.1.pep
MGSVSGIDDLVFPPGQTFRFGSLDFITNNFGKISLLDSESDQSGENRISVPFGFPNAAESYFETISTESASNHSAEIASSPTTPDQDDGAYPPVLMKLPDDLAAVFTTTASSSRRPRRKSASTPISPSFREVGVILQPLGTVSTDQLDDYNSSPTVDSRPTDIVEYDEFGSRYNDFDDFDGSLDDNYTPLYFGVFMANNETEEQRQARETEERRRLEEEHQAQEQERLRREQQDRERTAKEAEDRRQRALEAGRRARDLIGQQDVEGTPVFRTPQQNAVAAITLLDTLLNQNELNQSDHVVNILNQTKTMIAASVPVNSESVHTPTGSRVPHFRSHDYRHPSLSITGAGSNRRSKGHDERSVHSPPDLHRERRVERPRSPPRRRPVDLRDTIIQRRAARGYHHSPNRHDDDLDGVAAFTDDLRRVDWPAGFKPTGIEKYDGTTNPESWLTVYGLAIRAAGGDNKAMANYLPVALADSARSWLHGLPRGTIGSWAELRDHFIANFQGTFERPGTQYDLYNVIQKSGESLRDYIRRFSEQRNKISDITDDVIIAAFTKGIRHEELVGKFGRKPPRTVKLMFEKANEYAKAEDAVTASKQSGPSWKQNKGTPATGGGGSNNHKDRKHCFVYKQFADQYTKTARKNSDEEQSTSRKKDDGDTPAGFQDHRKELNHIFGGPLAYESKRKKKLTEREINAVQPDTPQYLRWSEIAIKFDRSDHPDRVVHPGRYPLVLDPVVRNVKLRRTLIDGGSALNILFAKTLDDMQIPRSELKPSNAPFHGVIPGLSATPLGQITLPVTFGTRENFRTENISFEVADFETAYHAILGRPALAKFMAVPHYTYMMMKMPGPRGVLSLRSDIKQAVTCDKESCDMAQTREMASAREDIRLAAATASEGEVPATKISKSGESEAKTKKIPLDPSDPTKTANNKDIFAWKPSDMPGIPREVIEHSLHVKEDAKPIKQRLRRFAQDRKDTIKEELTKLLAAGFIKEVLHPDWLANPVLVRKKTGQWRMCVDYTDLNKSCPKDPFGLPRIDQVVDSTAGCELLSFLDCYSGYHQIRLKESDCLKTSFITPFGAYCYVTMPFGLKNAGATYQRMIQRCFSTQIGRNVEAYVDDVVVKTKQKDDLISDLEETFASIRAFRMKLNPEKCTFGVPSGKLLGFMVSHRGIQANPEKVTAILNMKPPSTQKDVQKLTGCMAALSRFVSRLGERGMPFFKLLKKTDNFQWGPEAQKAFEDFKKLLTEPPVLASPHPQEPLLLYVSATSQVVSTVLVVEREEEGHVQKFQRPIYFVSEVLADSKTRYPQVQKLLYGILITTRKLSHYFQGHSVTVVTSIPLGDILHNREANGRIAKWALELMSLDISFKPRISIKSQALADFVAEWTECQEDTPAENMEHWTMHFDGSKRLSGTGAGVVLISPTGERLSYVLWIHFSASHNVAEYEALLHGLRIAISLGIKRLIVRGDSQLVVNQVMKEWSCLDDNMIAYRQEVRKLEDKFDGLELSHVLRHNNEAADRLANFGSKREVAPSDVFVEHLYTPTVPHKDTTQVAGTHDVAMVETDWREPLIRFLTSQELPQDKDEAERISRRSKLYVMHEAELYKKSPSGILQRCVSLEEGRQLLQDIHSGICGNHAAARTIVGKAYRQGFFWPTAVSDADKIVRTCEGCQFFARQIHLPAQELQTIPLSWPFAVWGLDMVGPFKKAVGGYTHLFVAIDKFSKWIEAKPVVTITADNARDFFINIVHRFGVPNRIITDNGTQFTGGVFKDFCEDFGIKICYASVAHPMSNGQVERANGMILQGIKARVFDRLKPYAGKWVQQLPSVLWSLRTTPSRATGQSPFFLVYGAEAMLPSEVEFESLRFRNFREERYEEDRVDDLHRLEEAREAALIRSARYLQGLRRYHNRNVRSRAFLVGDLVLRKIQTTRDRHKLSPLWEGPFIISEVTRPGSYRLKREDGTLVDNSWNIEHLRRFYA

SEQ ID NO: 149863 - protein, 1737 aa, Oryza sativa
  unsure (1)..(1737): unsure at all Xaa locations
  Clone ID: PAT_MRT4530_50154C.1.pep
MGSVSGIDDLVFPPGQTFRFGSLDFVTNNFGKISLLDSESNQSGENRISVPFGLPNAAESYFKTISIESASNHSGKIASSPTTPDQDDGAYPPILMKLPDDLAAISITTASPSRRPRRKSASTPISPSFREVGVILQPLGTVSTDQLDGYYSSPTVDSRPTDIVEYDEFSSRYNDPDLDDFDESLDDNYTPLFFGVFMANNETEEQRQARETEARRETERRRLEEEHQAQEQERLRREQQERERTAKEAEDRRQRALEAGRRARDLIGQQDVEGTPVFRTPQQNAVAAITLLDTLLKENELNQSDHVVNILNQTKTMIAASVPVNSESVHTPTGSRVPHFRSHDYRYPSLSITGAGSNRRSRGHDERSVHSPPDHHRERRVERPHSPPRRRPVDLRDTIIQRRAARGHHHSPDRHDDDLDRVAAFTDDLRRVDWPAGFKPTGIEKYDADSARSWLHGLPRGTIGSWAELRDHFIATFRGTFERPGTQYDLYNVIQKSGESLRDYIRRFSEQRNKISDITDDVIIAAFTKGIRHEELVGKFGRKPPRTVKLMFEKANEYAKAEDVVTASKQSGPSWKPNKGTPAPGGGGSNNNKDRKRKPAELVATATHSSRQRSRVNTFDKIMNSQCPHHPNSNHVAKDCFVYKQFAEQYTKTTRKNSDEEQSTSRKKDDGDTPAGFQDHRKELNHIFGGPLAYESKRKQKLTEREINAVQPDTPQYLRWSEIAIKFDRSDHPDRVVHPGRYPLVLDPVVRNVKLRRTLIDGGSALNILFAKTLDDMQIPRSELKPSNAPFHGVIPGLSATPLGQITLPVTFGTRENFRTENISFEVADFETAYHAILGRPALAKFMAVPHYTYMMMKMPGPRGVLSLRSDIKQAVTCDKESCDMAQTREMASAREDIRLAAATTSEGEVPATKISKSGESEAKTKKIPLDPSDSTKTAVIGAELDCFIKEVLHPDWLANPVLVRKKTGQWRMCVDYTDLNKSCPKDPFGLPRIDQVVDSTAGCELLSFLDCYSGYHQIRLKESDCLKTSFITPFGAYCYVTMPFELKNAGATYQRMIQRCFSTQIGRNVEAYVDDVVVKTKQKDDLILDLEETFASIRAFRMKLNPEKCTFGVPSGKLLGFMVSHRGIQANPEKVTAILNMKPPSTQKDVQKLTGCMAALSRFVSRLGERGMPFFKLLKKTDDFQWGPEAQKAFEDFKKLLTEPPVLASPHPQEPLLLYVSATSQVVSTVLVVEHEEEGHVQKVQRPIYFVSEVLADSKTRYPQVQKLLYGILITTRKLSHYFQGHSVTVVTSFPLGDILHNREANGRIAKWALELMSLDISFKPRISIKSQALADFVAEWTECQEDTPAEKMEHWTMHFDGSKRLSGTGAGVVLISLTGERLSYVLWIHFSASHNVAEYEALLHGLRIAISLGIKRLIVRGDSQLVVNQVMKEWSCLDDNMMAYRQEVRKLEDKFDGLELSHVLRHNNEAADRLANFGSKREAAPSDVFVEHLYTPTVPHKDTTQVAGTHDIAMVEADWREPLIRFLTSQELPQDKDEAERISRRSKLYVMHEAELYKKSPSGILQRCVSLEEGRQLLKDIHSGICGNHAAARTIVGKAYRQGFFWPTAVSDADKITIPLSWPFAVWGLDMVGPFKKAVGGYTHLFVAIDKFSKWIEAKPVVTITADNARDFFINIVHRFGVPNRIITDNGRQFTGGVFKDFCEDFGIKICYASVXHPMSNGQVERANGMILQGI

SEQ ID NO: 149864 - protein, 67 aa, Oryza sativa
  unsure (1)..(67): unsure at all Xaa locations
  Clone ID: PAT_MRT4530_50155C.1.pep
IHTGQSQTLALPSXPSIRXSSSSAGWKLNHXRRGXPNSXXXRANNPGXRXXPPSLLTSXFAASXIHA

SEQ ID NO: 149865 - protein, 1808 aa, Oryza sativa
  unsure (1)..(1808): unsure at all Xaa locations
  Clone ID: PAT_MRT4530_50156C.1.pep
MGSVSGIDDLVFPPGQTFRFGSLDFVTNNFGKISLLDSESDQSGENRISVPFGLPNAAESYFKTISIELASNHSGEIASSPMSPDQDDEAYPPILMKLPDDLAAVSITTASPSRRPRRKSASTPISPSFREVGVILQPLGTVSTDQLDGYYSSPTVDSRPTDIVEYDEFSSRYNDPDLDDFDGSLDDNYTPLYFGVFMADNETEEQRQARETEARRETERRRLEEERQAQEQERLRREQQERERTAKEAEDRRQRALEAGRRARDFNGQQDVEGTPVFRTPQQNAVAAITLLDTLLKENELNQSDHVVNILNQTKTMIAASVPVNSESVRTPTGSRLPHFRSHDYRHPSLSITGAGSNRRSRGHDERSVHSPPDHHRERRVERPRSPPRRRPVDLRDTIIQRRAARGHHHSPDRHDDDLDGVAAFTDDLRRVDWPAGFKPTGIEKYDGTTNPESWLTVYGLAIRAAGGDSKAMANYLPVALADSARSWLHGLPRGTIGSWAELRDHFIANFQGTFERPGTQFDLYNVVQKSGESLRDYIRRFSEQRNKISDITDDVIIAAFTKGIRHEELVGKFGRKPPRTVKLMFEKVNEYAKAEDAVTASKQSGPSWKPKKDTPATGGGGSNNHKDRKRKPEELVATAIHSSRQRSRVNTFDKIMNSQCPHHPNSNHVAKDCFVYKQFAEQYTKTTRKNSDEEQSTSRKKDDGDTPVGFQDHRKELNHIFGGPLAYESKRKQKLTEREINAVQPDTPQYLRWSEIAIKFDRSDHPDRVVHPGRYPLVLDPVVRNVKLRRTLIDGGSALNILFAKTLDDMQIPRSKLKPSNAPFHGVIPGLSATPLGQITLPVTFGTRENFRTENISFEVTDFETAYHAILGRPALAKFMAVPHYTYMMMKMPGPRGVLSLRSDIKQAVTCDKESCDMAQTREMASAREDIRLAAATASEGEVPATKTSKSGESEAKTKKIPLDPSNPTKTANNKDIFAWKPSDMPGIPREVIEHSLHVKEDAKPIKQRLRRFAQDRKDAIKEELTKLLAAGFIKEVHHPDWLANPVLVRKKTGQWRMCVDYTDLNKSCPKDPFGLPRIDQVVDSTAGCELLSFLDCYSGYHQIRLKESDCLKTSFITPFGAYCYVTMPFGLKNAGATYQRMIQRCFSTQIGRNVEAYVDDVVVKTKQKDDLISDLEETFASIRAFRMKLNPEKCTFGVPSGKLLGFMVSHRGIQANPEKVTAILNMKPPSTQKDVQKLTGCMAALSRFVSRLGERGMPFFKLLKKTDDFQWGPEAQKAFEDFKKLLTEPPVLASPHPQEPLLLYVSATSQVVSTVLVVEREEEGHVQKVQRPIYFVSEVLADSKTRYPQVQKLLYGILITTRKLSHYFQGHSTECQEDTPAEKMEHWTMHFDGSKRLSGTGAGVVLISPTXGERLSYVLWIHFSASHNVAEYEALLHGLRIAISLGIKRLIVRGDSQLVVNQVMKEWSCLDDNMMAYRQEVRKLEDKFDGLELSHVLRHNNEAADRLANFGSKREVAPSDVFVEHLYTPTVPHKDTTQVAGTHDVAMVSADWREPLIRFLTSQELPQDKDEAERISRRSKLYVMHEAELYKKSPSGILQRCVSLEEGRQLLKDIHSGICGNHAAARTIVGKAYRQGFFWPTAVSDADKIVRTCEGCQFFARQIHLPAQELQTIPLSWPFAVWGLDMVGPFKKAVGGYTHLFVAIDKFSKWIEAKPVVTITADNARDFFINIVHRFGVPNRIITDNDRQFTGGVFKDFCEDFGIKICYASVAHPMSNGQNATRRTDFESLSLSLYFPILTVNIKFSS

SEQ ID NO: 149866 - protein, 55 aa, Oryza sativa
  Clone ID: PAT_MRT4530_50157C.1.pep
MAQEGCGAGGFAKAGGVDISGGIRHILASCLPSLVRIIRISRESGGFVVGDKPGA

SEQ ID NO: 149867 - protein, 2016 aa, Oryza sativa
  Clone ID: PAT_MRT4530_50158C.1.pep
MGLVSGIDDLVFPPGQTFRFGSLDFITSNFGKISLLDSESDQSGENRISTPFGFPNAAETYFKTISIESASNHSAEIASSPTTTDQEDGAYPPVLMKLPDDLAAVSTTTASSSRRPRQKSASTPISPSFREVGVILQPLGTVSTDQLDDYNSSPTVDSRPTDIVEYDEFSSRYHDFDDFDDFDGSLDDNYTPLYFGVFMANNETEEQRQARETEERRRLEEEHQAQEQERLRHEQQDRERIAKEAEDRRQRALEAGRRARDLIGQQDVEGTPVFRTPQQNAVAAITLLDTLLNQNELNRSDHVVNILNQTKTMIAASVPVNSESVHTPTGSRVPHFRSHDYRHPSLSITGAGSNRRSRGHDERSVHSPPDLHRERRVERPRSPPRRRPIDLRDTIIQRRAARGYHRSPDRRDDDLDGVAAFTDDLRRVDWPAGFKPTGIEKYDGTTNPESWLTVYGLAIRAAGGDNKAMANYLPVALADSARSWLHGLPRGTIGSWAELRDHFIANFQGTFERPGTQYDLYNVIQKSGESLREYIRRFSEQRNKISDITDDVIIAAFTKGIRHEELVGKFGRKPPRTVKLMFEKANEYAKAEDAVTASKQSGPSWKPKNTPATGGGGSNNHKDRKRKPEELVATAAHSSRQRSRVNTFDKIMNSQCPHHPNSNHVAKECFIYKQFAEQYTKSTRKNSDEEQSTSRKKDDGDTPAGFQDHRKELNHIFGGPLAYESKRKQKLTEREINAVQPDTPQYLRWSEIAIKFDRSDHPDRVVHPGRYPLVLDPVVRNVKLRRTLIDGGSALNILFAKTLDDMQIPRSELKPSNAPFHGVIPGLSATPLGQITLPVTFGTRENFRTENISFEVADFETAYHAILGRPALAKFMAVPHYTYMMMKMPGPRGVLSLRSDIKQAVTCDKESCDMAQTREMASAREEIRLAATTVSEGEVPTAKISKSGETEAETKKIPLDPSDPTKTAVIGAELDYIFAWKPSDMPGIPREVIEHSLHVKEDAKPIKQRLRRFAQDRKDAIKEELTKLLAAGFIKEVLHPDWLANPVLVRKKTGQWRMCVDYTDLNKSCPKDPFGLPRIDQVVDSTAGCELLSFLDCYSGYHQIRLKESDCLKTSFITPFGAYCYVTMPFGLKNAGATYQRMIQRCFSTQIGRNVEAYVDDVVVKTKQKDDLILDLEETFASIRAFRMKLNPEKCTFGVPSGKLLGFMVSHRGIQANPEKVTAILNMKPPSTQKDVQKLTGCMAALSRFVSRLGERGMPFFKLLKKTDNFQWGPEAQKAFEDFKQLLTKPPVLASPHPQEPLLLYVSATSQVVSTVLVVEREEEGHVQKVQRPIYFVSEVLADSKTRYPQVQKLLYGILITIRKLSHYFQGHSVTVVTSFPLGDVLHNREANGRIAKWALELMSLDISFKPRTSIKSQALADFVAEWTECQEDTPVEKIEHWTMHFDGSKRLSGTGAGVVLISPTGERLSYVLWIHFSASHNVAEYEALLHGLRIAISLGIKRLIVRGDSQLVVNQVMKEWSCIDDNMMAYRQEVRKLEDKFDGLELSHVLRHNNEAADRLANFGSKREAAPSDVFVEHLYTPTVPHKDATQVTGTHDVAMVEADWREPFIRFLTSQELPQDKDEAERISRRSKLYVMHESELYKKSPSGILQRCVSLEEGRQLLKDIHSGICGNHAAARTIVGKAYRQGFFWPTAVSDADKIVRTCEGCQFFARQIHLPAQELQTIPLSWPFAVWGLDMVGPFKKAIGGYTHLFVAIDKFSKWIEAKPVITITADNARDFFINIVHRFGVPNRIITDNGTQFTGGVFKDFCEDFGIKICYASVAHPMSNGQVERANGMILQGIKARVFDRLKPYAGKWVQQLPSVLWSLRTTPSRATGQSPFFLVYGAEAMLPSEVEFESLRFRNFREERYEEDRVDDLHRLEEVREAALIQSARYLQGLRRYHNRNVRSRAFLVGDLVLRKIQTTRDRHKLSPLWEGPFIISEVTRPGSYRLKREDGTLVDNSWNIEHLRRFYA

SEQ ID NO: 149868 - protein, 573 aa, Oryza sativa
  Clone ID: PAT_MRT4530_50159C.1.pep
MKPAFFLLRLISLLHLALALCSGSGDFQFAYHGFTGTNLTLDGNATVMPDGILVLTSRKTNLKGHAFFPAPLQFRTSPDGTARSFSAAFVFAIISDYTDFCAHGMAFIVSPTKNFTTALPVGYLALLNVQNNGNTTNHLFAVELDTVQNTDFQDVNANHVGINVNNLHSLQSSPTSYYDDGNNGVFKNLTLFSREAMQVWVDYDGNTGQIDVALAPIKVAKPRKPLVSANFAMNGPAPPINIANLPKLPCFGPKPPSKVLVIVLPIATATVMLSLGTIATLLVLRHLRYAQLLEDWELEFGPHRFSYKDLYHATNGFKSKHLLGTGLYGQEDKPLRDWSQRFHIIRGVASGLLYIHEKWEKVVIHRDIKASNVLLDHQMNGCLGDFGLSRLYDHGTDPQTTHVVGTMGYLAPELIWTGKASKLTDVFTFGAFLLEITCGQRPVNDDSGRYNQEMLVDWVLDHFKKGSLNETVDLRLQGDCNTDEACRVLKLGLLCSHPSANLRPGMRQVMQYLDGDTPLPDLTSTNMSFSTMALMQNEGFDSYPMSYPSSAATIGTVSFLLGGRFSLGGSHLY

SEQ ID NO: 149869 - protein, 436 aa, Oryza sativa
  Clone ID: PAT_MRT4530_5015C.1.pep
MEALSRTERVGGGGGAMVEVAFASSAGSSAAAPRRLRGELVVRDAIPYAGVAPPPPALPLPQPQLQPQVQATTSGGGGGGKISPAVLFIIVILAVVFFISGLLHLLVRLLMKKQHRRGGGGGAAAGVSRSAAGDDAGGGGDAALQRQLQQLFHLHDSGLDQAFIDALPVFAYREIVVGGGGDGDKEPFDCAVCLCEFDAEDRLRLLPLCGHAFHLHCIDTWLLSNSTCPLCRGVLFVPGLTENNPMFDFDEGLEEGRLSEDCDNGFGYPGHKATEGMQTPGTEKRVFPVRLGKFKNVGTQGAVEGGGIGNANGAVLRREEGESSSSSLDARRCFSMGTYQYVLGTSELRVSLQPDRIRNGGGGVTRARPTGLSSVNAEIMEGKKICARNKGESFSVSKIWQWSNLKGKLPTGSDECSEAGSLPWMKRGGIGDTSNM

SEQ ID NO: 149870 - protein, 1133 aa, Oryza sativa
  Clone ID: PAT_MRT4530_50160C.1.pep
MARATALLCSSLLLLSCFYAQVSPGSSSSSRSTAMADEPALLSFKSMLLSDGFLASWNASSHYCSWPGVVCGGRHPERVVALQMSSFNLSGRISPSLGNLSLLRELELGDNQFTGDIPPEIGQLTRLRMLNLSSNYLQGSIPASIGECAELMSIDLGNNQLQGEIPAELGALKNLVRLGLHENALSGEIPRSLADLQSLGALSLFKNRLHGEIPPGLGNLTNLYHLLLAHNMLSGAIPSSLGMLSGLSWLELGFNNLTGLIPSSIWNVSSLTELNLQQNMLHGTMPPDVFNSLPHLQHLYINDNQFHGNIPVSIGNVSALSRIQIGFNSFGGIIPPEVGRLRNLTSLEAEHTFLEAKDQKGWGFISALTNCSKLQALFLGNNRFEGVLPVSISNLSVYLEYLYLDFNAISGSLPEEIGNLVRLEALLLHNNSFTGILPSSLGRLKNLQVLYIDNNKISGSIPLAIGNLTELNYFRLDVNAFTGRIPSALGNLTNLVELGLSSNNFTGSIPVEIFKIHTLSLTLDISNNNLEGSIPQEIGGLKNLVQFYADSNKLSGEIPSTLGECQLLQNISLQNNFLSGSVPSLLSQLKGLQILDLSNNNLSGQIPTFLSNLTMLSYLNLSFNDFSGEVPTFGVFSNPSAISIHGNGKLCGGIPDLHLPRCSSQSPHRRQKLLVIPIVVSLAVTLLLLLLLYKLLYWRKNIKTNIPSTTSMEGHPLISHSQLVRATDNFSATNLLGSGSFGSVYKGEINNQAGESKDIAVKVLKLQTPGALKSFIAECEALRNLWHRNLVKIITACSSIDNSGNDFKAIVFEFMPNGSLDGWLHPDNNDHTEQRYLNILERVSILLDVAYALDYLHCHGPAPVIHCDIKSSNVLLDSDMVARVGDFGLARILDEQNSVFQPSTNSILFRGTIGYAAPGVAGEPDRPQCSEVSAHPCSRRRQDTGSDAERCMRHARSASSGWWPATVRTLSCGHDFHEDCNIAKWLRDNKKACPVHSACNIQLYEYGAGNTVSTQGDIYSYGILVLETVTGKRPSDSEFTQGLSLCESVSLGLHGKVMDIVDNKLCLGIDQHDPETTDDFSSKQKIDCLISLLRLGLSCSQEMPSSRLSTGDIIKELHAIKESLLLEIEDTEK

SEQ ID NO: 149871 - protein, 114 aa, Oryza sativa
  Clone ID: PAT_MRT4530_50161C.1.pep
MALVGTSPYPPIYSSHPSIAREIIFLPFHLYSPRGTVSGTELVPHGTKLYQIQWPGFDTVSVAISLGQQATPRPVSHFRLTSLPVSSRFHQYHAFVLRFRHDFALPNRDNGLFV

SEQ ID NO: 149872 - protein, 398 aa, Oryza sativa
  Clone ID: PAT_MRT4530_50162C.1.pep
MVPALVQELLATVQEPPGRFVQPEQHRPDAAPPASFPIVDLGRLSSPSPDDDGGGDEAAKLRRALDSWGLLQVTNHGIEASLMDELMSASKEFFRQPLQMKREFSNLNDGEQFRAEGYGNDKVRSKDQILDWSDWIYLKVEPEDERNLALWPKHPSSFRDALHEFVVRCRRVKRDVLRAMARIAGLDDDDQHFVDQLGGRATVHARFNYYPPCPRPDLVMGIKPHSDGTVITVLLVARGADGLQVLRYGVWYSVPSSSTHALLINVGESTEPCAAAVPVVVVARGGCHRGRQVTAVLVRPFAAAVDRRSTAVVIKPKTAAASSSSPSPSVDLPPTFWSSRSRREKGRWLLGRVGGGQMGAAAAAGLGRQRRPATGGGSGPRQVAGCEREAAACGMRRT

SEQ ID NO: 149873 - protein, 465 aa, Oryza sativa
  Clone ID: PAT_MRT4530_50163C.1.pep
MVPALVQELLATVQEPPGRFVQPEQHRPDAAPPASFPIVDLGRLSSPSPDDDGGGDEAAKLRRALDSWGLLQVTNHGIEASLMDELMSASKEFFRQPLQMKREFSNLNDGEQFRAEGYGNDKVRSKDQILDWSDWIYLKVEPEDERNLALWPKHPSSFRDALHEFVVRCRRVKRDVLRAMARIAGLDDDDQHFVDQLGGRATVHARFNYYPPCPRPDLVMGIKPHSDGTVITVLLVARGADGLQVLRYGVWYSVPSSSTHALLINVGESTEPCAAAVPVVVVARGGCHRGRQVTAVLVRPFAAAVDRRSTAVVIKPKTAAASSSSPSPSVDLPPTFWSSVSSPRRALRPGALRSCRSVVRRRVCKPEPPPVVTSPLTSSGNGALRWIVLCEGYCHSSFLRYRGGIERSRREKGRWLLGRVGGGQMGAAAAAGLGRQRRPATGGGSGPRQVAGCEREAAACGMRRT

SEQ ID NO: 149874 - protein, 70 aa, Oryza sativa
  Clone ID: PAT_MRT4530_50164C.1.pep
AAAASGAAAAYVVDTDMPFVPRLFREMLGALPLPVGAGDDRATILDGLSMAIAVMVVATDAFFFVVLFEL

SEQ ID NO: 149875 - protein, 173 aa, Oryza sativa
  unsure (1)..(173): unsure at all Xaa locations
  Clone ID: PAT_MRT4530_50165C.1.pep
MVSRDVIASSAGDARDGGGRLAXYFGGGEDVRSRSTSGHGGWRQRHHQRVERNTVKKTIIYKSAAAGDDHSVGGGDGGWGRRRLRAWPMGKTTAAVECAVAVVVAAEGTDLGSGHGGWRRSRIRRLLEKKSAWAAEGDNLGSSESSAGARLRPAAPVHAERSEEEDRIARGEA

SEQ ID NO: 149876 - protein, 36 aa, Oryza sativa
  Clone ID: PAT_MRT4530_50166C.1.pep
SSSCCSAACSVIPSFPMLIYEKEDGWVSEASSMFSS

SEQ ID NO: 149877 - protein, 146 aa, Oryza sativa
  Clone ID: PAT_MRT4530_50167C.1.pep
ASRPTRPKDPQCGFLISSASRTGVSKVIFDTRNMNARWSYLCWHNKTVIMGTIFGSHRATPVDVCGNHWIRWNTLEVSCTPWELSSGRKLAVYTMLLTVDDSRACAVDAIIRCSTTWPTMVCHAGTVTVHNIGAVPCQGQKGTCSG

SEQ ID NO: 149878 - protein, 76 aa, Oryza sativa
  Clone ID: PAT_MRT4530_50168C.1.pep
FFLKKVWRNSQKIGKKKRARGEKNHGGGNHFSFTLLVRDSMENWRIFGRTNRKFGGKKKKKKKKKKKKKKKKKKNK

SEQ ID NO: 149879 - protein, 49 aa, Oryza sativa
  Clone ID: PAT_MRT4530_50169C.1.pep
TQDRFRTCTRHTKRAAQVERNPENPRHLSQDSARPSEEAVDRRAQPCLI

SEQ ID NO: 149880 - protein, 42 aa, Oryza sativa
  Clone ID: PAT_MRT4530_5016C.1.pep
FSPIQRTQRLISQAQTQTAAYGLLESDNWIHVHDYMNYATVY

SEQ ID NO: 149881 - protein, 140 aa, Oryza sativa
  unsure (1)..(140): unsure at all Xaa locations
  Clone ID: PAT_MRT4530_50170C.1.pep
MATRTRRRPAGDLPQXLRVSLAALRGSLVVAQDDHQAGTLDLWFLLAGDGGKVGPQHWSKLYTVTMPYHGRPFRLDGERAEPVVVLDDGRIVFWVWERRVSSRGGVMRVYDPNTGGQTDVAAEANCVHVGVYTGSLLRPR

SEQ ID NO: 149882 - protein, 624 aa, Oryza sativa
  Clone ID: PAT_MRT4530_50171C.1.pep
MSSSSNALVQHYYSCKPPPPPRLVLVPFFFSGSGSGTNNTASSPAAASSTHTHTHTADANAQLDAHLLSLLRDGHTDAAYHLFASNPSLPLSPVSASRLLAQLSYSSFSRASALLHRLRARQALHLLDANSLSLASSASARSNNPHLAYSLLLSMLRRGLLPDRRAYTAALARLPPSRALRLFDALLHHLRHHHNKTNSLPDTAAFNAALSACANAGDCIRFRHLFDQMPAWNAPPDALTYNVLIKIHDQQSCVLEDIVKPWEQEEVPLLPKAYPPNSRVYTTLMKGYMNAGRVQDVVAMLRAMRREGETSPASRPDHVTYTTVISTLVAAGDMERARAVLEEMGQAGVAASRVTYNVLIKGYCQQLQAGKAKELLAVDMAEAGIQPDVVTYNTLIDGCVLTDDSAGAVALFNEMRERGIAPSAVSYTTLMKAFAASGQPKLAHKVFDEMEKDPRVAVDRAAWNMLVEAYCRLGLLESAKKVVERMKARGVQPDVATYGSLAKGIAVARRPGEALLLWEEIKEKEVDGEVVEALADVCVRAALFRKALEMVARMEEMGVEPNKAKYKRMYVDLHSRMFTSKHASQARQDRRRERKRAAEAFKFWLGLPNSYYATDWRLQDDGLN

SEQ ID NO: 149883 - protein, 1937 aa, Oryza sativa
  Clone ID: PAT_MRT4530_50172C.1.pep
MGPVSGIDDLVFPPGQTFRFGSLDFVTNNFGKISLLDSESDQSGENQISAPFGLPNAAESYFKTISIESASNHSGEIASSPTSPDQDEGAYPPILMKLPDDLAAVSITTASPSRRPRRKSASTPISPSFREVGVILQPLGTVSTDQLDGHYSSPTVHSRPTDIVEYDEFTSRYNDPDLDDFDGSLDDNYTPLYFGVFMANNETEEQRQARENEARHETERRRLEEEHQAQEQERLRREQQERERTAKEAEDRRQRALEAGRRARDLIGQQDVEGTPVFRTPQQNAVAAITLLDTLLRENELNQSDHVVNILNQTKTMIAASRRAARGYHHSPDRHDDDLDGVAAFTDDLRRVDWPAGFKPTGIEKYDGTTNPESWLTVYGLAIRAAGGDSKAMANYLPVALADSARSWLHGLPRGTIGSWAELRDHFIANFQGTFERPGTQYDLYNVIQKSGESLRDYIRRFSELRNKISDITDDVIIAAFTKGIRHEELVGKFGRKPPRTVKLMFEKANEYAKAEDAVTASKQSGPSWKPKKDTPASGGGGSNNHKDRKRKPAELVATASHSSRQRSRVNTFDKIMNSQRPHHPNSNHVAKDCFVYKQFADQYTKTTRKNPDEEQSTSRKKDDGDTPAGFQDHRKELNHIFGGPLAYESKRKQKLTEREINAVQPDTPQYLRWSEIAIKFDRSDHPDRVVHPGRYPLVLDPVVRNVKLRRTLIDGGSALNILFAKTLDDMQIPRSELKPSNAPFHGVIPGLSATPLGQITLPVTFGTRENFRTENISFEVADFETAYHAILGRPALAKFMAVPHYTYMMMKMPGPRGVLSLRSDIKQAVTCDKESCDMAQTREMASAREDIRLAAATASEGEVPATKTSKSAESEAKTKKIPLDPSDPTKTANNKDIFAWKPSDMPGIPREVIEHSLHVKEDAKPIKQRLRRFAQDRKDAIKEELTKLLAAGFIKEVLHPDWLANPVLVRKKTGQWRMCVDYTDLNKSCPKDPFGLPRIDQVVDSTAGCELLSFLDCYSGYHQIRLKESDCLKTSFITPFGAYCYVTMPFGLKKAGATYQRMIQRCFSTQIGRNVEAYVDDVVVKTKQKDDLISDLEETFASIRAFRMKLNPEKCTFGVPSGKLLGFMVSHRGIQANPEKVTAILNMKPPSTQKDVQKLTGCMAALSRFVSRLGERGMPFFKLLKKTDDFQWGPEAQKAFEDFKKLLTEPPVLASPHPQEPLLLYVSATSQVVSSVLVVEREEEGHVQKVQRPIYFVSEVLADSKTRYPQVQKLLYGILITTRKLSHYFQGHSVTVVTSFPLGDILHNREANGRIAKWALELMSLDISFKPRISIKSQALADFVAEWTECQEDTPAEKMEHWTMHFDRSKRLSGTGAGVVLISPTGERLSYVLWIHFSASHNVAEYEALLHGLRIAISLGIKRLIVRGDSQLVVNQVMKEWSCLDDNMMAYRQEVRKLEDKFDGLELSHVLRHNNEAADRLANFGSKREVAPSDVFVEHLYTPTVPPKDTTQVAGTHDVAMVEADWREPLIRFLTSQELPQDKDEAERISRRSKLYVMHEAELYKKSPSGILQRCVSLEEGRQLLKDIHSGICGNHAAARTIVGKAYRQGFFWPTAVSDADKIVRTCEGCQFFARQIHLPAQELQTIPLSWPFAVWGLDMVCSFKKAVGGYTHLFVAIDKFSKWIEAKPVATITANNARDFFINIVHRFGVPNRIITDNGTQFTGGVFKDFCEDFGIKICYASVAHPMSNGQVERANGMILQGIKARVFDRLKPYAGKWVTQLPSVLWSLRTTPSRATGQSPFFLVYGAEAMLPSEVEFESLRFRNFREERYEEDRVDDLHRLEEVREAALIRSARYLQGLRHYHNRNVRSRAFLVGDLVLRKIQTTRDRHKLSPLWEGPFIISEVTRPGSYRLKREDGTIVDNSWNIEHLRRFYA

SEQ ID NO: 149884 - protein, 57 aa, Oryza sativa
  Clone ID: PAT_MRT4530_50173C.1.pep
MWRPRSCRRRCRCRVLATPATLCTAEEHSQGIRFVRAVNLDLRLSDSSISEFDPSSL

SEQ ID NO: 149885 - protein, 37 aa, Oryza sativa
  Clone ID: PAT_MRT4530_50174C.1.pep
MPAGFTITMLLEISIYTLTQAKIIMSYKLTVRLCGAE

SEQ ID NO: 149886 - protein, 1889 aa, Oryza sativa
  Clone ID: PAT_MRT4530_50175C.1.pep
MGSVSGIDDLVFPPGQTFRFGSLDFVTNNFGKISLLDSESDQSGENRISVPFGLPNAAESYFKTVSIELASNHSGGIASSPMSPDQDDEAYPPILMKLPDDLAAVSITTASPSRRPRRKSASTPISPSFREVGVILQPLGTVSTDQLDGYYSSPTVDSRPTDIVEYDEFSSRYNDADLDDFDGSLDDNHTPLYFGVFMADNETEEQRQARETEARRETERRRLEEERQAQEQERLRREQQERERTAKEAEDRRQRALEAGRRARDFIGQQDVEGTPIFRTPQQNAVAAITLLDTLLKENELNQSDHVVNNLNQTKTMIAASVPVNSESVRTPTGSRLPHFRSHDYRYPSLSITGAGSNRRSRGHDERSVHSPPDHHRERRVERPRSPPRRRPVDLRDTIIQRRAARGHHHSSDRHDDDLDGVAAFTDDLRRVDWPAGFKPTGIEKYDGTTNPESWLTVYGLAIRAAGGDSKAMANYLPVTLADSTRSWLHGLLRGTIGSWAELRDHFIANLQGTFERPGTQFDLYNVVQKSGESLRDYIRRFSEQRNKISDITDDVIIAAFTKGIRHEELVGKFGRKPPRTVKLMFEKANEYAKAEDAVTVSKQSGPSWKPKKDTPATGGGGSNNHKDRKRKPEELVATAIHSSRQRSRVNTFDKIMNSQCPHHPNSNHVAKDCFVYKQFAEQYTKTTRKNSDDEQSTSRKKDDGDTPVGFQDHRKELNHIFGGPLAYESKRKQKLTEREINAVQPDTPQYLRWSEIAIKFDRSDHPDRVVHPGRYPLVLDPVVRNVKLRRTLIDGGSALNILFAKTLDDMQIPRSELKPSNAPFHGVIPGLSATPLGQITLPVTFGTRENFRTENISFEVADFETAYHAILGRPALAKFMAVPHYTYMMMKMPGPRGVLSLRSDIKQAVTCDKESCDMAQTRETASAREDIRLAAATASEGEVPATKTSKSGESEAKTNKIPLDPSNPTKTANNKDIFAWKPSDMPGIPREVIEHSLHVKEDAKPIKQRLRRFAQDRKDAIKEELTKLLAAGFIKEVHHPDWLANPVLVRKKTGQWRMCVDYIDLNKSCPKDPFGLPRIDQIGRNVEAYVDDVVVKTKQKDDLISDLEETFASIRAFSMKLNPEKCTFGVPSGKLLGFMVSHRGIQANPEKVTAILNMKPPSTQKDVQKLTGCMAALSRFVSRLGERGMPFFKLLKKTDDFQWGPEAQKAFEDFKKLLTEPPVLASSHPQEPLLLKLSHYFQGHSVTVVTSFPLGDILHNREANGRIAKWALELMSLDISFKPRISIKSQALADFVAEWTECQEDTPAEKMEHWTMHFDGSKRLSGTGAGVVLISPTGERLSYVLWIHFSASHNVAEYEALLHGLRIAISLGIKRLIVRGDSQLVVNQVMKEWSCLDDNMMAYRQEVRKLEDKFDGLELSHVLRHNNEAADRLANFGSKREVAPSDVFVEHLYTPTVPHKDTTQVAGTHDVAMVEVDWREPLIRFLTSQELPQDKDEAERISRRSKLYIMHEAELYKKSLSGILQRCVSLEEGRQLLKDIHSGICGNHAAARTIVGKAYRQGFFWPTAVSDADKIVRTCEGCQFFARQIHLPAQELQTIPLSWPFAVWGLDMVGPFKKAVGGYTHLFVAIDKFSKWIEAKPVVTITADNARDFFINIVHRFGVPNRIITDNGRQFTGGVFKDFCEDFGIKICYASVAHPMSNGQVERANGIILQGIKARVFDRLKPYAGKWVEQLPSVLWSLRTTPSRATGQSPFFLVYGAEAMLPSEVEFESLRFRNFREERYEEDRVDDLHRLEEVREAALIQSARYLQGLRRYHNRNVRSRAFLVGDLVLRKIQTTRDRHKLSPLWEGPFIISAVTRPGSYRLKREDGTLVDNSWNIEHLRRFYA

SEQ ID NO: 149887 - protein, 1195 aa, Oryza sativa
  Clone ID: PAT_MRT4530_50176C.1.pep
MANYLPVALADSARSWIHVLPRGTIGSWAELRDHFIANFQGTFERPGTQFDLYNVIQKSEESLRDYIRRFSEQRNKISDITDDVIIAAFTKGIRHEELVDKFGRKPPKTRSRVNTFDKIMNSQCPHHPNSNHVAKDCFVYKQFAEQYTKTTRKNSDEEQSTSKKKDDGDPPAGFQDHRKELNHIFGGPLAYESKRKQKLTEREINAVQPDTPQYLRWSETAIKFDRSDHPDRVVHPGRYPLVLDPVVRNVKLRRTFIDGGSALNILFAKTLDDMQIPRSELKPSNAPFHGVIPGLSATPLGQITLPVTFGTRENFRTENICFEVADFETAYHAILRRPALAKFMAVPHYTYMMMKMPGPRGVLSLRSDIKQAVTCDKESCEMAQTREMASAREDIRLAATTASEGEVPATKESALVTFLQNNKDIFAWKPSDMPGIPREVIEHSLHVKEDAKPIKQRLRRFAQDRKDAIKEELTKLLAAGFIKEVLHPDRLANPVLVRKKAGQWRMCVDYTDLNKSCPKDPFGLPRIDQVVNSTAGCELLSFLDCYSGYHQIRLKESDCLKTSFITPFGAYCYITMPFGLKNAGATYQRKLLGFMVSRRGIQANPEKVTAILNMKPPSSQKDVQKLTGCMAALSRFVSRLGERGMPFFKLKKTDNFQWGPEAQKAFEDFKKLLTEPPVLASPHPQEPLLLYVSATSQVVSTVLVVEREEEGHVQKVQRPIYFVSEVLANSKTRYPQVQKLLYGILITTRKLSHYFQGHSVTVVTSFPLVDILHNREANGRIAKWALELMSLDISFKPRTSIKLADFVAEWTECQEDTPAEKMEHWTMHFDGSKRLSGTRAGVVLISPTGERLSYVLWIHFSASHNVAEYEALLHGLRIAISLGIKRLIVQGDSQLVVNQVMKEWSCLDDNMTAYRQKARKLEDNFDGLELSHVLRHNNEATDRPANFGSKREVAPSDVFVEHLYEPTVPQKETTQVADTHDIAMIEADWREPLIRFLTSQELLQDKDEAERISRRSRLYVIHEAELYKKSPSGILQRCVSLEEGRQLLKDIHSGICGNHAAARTIVGKAYRQVGGYTHLFVAIDKFSKWIEAKPVVTITADKARDFFINIVHRFGVPNRIITDNGTQFTGGVFKDFCEDFGIKICYASVAHPMSNGQVERANGMILQGIKARVFDRLKPYAGKWVEQLPSVLWSL

SEQ ID NO: 149888 - protein, 297 aa, Oryza sativa
  Clone ID: PAT_MRT4530_50177C.1.pep
MGCRSCDKPKMNYRKGLWSPEEDQRLRDYIVKHGLGCWSAVPAKAGLQRNGKSCRLRWINYLRPGLKRGMFSQEEEDIVINLQAKLGNKWSQIAMHLPGRTDNEVKNYWNSYLKKRVMQAQGSIPNNLAAAAAEVTSMSTTEPPSLHHHHHHPHHHQIKNSSGSTTTSHDQDANLSSGGSHGGISAPAPVAEPFDQQPKSFVFTGDWMPMSAAAAGQESYSISAQHWPASTASSGNVTPSHGGAFGDQMSGSYGALQQQHQSSAAAAPMAGGGGYFDLLNMGDIYGGFAATSDDLLF

SEQ ID NO: 149889 - protein, 1436 aa, Oryza sativa
  Clone ID: PAT_MRT4530_50178C.1.pep
CILESIWDATITDDVIIAAFTKGIRHEELVGKFGRKPPTTVKLMFEKANEYAKAEDAVTASKQSGPSWKPKKDTPATGGGGSNNHKDRKRKPEELVATAIHSSRQRSRVNTFDKIMNSQCPHHPNSNHVAKDYFVYKQFAEQYTKTTRKNSDEEQSTSRKKDDGDTPVGFQDHRKELNHIFGGPLAYESKRKQKLTKREINAVQPDTPQYLRWSEIAIKFDRSDHPDRVVHPGRYPLVLDPVVRNVKLRRTLIDGGSALNILFAKTLDDMQIPRSELKPSNAPFHGVIPGLSATPLGQITLPVTFGTRENFRTENISFEVADFETAYHAILGCPALAKFMAVPHYTYMMMKMPGPRGVLSLRSDIKQAVTCDKESCDMAQTREMASAREDIRLAAATASEEEVPATKTSKSGESEAKTKKIPLDPSNPTKTANNKDIFAWKSSDMPGIPREVIEHSLHVKEDAKPIKQRLRRFAQDRKDAIKEELTKLLAAGFIKEVHHPDWLANPVLVRKKTGQWRMCVDYTDLNKSCPKDPFGLPRIDQVVDSTAGYELLSFLDCYSGYHQIRLKESDCLKTSFITPFGAYCYVTMPFGLKNAGATYQRMIQRCFSTQIGRNVEAYVDDVVVKTKQKDDLISDLEETFASIRAFRMKLNPEKCTFGVPSGKLLGFMVSHRGIQANPEKVTAILNMKPPSTQKDVQKLTGCMAALSRFVSRLGERGMPFFKLLKKTDDFQWGPEAQKAFEDFKKLLTEPPVLASPHPQEPLLLYVSATSQVVSTVLVVEREEEGHVQKVQRPIYFVSEVLADSKTRYPQVQKLLYGILITTRKLSHYFQARNSIKSQALADFVAEWTECQEDTPAEKMEHWTMHFDGSKRLSGTGAGVVLISPTGERLSYVLWIHFSASHNVAEYEALLHGLRIAISLGIKRLIVRGDSQLVVNQVMKEWSCLDDNMMAYRQEVRKLEDKFDGLELSHVLRHNNEAADRLANFGSKREVAPSDVFVEHLYTPTVPHKDTTQVAGTHDVAMVAADWREPLIRFLTSQELPQDKDEAERISRRSKLYVMHEAELYKKSPSGILQRCVSLEEGRQLLKDIHSGICGNHAAARTIVGKAYRQGFFWPTAVSDADKIVRTCEGCQFFARQIHLPAQELQTIPLSWPFVVWGLDMVGPFKKAVGGYTHLFVAIDKFSKWIEAKPVVTITADNARDFFINIVHRFGVPNRIITDNGRQFTGGVFKDFCEDFGIKICYASVAHPMSNGQVERANGMILQGIKARVFDRLKPYAGKWVEQLPSVLWSLRTTPSRATGQSPFFLVYGAEAMLPSEVEFESLRFRNFREERYEEDRVDDLHRLEEVREAALIQSARYLQGLRRYHNRNVRSRAFLVGDLVLRKIQTTRDRHKLSPLWEGPFIISAVTRPGSYRLKREDGTLVDNSWNIEHLHRFYA

SEQ ID NO: 149890 - protein, 203 aa, Oryza sativa
  Clone ID: PAT_MRT4530_50179C.1.pep
MRMRESNEEEKKSVCVMDASGPLGHALVARLLRRGYTVHAATYPHHHHHPEEEYQQHPRLKLFRADPLDYHAIADAVHGCSGLFAIFNTPSSSQSQSHSCFLDEEEGMVEAEVRAAHNILEACAQTDTMERVVFNSSVTAVVWRPQPEEDDDAALQLDENTWSDLTFCRRFKLWHALAKTLSERTAWALAMDRGVDMVAINAG

SEQ ID NO: 149891 - protein, 65 aa, Oryza sativa
  Clone ID: PAT_MRT4530_5017C.1.pep
MVAEAILHRQWTRDIIQGALTIRSPAGKSFGGLGHCLDKVLAIARLTLAAPMDQDDLVDWWSSAR

SEQ ID NO: 149892 - protein, 127 aa, Oryza sativa
  unsure (1)..(127): unsure at all Xaa locations
  Clone ID: PAT_MRT4530_50180C.1.pep
IWSIAHNRGYGYSNSFTLARGAQLYPQNTIHRHVTVSSCAHDEHITTSSDCDKILHITXPNHPHHAXGFTPTPRKATGSPLMRRGEFGSWTTGHPGRPNSITPTLATXPRKGSSYTSDQVVTHSRLW

SEQ ID NO: 149893 - protein, 341 aa, Oryza sativa
  Clone ID: PAT_MRT4530_50181C.1.pep
MRMRESNEEEKKSVCVMDASGPLGHALVARLLRRGYTVHAATYPHHHHHPEEEYQQHPRLKLFRADPLDYHAIADAVHGCSGLFAIFNTPSSSQSQSHSCFLDEEEGMVEAEVRAAHNILEACAQTDTMERVVFNSSVTAVVWRPQPEEDDDAALQLDENTWSDLTFCRRFKAPIQVADYSLLMNCVRKKKNCTLWHALAKTLSERTAWALAMDRGVDMVAINAGLLTGPGLTAGHPYLKGAPDMYDHGVLVTVDVDFLADAHIAAYECPTAYGRYLCFNNAICRPEDAAKLAQMLISSAAAPRPPAPPSDELKVIPQRIHTKKLNKLMLDFTSGVYGDIN

SEQ ID NO: 149894 - protein, 467 aa, Oryza sativa
  Clone ID: PAT_MRT4530_50182C.1.pep
MAGHGHSRGWPDRPQRAAARSHWRRRAAGGTGSNGAQRGKRREETEAVREREVAELTEGHGDGESSRRREAAALHRSTMRRGSRQRKAATGRRVGKSGTRRSRRYGRCVAAAAGVKANGDRRRKKAAGERGWLGAAETGPRGAATGGEVGRRRGVVVARPAPVFVGRAGKMVEDVEGIVPTSLDASSGRRQNGKDRRAVPAGTCAEADSRRCGGGGCSRAVAATANGRADAASRRSGDEAPSGRSYGSSSSRRRDGSRHAHAHRDAFAAAAAYLDYIVDNADEFGGTRWAITKFSWDVKYAGVQILAAKLLLDGDPQAAAHRGVLEKYREKAEHYLCACLGRNINGADNVDRSPGGMLYVRQWNNLQYASSAAFLLTAYSHYLSSSSASASAALRCPGGAAAAAEMVSLARSQADYILGRNPLRLSYMVGYGRRYPARVHHRGASIVSHKEDGRFIGCVQGFDDWFG

SEQ ID NO: 149895 - protein, 41 aa, Oryza sativa
  unsure (1)..(41): unsure at all Xaa locations
  Clone ID: PAT_MRT4530_50183C.1.pep
NXXLNKVNSXIIAXXKHXSXIDHHNIRXKSXKKDSLGQIVP

SEQ ID NO: 149896 - protein, 2002 aa, Oryza sativa
  unsure (1)..(2002): unsure at all Xaa locations
  Clone ID: PAT_MRT4530_50184C.1.pep
MGSVSGIDDLVFPPGQTFRFGSLDFVTNNFGKISLLDSESDQSGENRISVPFGLPNAAESYFKTISIELASNHSGEIASSPMSPDQDDEAYPPILMKLPDDLAAVSITTASPSRRPRRKSASTPISPSFREVGVILQPLGTVSTDQLDGYYSSPTVDSRPTDIVEYDEFSSRYNDPDLDDFDGSLDDNYTPLYFGVFMADNETEEQRQARETEARRETERRRLEEERQAQEQERLRREQQERERTAKEAEDRQQRALEAGRRARDFIGQQDVEGTPVFRTPQQNAVAAITLLDTLLKENELNQSDHVVNILNQTKTMIAASVPVNSESVRTPTGSRLPHFRSHDYRHPSLSITGAGSNRRSRGHDERSVHSPPDHHRERRVERPRSPPRRRPVDLRDTIIQRRAARGHHHSPDRHDDDLDGVAAFTDDLRRVDWPAGFKPTGIEKYDGTTNPESWLTVYGLAIRAAGGDSKAMVNYLPVALADSARSWLHGLPRGTIGSWAELRDHFIANFQGTFERPGTQFDLYNVVQKSGESLRDYIRRFSEQRNKISDITDDVIIAAFTKGIRHEELVGKFGRKPPRTVKLMFEKANEYAKAEDAVTASKQSGPSWKPKKDTPATGGGGSNNHKDRKRKPEELVATAIHSSRQRSRVNTFDKIMNSQCPHYPNSNHVAKDCFVYKQFAEQYAKTTRKNSDEEQSTSRKKDDGDTPVEFQDHRKELNHIFGGPLAYESKRKQKLTEREINAVQPDTPQYLRWSEIAIKFDRSDHPDRVVHPGRYPLVLDPVVRNVKLRRTLIDGGSALNILFAKTLDDMQIPRSELKPSNAPFHGVIPGLSATPLGQITLPVTFGTRENFRTENISFEVADFETAYHAILGRPALAKFMAVPHYTYMMMKMPGPRGVLSLRSDIKQAVTCDKESCDMAQTREMASAREDIRLAAATASEGEVPATKTSKSGESEAKTKKIPLDPSNPTKTANNKDIFAWKPSDMPGIPREVIEHSLHVKEDAKPIKQRLRRFAQDRKDAIKEELTKLLAAGFIKEVHHPDWLANPVLVRKKTGQWRMCVDYTDLNKSCPKDPFGLPRIDQVVDSTAGCELLSFLDCYSGYHQIRLKESDCLKTSFITPFGAYCYVTMPFGLKNAGATYQRMIQRCFSTQIGRNVEAYVDDVVVKTKQKDDLISDLEETFASIRAFRMKLNPEKYTFGVPSGKLLGFMVSHRGIQANPEKVTAILNMKPPSTQKDVQKLTGCMAALSRFVSRLGERGMPFFKLLKKTDDFQWGPEAQKAFEDFKKLLTEPPVLASPHPQEPLLLYVSATSQVVSTVLVVEREEEGHVQKVQRPIYFVSEVLADSKTRYPQVQKLLYGILITTRKLSHYFQGHSVTVVTSFPLGDILHNREANGRIAKWALELMSLDISFKPRISIKSQALADFIAEWTECQEDTPAEKMEHWTMHFDGSKRLSGTGAGVVLISPAGERLSYVLWIHFSASHNVAEYEALLHGLRIAISLGIKRLIVRGDSQLVVNQVMKEWSCLDDNMMAYRQEVRKLEDKFDGLELSHVLRHNNEAADRLANFGSKREVAPSDVFVEHLYTPTVPHKDTTQVAGTHDVAMVEADWREPLIRFLTSQELPQDKDEAERISRRSKLYVMHEAELXEGRQLLKDIHSGICGNHAAARTIVGKAYRQGFFXPTAVSDADKIVRTCEGCQFFARQIHLPAQELQTIPLSWPFAVWGLDMVGPFKKAVGGYTHLFVAIDKFSKWIEAKPVVTITADNARDFFINSVHRFGVPNRIITDNGRQFTGGVFQDFCEDFGIKICYASVAHPMSNGQVERANGMILQGIKARVFDRLKPYAGKWVEQLPSVLWSLRTTPSRATGQSPFFLVYGAEAMLPSEVEFESLRFRNFREERYEEDRVDDLHRLEEVREAALIQSARYLQGLRRYHNRNVRSRAFLVGDLVLRKIQTTRDRHKLSPLWEGPFIISAVTRPGSYRLKREDGTLVDNSWNIEHLRRFYA

SEQ ID NO: 149897 - protein, 110 aa, Oryza sativa
  unsure (1)..(110): unsure at all Xaa locations
  Clone ID: PAT_MRT4530_50185C.1.pep
KTVTKIVRSLEYFRRFVSQLILVLLCLVFFYFFFNLICFSFIFYFISFFFLFLYYIIFTYISXSYFFFLFFTTYKYYSLYLTLLFFILIIISKYFYFLLYFYYIIYLFLY

SEQ ID NO: 149898 - protein, 224 aa, Oryza sativa
  Clone ID: PAT_MRT4530_50186C.1.pep
QAGRPWRGDDGARPPAVTGGAGRRRQPARRRRRQPKTTADARRAAALTGERKGRRKGDSSPRRWRRPAWEETSGDDRRRGGTDGRRRHPAREGRGAPVGFRRREAAAGKALAAAKLTAAAVWRGGDSSGGGSRPKAAASGGARGVTGVEKRGGGGSHRCRFRPRWPPPPTDSPADEADAVVAIDAAVERVSSPSRPTGRGRGGGTTVAAVSAAPRRRYAVPARR

SEQ ID NO: 149899 - protein, 51 aa, Oryza sativa
  unsure (1)..(51): unsure at all Xaa locations
  Clone ID: PAT_MRT4530_50187C.1.pep
WESSSLIKGSCVGPKERVVTHPQSMLKHTSCLALEYIXLEFFYTLSKFGDG

SEQ ID NO: 149900 - protein, 1433 aa, Oryza sativa
  Clone ID: PAT_MRT4530_50188C.1.pep
MGSVSGIDDLVFPPGQTFRFGSLDFVTNNFGKISLLDSVSVQSGENQISVPFGLPNAAESYFKTISIESASNHSAEIASSPTTPDRDDGAYPPAEVGFYTDFACFREVGVILQPLGTVSTDQLDGYYSSPTVDSRPTDIVEYDEFSSRYNDPDLDDFDESLDDNYTPLFFGVFMANNETEEQRQARETEVRRETERRRLEEEHQAQEQERLRREQQERERTAKEAEDRRQRALEAGRRARDLIGQQDVEGTPVFRTPQQNAVAAITLLDTLLKENELNQSDHVVNILNQTKTMIAASVPVNSESVHTPTGSRVPHFRSHDYRHPSLSITGAGSNRRSRGHDERSIHSPPDHHRERRVERPRSPPRRRPVDLRDTIIQRRAARGYHHSPDRHDDDLDGVAAFTDDLRRVDWPAGFKPTGIEKYDGTTNPESWLTVYGLAIRAAGGDSKAMANYLPVALADSARSWLHGLPRGTIGSWAELRDHFIANFQGTFERPGTQYDLYNVIQKSGESLRDYIRRFSEQRNKISDITDDVIIAAFTKGIRHEELVGKFGRKPPRTVKLMFEKANEYAKAEDAVTASKQSGPSWKPNKGTPATGGGGSNNNKDRKRKPVELVATATHSSRQRSRVNTFDKIMNSQCPHHPNSNHVAKDCFVYKQFAEQYTKTTRKNSDEEQSTSRKKDDGDTPAGFQDHRKELNHIFGGPLAYESKRKQKLTEREINTVQPDTPQYLRWSEIAIKFDRSDHPDRVVHPGRYPLVLDPVVRNVKLRRTLIDGGRLSATPLGQITLPVTFGTRENFRTENISFEVADFETAYHAILGRPALAKFMAVPHYTYMMMKMPGPRGVLALRSDIKQAVTCDKESCDMAQTREMASAREDIRLAAATASEGEVPATKISKSGESEAKTKKIPLDPSDSTKTVVIGAEEVIEHSLHVKEDAKPIKQRLRRFAQDRKDAIKEELTKLLAACFIKEVLHPDWLANPVLVRKKTGQWRMCADYTDLNKSCPKDPFGLPRIDQVVDSTAGCELLSFLDCYSGYHQIRLKESDCLKTSFITPFGAYCYVTMPFGLKNAGATYQRMIQRCFSTQIGRNVEAYVDDVVVKTKQKDDLILDLEETFASIRAFRMKLNPEKCTFGVPSGKLLGFMVSHRGIQANPEKVTAILNMKPPSTQKDVQKLTGCMAALSRFVSRLGERGMPFFKLLKKTDNFQWGPEAQKAFEDFKKLLTEPPVLASPHPQEPLLLYVAATSQVVSTVLVVEREEEGHVQKVQRPIYFVSEVLSDSKTRYPQVQKLLYGILITTRKLSHYFQGHSVTVVTSFPLGDILHNREANGRIAKWALELMSLDISFKPRISIKSQALADFVAEWTECQEDTPAEKMEHWTMHFDGSKRLSGTGAGLSLTADDFLDRENAVRHHLLQGLGKMARVPAGKTKRRFNLGISC

SEQ ID NO: 149901 - protein, 1963 aa, Oryza sativa
  Clone ID: PAT_MRT4530_50189C.1.pep
MGPVTGIDDLVFPPGQAFRFGSLDFITSNFGKISLLDSESNQSGENRISVPFGFPNAAETYFKTISLESASNHSAEIASSPTTPDQDDGAYPPVLMKLPDDLAAVFTTTASSSRRPRRKSASTPISPSFREVGVILQPLGTVSTDQLDDYNSSPTVDSRPTDIVEYDEFSSRYHDPDLDDFDGSLDDNYTPLYFGVFMANNETEEQRQARETEERRRLEEERQAQEQERLRREQQDRERIAKEAEDRRQRALEAGRRARDLIGQQDVEGTPVFRTPQQNAVAAITLLDTLLNQNELNRSDHVVNILNQTKTMIAASVPVNSESVHTPTGSRVPHFRSQDYRHPSLSITGAGSNRRSRGHDERSVHSPPDLHRERRVERPRSPPRRRPIDLRDTIIQRRAARGYHHSLDRHDDDLDGVAAFTDDLRRVDWPAGFKPTGIEKYDGTTNPESWLTVYGLAIRAAGGDNKAMANYLPVALADSARSWLHGLPRGTIGSWAELRDHFIANFQGTFERPGTQYDLYNVIQKSGESLREYIRRFSEQRNKISDISDDVIIAAFTKGIRHEELVGKFGRKPPRTVKLMFEKANEYAKAEDAVTASKQSGPSWKPKNTPATGGGGSNNHKDRKRKPEELVATAAHSSRQRSRVNTFDKIMNSQCPHHPNSNHVAKECFIYKQFAEQYTKSTRKNSDEEQSTSRKKDDGDTPAGFQDHRKELNHIFGGPMAYESKRKQKLTEREINAVQPDTPQYLRWSEIAIKFDRSDHPDRVVHPGRYPLVLDPVVRNVKLRRTLIDGGSALNILFAKTLDDMQIPRSELKPSNAPFHGVIPGLSATPLGQITLPVTFGTRENFRTENISFEVADFETAYHAILGRPALAKFMAVPHYTYMMMKMPGPRGVLSLRSDIKQAVTCDKESCDMAQTREMASAREEIRLAATTESALITFLQNNKDIFAWKPSDMPGIPREVIEHSLHVKEDAKPIKQRLRRFAQDRKDAIKEELTKLLAAGFIKEVLHPDWLANPVLVRKKTGQWRMCVDYTDLNKSCPKDPCGLPRIDQIRLKESDCLKTSFITPFGAYCYVTMPFGLKNAGATYQRMIQRCFSTQIGRNVEAYVDDVVVKTKQKDDLISDLEETFASIRAFRMKLNPEKCTFGVPSGKLLGFMVSHRGIQANPEKVTAILNMKPPSTQKDVQKLTGCMAALSRFVSRLGERGMPFFKLLKKTDNFQWGPEAQKAFEDFKQLLTKPPVLASPHPQEPLLLYVSATSQVVSTVLVVEREEEGHVQKVQRPIYFVSEVLADSKTRYPQVQKLLYGILITTRKLSHYFQGHSVTVVTSFPLGDVLHNREANGRIAKWALELMSLDISFKPRTSIKSQALADFVAEWTECQEDTPAEKIEHWTMHFDGSKRLSGTGAGVVLISPTGERLSYVLWIHFSASHNVAEYEALLHGLRIAISLGIKRLIVRGDSQLVVNQVMKEWSCIDDNMMAYRQEVRKLEDKFDGLELSHVLRHNNEAADRLANFGSKREAAPSDVFVEHLYTPTVPHKDTTQDADTHDIAMVEADWREPFIRFLTSQELPQDKDEAERISRRSKLYVMHESELYKKSPSGILQRCVSLEEGRQLLKDIHSGICGNHAAARTIVGKAYRQGFFWPTAVSDADKIVRTCEGCQFFARQIHLPAQELQTIPLSWPFAVWGLDMVGPFKKAVGGYTHLFVAIDKFSKWIEAKPVVTITADNARDFFINIVHRFGVPNRIITDNGTQFTGGVFKDFCEDFGIKICYASVAHPMSNGQVERANGMILQGIKARVFDRLKPYAGKWVQQLPSVLWSLRTTPSRATGQSPFFLVYGAEAMLPSEVEFESLCFRNFREERYEEDRVDDLHRLEEAREAALIQSARYLQGLRRYHNRNVRSRAFLVGDLVLRKIQATRDRHKLSPLWEGPFIISEVTRPGSYRLKREDGTLVDNSWNIEHLRRFYA

SEQ ID NO: 149902 - protein, 55 aa, Oryza sativa
  Clone ID: PAT_MRT4530_5018C.1.pep
MTVAAGQIQSMKKTQVDRIQARSERPMERRQQHACGDGTNEARNSQAWLRSAFCT

SEQ ID NO: 149903 - protein, 55 aa, Oryza sativa
  Clone ID: PAT_MRT4530_50190C.1.pep
NELRMNYNSAFSLGLFAPCHKMFLSVSCFINQLGRIPKTLFIVCTWCPVGHSAFF

SEQ ID NO: 149904 - protein, 79 aa, Oryza sativa
  Clone ID: PAT_MRT4530_50191C.1.pep
VCTIIVCPKVIHFCGCSDQWVVCPSHVEMLNPSSPGFMYPSAVRISSVDDAMAIVIIQTLVISAYVVVMQFRPPAVFYT

SEQ ID NO: 149905 - protein, 809 aa, Oryza sativa
  Clone ID: PAT_MRT4530_50192C.1.pep
MAAARACLVVALLLLVALFSPSEATSSTSLRRRQVRSLLKRLNKPPLATFQSLDGDIIDCVHISNQPAFDHPLLKDHTIQMRPSIQPSGLYGEATRPFTQTWNQNGEKCPDNTIPIRRTKEEDVMRATSVTTFGKKTHGGSPHPHSHLGGVTDGHHYGVAYATGDSNYYGTKVTINVWQPTIATFGDFSLSQLWITAGSYENKDLNTIEAGWQTNPQFVIGGSLSPVSIYGSTQYEYDYLVWKDPAGGNWWLQLQGNYVGYWPSSIFTLLQTGVADTVEWGGEVYSPQITAPMGSGHFPEEGFGKATYSRAIQVVDSSNHLKPPNVVLRNSNKRFTYEATPLGQMEDMEGYTKNTKTIVQDEESYTRKTRGYTLRASNSSASLYQSIMFQGAQHASGEEDEPSRTNREQSREALPKNLIAAFSLFRTSKAEVSETCSPDRREDVEARWSVLGGGGAPDPPGGYRLAIGSYFVYFFGAATDSLHSIILSSRTIQSRPSILPSGMYDEAAHPFTQTWNQNGEKCPDNTIPIRRTKEEDVMRATSVTTFGKKTHNGSPHSHLAGVTDGHHYGVAYATGNAKYYGTKVTINVWKPKIATSRDFSMAQLWITAGSYANKDLNTIEAGWQVYPAMYGDDKTRLFIYWTRDAYNRTGCYNLACSGFIQTNPQFVIGGSISPVSIYGGTQYDPARGNWWLQVQGKYVGYWPSSIFTRLRTGVADTVEWGGEVYSPRITTPMGSGHFPEEGFGRATYSRAIQVVDSSNHLKPPKGVGLIAPLPNCYNVIAGSSSTTNWGTYIYYGGPECPRNSQIEVM

SEQ ID NO: 149906 - protein, 409 aa, Oryza sativa
  Clone ID: PAT_MRT4530_50193C.1.pep
MAAARTWSRRGLVALLLLAMIFPSLLSPSDATSTYLRRRQVLKRLNKPPLATIQSPDGDIIDCVHISRQPAFDHPLLKDHTIQMQPSSQPSGLYGEATRPFTQTWNQNGEKCPDNTIPIRRTKEEDVMRATSLTTFGKKTHDMSSHPHSHLAGVTSGHYYGVAYATGDANYYGTKVTINVWQPTIATSGDFSLSQLWISAGSYDNKDLNTIETGWQVYPAMYGDDKTRLFIYWTRDAYNETGCYNLACSGFIQTNPQFVIGGSISPVSTYGDTQYEYDYLVWKDPAGGNWWLQVQGNNVGYWPSSIFTLLQTGVADSVEWGGEVNSPQITTPMGSGHFPEEGFGKATYSRAIQVVDSSNNLKPPNGVGLIAPLPSCYNVMTGSSSTTSWGTYIYYGGPGCPQNSQIEVM

SEQ ID NO: 149907 - protein, 735 aa, Oryza sativa
  unsure (1)..(735): unsure at all Xaa locations
  Clone ID: PAT_MRT4530_50194C.1.pep
MRGAVLVAVAAAIGNYLQGWDNATIAGAVLYIKREFALETQPAVEGLVVAMSLIGATIITTFSGPVSDLVGRRPMLIASSLLYFAGGLIMLWSPNVYVLLLARLVDGFGVGLAVTLVPVYISETSPPEIRGRLNTLPQFTGSGGMFMSYCMIFAMTLSPSPNWRIMLGVLFVPSLLYLFVTVFYLPESPRWLVSKGRMKEARVVLEMLRGRXDVSGEMALLVEGLGTGGDTEIEDYVVGPGXSWVAQPVAGGRGSMLGSSLGLQASRHGSMYEQMKDPVVALLGSVHERLPESGGGATXSMRGSTLFPNLGSMLSVNDRPGGSSWDEENVQPGDDDLDEEEEEYLSDDGKDDDDGGGLQAPLLSRQSTDVETKNEPASGQVAMQRHSSIGGGGGVETASTMGIGGGWQLAWKWTENVGPDGVKRGAVKRMYLHEESEAAPGGDSGAAGDAQSTAYVHAAALVSRSMLYTKDVLIGQSPTEPAFANPPEAVAAAASTGPAWRELLEPGVRHALFCGVTIQILQQFSGINGVLYYTPQILDQAGVSVLLASLGLSGDSTSILISGLTTLLMLPSIGVAMRLMDASGRRALLLWTLPVLVASLAVLVVANVVPMAATAHAALSTGSVIVYFCCFVMGFGPIPNILCAEIFPTRVRGLCIAICSLTFWLGDIAVTYSLPVMLSSVGLAGVFSFYAAVCCVALVFVALKVPETKGLPLEVIIEFFNVGAKAGTLPDEEFH

SEQ ID NO: 149908 - protein, 125 aa, Oryza sativa
  Clone ID: PAT_MRT4530_50195C.1.pep
MPNPRYRKIVSETIFFFPSIHGAHLPRLLTALGLEAARGPGAAYLQPPLVSFPPSVTAGLHPATAAAARHLSFLASDSPVAGEGKVEGNSPDIKKQRCRAQLLVLLLAKINFFVGFVPTLKVHLI

SEQ ID NO: 149909 - protein, 55 aa, Oryza sativa
  Clone ID: PAT_MRT4530_50196C.1.pep
ANLRHPCSVLNRNELLISTWSIDHATPSLFASGEIDPVHGHLCGLGVEAHRIMEE

SEQ ID NO: 149910 - protein, 43 aa, Oryza sativa
  Clone ID: PAT_MRT4530_50197C.1.pep
KRRGRPRLTPSRGLGADKVGPGVSPRVGPTGGDRRRRCVWCGA

SEQ ID NO: 149911 - protein, 392 aa, Oryza sativa
  Clone ID: PAT_MRT4530_50198C.1.pep
MALAMPSCCSRSESSRRGGGDWHAAPEVRAGAGGYPAQLPRDLAEVPPDHVPRGRPPVGLVPLVRRAVAERGEEPGRARAVGAPGEAGAAAVERGLGGPEAERAQLAAPAGAVPRGGVARLGRAELEVRGRRRRRARPPTTAANVEDPLLSSDSDPDSALDAGAEAEQHDRSRSKNGPSSSPYQPPPPHGVAGAVAVIVDTARRRNRRAASSRRTFMCAAAGVRDGGARQVGVISGRCGGVVVLVGGGRRRGGGSLLNGSGKGRSGGGGRARDLRKALLGFLGEFFHVSAVFAVRSVEADGIRGVSRFRQATWVGWLGAVWVASRGVAWRGRCVAVVVGVRRTGRGWQGERACARAARCVAVAASFERDAARLRGVAGVRACGRAVAQKSVN

SEQ ID NO: 149912 - protein, 228 aa, Oryza sativa
  Clone ID: PAT_MRT4530_50199C.1.pep
MDARWSDSLQCAMALAMPSCCSRSESSRRGGGDWHAAPEVRAGAGGYPAQLPRDLAEVPPDHVPRGRPPVGLVPLVRRAVAERGEEPGRARAVGAPGEAGAAAVERGLGGPEAERAQLAAPAGAVPRGGVARLGRAELEVRGRRRRRARPPTTAANVEDPLLSSDSDPDSALDAGAEAEQHDRSRSKNGPSSSPYQPPPPHGVAGAVAVIVDTARRRNRRAASSRRTF

SEQ ID NO: 149913 - protein, 153 aa, Oryza sativa
  unsure (1)..(153): unsure at all Xaa locations
  Clone ID: PAT_MRT4530_5019C.1.pep
FFSWLVIQNRVXTADRLXKEGWQNQKVCPLCGTVDVNSSSAXLNAKCRVTKIVWSEIXRWTSKDLQTAKXKDCYSVKHWWNLVLESPDNLRKPLKTLVILVSXEIWCERMQELFATNAATPASILAKIKEEVAAWVKAGAVRLREFEILGDIA

SEQ ID NO: 149914 - protein, 704 aa, Oryza sativa
  Clone ID: PAT_MRT4530_501C.1.pep
MQTLEHLLRIIDGFTRGEEDSKRWQAIQVEYDKASVTTAQAQQQVQVAEPPPLVVRQPQPAIQAQPPRQEDAEGVTFPHQDPLVISAEIAGFEVRRILVDGGSSTDVIFAEAYAKMGLTTQALTPAPTSLRGFGGEAVQVLGQAQLIVAFGTGENRREEQVLFDVVDIPYNYNAIFGRATLNKFEVISHHNYLKLKMSGPAGVIVIKGLHPSAASKGDLAIINKAVHNVEAEPHDRAKHVPKPAPHGKIIKMQIDDADPIKLVSLGGGDMGEEEAKNILEVLKKNIDIFAWGPDEVGGVSADLIMHHLAVKPDAKPRKQKLCKMSADRQEAAKAEVQKLLKAGVIQEIDHPEWLANSVLVRKSNGKWRMCVDFTDLNKACPKDDFPLPRIDRLVDSTAGCELMSFLDAYSGYHQIRMNPADIPKTAFITPFGTFCHLRMPFGLRNAGATFARLVYKVLYKQLGQNVEAYVDDIVVKSRKAFDHASDLQETFDNLHAAAELSPFDLHFVARTAVKSQVLADFVAKWTPAFAPEPELVKQPWVMYSNGSWSHKGAGGAAVVTSPNGVPIRYAARLQFDTTNNAAEYEAILLGLRKAKALGIRRLLIRTDSKLVAGYVDKSFEAKEEGMKRYLDAVRSMEKCFTGITVEHLPRGQNEKADTLAKSAACGGLHSPGILFEVLYAPSVPMDSLEVLAIDHVKLSKDPYD

SEQ ID NO: 149915 - protein, 78 aa, Oryza sativa
  Clone ID: PAT_MRT4530_50200C.1.pep
RPPAGLWRRGLTERVREAAGSGEEGDPSSVHPSSTSTPLPTPSRRHLDAIRLLRPCFSLEAANQDPPPPPCSALPTAP

SEQ ID NO: 149916 - protein, 85 aa, Oryza sativa
  unsure (1)..(85): unsure at all Xaa locations
  Clone ID: PAT_MRT4530_50201C.1.pep
SIWDATQPKKVTQVRSFLGLAGYYRRFIENFSKIARPMTQLLKKVEKFVXGPQGKRRSQLSKEKLVSWPVLFLPDTHKDFLVYCD

SEQ ID NO: 149917 - protein, 68 aa, Oryza sativa
  unsure (1)..(68): unsure at all Xaa locations
  Clone ID: PAT_MRT4530_50202C.1.pep
TRACHXRGFDLGTAAAHLPYTPPPPPPPSIFTCTNKKYNSTPRPCGTLYCACPPARELIGRLQPDKKN

SEQ ID NO: 149918 - protein, 84 aa, Oryza sativa
  unsure (1)..(84): unsure at all Xaa locations
  Clone ID: PAT_MRT4530_50203C.1.pep
MGRRRGGAQTGETERAKVRAEGCVETEDEALEERVYEKDLEPRYDMGRVSPAGTPTFGVTQSVKDWWEMLVSVSGVPRRXLCTL

SEQ ID NO: 149919 - protein, 169 aa, Oryza sativa
  Clone ID: PAT_MRT4530_50204C.1.pep
MAPPGQLLPLARSLLPLSAPPFVSGRRRRLPTLVLGRALPPPTWLPHGRLSPAHPLPFAPPRRLSRPPPPATSLPGASPGGGAEAQAVLAEFVTSERVKVAAMLGLALALCNADRVVMSVAIVPLSQAYGWTPSFAGVVQSSFLWGYLVSPIIGGALVDYYCGKRVMGY

SEQ ID NO: 149920 - protein, 32 aa, Oryza sativa
  Clone ID: PAT_MRT4530_50205C.1.pep
HYQALRKDMAICESSIDIIKVTAASVVPVHLV

SEQ ID NO: 149921 - protein, 141 aa, Oryza sativa
  Clone ID: PAT_MRT4530_50206C.1.pep
MWLLAAVGEAGSDGQALKAVASYGGKFMAGQSGGLTDDGGDGGDGAVGRNPCPCHQHPFATSLYLLLLRYTSRCRRRALPPSPTSSGAFEVNRVAPVTPLSGAACLLILSLTRLQDLNHSALAAIEQAHVTIVPCSWGRRY

SEQ ID NO: 149922 - protein, 79 aa, Oryza sativa
  Clone ID: PAT_MRT4530_50207C.1.pep
KCPLWSEFYFFFFKVFFIPIRKLKGFPAILKGFGSFFFGGGVFTQIFVPWGDPRNFGGGPGGVHIFFLLEVFKVWDNKG

SEQ ID NO: 149923 - protein, 289 aa, Oryza sativa
  Clone ID: PAT_MRT4530_50208C.1.pep
MQSFLEIHSDFFPFPFRDLKGLEQSSGSLMFCFDSLTNIAECDEFGYFSSHAGPPEFLFEVLEKQSLTSAKGEAGADTWAPHVSGFKGRAHGGPSPPWMRRHRGPRPRVVHGRRHRKARSRLASRPDKAAAAHGRTTTTGDGTGAGEARAERGGGAPATGGANRGAAKGRRDLRKVMGGLGERGVAGNSEERWSEATRGGAEAHLARGERSLGSGWRGRSGGRASSRPCEAEGGDEPARRGVHCPPRAAEGDNGKSGSGSRWGGGSGGGTGERSGGRGRARRGDASGGG

SEQ ID NO: 149924 - protein, 601 aa, Oryza sativa
  Clone ID: PAT_MRT4530_50209C.1.pep
MANKSKSAAASPSSSSSPSVALGLDATTPTTSPLPLAPAAAASSSNPNATPADTTPTSPPPASPPLPSATPPLAASPPPPPPPPPPRNSPSPPKPPSQAAQSPLPPTTTTTTPPTAPVPAAAPPPTAPSPYSAPSPTPTPTHTQPRPSPPLLPTPATAADPANPNKARHPSSNKSSSPAAPRRTNSSSSPPNLAIAVGAVLAILVLSLLGAAIWYTTKKKKKQRRRDNGYRAGFMSPTSPLSSHHPSSGSGASANVGSSLDPSFKTNYSAGSPKLKACMSDISMGNSRFFTYQELYQITDAFSAHNLLGEGGFGSVYKGHLPDGKQVAVKQLKDGGGQGEREFQAEVEIISRVHHRHLVSLVGYCISNNQRLLVYDFVPNNTLHYHLHGHPRIIHRDIKSSNILLDNNFEAHVADFGLARLALDAVTHVTTRVMGTFGYMAPEYASSGKLTERSDVFSFGVVLLELITGRKPVDASRPLGDESLVEWARPLLTQAIETGNLEELVDPRLERNFNEAEMFRMIEAAAACVRYSASRRPRMSQVVRALDSLADIDLTNGVQPGQSELFNVANTAEVRMFQRMVLGNHDDSSDMSQYGWSSSRQ

SEQ ID NO: 149925 - protein, 357 aa, Oryza sativa
  Clone ID: PAT_MRT4530_5020C.1.pep
MRRITWLATAAAALCCLVAAASATAQCRFPAVFNFGDSNSDTGGFWAAFPAQQAPFVQATGLPLLSPYLQSVGSGYRHGANFATLASTALQPNTSLFVTGISPFFLAVQLNQRKELRTKVLTSNGNNDQLPAPDVLHNALYTIDIGQNDLTSNLGSQSIETVKQSLPSVVSKISSTVQELYNIGARNIMVFNMAPIGCYPAFLTKLPHTSNDMDGYGCMKTYNSAVTYYNELLNNSLAEVRKKLQDASIVYLDKHAVTLELFRHPKAHGLKYGTKACCGYGDGAYNFNPDVYCGSSKLLNGQTVTAKACADPQNYVSWDGIHATEAANKIIASSLMSGSYSYPPFDLSKLCHLQPIA

SEQ ID NO: 149926 - protein, 339 aa, Oryza sativa
  unsure (1)..(339): unsure at all Xaa locations
  Clone ID: PAT_MRT4530_50210C.1.pep
ILQLDLVDPTVNVSHSLGILSMPIPQTNAHFPIIQYADDTLIIMKTDQKELFCLKALLNTYTLCTGLKINFHKSCMIPTNTYSQKLKILAGTFGCTIGALPFTYLGRPMVTTKXKKIIDFAPLIDKIERRLPSTTXFLNHGQRLTMVNSVLSSFPTYYMCILHLPKKVIXHIDRARRHYLWRKSNTLETKTHCLATXDLVCKPKKKGGLGIINLELENTALLIKHLDKFYNKKDMSWVHLIWNKYYSHSTIPPHKEKGSFWXKDIFRLTPLFRAITFVHIGSGETTLFWKDKWNNSCLQNKFSILFSYAKNEDISVQDFLSIHEFKHNFHIPLSNQAMQ

SEQ ID NO: 149927 - protein, 79 aa, Oryza sativa
  Clone ID: PAT_MRT4530_50211C.1.pep
GGRSAKGGLRRELPHGVVEAGGRGRYPPVGEVERARRPRCPPAPRASTRFLESVARTKKWAPQEKPLAAESESYAAAAT

SEQ ID NO: 149928 - protein, 37 aa, Oryza sativa
  Clone ID: PAT_MRT4530_50212C.1.pep
MDKALVYGTRDSGAKISALNHDQEPGSRKSTCHGLQR

SEQ ID NO: 149929 - protein, 1964 aa, Oryza sativa
  Clone ID: PAT_MRT4530_50213C.1.pep
MGSVTGIDDLVFPPGQTFRFGSLDFVTNNFGKISLLDSESDQSGENRLPVPFGFPNAAESYFKTISIESASNHPAEIAFSPTTPDQDDGAYPPILMKLPDDLAAVFTTTASSSRRPRRKSASTPISPSFREVGVILQPLGTVSTDQLDDYNSSPTVDSRPTDIVEYDEFSSRYNDFDDFNDFDGSLDDNYTPLYFGVFMANNETEEQRQARETEERRRLEEEHQVQEQERLRREQQDRERIAKEAEDRRQRALEAGRRARDLIGQQDVEGTPVFRTPQQNAVAAITLLDTLLNQNELNRSDHVVNILNQTKTMIAASVPVNSESVHTPTGSRVPHFRSHDYHHPSLSITGAGSNRRSRGHDERSVHSPPELHRERRVERPHSPPRRRPIDLRDTIIQRRAARGYHHSPDRRDDDLDGVAAFTDDLRRVDWPAGFKPTGIEKYDGTTNPESWLTVYGLAIRAAGGDNKAMANYLPVALADSARSWLHGLPRGTIGSWAELRDHFIANFQGTFERPGTQYDLYNVIQKPGESLRDYIRRFSEQRNKISDITDDVIIAAFTKGIRHEELVGKFGRKPPRTVKLMFEKANEYAKAEDAVTASKQSGPSWKPKNTPATGGGGSNNHKDRKRKPEELVATAAHSSRQRSRVNTFDKIMNSQCPHHPNSNHVAKECFIYKQFAEQYTKSTRKNSDEEQSTSRKKDDGDTPAGFQDHRKELNHIFGGPMAYESKRKQKLTEREINAVQPDTPQYLRWSEIAIRFDRSDHPDRVVHPGRYPLVLDPVVRNVKLRRTLIDGGSALNILFAKTLDDMQIPRSELKPSNAPFHGVIPGLSATPLGQITLPVTFGTRENFRTENISFEVADFETAYHAILGRPALAKFMAVPHYTYMMMKMPGPRGVLSLRSDIKQAVTCDKESCDMAQTREMASAREEIRLAATTESALITFLQNNKDIFAWKPSDMPGIPREVIEHSLHVKEDAKPIKQRLRRFAQDRKDAIKEELTKLLAAGFIKEVLHPDWLANPVLVRKKTGQWRMCVDYTDLNKSCPKDPFGLPRIDQIRLKESDCLKTSFITPFGAYCYVTMPFGLKNAGATYQRMIQRCFSTQIGRNVEAYVDDVVVKTKQKDDLILDLEETFASIRAFRMKLNPEKCTFGVPSGKLLGFMVSHRGIQANPEKVTAILNMKPPSTQKDVQKLTGCMAALSRFVSRLGERGMPFFKLLKKTDNFQWGPEAQKAFEDFKQLLTKPPVLASPHPQEPLLLYVSATSQVVSTVLVVEREEEGHVQKVQRPIYFVSEVLADSKTRYPQVQKLLYGILITTRKLSHYFQGHSVTVVTSFPLGDVLHNREANGRIAKWALELMSLDISFKPRTSIKSQALADFVAEWTECQEEAPVEKMEHWTMHFDGSKRLSGTGAGVVLISPTGERLSYVLWIHFSASHNVAEYEALLHGLRIAISLGIKRLIVRGDSQLVVNQVMKEWSCIDDNMMAYRQEVRKLEDKFDGLELSHVLRHNNEAADRLANFGSKREAAPSDVFVEHLYSPTVPHKDATQVADTHDIAMVEADWREPFIRFLTSQELPQDKDEAERISRRSKLYVMHESELYKKSPSGILQRCVSLEEGRQLLKDIHSGICGNHAAARTIVGKAYRQGFFWPTAVSDADKIVRTCEGCQFFARQIHLPAQELQTIPLSWPFAVWGLDMVGPFKKAVGGYTHLFVAIDKFSKWIEAKPVVTITADNARDFFINIVHRFGVPNRIITDNGTQFTGGVFKDFCEDFGIKICYASVAHPMSNGQVERANGMILQGIKARVFDRLKPYAGKWVSQLPSVLWSLRTTPSRATGQSPFFLVYGAEAMLPSEVEFESLRFRNFREERYEEDRVDDLHRLEEVREAALIQSARYLQGLRRYHNRNVRSRAFLVGDLVLRKIQTTRDRHKLSPLWEGPFIISEVTRPGSYRLKREDGTLVDNSWNIEHLRRFYA

SEQ ID NO: 149930 - protein, 248 aa, Oryza sativa
  unsure (1)..(248): unsure at all Xaa locations
  Clone ID: PAT_MRT4530_50214C.1.pep
MAGKRPGDAPAGDTAAKRARTAARRQKTTVSARLRRSETKHDTYVVRVGASRVVATVTARPAVARRWVFSTRWRHGRRLRSGAGLTVAMGVQWTPPSRALAGGAEPRPGTLQLCVGSRCLVFQVAQGNAFPAALRRFLADGGVAAFVGYGIRSDCRKLPAHHGLHVACTRELRAVTGMGSSSMARMAEELLGXLAGIKKPAAVGRSRWDAPKLSKKQVKYACVDAFLSHRLGVHVGAAPPSTSSSDSA

SEQ ID NO: 149931 - protein, 1964 aa, Oryza sativa
  Clone ID: PAT_MRT4530_50215C.1.pep
MGPFSGIDDLVFPPGQTFRFGSLDFITDNFGKISLFDSESDQSGENRISVPFGFPNAAETYFKTISIESASNHSAEIAFSPMTPDQGDGAYPPVLMKLPDDLAAVSTTTASSSRRPRRKSASTPISPSFREVGVILQPLGTVSTDQLDDHYSSPTVDSRPTDIVEYDEFSSRYNDFHDFDDFDGSLDDDYTPLYFGVFMANNETEEQRQARETEERRRLEEEHQAQEQERLRREQQDRERIAKEAEDRRQRALEAGRRARDLIGQQDVEGTPVFRTPQQNAVAAITLLDTLLNQNELNRSDHVVNILNQTKTMIAASVPVNSESVHTPTGSRVPHFRSHDYRHPSLSITGAGSNRRSRGHDERSVHSPPDLHRERRVERPRSPPRRRPIDLRDTIIQRRAARGYHHSPDRHDDDLDGVAAFTDDLRRVDWPAGFKPTGIEKYDGTTNPESWLTVYGLAIRAAGGDNKAMANYLPVALADSARSWLHGLPRGTIGSWAELRDHFIANFQGTFERPGTQYDLYNVIQKSGESLREYIRRFSEQRNKISDITDDVIIAAFTKGIRHEELVGKFGRKPPRTVKLMFEKANEYAKAEDAVTASKQSGPSWKPKNTPATGGGGSNNHKDRKRKPEELVATAAHSSRQRSRVNTFDKIMNSQCPHHPNSNHVAKECFIYKQFAEQYTKSTRKNSDEEQSTSRKKDDGDTPAGFQDHRKELNHIFGGPMAYESKRKQKLTEREINAVQPDTPQYLRWSEIAIRFDRSDHPDRVVHPGRYPLVLDPVVRNVKLRRTLIDGGSALNILFAKTLDDMQIPRSELKSSNAPFHGVIPGLSATPLGQITLPVTFGTRENFRTENISFEVADFETAYHAILGRPALAKFMAVPHYTYMMMKMPGPRGVLTLRSDIKQAVTCDKESCDMAQTREIASAREEIRLAATTESALITFLQNNKDIFAWKPSDMPGIPREVIEHSLHVKEDAKPIKQRLRRFAQDRKDAIKEELTKLLAAGFIKEVLHPDWLANPVLVRKKTGQWRMCVDYTDLNKSCPKDPFGLPRIDQIRLKESDCLKTSFITPFGAYCYVTMPFGLKNAGATYQRMIQRCFSTQIGRNVEAYVDDVVVKTKQKDDLILDLEETFASIRAFRMKLNPEKCTFGVPSGKLLGFMVSHRGIQANPEKVTAILNMKPPSTQKDVQKLTGCMAALSRFVSRLGERGMPFFKLLKKTDNFQWGPEAQKAFEDLKQLLTKPPVLASPHPQEPLLLYVSATSQVVSTVLVVEREEEGHVQKVQRPIYFVSEVLADSKTRYPQVQKLLYGILITTRKLSHYFQGHSVTVVTSFPLGDVLHNREANGRIAKWALELMSLDISFKPRTSIKSQALADFVAEWTECQEDTPVEKIEHWTMHFDGSKRLSGTGAGVVLISPTGERLSYVLWIHFSASHNVAEYEALLHGLRIAISLGIKRLIVRGDSQLVVNQVMKEWSCIDDNMMAYRQEVRKLEDKFDGLELSHVLRHNNEAADRLANFGSKRETAPSDVFVEHLYTPTVPHKDTTQDADTRDIAMVEADWREPFIRFLTSQELPQDKDEAERISRRSKLYVLHESELYKKSPSGILQRCVSLEEGRQLLKDIHSGICGNHAAARTIVGKAYRQGFFWPTAVSDADKIVRTCEGCQFFARQIHLPAQELQTIPLSWPFAVWGLDMVGPFKKAVGGYTHLFVAIDKFSKWIEAKPVVTITADNARDFFINIVHRFGVPNRIITDNGTQFTGGVFKDFCEDFGIKICYASVAHPMSNGQVERANGMILQGIKARVFDRLKSYAGKWVQQLPSVLWSLRTTPSRATGQSPFFLVYGAEAMLPSEVEFESLRFRNFREERYGEDRVDDLHRLEEVREAALIQSARYLQGLRRYHNRNVRSRAFLVGDLVLRRIQTTRDRHKLSPLWEGPFIISEVTRPGSYRLKREDGTLVDNSWHIEHLRRFYA

SEQ ID NO: 149932 - protein, 1945 aa, Oryza sativa
  Clone ID: PAT_MRT4530_50216C.1.pep
MGSISGIDDLVFPPGQTFRFGSLDFVTNNFGKISLLDSESDQSGENRISVPFGFPNAAESYFKTISTESASNHSAEIASSPTTPDQDDGAYPPVLMKLPDDLAAVSTTTASSSRRPRRKSASTPISPSFREVGVILQPLGTVSTDQLDDYNSSPTVDSRPTDIVEYDEFSSRYNDFDDFDDFDGSLDDNYTPLYFGVFMANNETEEQRQARETEERRRLEEEHQAQEQERLRREQQDRERTAKEAEDRRQRALEAGRRARDLIGQQDVEGTPVFRTPQQNAVAAITLLDTLLNQNELNQSDHVVNILNQTKTMIAASVPVNSESVHTPTGSRVPHFRSHDYRHPSLSITGAGSNRRSRGHDERSVHSPPDLHRERRVERPRSPPRRRPIDLRDTIIQRRAARGYHHSPDSHDDDLDGVAAFTDDLRRVDWPAGFKPTGIEKYDGTTNPESWLTVYGLAIRAAGGDSKAMANYLPVALADSARSWLHGLPRGTIGSWAELRDHFIANFQGTFERPGTQYDLYNVIQKSGESLRDYIRRFSEQRNKISDITDDVIIAAFTKGIRHEELVGKFGRKPPRTVKLMFEKANDHSSRQRSRVNTFDKIMNSQCPHHPNSNHVAKDCFVYKQFADQYTKTARKNSDEEQSTSRKKDDGDAPAGFQDHRKELNHIFGGPLAYESKRKQKLTEREINAVQPDTPQYLRWSEIAIKFDRSDHPDRVVHPGRYPLVLDPVVRNVKLRRTLIDGGSALNILFAKTLDDMQIPRSELKPSNAPFHGVIPGLSATPLGQITLPVTFGTRENFRTENISFEVADFETAYHAILGRPALAKFMAVPHYTYMMMKMPGPRGVLSLRSDIKQAVTCDKESCDMAQTREMASAREDIRLAAATASEGEIPATKTSKSGESEAKTKKIPLDPSDPTKTANNKDIFAWKPSDMPGIPREVIEHSLHVKEDAKPIKQRLRRFAQDRKDAIKEELTKLLAAGFIKEVLHPDWLANPVLVRKKTGQWRMCVDYTDLNKSCPKDPFGLPRIDQVVDSTAGCELLSFLDCYSGYHQIRLKESDCLKTSFITPFGAYCYVTMPFGLKNAGATYQRMIQRFFSTQIGRNVEAYVDDVVVKTKQKGDLISDLEETFVSIRAFRMKLNPEKCTFGVPSGKLLGFMVSHRGIQANPEKVTAILNMKPPSTQKDVQKLTGCMAALSRFVSRLGERGMPFFKLLKKTDNFQWGPEAQKAFEDFKKLLTEPPVLASPHPQEPLLLYVSATSQVVSTVLVVEREEECHVQKVQRPIYFVSEVLADSKTRYPQVQKLLYGILITTRKLSHYFQGHSVTVVTSFPLGDILHNREANGRIAKWALELMSLDISFKPRISIKSQALADFVAEWTECQEDTPAENMEHWTMHFDGSKRLSGTGAGVVLISPTGERLSYVLWIHFSASHNVAEYEALLHGLRIAISLGIKRLIVRGDSQLVVNQVRKLEDKFEGLELSHVLRHNNEAADRLANFGSKRETAPSDVFVEHLYTPTVPHKDTTQDADTHDVAMVEADWREPFIRFLTSQELPQDKDEAERISRRSKLYVMHESELYKKSPSGILQRCVSLEEGRQLLKDIHSGICGNHAAARTIVGKAYRQGFFWPTAVSDADKIVRTCEGCQFFARQIHLPAQELQTIPLSWPFAVWGLDMVGPFKKAVGGYTHLFVAIDKFSKWIEAKPVVTITADNARDFFINIVHRFGVPNRIITDNGTQFTGGVFKDFCEDFGIKICYASVAHPMSNGQVERANGMILQGIKARVFDRLKPYAGKWVQQLPSVLWSLRTTPSRATGQSPFFLVYGAEAMLPSEVEFESLRFRNFREERYEEDRVDDLHRLEEAREAALIRSARYLQGLRRYHNRNVRSRAFLVGDLVLRKIQTTRDRHKLSPLWEGPFIISEVTRPGSYRLKREDGTLVDNSWNIEHLRRFYA

SEQ ID NO: 149933 - protein, 1979 aa, Oryza sativa
  Clone ID: PAT_MRT4530_50217C.1.pep
MGSVSGIDDLVFPPGQTFRFGSLDFVTNNFGKISLLDSESDQSGENRISVPFGLPNAAESYFKTISIELASNHSGEIASSPMSPDQDDEAYPPILMKLPNDLAAVSITTASPSRRPRRKSASTPISPSFREVGVILQPLGTVSTDQLDGYYSSPTVDSRPTDIVEYDEFSSRYNDADLDDFDGSLDDNYTPLYFGVFMADNETEEQRQARETEARRETERRRLEEERQAQEQERLRREQQERERTAKEAEGRRQRALEAGRRARDFIGQQDVEGTPVFRTPQQNAVAAITLLNTLLKENELNQSDHVVNILNQTKTMIAASVPVNSESVRTPTGSRLPHFRSHDYRRPSLSITGAGSNRRSRGHDERSVHSPPDHHRERRVERPRSPPRRRPVDLRDTIIQRQAARGHHHSPDRHDDDLDGVAAFTDDLRRVDWPAGFKPTGIEKYDGTTNPESWLTVYGLAIRAAGGDSKAMANYLPVALADSTRSWLHGLPRGTIGSWAELRDHFIANFQGTFERPGTQFDLYNVVQKSGESLRDYIRRFSEQRNKISDITDDVIIAAFTKGIRHEELVGKFGRKPPRTVKLMFEKANEYAKAEDAVTASKQSGPSWKPKKDTPATGGGGSNNHKDRKRKPEELVATAIHSSRQRSRVNTFDKIMNSQCPHHPNSNHVAKDCFVYKQFAEQYTKTTRKNSDEEQSTSRKKDDGDTPVGFQDHRKELNHIFGGPLAYESKRKQKLTEREINAVQPDTPQYLRWSEIAIKFDRSDHPDRVVHPGRYPLVLDPVVRNVKLRRTLIDGGSALNILFAKTLDDMQIPRSELKPSNAPFHGVIPGLSATPLGQITLPVTFGTRENFRTENISFEVADFETAYHAILGRPALAKFMAVPHYTYMMMKMPGPRGVLSLRSNIKQAVTCDKESCDMAQTREIASAREDIRLAAATASEGEVPATKTSKSGESEAKTKKIPLDPSNPTKTANNKDIFAWKPSDMPGIPREVIEHSLHVKEDAKPIKQRLRRFAQDRKDAIKEELTKLLAAGFIKEVHHPDWLANPVLVRKKTGQWRMCVDYTDLNKSCPKDPFGLPRIDQIRLKESDCLKTSFITPFGAYCYVTMPFGLKNAGATYQRMIQRCFSTQIGRNVEAYVDDVVVKTKQKDDLISDLEETFASIRAFRMKLNPEKCTFGVPSGKLLGFMVSYRGIQANPEKVTAILNMKPPSTQKDVQKLTGCMAALSRFVSRLGERGMPFFKLLKKTDDFQWGPEAQKAFEDFKKLLTEPPVLASPHPQEPLLLYVSATSQVVSTVLVVEREEEGHVQKVQRPIYFVSEVLADSKTRKLSHYFQGHSVTVVTSFPLGNILHNREANGRIAKWALELMSLDISFKPRISIKSQALADFVAEWTECQEDTPAEKMEHWTMHFDGSKRLSGTGAGVVLISPTGERLSYVLWIHFSASHNVAEYEALLHGLRIAISLGIKRLIVRGDSQLVVNQVMKEWSCLDDNMMAYRQEVRRLEDKFDGLELSHVLRHNNEAADRLTNFGSKREVAPSDVFVEHLYTPTVPHKDTTQVAGTHDVAMVEVDWREPLIRFLTSQELPQDKDEAERISRRSKLYVMHEAELYKKSPSGILQRCVSLEEGRQLLKDIHSGICGNHAAARTIVGKAYRQGFFWPTAVSDADKIVRTCEGCQFFARQIHLPAQELQTIPLSWPFAVWGLDMVGPFKKAVGGYTHLFVAIDKFSKWIEAKPVVTITADNARDFLINIVHRFGVPNRIITDNGRQFTGGVFKDFCEDFGIKICYASVAHPMSNGQVERANGMILQGIKARVFDRLKPYAGKWVEQLPSVLWSLRTTPSRATGQSPFFLVYGAEAMLPSEVEFESLRFRNFREERYEEDRVDDLHRLEEVREAALIQSARYLQGLRRYHNRNVRSRAFLVGDLVLRKIQTTRDRHKLSPLWEGPFIISAVTRPGSYRLKREDGTLVDNSWNIEHLRRFYA

SEQ ID NO: 149934 - protein, 1458 aa, Oryza sativa
  unsure (1)..(1458): unsure at all Xaa locations
  Clone ID: PAT_MRT4530_50218C.1.pep
HTSNRTPVPVPRWGSSRVDLQACKLMFEKANEYAKAEDAVTASKQSGPSWKQNKGTPATGGGGSNNHKNRKRKPAELVATASHSSRQRSRVNTFDKIMNSQCPHHPNSNHVAKDCFVYKQFADQYTKTARKNSDEEQSTSRKKDDDDTPAGFQDHRKELNHIFGGPLAYESKRKQKLTEREINAVQPDTPQYLRWSEIAIKFDRSDHPDRVVHPGRYPLVLDPVVRNVKLRRTLIDGGSALNILFAKTLDDMQIPRSELKPSNAPFHGVIPGLSATPLGQITLPVTFGTRENFRTENISFEVADFETAYHAILGRPALAKFMAVPHYTYMMMKMPGPRGVLSLRSDIKQAVTCDKESCDMAQTREMASAREDIRLAAATASEGEEPATKISKSGESEAKTKKIPLDPSDPTKTANNKDIFAWKPSDMPGIPREVIEHSLHVKEDAKPIKQRLRRFAQDRKDAIKEELTKLLAAGFIKEVLHPDWLANPVLVRKKTGQWRMCVDYTDLNKSCPKDPFGLPRIDQVVDSTAGRELLSFLDCYSGYHQIRLKESDCLKTSFITPFGAYCYVTMPFGLKNAGATYQRMIQRCFSTQIGRNVEAYVDDVVVKTKQKDDLISDLEETFASIRAFRMKLNPEKCTFGVPSGKLLGFMVSHRGIQANPEKVTAILNMKPPSTQKDVQKLTGCMAALSRFVSRLGERGMPFFKLLKKTDNFQWGPEAQKAFEDFKKLLTEPPVLASPHPQEPLLLYVSATSQVVSTVLVVERDEEGHVQKVQRPIYFVSEVLADSKTRYPQVQKLLYGILITTRKLSHYFQGHSVTVVTSFPLGDILHNREANGRIAKWALELMSLDISFKPRISIKSQALADFVAEWTECQEDAPAENMEHWTMHFDGSKRLSGTGAGVVLISPTGERLSYVLWIHFSASHNVAEYEALLHGLRIAISLGIKRLIVRGDSQLVVNQVMKEWSCLDDNMMAYRQEVRKLEDKFDGLELSHVLRHNNEDADRLVNFGSKREVAPSDVFVEHLYTPTVPHKDTTQVAGTHDVAMVETDWRKPLIRFLTSQELPQDKDEAERISRRSKLYVMHEAELYKKSPSGILQRCVSLEEGRQLLQDIHSGICGNHAAARTIVGKAYRQGFFWPTAVSDADKIVRTCEGCQFFARQIHLPAQELQTIPLSWPFAVWGLDMVGPFKKAVGGYTHLFVAIDKFSKWIEAKPVVTITADNARDFFIXIVHRFGVPNRIITDNGTQFTGGVFKDFCEDFGIKICYASVAHPMSNGQVERANGMILQGIKARVFDRLKPYAGKWVQQLPSVLWSLRTTPSRATGQSPFFLVYGAEAMLPSEVEFESLRFRNFREERYEEDRVDDLHRLEEVREAALIRSARYLQGLRRYHNRNVRSRAFLVGDLVLRKIQTTRDRHKLSPLWEGPFIISEVTRPGSYRLKHEDGTLVDNSWNIEHLRRFYA

SEQ ID NO: 149935 - protein, 201 aa, Oryza sativa
  unsure (1)..(201): unsure at all Xaa locations
  Clone ID: PAT_MRT4530_50219C.1.pep
MEGDAVARVEIGGGGATMPAEGVGGAAGGLPLLRPAGLPPPLRWGSARRRPTPPRRFRAAALPARPADFTPLRTGRRRRAVRRSASLRTVNWVQLESAMRHMSSYTTPSAASAADLRGAGMSGSPNESSHPAPDLDPRFHPXPPPHPPPPPGPKKPSSSSPEXGPPVSKGGLDRRVRGRVRARRRTVAVAXVEGRXALMVM

SEQ ID NO: 149936 - protein, 113 aa, Oryza sativa
  Clone ID: PAT_MRT4530_5021C.1.pep
MMKRLVVLRRREPAVRFSCCGVRYGECRRNHAASTGGHAVDGCREFIAAEDGGGGNSTSAVGVAAAALKCAACGCHRSFHRRVQVYEVAWDDDCASGDTSSSSPSSSSSLSSE

SEQ ID NO: 149937 - protein, 704 aa, Oryza sativa
  unsure (1)..(704): unsure at all Xaa locations
  Clone ID: PAT_MRT4530_50220C.1.pep
MMQQQQQPPPPPPPPQHPPPPQAGGGGGGEFYRGPPPQPPMRQLSAASSTNIPGDYAAHQGHPPPQQNQPPYDAYGDNFGAKRMRKPVQRRTVDYTSTVVRYVQARMWQRDARDRPTVQPTPAAVLDMLPSVAYPDNPSTSFAAKFVHSSINKNRCSINRVLWTPTGRRLITGSQSGEFTLWNGQSFNFEMILQAHDQAVRSMIWSNNENWMVTGDDGGAIKYWQSNMNNVKVNKTAHRESVRDLSFCRTDLKFCSCSDDTTVKPGHGWDVKSVDWHPTKSLLVSGGKDYLVKLWDAKSGRELRSFHGHKNIVQCVKWNQNGNWVLTASKDQIIKLYDIRSMKELESFRGHNKDVXLWHGIHFMKNILLAGAMMERSFIGWXGHETPQIEINNAHDNSVWDLAWHPVGYLLCSGGNDHATRFWCRNRPGDLTRDKYNSGQMQGYGDQHPAFAGRAMGGFQMPEPSTTPGPFNTGLSRNEGTIPGIGVAMPLDGSDHGEQRPSIPGLPPGQPPLPPGPHPSLLAGGQQQQYQQMQQQHPQFPRPPPPNMPQLQPPAHMLPHAQGSRAPLPQLPSMSGPPPVNPPLPPMPHPMAMQVQGSSNQMMPQMPQHLIGMNQTHQGPPSNMPPMGGFPNGMGNIQGGSSASGMQNFPMGGMYNRPQGKMPPQAQAQMTSIPGLSSYQPGMGNVGLPPPPPQHPPPRGSAPQ

SEQ ID NO: 149938 - protein, 1892 aa, Oryza sativa
  Clone ID: PAT_MRT4530_50221C.1.pep
MGSVSGIDDLVFPPGQTFRFGSLDFVTNNFGKISLLDSESDQSGENRISVPFGFPNAAESYFKTISTESASNHSAEIASSPMTPDQDDGAYPPVLMKLPDDLAAVSTTTASSSRRPRRKSASTPISPSFREVGVILQPLGTVSTDQLDDYNSSPTVDSRPTDIVEYDEFSSRYNDFDDFDDFDGSLDDNYTPLYFGVFMANNETEEQRQARETEERRRLEEEHQAQEQERLRREQQDRERTAKEAEDRRQRALEAGRRARDLIGQQDVEGTPVFRTPQQNAVAAITLLDTLLNQNELNQSDHVVNILNQTKTMIAASVPVNSESVHTPTGSRVPHFRSHDYRHPSLSITGAGSNRRSRGHDERSVHSPLDLHRERRVERPRSPPRRRPIDLRDTIIQRRAARGHHHSPDRHDDDLDGVAAFTDDLRRVDWPAGFKPTGIEKYDGTTNPESWLTVYGLAIRAAGGDSKAMANYLPVALADSARSWLHGLPRGTIGSWAELRDHFIANFQGTFERPGTQYDLYNVIQKSGESLRDYIRRFSEQRNKISDITDDVIIAAFTKGIRHEELVGKFGRKPPRTVKLMLEKANEYAKAEDAVTASKQSGPSWKPKKDTPATGGGRSNNHKDRKRKPAELVATASHSSRQRSRVNTFDKIMNSQCPHHPNSNHVAKDCFVYKQFADQYTKTARKNSDKEQSTSRKKDDGDTPAGFQDHRKELNHIFGGPLAYESKRKQKLTEREINAVQPDTPQYLRWSEIAIKFDRSDHPDRVVHPGRYPCALNILFAKTLDDMQIPRSELKPSNAPFHGVIPGLSATPLGQITLPVTFGTRENFRTENISFEVADFETAYHAILGHPALAKFMAVPHYTYMMMKMPGPRGVLSLRSDIKQAVTCDKESCDMAQTREMASAREDIRLAAATASEGEIPATKTSKSGESEAKTKKIPLDPSDPTKTANNKDIFAWKPSDMPGIPREVIEHSLHVKEDAKPIKQRLRRFAQDRKDAIKEELTKLLAAGFIKEVLHPDWLANPVLVRKKTGQWRMCVDYTDLNKSCPKDPFGLPRIDQVVDSTAGCELLSFLDCYSGYHQIRLKESDCLKTSFIMPFGAYCYVTMPFGLKNAGATYQRMIQRCFSTQIGRNVEAYVDDVVVKTKQKDDLISDLEETFASIRAFRMKLNPEKCTFGVPSGKLLGFMVSHRGIQANPEKVTAILNMKPPSTQKDVQKLTGCMAALSRFVSRLGERGMPFFKLLKKTDDFQWGPEAQKAFEDFKKLLTEPPVLASPHPQEPLLLYVSATSQVVSTVLVVEREEEGHVQKVQRPIYFVSEVLADSKTRYPQVQKLLYGILITTRKLSHYFQGHSVTVVTSFPLGDILHNREANGRIAKWALELMSLDISFKPRISIKSQALADFVAEWTECQEDTPAEKMEHWTMHFDGSKRLSGTGAGVVLISPTGERLSYVLWIHFSASHNVAEYEALLHGLRIAISLGIKRLIVRGDSQLVVNQVMKEWSCLDDNMMAYRPEVRKLEDKFDGLELSHVLRHNNEAADRLANFGSKREVAPSDVFVEHLYTPTVPHKDTTQVAGTHDVAMVEADWREPLIRFLTSQELPQDKGEAERISRRSKLYVMHEAELYKKSPSGILQRCVSLEEGRQLLKDIHSGICGNHAAARTIVGKAYRQGFFWPTAVSDADKIVRTCEGCQFFARQIHLPAQELQTIPLSWPFAVWGLDMVGPFKKAVGSYTHLFVAIDKFSKWIEAKPVIAITADNARDFFINIVHRFGVPNRIITDNGTQFTGGVFKDFCEDFGIKICYASVAHPMSNGQVERANGMILQGIKARVFDRLKPYAGKWVQQLPSVLWSLRTTPSRATGRSPFFLVYGAEAMLPSEVEFESLRFRNFREERYEED

SEQ ID NO: 149939 - protein, 1313 aa, Oryza sativa
  Clone ID: PAT_MRT4530_50222C.1.pep
MRRAARGLHHSPDHYDDDLDGVAAFTNDLHRVDWPAGFKPTGIEKYDGTTNPESWLTVYGLAIRAAGGDSKAMANYLPMALADSARSWLHGLPRGTIGSWAELRDHFIANFQGTFERPGTQFDLYNISDITDDVIIAAFTKGIRHEELVGKFGCKPPKTVKLMFEKANEYAKAEDAVIASKQSGSNWKQKKDTPATGGGGSNNHKDRKRKPEELVATTTHSSRQRSRVNTFDKIMNSQCPHHPNSNHVAKDCFVYQQFAEKYAKTTRKNSDEDQSTSKKKDDGDSPTGFQDQRKELHHIFDGPLAYESKRKQKLTEREINAVQPDTPQYLRWSETTIKFDRSDHPDRVVHPGRYPLVLDPVVRNVKLRRTLIDGGSALNILFAKTLDDMQVPRSELKPSNAPFHGVILGLSATPLGQITLPVTFGTRENFRTENICFEVADFETAYHAILGRPALAKFMAVLHYTYMMMKMPGPRGVLSLWSDIKQAVTCDKESCEMAQTREMAVAREDIRLAATTASEGEVPATKIPKSGESEAKTKKIPLDPSDSTKTAVIGAELDYRKDAIKEELTKLLAAGFIKEVLHPDWLANPVLVRKKTGQWRMCVDYTNLNKSCPKDPFGLPRIDQIRLKESDCLKTSFITPFGAYFYITMPFGLKNAGATYQRMIQRCFSTQIGHNVEAYVDDVVVKTKQKDDLISDLEETFASIRTFRMNLNPEKCVFGVPSGKLLGFMVSHRGIQANPEKITAILNMKPPSSQKDVLSDSKSRYPQVQKLLYAILITVRKLSHYFQGHSVTVVTSFPLGDILHNREANGRIAKWALELMSLDISFKPRTLIKSQALADFVAEWTESQEDTPGEKIEHWTMHFDGSKRLSGTGAGVVLISPTRERLSYVLWIHFSASHNVAEYEALLHGLRIAVSLGIKRLIVRGDSQLVVNQVMKERSCLDDNMTAYRQEVRKLENKFDRLELSHVLRHNNEATDRLAHFGSKREMAPSDVFVEHLYEPTVPQKETTQVADTQDIAMIEADWREPLIQFLTSQELPQDKDEAERISRRSRLYVIHEAELYKKSPSGILQRCVSLEEGRQLLKDIHSGICGNHAAARTIVGKAYRQGCQFFARQIHLPAQELQTIPLSWPFAVWGLDMVGPFKKAIGGYTHLFVAIDKFSKWIEAKPVVTITADKARDFFINIVHRFGVPNRIITDNGTQFTGGVFKDFCEDFGIKICYASVAHPMSNGQVERANGMILQGIKARVFDRLKPYAGKWVEQLPSVLWSLHTTPSRATGQSPFFLVYGAEAMLPSEVEFESLRFRNFREERYEED

SEQ ID NO: 149940 - protein, 88 aa, Oryza sativa
  unsure (1)..(88): unsure at all Xaa locations
  Clone ID: PAT_MRT4530_50223C.1.pep
ITQSCNSHATGHCDRSPPHHPISFSSSHSIIPNPQXGSPVNPHPRGPTSIIRGGHHLLHSWVHHTHAFXPSHLACLAHYVTFGTSPPC

SEQ ID NO: 149941 - protein, 279 aa, Oryza sativa
  unsure (1)..(279): unsure at all Xaa locations
  Clone ID: PAT_MRT4530_50224C.1.pep
MCIKPLSRTSQGTQTTIVDIQIHVLQKYKRLQMQRKRKKRDKPEELTPAAGNSIPQAILDGSDETNLFKTSPTEKNFNSAGQPNTSADPTPSRPPSLPVPRKGSSYTSDQAVTHSRLRPTGRPRRGDGEARPPTAVTGGAGSGGDGRKAAAHGRSSGVAGARERKTKAATTTRREEGRTSGGDTXRRGGEELGMEKATATTKVAGWRRRGMDSSPAREGDGVPVGFRXREAVAEMAHTAAELAAAAAWRGGGPSGDGTRPEMGGGGGARRARRDGIHVQ

SEQ ID NO: 149942 - protein, 82 aa, Oryza sativa
  Clone ID: PAT_MRT4530_50225C.1.pep
MADTGMDCGRRTGGPLHGNLQDVMNNFYPYDLLYDPCSDNPSSFFSICDDPFLSSFGDYEEPNGIGFRFPDWGMVVRDGPAV

SEQ ID NO: 149943 - protein, 224 aa, Oryza sativa
  unsure (1)..(224): unsure at all Xaa locations
  Clone ID: PAT_MRT4530_50226C.1.pep
GAVPSCAAVNPAAGQPDTPADPTPSRPPTPPVPRKGSSYTSDQAVTHSRLXQRLRETADRRNGQGAPTCGPHXAAAQRGXVHRGPGPRGRGGGVSRGVDVAPRGWPRGPWDGRPRSGEGRSGGWGRAAPRPARAWRTVATGDRPAATAGDADGGAVRRHACGERRRARERRGRGGKGGPHRRGDSDRCGRGGAAAQEAVATGAEAAAAHGRSGGERAGRRRMRE

SEQ ID NO: 149944 - protein, 1756 aa, Oryza sativa
  Clone ID: PAT_MRT4530_50227C.1.pep
MADNETEEQRQARETEARREAERLRLEEERQAQEQERLRREQQERERTAKEAEDRRQRALEAGRRARDLIGQQDVEGTPVFRTPQQNAVAAITLLDTLLKENELNQSDHVVNILNQTKTMIAASVPVNSESVHTPTGSRVPHFRSHDYRHPSLSITGAGSNRRSRARGHHHSPDRHDDDLDGVAAFTDDLRRVDWPAGFKPTGIEKYDGTTNPESWLTVYGLAIRAAGGDSKAMANYLPVALADSARSWLHGLPRGTIGSWAELRDHFIANFQGTFERPGTQYDLYNVIQKSGESLRDYIRRFSEQRNKISDITDDVIIAAFTKGIRHEELVGKFGRKPPRTVKLMFEKANEYAKAEDAVTASKQSGPSWKPNKGTPATGGGGSNNHKDRKRKPAELVATASHSSRQRSRVNTFDKIMNSQCPHHPNSNHVAKDCFVYKQFADQYTKTTRKNSDEEQSTSRKKDDGDAPAGFQDHRKELNHIFGGPLAYESKRKQKLTEREINAVQPDTPQYLRWSEIAIKFDRSDHPDRVVHPGRYPLVLDPVVRNVKLRRTLIDGGSALNILFAKTLDDMQIPRSELKPSNAPFHGVILGLSATPLGQITLPVTFGTRENFRTENISFEVADFETAYHAILGRPALAKFMAVPHYTYMMMKMPGPRGVLSLRSDIKQAVTCDKESCDMAQTREMTSVREDIRLAAATASEGEVPATKTSKSGESEAKTKKIPLDPSDSTKTANNKDIFAWKPSDMPGIPREVIEHSLHVKEDAKPIKQRLRRFAQDRKDAIKEELTKLLAAGFIKEVLHPDWLANPVLVRKKTGQWRMCVDYTDLNKSCPKDPFGLPRIDQIRLKESDCLKTSFITPFGAYCYVTMPFGLKNAGATYQRMIQRCFSTQIGRNVEAYVDDVVVKTKQKDDLILDLEETFASIRAFRMKLNPEKCTFGVPSGKLLGFMVSHRGIQANPEKVIAILNMKPPSTQKDVQKLTGCMAALSRFISRLGERGMPFFKLLKKTDDFQWGPEAQKAFEDFKKLLTEPPVLASPHPQEPLLLYVSATSQVVSTVLVVEREEEGHLQKVQRPIYFVSEVLADSKTRYPQVQKLLYGILITTRTLSHYFQGHSVTVVTSFPLGDILHNREANGRIAKWALELMSLDISFKPRISIKSQALADFVAEWTECQEDTPAEKMEHWTMHFDGSKRLSGTGAGVVLISPTGERLSYVLWIHFSTSHNVAEYEALLHGLRIAISLGIKRLIVRGDSQLVVNQVMKEWSCLDDNMMAYRQEVRKLEDKFDGLELSHVLRHNNEAADRLANFGSKREAAPSDVFVEHLYTPTVPHKDATQVAGTHDVAMVEADWREPLIRFLTSQELPQDKDEAERISRRSKLYVMHEAELYKKSPSGILQRCVSLEEGRQLLKDIHSGICGNHAAARTIVGKAYRQGFFWPTAVSDADKIIRTCEGCQFFARQIHLPAQELQTIPLSWPFAVWGLDMVGPFKKAVGGYTHLFVAIDKFSKWIEAKPVITITADNARDFFINIVHRFGVPNRIITDNGRQFTGRVFKDFCEDFGIKICYASVAHPMSNGQVERANGMILQGIKARVFDRLKPYAGKWVKQLPSVLWSLRTTPSRATGQSPFFLVYGAEAMLPSEVEFESLRFRNFREERYEEDRVDDLHRLEEVREAALIQSARYLQGLRRYHNRNVRSRAFLVGDLVLRKIQTTRDRHKLSPLWEGPFIISEVTRPGSYRLKREDGTLVDNSWNIEHLRRFYA

SEQ ID NO: 149945 - protein, 37 aa, Oryza sativa
  Clone ID: PAT_MRT4530_50228C.1.pep
MMFVMVGHPHPHSCGRCEIKPCRQGALADSDMIVVAE

SEQ ID NO: 149946 - protein, 44 aa, Oryza sativa
  Clone ID: PAT_MRT4530_50229C.1.pep
LKIPLPTRTLLPKSKDGWHFSVLQMCGVFKNAYTASFAPSLEKT

SEQ ID NO: 149947 - protein, 481 aa, Oryza sativa
  Clone ID: PAT_MRT4530_5022C.1.pep
MEVSFSAPPPPDAASAAAAAPSLVPAVSAAAVAATTVSCSPQPPTGSPSADDRILVSVEVLLHATSTARAEDVCAAVERMLEARSLSYVDGPVPIPNDDPFLLANVKRIQICDTDEWTENHKVLLFWQVRPVVHVFQSRDFQRYILQLSEDGPGEEPGEDDTLSSFNEWALPAKEFDGLWESLLYEVGLKQRLLRYAASALLFTEKGVDPCLVSWNRIVLLHGPPGTGKTSLCKALAQKLSIRFKSRYSMCQLIEVNAHSLFSKWFSESGKLVAKLFQKIQEMVEEESNLVFVLIDEVESLAAARQAAISGSEPSDSIRVVNALLTQMDKLKSWPNVIILTTSNITTAIDIAFVDRADIKAYVGPPTLQARYEILRSCLQELLRVGILTHTQGGNSLCLLSYFSLMENQHCPEVADPHGSVHLSGLLHKAAEICEGLSGRTLRKLPFLAHASVANPSCCDASAFLHALIQTAQRELSESRG

SEQ ID NO: 149948 - protein, 1335 aa, Oryza sativa
  Clone ID: PAT_MRT4530_50230C.1.pep
MDMTLIDCSRSPVARSDGPHGACFSSPQTYQVFGEMPERASCRSLTTAPAAPRPAGKAIATSVITYVINKAFDYLKDNKEAGGLKPTRERLEKLLPQIKVVLDAVDMEHIGDQSDALDAWLWQLRDAVELAKDALDELEYYKLEREAKKIQAGSKVSGSLHQYKGKIVQRFNHTFNTGSLKRLKNAVKALADVASGVERFIQVLNQFGNKVNFKQEVEFKNLRETSSLPHSLVLGREEESNIVVQWLTKRENSASEQIVGNIPIFCIVGLGGIGKTTLAQVICNDNKVKDYFDLFVWVCVSHIFDVETLTRKILQGVTRTEIGMIGLDALHKALQEKLSSRTFLLVLDDVWNDESLRGWETLVSPLRYGKTGSKILLTTRMESVANLAARAMQGECQSLSLSGLKETELLLLLERHAFFGVNPDDYRNLQHISKKMVSKLSGSPLAAKVLGGLLNNKRDSNTWNRILASSVHNIQQGKEGIMTVLKLSYQHLPTHLQSCFRYCSLFHKDYEFTKKELVYLWMGSGLIQQSVDGMTPEDVGMGYLDALTRKSFFEIKSRPRSSRDIKCRLFEEYYEERFVVHDLLHELARSASVNECARVSISSEKIPNTIRHLCLDVISLTVVEQISQSKKLRTLIMHFQEQDQAEQEHMLKKVLAVTKSLRVLSLTANYPFKLPDAVGDLVHLRYLSLSLMWGEGNTTHSCWFPQVVYNLYHLQTMKFNNPRPAVPMEGQMEGMCKLVNLRHLHLTLVIRPMIPFIGKLTSLHELYGFSIQQKVGYTIVELKNLRDIHHLHVSGLENVCNIEEAAEIMLDQKEHLSAVTLVWAPGSSDSCDPSKADAILDKLQPHSNTSKLQLEGYPGSRPPFWLQDLILINLTYIYLRDCQSMQCLPYLGHLPSLQYLYIVNMKSVECVDSSFYGSGEKPSGLQSLKVLEIENMPVCTEWVGLEGENLFPRLETLAVRDCQELRRLPTLPTSIRQIEIDHAGLQAMPTFFVSSDGSSSSMFNLSLSKLMISNCPYITTLWHGCSLYALEELSIQQCASLSCLPEDSFSSCSSLKTLEIVKCPNLIARQIMLPHTMRTITFGLCANAELALLDSLTGLKYLKRIFLDGCAMSKLPLQLFAGLIGLTHMVLNACSIAHLPTVEAFARLINLEYLFIWDCKELVSLIGIQGLASLMSLTIASCDKLVEDSSILSPEDADSSGLSLNLSELDIDHPSILLREPLRSVTTIKRLQISGGPNLALLPEEYLLHNCHALEELVLTNASHLQCLPQAVTTLTSLQSMHINNAVKIQTLPDMPASLTSLHIYGCSSELKKRCQKHVGHDWVKIAHISDADIR

SEQ ID NO: 149949 - protein, 53 aa, Oryza sativa
  Clone ID: PAT_MRT4530_50231C.1.pep
MKNKSNAYFNSTTYTLNDFLGFNAWLSILSHKIDYMGIEKALLSQGRDIDSII

SEQ ID NO: 149950 - protein, 452 aa, Oryza sativa
  Clone ID: PAT_MRT4530_50232C.1.pep
MASSTSLLLPTAAAAARRSPSGHRAPPSAVLSPPRRLATLRCLGYARRRAQARHVVACASAASAGSLDALIFDCDGVILESEHLHRQAYNDAFAHFGVSCEPASAAATDAPLYWDEAFYDDLQNRIGGGKPKMRWYVPPWLRDSGNSDRHAHFAMILEYFGENGWPTSKIFETPPSSDSDKEKLDWKTERYKEILKSGTVKPRPGVLRLMDEVKGAGIKLAVCSAATKSSVIMCLENLIGLERFNGLDCFLAGDDVKLKKPDPSIYITAAEDFSDAIATYPDLTPIHSPLLAGESKIFHTIFAYKMHVVKRREFEAMAISRRSSMLLVMALVLGTVSLATAASGVATFYTQYTPSACYGNRNMGNMVAAANDRLYNNGAVCGRCYAVKCAGAAAGGGGGNPCTGASVTVKMVDNCASSDGCTSTIDLSREAFAKIANLDAGVIRITYNPTYV

SEQ ID NO: 149951 - protein, 447 aa, Oryza sativa
  Clone ID: PAT_MRT4530_50233C.1.pep
MAAARSLPPWVVLDRNAFLHKPDDEEEEDPGWATISCSRSSPIPPRPSRLSIRLDGDPEEEDRRGFRSSVLLADAGFIVLSSCLPDTRGHKSYLVCDVAAADNAASLKMLPTLPMRFLPSVTYCPHPVRQQPDADGGGYLLAIFAMDMDADAEADGYLPQVLCLLPSSAPFDRRRWGTRRPIFPSEKPKSFTAHQTFSFQGSAYWVDLGQGILFCSCHDLMSGTNNINNNDDDDLQFGYIQLPDGCYVGCDSLYLTHLPSQYRDIRCISDSIRFVSIEGYNTDPPYDMLLSMWDLTPSSRQWHKVGSIHVGSLWEQEGFRRSGLPTNTSPTQPMLSSEEDGVVYLMAGDFYEEDEKHRSLHVFSVDMTTCEFVSAWRLPPWRHSGPPSLIGSDIFKHLKMDNLCQLVPPNTRAKVLPRPPKRDRGEGNVITVRPRKVQRVHHQGENV

SEQ ID NO: 149952 - protein, 166 aa, Oryza sativa
  unsure (1)..(166): unsure at all Xaa locations
  Clone ID: PAT_MRT4530_50234C.1.pep
MVTASNVCATHVMEDARHHMLXGRLDSIISNELLNGHRVALVRCKENCMSGEIVHQKKKHLRFLRMRMNNKPSHGPIHFRSPGKILXRAPDRGMIPXHKNKRREAEMARMKVYDGVPTPNNRTKRMXIPDTLKALKVKPGNSYCLLGHVYEEDGWNXYDTIRDVED

SEQ ID NO: 149953 - protein, 55 aa, Oryza sativa
  Clone ID: PAT_MRT4530_50235C.1.pep
RLTVADHQIDGAPQPLVTMNAANIMHVIVLSVYSKLISISTHHLSDYYDLIQSLC

SEQ ID NO: 149954 - protein, 273 aa, Oryza sativa
  Clone ID: PAT_MRT4530_50236C.1.pep
MAPRLLSCFGRGSATASAPDQPEEAAAAAAPGPVLLELFCSQGCGASPEADAVAARMVHEDQQRAAAGEGGGGERGVVVLGFHVDYWDYRGWKDPFASSAWTVRQKAYVEALRLDTLFTPQAVVQGRAHCVGTEQDALAQAVRDAPRYPAPAMKVTFQRPNPSTLQASFTGTLRSRMEGGGSVLVALYESGLVTDCGRGENKGKSLLNDHVVRRLEKVAAVRDGASAKKSVSGSVQFPLWDGFRASRCGLVLFVQNAALQVLGVQHFDLPDNV

SEQ ID NO: 149955 - protein, 108 aa, Oryza sativa
  Clone ID: PAT_MRT4530_50237C.1.pep
MVACPSRLTAKRPSAQHPFTRRSRGHSGLRLPSWHRALAAPRAHWRHAAAAASPQSQGGRGGGALPSARFGGREGGGGDDAGGLRIRRPLRLTLLAYTGRQCYANSAY

SEQ ID NO: 149956 - protein, 63 aa, Oryza sativa
  Clone ID: PAT_MRT4530_50238C.1.pep
MKDLNGDSVLITWTDLFATTFFPSVFFLGDITLAGNVPAIAEATPGSQLQRCAASIRCRPHRS

SEQ ID NO: 149957 - protein, 62 aa, Oryza sativa
  Clone ID: PAT_MRT4530_50239C.1.pep
ALPMLLARRDQSICVYASRDYVLESRELVISGSRVSCAVAVGGKSKLADLLIFHYCIHFPSQ

SEQ ID NO: 149958 - protein, 64 aa, Oryza sativa
  Clone ID: PAT_MRT4530_5023C.1.pep
MDRVLRGSRRFAKGLVAEARGRRGRGGWVGTTSLLDECLLIRGERKPTGFAGIRGAYGWAEEPV

SEQ ID NO: 149959 - protein, 447 aa, Oryza sativa
  Clone ID: PAT_MRT4530_50240C.1.pep
MDPYPKKRKPDENGAAVASSPAAGAAALGLTRDDLLRLVEPLSRDQLADIAATAALASGVALDAVRAAADRDPALRKLFVRGLGWETNSDSLRAIFSAFGDLEEAVVITDKSTGRSKGYGFVTFRHADSAVLALKEPSKKIDGRMTVTQLAAAGAAGGASGGAAGAGGAPAADVSLRKIFVGNVPADMPSERLLAHFAAYGEIEEGPLGFDKQTGKFRGFALFVYKTPEGAQASLVDSVKVIDGHQLVCKLAIEGKKGKQSQQQQQQSGPGGAQPPQMLQGGPPDMPGSGLGLGGPQMGAQYGGPGSLSSYGAFGGVGAGLGGPNPYANLPSSMGGGGAGLGSLGNQMPSGMGGAGAGAYGPGGLGGGSFGGSSQFGAGGMGAYGGLGMGGASSLYRMQQGSGGLPSGGYGEGNYPLPGPGFRGQEGGMSPGPGGRAPMYPNVPPYF

SEQ ID NO: 149960 - protein, 188 aa, Oryza sativa
  Clone ID: PAT_MRT4530_50241C.1.pep
MDRAQRAHMVRALGVTTTVLFVASVSYIALTALYACFCDGGGRRRREDGGSSSVRPEPSEETKRALDGIPVHVVQMPPRDGGGGGADEEGGSGDCAVCLAEYAAGDEVRVLPACGHGFHRECVDRWLLTRAPTCPVCRAPVVARVEGPDDDAKEDYCGDGESVERHGGGGGDIGFLSVAGESRVLPAI

SEQ ID NO: 149961 - protein, 1414 aa, Oryza sativa
  Clone ID: PAT_MRT4530_50242C.1.pep
MDSPPPPREEVVVFAVNSERFELRRDGGDPGESLLEFLRSRTRFTGAKLGCGEGKATPQPTALPPPRLLCFRGCGACVVVVSAYDAEADEVAHAAVSSCLTLARGLHHRAVTTTEGLGSSRRGLHALHERLAGFHASQCGFCTPGVCMSLAGALAAAEGNGKKAASAAEGFSRLTAAEAERAVAGNLCRCTGYRPIADACKSFAADVDLEDLGLNCFWNKGDATASVSKLPPYKERSIAAFPEFLKDEIRSSLGIDHSISSASMVGSVSSWYQPKNVEEYYKLIGSLSSSSDKSRTKVVVGNTSSGVYRDAELYDRYIDLRAIPELNSVSKDVKGVGIGAAMSISQVIEILRGEGNSYKDVVFCKIADHMEKVASQFVRNMASLGGNLIMAQRDEFASDIATVLLAAGSSLCIQVSSERMNVTLERFLDMAPCDCKTLLLRIYIPHCTPSGISSSSESVNKTGDKPASSVLFETYRASPRPIGNAVSYLNSAFLAKLSSDETSGNCILEKLCLAFGAYGTQHAVRATNVESLLVGKPITASLLLEACTVLKKTIVPGEGTRHAAYRSSLAVAFLFSFLYPITKGTFKPVEAVHLNGHIISDNNGNMNRGPDTHVDVSPKEINNVKSDLHGNDRILESSKQVIEISEDYLPVGLPAKKVGAELQASGEAIYVDDIPSPKDCLHGAFVYSTKPLAHVKSIELNPSLEQLKTVAIVTAKDIPKGGSNVGANTIFGPEPLFGDPLTQWAGEPLGIVVAETQKTANIAASRALVDYSMENLDAPILSIEEAVRSSSYFEILPFLLPQKIGDFSKGMEEADQKIYSTEVNLHSQYYFYMETQTALAIPEEDNCMVVYSSSQCPEVAQETIAKCLGLPCHNVRVITRRVGGGFGGKAVRSLPVATACALSAFKLQRPVRIYLDRKTDMIMTGGRHPMKIRYSVGFKSDGNITALHIELLVNAGITQDVSPVIPHNFIEALKKYNWGAFSYDARICKTNIATRSAMRGPGEVQGSYVAEAIIEHVAAVLSTDVNLVRQRNLHTVESLSLYHSECMEDALGYTLPSICNQLITSANYQHQLEMIRSFNKSNRWKKRGLSVVPIVHKFASRPTPGKVSILNDGSVAVEVGGIELGQGLWTKVKQMAAFGLGQLWTDRRQELLERVRIIQADTLSVIQGGWTTGSTTSESSCEAVHRACNILVDRLKPLKEQLQEKQGTVSWDELISQAKMVGVDLSAKELYVPGASGSYLNYGAAASEVEIDLLTGATTILRSDLIYDCGRSLNPAHASGQVEGAFVQGIGYFMNEEYVTNSDGLLVSDGTWTYKIPTVDTIPKQFNVKLLNSGFHKKRVLSSKASGEPPLLLAASVHCATREAIRAAREEYHCSRSGSSPPFFDLEVPAIMPTVKELCGLDNVEKYLESICSK

SEQ ID NO: 149962 - protein, 228 aa, Oryza sativa
  Clone ID: PAT_MRT4530_50243C.1.pep
MATRMCGRAGEPAVRKGPWTLEEDLILVSYISQNGEGSWDNLARSAGLNRNGKSCRLRWLNYLRPGVRRGSITPEEDMVIRELHSRWGNRWSKIAKHLPGRTDNEIKNYWRTKIHRKPRGRSQLLQEPCEDAMGMGMSTTTSEAASTSASSGQSQASPGVWDEYMQASSFPHPELVSFAADHHLEMAGVGEVAAAAAAQFVPTEFGFNDGFWNFVDNFWETMPVSDVV

SEQ ID NO: 149963 - protein, 1821 aa, Oryza sativa
  Clone ID: PAT_MRT4530_50244C.1.pep
MGSISGIDDLVFPPGQMFRFGSLDFVTNNFGKISLLDSESYQSGENRISVPFGLPNAAESYFKTISIESASNHSGEIASSPTSPDQDDGAYPPILMELPDDLATVSIMTAPSSRRPRRKSASTPISPSFREVGVILQPLGTVSTDQLDGYYSSPTVDSRPTDIVEYDEFGSRYYNDPDLDDFDGSLEDNYTPLYFGVFMADNETEEQCQARETEARREIERRRLEQERQAQEQERLRRDQHERERTAKEAEDRRQRALEAGRRARDFIGQQDVEGIPVFRTPQQNAVAAITLLDTLLKENEHNQSDHVVNILNQTKTMIAASVPVNSESVHTPTGSRLPHFRSHDYRHLSLSITGAGSNRRSRGHDERSVHSPPDHHGERRVEWPRSPPRRRPVDLRDTIIQRRAARGRHHYSPDRHDDDLDGVAAFTDDLRRVDWPAGFKPTGIEKYDGTTNPESWLTVYGLAIRAAGGDSKAMANYLPVALADSARSWLHGLPRGTIGSWAELRDRFIANFQGTFERPGTQYDLYNVIQKSGESLREYIRRFSEQRNKISDITDDVIIAAFTKGIRHEELVGKFGRKPPRTVKLMFEKANEYAKAEDAVTASKQSGPSWKPKNTPATGGGGSNNHKDRKRKPEELVATATHSSRQRSRVNTFDKIMNSQCPHHPNSNHVAKDCFVYKQFAEQYTKPTRKNSDEEQSTSRKKDDGDTPAGFQDHRKELNHIFGGPLAYESKRKQKLTEREINAVQPDTPQYLRWSEIAIKFDRSDHPDRVVHPGRYPLVLDPVVRNVKLRRTLIDGGSALNILFAKTLDDMQIPRSELKPSNTPFHGVIPGLSATPLGQITLPVTFGTRENFRTENISFEVADFETAYHAILGRPALAKFMAVPHYTYMMMKMPGLRGVLTLRSDIKQAVTCDKESCDMAQTREIASAREDIRLAATTNNKDIFAWKPSDMPGIPREVIEHSLQVKEDAKRIKQRLRRFAQDRKDAIKEELTKLLAAGFIKEVHHPDWLVNPVLVRKKTGQWRMCVDYTDLNKSCPKDPFGLPRIDQESDCLKASFITPFGAYCYVTMPFGLKNAGATYQRMIQRCFSTQIGRNVEAYVDDVVVKTKQKDDLILDLEETFASIRAFRMKLNPEKCTFGVPSGKLLGFMVSHRGIQANPEKVTAILNMKPPSTQKDVQKLTGCMAALSRFVSRLGERGMPFFKLLKKTDDFQWGPEAQKAFEDFKKLLTKPPVLASPYPQEPLLLYVSATSQVVSTVLVVEREEEGHVQKVQRPIYFVSEVLADSKTRYPQVQKLLYGILITTRKLSHYFQGHSVTVVTSFPLGDILHNREANGRIAKWALELMSLDISFKPRTSIKSQALADFVAEWTECQEDAPTEKIEHWTMHFDGSKRLSGTGAGVVLISPTGERLSYVLWIHFSASHNVAEYEALLHGLRIAISLGIKRLIVRGDSQLVVNQVMKEWTCLDDNMMAYRQEAAPSDVFVEHLYTPTVPHKDATQVAGTHDVAMVEADWREPLIRFLTSQELPQDKDEAERISRRSKLYVMHEAELYKKNPSGILQRCVSLEEGRQLLKDIHSGICGNHAAARTIVGKAYRQGFFWPTAVSDADKIVRTCEGCQFFARQIHLPAQELQTIPLSWPFAVWGLDMVGPFKKAVGGYTHLFVAIDKFSKWIEAKPVVTITADNARDFFLNIVHRFGVPNRIITDNGRQFTGGVFKDFCEDFGIKICYASVAHPMSNGQVERANGMILQGIKARVFDRLKPYAGKWVAQLPSVLWSLRTTPSRATGQSPFFLLYGAEAMLPSEVEFESLRFRNFREERYEED

SEQ ID NO: 149964 - protein, 771 aa, Oryza sativa
  Clone ID: PAT_MRT4530_50245C.1.pep
MAGVLRLAGAARSPLARALAPAARRMGASAAAAMEDEAYWTEWEEEEEKARARESAPVAEMCPTGGGGGGPQWVVMGRPGPQKHAHAARLAEVLAVPYISMGTLVRQELSPASSLYKKIANSVNEGKLVPEDIIFGLLTKRLEEGYNKGETGFILDGIPRTHMQAEILDEIVDIDLVLNFKCADNCFMKRRFGGDICPHCGQLFDFSKTASSDRNPSLGSCTWPSQVQHAAVLGLEDSRMEKMRAYAEQVTWALRIVVKQRLWSDYLHSSLVAVHDEPLFLSQLKVDAKRWAQHKKTKPQPRRRERQAKPPHFPAAAAAVTAAAMETVETLVAHIQGLSGSGEELAHLHNLLRQADGEPLRAHSAALLPFLAQLHPSAHSLGFLYLLEAFASSASNLRAQGGGDFLVTTADFLVSCSAEQIRLAPDKFLSVCRVFKNEVMQLNAPIRGIAPLRAAIRKIQTSSEELTPIHADYLLLCLLAKQYKAGLSVLEDDILEVDQPKDLFLYCYYGGMIYIGLKKFTIALDFLHNCLQCYAFLQAVTVPMSSLNAIAVEAYKKYILVSLIQNGQIPLLDKGESIFMVPSFPKYTSSTAQRNLKNHAQVYVDLSTCYSKGNYSELEEYIQLNAEKFQSDNNLGLVKQVLSSMYKRNIQRLTQTYLTLSLEDIASSVQLKTPKEAEMHVLRMIEDGEIHATINQKDGMVSFHEDPEQYKSCEMVEHIDSSIQRLMALSKKLSSIDENISCDPAYLMKTGRERGGRFDYDDFDSVPHKYF

SEQ ID NO: 149965 - protein, 209 aa, Oryza sativa
  unsure (1)..(209): unsure at all Xaa locations
  Clone ID: PAT_MRT4530_50246C.1.pep
MDAGSTTRRRRVSASSRWPXAPIPQAHSRPRSXQKPMCLGVTELRLSSAEEHARFRRIVFEAPLSGFYLLPPPNDHHLSPYWSPATTHLSRDSASGVLFMFALFAVQPLPVRCCQSRRREWQIRPLPPLPRAGTVDLPVPIVAVHHLPIYPPPSLPRVEATDLLAPATAATPVVVGGGSARNHHHCRSLSLGGSVKFEPHIGEDAGSNL

SEQ ID NO: 149966 - protein, 1032 aa, Oryza sativa
  Clone ID: PAT_MRT4530_50247C.1.pep
MPGIPREVIEHSLHVKEDAKPIKQRLRRFAQDRKDAIKEELTKLLAAGFIKEVLHPDWLANPVLVRKKTGQWRMCVDYTDLNKSCPKDPFGLPRIDQVVDSTAGCELLSFLDCYSGYHQIRLKESDCLKTSFITPFGAYCYVTMPFGLKNAGATYQRMIQRCFSTQIGRNVEAYVDDVVVKTKQKDDLISDLEETFASIRAFRMKLNPEKCTFGVPSGKLLGFMVSHRGIQANPEKVTAILNMKPPSTQKDVQKLTGCMAALSRFVSRLGERGMPFFKLLKKTDDFQWGPEAQKAFEDFKKLLTEPPVLASPHPQEPLLLYVSATSQVVSTVLVVEREEEGHVQKVQRPIYFVSEVLADSKTRYPQVQKLLYGILITTRKLSHYFQGHSVTVVTSFPLGDILHNREANGRIAKWALELMSLDLSFKPRISIKSQALADFVAEWTECQEDTTVKKMEHWTMHFDGSKRLSGTGAGVVLISPTGERLSYVLWIHFSASHNVAEYEALLHGLRIAISLGIKRLIVRGDSQLVVNQVMKEWSCLDDNMKAYRQEVRKLEDKFDGLELSHVLRHDNEAADRLANFGSKREVAPSDVFVEHLYTPTVPHKDTTQAAGIHDVAMVETDWREPLIRFLTSQELPQDKDEAERISRRSKLYVMHEAELYKKSPSGILQRCVSLEEGRQLLKDIHSGICGNHAAARTIVGKAYRQGFFWPTAVSDADKIVRTCEGCQFFARQIHLPAQELQTIPLSWPFAVWGLDMVGPFKKAVGGYTHLFVAIDKFSKWIEAKPVVTITADNARDFFINIVHRFGVPNRIITDNGTQFTGGVFKDFCEDFGIKICYASVAHPMSNGQVERANGMILQGIKARVFDRLKPYAGKWVQQLPSVLWSLRTTPSRATGQSPFFLVYGAEAMLPSEVEFESLRFRNFREERYEEDRVDDLHRLEEVREAALIRSARYLQGLRRYHNRNVRSRAFLVGDLVLRKIQTTRDRHKLSPLWEGPFIISEVTRPGSYRLKREDGTLVDNSWNIEYLRRFYA

SEQ ID NO: 149967 - protein, 143 aa, Oryza sativa
  Clone ID: PAT_MRT4530_50248C.1.pep
TRATLAAVQPTTAVNGLAGSSIVGTKLHVKSSRLNLKSTKSRAGSVVAKYGDKSVYFDLEDLGNTTGQWDLYGSDAPSPYNPLQSKFFETFAAPFTKRGLLLKFLILGGGSTLAYFSSTASGDILPIKKGPQLPPKLGPRGKI

SEQ ID NO: 149968 - protein, 1408 aa, Oryza sativa
  unsure (1)..(1408): unsure at all Xaa locations
  Clone ID: PAT_MRT4530_50249C.1.pep
MGPISGIDDLVFPPGQSGENRLSVPFGLPNTAESYFKTISIESASNHSAEIAFSSTTPDQDDGAYPPVLMKLPDDLAAVSTTTASSSRYNSSPTVDSRPTDIVEYDEFSSRYNDFDDFDDFDGSLDDNYTPLYFGVFMANNETEEQRQARETEERRRLEEEHQAQEQERLRREQQDRERTAKEAEDRRQRALEAGRRARDLIGQQDVEGTPVFRTPQQNAVAAITLLDTLLNQNELNQSDHVVNILNQTKTMIAASVPVNSESVHTPTGSRVPHFRSHDYRHPSLSITGAGSNRRSRGHDERSVHSPPDHHRERRVERPRSPPRRRPIDLRDTIIQRRAARGYHHSPDRHDDDLDGVAAFTDDLRRVDWPAGFKPTGIEKYDGTTNPESWLTVYGLAIRAAGGDSKAMANYLPGTFERPGTQYDLYNVIQKSGESLRDYIWRFSEQRNKISDITDDVIIAAFTKGIRHEELVGKFGRKPPRTVKLMFEKANEYAKAEDAVTASKQSGPSWKPKKDTPATGGGGSNNHKDRKRKPAELVATASHSSRQRSRVNTFDKIMNSQCPHHPNSNHVAKDCFVYKQFADQYTKTARKNSDEEQSTSRKKDDGDTPAGFQDHRKELNHIFGSPLAYESKRKQKLTEREINAVQPDTPQYLRWSEIAIKFDRSDHPDRVVHPGRYPREVIEHSLHVKEDAKPIKQRLRRFAQDRKDAIKEELTKLLAAGFIKEVLHPDWLANPVLVRKKTRQWRMCVDYTDLNKSCPKDPFGLPRIDQVVDSTAGCELLSFLDCYSGYHQIRLKESDCLKTSFITPFGAYCYVTMPFGLKNAGATYQRIIQRCFSTQIGRNVEAYVDDVVVKTKMKLNPEKCTFGVPSGKLLGFMVSHRGIQANPEKVTAILNMKPPSTQKDVQKLTGCMAALSRFVSRLGERGMPFFKLLKKTDNFQWGPEAQKAFEDFKKLLTEPPVLASPRPQEPLLLYVSATSQVVSTVLVVEREEEGHVQKVQRPIYFVSEVLADSKTRYPQVQKLLYGILITARKLSHYFQGHSVTVVTSFPLGDILHNREANGRIAKWALELMSLDISFKPRISIKSQALADFVAEWTECQEDTPAEKMEHWTMHFDGSKRLSGTGAGIHFSASHNVAEYEALLHGLRIAISLGIKRLIVRGDSQLVVNQVMKEWSCLDDNMMAYRQEVRKLEDKFDGLELSHVLRHNNEAADRLANFGSKREVAPSDVFVEHLYSPTVPHKDATQVARTHDVAMVEADWREPLIRFLTSQELPQDKDEAERISRRSKLYVMHEAELYKKSPSGILQRCVSLEEGRQLLKDIHSGICGNHAAARTIVGKAYRQGFFWPTAVSDADKIVRTCEGCQXSPDKFIYQLKSCKQSRCLGRLRFGGSTWLARLKRQSAVTRISL

SEQ ID NO: 149969 - protein, 315 aa, Oryza sativa
  Clone ID: PAT_MRT4530_5024C.1.pep
MELNFQVQPPVFQLQDYCYYYSQEVAAAASPAAKPTKPRGRKKGSTSHSKFVGVRQRPSGRWVAEIKDTTQKIRMWLGTFETADAAARAYDEAARLLRGAEARTNFAPRISPDCPLAVRIRGILHHKKLKKARSAAAATAGSPGAASKKRSTTAAAAAATPTITTTSNSNSDGAGSACGGSSSSSSSTDSCDGAVKQGGGGGGAPTDASEVYRPDFVHAGAEEFDSWMFDTAFGPFPELDSFAAVDAVTPPPATASPEESSAGTPPVEMAEFERIKVERRISASLYAMNGLQEYFDKVFDASACDPFWDFSPLCH

SEQ ID NO: 149970 - protein, 433 aa, Oryza sativa
  Clone ID: PAT_MRT4530_50250C.1.pep
TRPRPKKKRGQRQPTHPLPSPSSAHESTTNPAIELKMASAVTISSVGAQAGMISKPRNHGFTSYSGLKAASSVSFESGSSFLGRNASLRASVAPRIVPKAKSGSQISPEASYKVAVLGAAGGIGQPLGLLIKMSPLVSELHLYDIANVKGVAADLSHCNTPSQVLDFTGPSELANCLKGVDVVVIPAGVPRKPGMTRDDLFNINASIVKSLVEAVADNCPEAFIHIISNPVNSTVPIAAEVLKQKGVYNPKKLFGVTTLDVVRANTFVAQKKNLKLIDVDVPVVGGHAGITILPLLSKTMPSVTFTDEETEQLTKRIQNAGTEVVEAKAGAGSATLSMAYAAARFVESSLRALAGDPDVYECTFVQSELTELPFFASRVKLGKNGVESIISADLEGVTEYEAKALEALKSELKASIEKGIEFVHKQQTAAASV

SEQ ID NO: 149971 - protein, 1928 aa, Oryza sativa
  Clone ID: PAT_MRT4530_50251C.1.pep
MGSISGIDDLVFPPGQTFRFGSLDFITNNFGKISLLDSESDQSGENQISVPFGFPNAAESYFKTISTESASNHSAEIASSPTTPDQDDGAYPPVLMKLPDDLAAVFTTTASSSCRPRRKSASTPISPSFREVGVILQPLGTVSTDQLDDYNSSPTVDSRPTDIVEYDEFSSRYNDFDDFDGSLDDNYTPLYFGVFMANNETEQDVEGTPVFRTPQQNAVAAITLLDTLLNQNELNRSDHVVNILNQTKTMIAASVPVNSESVHTPTGSRVPHFRSHDYRHPSLSITGAGSNRRSRGHDVRSVHSPPDLHRERRVERPRSPPRRRPIDLRDTIIQRRAARGYHHSPDRHDDDLDGVAAFTDDLRRVDWPAGFKPTGIEKYDGTTNPESWLTVYGLAIRAAGGDNKAMANYLPVALADSARSWLHGLPRGTIGSWAELRDHFIANFQGTFERPGTQYDLYNVIQKSGESLRDYIRRFSEQRNKISDITDDVIIAAFTKGIRHEELVGKFGRKPPRTVKLMFEKANEYTKAEDAVTASKQSGPSWKQNKGTPATGGGGSNNHKDRKRKPAELVATASHSSRQRSRVNTFDKIMNSQCPHHPNSNHVAKDCFVYKQFADQYTKTARKNSDEEQSTSRKKDDGDTPAGFQDHRKELNHIFGGPLAYESKRKQKLTEREINAVQPDTPQYLRWSEIAIKFDRSDHPDRVVHPGRYPLVLDPVVRNVKLRRTLIDGGSALNILFAKTLDDMQIPRSELKPSNAPFHGVIPGLSATPLGQITLPVTFGTRENFRTENISFEVADFETAYHAILGRPALAKFMAVPHYTYMMMKMPGPRGVLSLRSDIKQAVTCDKESCDMAQTREMASAREDIRLAAATASEGEIPATKTSKSGESEAKTKKIPLDPSDPTKTANNKDIFAWKPSDMPGIPREVIEHSLHVKEDAKPIKQRLRRFAQDRKDAIKEELTKLLAAGFIKEVLHPDWLANPVLVRKKTGQWRMCVDYTDLNKSCPKDPFGLPRIDQIRLKESDCLKTSFITPFGAYCYVTMPFGLKNAGATYQRMIQRCFSTQIGRNVEAYVDDVVVKTKQKDDLISDLEETFASIRAFRMKLNPEKCTFGVPSGKLLGFMVSHRGIQANPEKVTAILNMKPPSTQKDVQKLTGCMAALSRFVSRLGERGMPFFKLLKKTDNFQWGPEAQKAFEDFKKLLTEPPILASPHPQEPLLLYVSATSQVVSTVLVVEREEEGHVQKVQRPIYFVSEVLADSKTRYPQVQKLLYGILITTRKLSHYFQGHSVTVVTSFPLGDILHNREANGRIAKWALELMSLDISFKPRISIKSQALADFVAEWTECQEDTPAENMEHWTMHFDGSKRLSGTGAGVVLISPTGERLSYVLWIHFSASHNVAEYEALLHGLRIAISLGIKRLIVRGDSQLVVNQVMKEWSCLDDNMMAYRQEVRKLEDKFDGLELSHVLRHNNEAADRLANFGSKREMAPSDVFVEHLYTPTVPHKDTTQDADTHDVALVEADWREPFIRFLTSQELPQDKDEAERISRRSKLYAMHEAELYKKSPSGILQRCVSLEEGRQLLKDIHSGICGNHAAARTIVGKAYRQGFFWPTAVSDADKIVRTCEGCQFFARQIHLPAQELQTIPLSWPFAVWGLDMVGPFKKAVGGYTHLFVAIDKFSKWIEAKPVVTITADNARDFFINIVHRFGVPNRIITDNGTQFTGGVFKDFCEDFGIKICYASVAHPMSNGQVERANGMILQGIKARVFDRLKPYAGKWVQQLPSVLWSLRTTPSRATGQSPFFLVYGAEAMLPSEVEFESLRFRNFREERYEEDRVDDLHRLEEAREAALIRSARYLQGLRRYHNRNVRSRAFLVGDLVLRKIQTTRDRHKLSPLWEGPFIISEVTRPGSYRLKREDGTLVDNSWNIEHLRRFYA

SEQ ID NO: 149972 - protein, 2001 aa, Oryza sativa
  Clone ID: PAT_MRT4530_50252C.1.pep
MGSISGIDDLVFPPGQTFRFGSLDFVTNIFGKISLLDSESDQSGENQISAPFGLPNAAESYFKTISTESASNHSGEIASSPTSPDQDDGVYPPILMKLPDDLAAVSITPASLSRRPRRKSASTPISPSFREVGVILQPLGTVSTDQLDGDYSSPTVDSRPTDIVEYDEFTSRYHDPDLDDFDGSLDDNYTPLYFGVFMANNETEEQRQARETEARRETERRRLEEEHQAQEQERLRHEQQERERTAKEAEDRRQRALEAGRRARDLIGQQDVEGTPVFRTPQQNAVAAITLLDTLLRENELNQSDHVVNILNQTKTVIAASVPVNSESVHRPTGSRVPHFRSHDYRHPSLSITGAGSNRRSRGHDERSVHSPPDHHRERRVERPRSPPRRRPVDLRDTIIQRRAARGYHHSPDRHDDDLDGVAAFTDDLRRVDWPAGFKPTGIEKYDGTTNPESWLTVYGLAIRAAGGDSKAMANYLPVALADSARSWLHGLPRGTIGSWAELRDHFIANFQGTFERPGTQYDLYNVIQKSGESLRDYIRRFSEQRNKISDITDDVIIVAFTKGIRHEELVGKFGRKPPRTVKLMFEKANEYAKAEDAVTTSKQSGPSWKPKKDTPASGGGGSNNHKDRKRKPAELVATASHSSRQRSRVNTFDKIMNSQCPHHPNSNHVAKDCFVYKQFADQYTKTTRKNSDEEQSTSRKKDDGDTPAGFQDHRKELNHIFGGPLAYESKRKQKLTEREINAVQPDTPQYLRWSEIAIKFDRSDHPDRVVHPGRYPLVLDPVVRNVKLRRTLIDGGSALNILFAKTLDDMQIPRSELKPSNAPFHGVIPGLSATPLGQITLPVTFGTRENFRTENISFEVADFETAYHAILGRPALAKFMAVPHYTYMMMKMPGPRGVLSLRSDIKQAVTCDKESCDMAQTREIASAREDIRLAAATADEGEVPATKTSKSGESEAKTKKIPLDPSDPTKTANNKDIFAWKPSDMPGIPREVIEHSLHVKEDAKPIKQRLRRFAQDRKDAIKEELTKLLAAGFIKEVLHPDWLANPVLVRKKTGQWRMCVDYTDLNKSCPKDPFGLPRIDQVVDSTAGCELLSFLDCYSGYHQIRLKESDCLKTSFITPFGAYCYVTMPFGLKNAGATYQRMIQRCFSTQIGRDVEAYVDDVVVKTKQKDDLISDLEETFASIRAFRMKLNPEKCTFGVPSGKLLGFMVSHRGIQANPEKVTAILNMKPPSTQKDVQKLTGCMAALSRFVSRLGERGMPFFKLLKKTDDFQWGPEAQKAFEDFKKLLTEPPVLASPHPQEPLLLYVSATSQVVSTVLVVEREEEGHVQKVQRPIYFVSEVLADSKTRKLSHYFQGHPVTVVTSFPLGDILHNREANERIAKWALELMSLDISFKPRISIKSQALADFVAEWTEFQEDTPAEKMEHWTMHFDGSKRLSGTGAGVVLISPTGERLSYVLWIHFSASHNVAEYEALLHGLRIAISLGIKRLIVRGDSQLVVNQVMKEWSCLDDNMMAYRQEVRKLEDKFDGLELSHVLRHNNEAADRLANFGSKREVAPSDVFVEHLYTPTVPHKDTAQIAGTHDVAMIEADWREPLIRFLTSQELPQDKDEAERISRRSKLYVMHEAELYKKSPSGILQRCVSLEEGRQLLKDIHSGICGNHAAARTIVGKAYRQGFFWPTAVSDADKIVRTCEGCQFFARQIHLPAQELQTIPLSWPFAVWGLDMVGPFKKAVGGYTHLFVAIDKFSKWIEAKPVVTITADNARDFFINIVHRFGVPNRIITDNGTQFTGGVFKDFCEDFGIKICYASVAHPMSNGQVERANGMILQGIKTRVFDRLKPYAGKWVQQLPSVLWSLRTTPSRATGQSPFFLVYGAEAMLPSEVEFESLRFRTFREERYEEDRVDDLHRLEEVREAALIRSARYLQGLRRYHNRNVRSRAFLVGDLVLRKIQTTRDRHKLSPLWEGPFIISDVTRPGSYRLKREDGTLVDNSWNIEHLRRFYA

SEQ ID NO: 149973 - protein, 96 aa, Oryza sativa
  unsure (1)..(96): unsure at all Xaa locations
  Clone ID: PAT_MRT4530_50253C.1.pep
SAMRRAAASVEGKGAAGMTQAKDGSSSSSAREVSWVPDPXTGHYRPSNFAGGXDRQAXPXRPPRXXLRPXVMXXSSXSSDRRRRHXSIYIWSESTT

SEQ ID NO: 149974 - protein, 2013 aa, Oryza sativa
  Clone ID: PAT_MRT4530_50254C.1.pep
MGSVSGIDDLVFPPGQTFWFGSLDFVTNNFGKISLLDSESDQSGENRLSVSFGFPNAAESYFKTISTESASNHSAEIASSPTTPDQDDGAYPPVLMKLPDDLAAVSTTTASSSRRPRRKSASTPISPSFREVGVILQPLGTVSTDQLDDYNSSPTIDSRPTDIVEYDEFSSRYNDFNDFDDFDGSLDDNYTPLYFGVFMANNETEEQRQARETEERHRLEEEHQAQEQERLRREQQDRERTAKEAEDRRQRALEAGRRARDLIGQQDVEGTPVFRTPQQNAVAAITLLDTLLNQNELNRSDHVVNILNQTKTMIAASVPVNSESVHTPTGSRVPHFRSHDYRHPSLSITGAGSNRRSRGHDERSVHSPPDLHRERRVERPRSPPRRRPIDLRDTIIQRRAARGYHHSPDRHDDDLDGVAAFTDDLRRVDWPAGFKPTGIEKYDGTTNPESWLTVYGLAIRAAGGDNKAMANYLPVALADSARSWLHGLPRGTIGSWAELRDHFIANFQGTFERPGTQYDLYNVIQKSGESLRDYIRRFSEQRNKISDITDDVIIAAFTKGIRHEELVGKFGRKPPRTVKLMFEKANEYAKAEDAVTASKQSGPSWKQNKGTPATGGGGSNNHKDRKRKPAELVATASHSSRQRSRVNTFDKIMNSQCPHHPNSNHVAKDCFVYKQFADQYTKTARKNSDEEQSTSRKKDDGDTPAGFQDHRKELNHIFGGPLAYESKRKQKLTEREINAVQPDTPQYLRWSEIAIKFDRSDHPDRVVHPGRYPLVLDPVVRNVKLRRTLIDGGSALNILFAKTLDDMQIPRSELKPSNAPFHGVIPGLSATPLGQITLPVTFGTRENFRTENISFEVANFETAYHAILGRPALAKFMAVPHYTYMMMKMPGPRGVLSLRSDIKQAVTCDKESCDMAQTREMASAREDIRLAAATASEGEVPATKISKSGESEAKTKKIPLDPSDPTKTANNKDIFAWKPSDMPGIPREVIEHSLHVKEDATPIKQRLRRFAQDRKDAIKEELTKLLAAGFIKEVLHPDWLANPVLVRKKTGQWRMCVDYTDLNKSCPKDPFGLPRIDQVVDSTAGCELLSFLDCYSGYHQIRLKESDCLKTSFITPFGAYCYVTMPFGLKNAGATYQRMIQRCFSTQIGRNVEAYVDDVVVKTKQKDDLILDLEETFASIRVFRMKLNPEKCTFGVPSGKLLGFMVSHRGIQANPEKVTAILNMKPPSTQKDVQKLTGCMAALSRFVSRLGERGMPFFKLLKKTDDFQWGPEAQKAFEDFKKLLTEPPVLASPHPQEPLLLYVSATSQVVSTVLVVEREEEGHVQKVQRPIYFVSEVLADSKTRYPQVQKLLYGILITTRKLSHYFQGHSVTVVTSFPLGDILHNREANGRIAKWALELMSLDISFKPRISIKSQVLVDFVAEWTECQEDTPAENKEHWTMHFDGSKRLSGTGAGVVLISPTGERLSYVLWIHFSASHNVAEYEALLHGLRIAISLGIKRLIVRGDSQLVVNQVMKEWSCLDDNMMAYRQEVRKLEDKFDGLELSHVLRHNNEAADRLANFGSKRETAPSDVFVEHLYTPTVPHKDTTQDADTHDVAMVEADWREPFIRFLTSQELPQDKDEAERISRRSKLYVMHESELYKKSPSGILQRCVSLEEGRQLLKDIHSGICGNHAAARTIVGKAYRQGFFWPTAVSDADKIVRTCEGCQFFARQIHLPAQELQTIPLSWPFAVWGLDMVGPFKKAVGGYTHLFVAIDKFSKWIEAKPVVTITADNARDFFINIVHRFGVPNRIITDNGTQFTGGVFKDFCEDFGIKICYASVAHPMSNGQVERANGMILQGIKARVFDRLKPYAGKWVQQLPSVLWSLRTTPSRATGQSPFFLVYGAEAMLPSEVEFESLRFRNFREESYEEDRVDDLHRLEEAREAALIRSARYLQGLRRYHNRNVRSRAFLVGDLVLRKIQTTRDRHKLSPLWEGPFIISEVTRPGSYRLKREDGTLVDNSWNIEHLRRFYA

SEQ ID NO: 149975 - protein, 855 aa, Oryza sativa
  unsure (1)..(855): unsure at all Xaa locations
  Clone ID: PAT_MRT4530_50255C.1.pep
PLHFSAQHKLQVLTLAYNNLTGTIPSSFANITGLRKLDFTANNIKGNIPNEFSNFLMMEILLLGGNMLTGRFPQAILNLSTLTNLHLSFNHLSGELPSNFLYSLPNLQVLALDYNFFQGHIPSSLGNDSNIRVLDITSNNFTGVVPSSIGKLSKLYWLNLXSNQLQAHKREDWEFMNSLANCTRLQSFSMAYNRLEGHLPSSLSNFSAHLQRLHLGGNAISESFPSGIEHLSNLIALSVGTNDFTGTLPEWLGNLKQLQILSLYDNYFTGFIPSSLSNLSQLVALTLQFNKLDGQIPSLGNQLQMLQIFNVLYNNLHGVIPNAIFSLPSLIQVDLSYNNLHGQLPIDIGNAKQLVSLKLSSNKLSGDILNALGDCESLEVIRLDRNNFSGSIPISLGNISSLRVLNLSLNNLTGSIPVSLSNLQYLEKLNLSFNHLKGEIPAKGIFKNATAFQIDGNQGLCGGPPALHLTTCPIVPLVSSKHNNLILLKVMIPLACMVSLATVISIIFIWRAKLKRESVSLPFFGSNFPRISYNALFKATEGFSTSSLIGRGRYGSVFVGKLFQENNVVAVKVFSLETRGAGKSFIAECNALRNVRHRNIVPILTACSSIDSKGNDFKALVYEFMSQGDLYNLLYTTRHDSNSSKLNHISLAQRTSIVLDVSSALEYLHHNNQGTIVHCDLNPSNILLDKNMIAHVGDFGLARFKIDSSSPSLGDSNLTSSLATRGTIGYIAPECSEGGQVSTASDVFSFGVVLLELFIRRRPIDDMFKDGLSIAKHVEMNFPDRILEIVDPQVQHELDLCQETPMAVKEKGIHCLRSVLNIGLCCTNPTPSERISMQEAAAKLHGINDSYLRGN

SEQ ID NO: 149976 - protein, 1988 aa, Oryza sativa
  Clone ID: PAT_MRT4530_50256C.1.pep
MGPFSGIDDLVFPPGQTFRFGSLDFITDNFGKISLLDSESNQSGENRISVPFGFPNAAESYFKTISTESASNHSAEIASSPMTPDQDDGAYPPVLMKLPDDLAAVSTTTASSSRRPRRKSASTPISPSFREVGVILQPLGTVSTDQLDDHYSPPTVDSRPTDIVEYDEFSSRYNDFHDFDDFDGSLDDDYTPLYFGVFMANNETEEQRQARETEERRRLEEEHQAQEQERLRREQQDRERIAKEAEDRRQRALEAGRRARDLIGQQDVEGTPVFRTPQQNAVAAITLLDTLLNQNELNRSDHVVNILNQTKTMIAASVPVNSESVHTPTGSRVPHFRSHDYRHPSLSITGAGSNRRSRGHDERSVHSPPDLHRERRVERPRSPPRRRPIDLRDTIIQRRAARGYHHSPDRHDDDLDGVAAFTDDLRRVDWPAGFKPTGIEKYDGTTNPESWLTVYGLAIRAAGGDNKAMANYLPVALADSARSWLHGLPRGTIGSWAELRDHFIANFQGTFERPGTQYDLYNVIQKSGESLRDYIRRFSEQRNKISDITDDVIIAAFTKGIRHEELVGKFGRKPPRTVKLMFEKANEYAKAEDAVTASKQSGPSWKPKNTPATGGGGSNNHKDRKRKPEELVATAAHSSRQRSRVNTFDKIMNSQCPHHPNSNHVAKECFIYKQFAEQYTKSTRKNSDEEQSTSRKKDDGDTPAGFQDHRKELNHIFGGPLAYESKRKQKLTEREINAVQPDTPQYLRWSEIAIKFDRSDHPDRVVHPGRYPLVLDPVVRNVKLRRTLIDGGSALNILFAKTLDDMQIPRSELKSSNAPFHGVIPGLSATPLGQITLPVTFGTRENFRTENISFEVADFETAYHAILGRPALAKFMAVPHYTYMMMKMPGPRGVLTLRSDIKQAVTCDKESCDMAQTREIASAREEIRLAATTESALITFLQNNKDIFAWKPSDMPGIPREVIEHSLHVKEDAKPIKQRLRRFAQDRKDAIKEELTKLLAAGFIKEVLHPDWLANPVLVRKKTGQWRMCVDYTDLNKSCPKDPFGLPRIDQVVDSTAGCELLSFLDCYSGYHQIRLKESESDCLKTSFITPFGAYCYVTMPFGLKNAGATYQRMIQRCFSTQIGRNVEAYVDDVVVKTKQKDDLILDLEETFASIRAFRMKLNPEKCTFGVPSGKLLGFMVSHRGVQANPEKVTAILNMKPPSTQKDVQKLTGCMAALSRFVSRLGERGMPFFKLLKKTDNFQWGPEAQKAFEDLKQLLTKPPVLASPHPQEPLLLYVSATSQVVSTVLVVEREEEGHVQKVQRPIYFVSEVLADSKARYPQVQKLLYGILITTRKLSHYFQGHSVTVVTSFPLGDVLHNREANGRIAKWALELMSLDISFKPRTSIKSQALADFVAEWTECQEDTPVEKIEHWTMHFDGSKRLSGTGAGVVLISPTGERLSYVLWIHFSASHNVAEYEALLHGLRIAISLGIKRLIVRGDSQLVVNQVMKEWSCIDDNMMAYRQEVRKLEDKFDGLELSHVLRHNNEAADRLANFGSKRETAPSDVFVEHLYTPTVPHKDTTQDADTRDIAMVEADWREPFIRFLTSQELPQDKDEAERISRRSKLYVLHESELYKKSPSGILQRCVSLEEGRQLLKDIHSGICGNHAAARTIVGKAYRQGFFWPTAVSDADKIVRTCEGCQFFARQIHLPAQELQTIPLSWPFAVWGLDMVGPFKKAVGGYTHLFVAFDKFSKWIEAKPVVTITADNARDFFIHIVHRFGVPNRIITDNGTQFTGGVFKDFCEDFGIKICYASVAHPMSNGQVERANGMILQGIKARVFDRLKPYAGKWVQQLPSVLWSLRTTPSRATGQSPFFLVYGAEAMLPSEVEFESLRFRNFREERYEDDRVDDLHRLEEVREAALIQSARYLQGLRRYHNRNVRSRAFLVGDLVLRKIQTTRDRHKLSPLWEGPFIISEVTRPGSYRLKREDGTLVDNSWNIEHLRRFYA

SEQ ID NO: 149977 - protein, 96 aa, Oryza sativa
  unsure (1)..(96): unsure at all Xaa locations
  Clone ID: PAT_MRT4530_50257C.1.pep
FIGVLADKLSRCCIGLXGLHPIGLYWIILLLFIIISRSXLYIIIYIGHIADCSKPYRYQLSQTDWHSRISSTFGPALELSRSRRPVCVFRINNMTR

SEQ ID NO: 149978 - protein, 73 aa, Oryza sativa
  Clone ID: PAT_MRT4530_50258C.1.pep
PTRAAASPDSKPRMAHESQEATTPKTANIADSGHIQPLRLPDTSESLNKVKHSADTNNVAPPSAISSKATHTL

SEQ ID NO: 149979 - protein, 184 aa, Oryza sativa
  unsure (1)..(184): unsure at all Xaa locations
  Clone ID: PAT_MRT4530_50259C.1.pep
MGGPSYAAVNPAAGQPDTPADPTPSRPPSPPVPRKGSSYTSDQAVIHSRLWXEWADGSEGGRLGRRAPHVSGTKGGRSTVDRDHLGNPPPVHGTDGPDQPGGRSDGVGTARHGSARHKAGRPAXRGDGGARPSATTGGVGDGGGRREGGGAAKASAHTGEERRGRGFSPRVGRRGRKTTANDGG

SEQ ID NO: 149980 - protein, 70 aa, Oryza sativa
  Clone ID: PAT_MRT4530_5025C.1.pep
REPCSHVLEISACVINYHVIESNILLQSRVRARPGAARPVGLRHSRSILTARGTGGLLRHLAPIVPPRSA

SEQ ID NO: 149981 - protein, 1971 aa, Oryza sativa
  Clone ID: PAT_MRT4530_50260C.1.pep
MGSVSGIDDLVFPPGQTFWFGSLDFVTNNFGKISLLDSESDQSGENRLSVSFGFPNAAESYFKTISTESASNHSAEIASSPTTPDQDDGAYPPVLMKLPDDLAAVSTTTASSSRRPRRKSASTPISPSFREVGVILQPLGTVSTDQLDDYNSSPTIDSRPTDIVEYDEFSSRYNDFNDFDDFDGSLDDNYTPLYFGVFMANNETEEQRQARETEERHRLEEEHQAQEQERLRREQQDRERTAKEAEDRRQRALEAGRRARDLIGQQDVEGTPVFRTPQQNAVAAITLLDTLLNQNELNRSDHVVNILNQTKTMIAASVPVNSESVHTPTGSRVPHFRSHDYRHPSLSITGAGSNRRSRGHDERSVHSPPDLHRERRVERPRSPPRRRPIDLRDTIIQRRAARGYHHSPDRHDDDLDGVAAFTDDLRRVDWPAGFKPTGIEKYDGTTNPESWLTVYGLAIRAAGGDNKAMANYLPVALADSARSWLHGLPRGTIGSWAELRDHFIANFQGTFERPGTQYDLYNVIQKSGESLRDYIRRFSEQRNKISDITDDVIIAAFTKGIRHEELVGKFGRKPPRTVKLMFEKANEYAKAEDAVTASKQSGPSWKQNKGTPATGGGGSNNHKDRKHCFVYKQFADQYTKTARKNSDEEQSTSRKKDDGDTPAGFQDHRKELNHIFGGPLAYESKRKQKLTEREINAVQPDTPQYLRWSEIAIKFDRSDHPDRVVHPGRYPLVLDPVVRNVKLRRTLIDGGSALNILFAKTLDDMQIPRSELKPSNAPFHGVIPGLSATPLGQITLPVTFGTRENFRTENISFEVANFETAYHAILGRPALAKFMAVPHYTYMMMKMPGPRGVLSLRSDIKQAVTCDKESCDMAQTREMASAREDIRLAAATASEGEVPATKISKSGESEAKTKKIPLDPSDPTKTANNKDIFAWKPSDMPGIPREVIEHSLHVKEDATPIKQRLRRFAQDRKDAIKEELTKLLAAGFIKEVLHPDWLANPVLVRKKTGQWRMCVDYTDLNKSCPKDPFGLPRIDQVVDSTAGCELLSFLDCYSGYHQIRLKESDCLKTSFITPFGAYCYVTMPFGLKNAGATYQRMIQRCFSTQIGRNVEAYVDDVVVKTKQKDDLILDLEETFASIRVFRMKLNPEKCTFGVPSGKLLGFMVSHRGIQANPEKVTAILNMKPPSTQKDVQKLTGCMAALSRFVSRLGERGMPFFKLLKKTDDFQWGPEAQKAFEDFKKLLTEPPVLASPHPQEPLLLYVSATSQVVSTVLVVEREEEGHVQKVQRPIYFVSEVLADSKTRYPQVQKLLYGILITTRKLSHYFQGHSVTVVTSFPLGDILHNREANGRIAKWALELMSLDISFKPRISIKSQVLVDFVAEWTECQEDTPAENKEHWTMHFDGSKRLSGTGAGVVLISPTGERLSYVLWIHFSASHNVAEYEALLHGLRIAISLGIKRLIVRGDSQLVVNQVMKEWSCLDDNMMAYRQEVRKLEDKFDGLELSHVLRHNNEAADRLANFGSKRETAPSDVFVEHLYTPTVPHKDTTQDADTHDVAMVEADWREPFIRFLTSQELPQDKDEAERISRRSKLYVMHESELYKKSPSGILQRCVSLEEGRQLLKDIHSGICGNHAAARTIVGKAYRQGFFWPTAVSDADKIVRTCEGCQFFARQIHLPAQELQTIPLSWPFAVWGLDMVGPFKKAVGGYTHLFVAIDKFSKWIEAKPVVTITADNARDFFINIVHRFGVPNRIITDNGTQFTGGVFKDFCEDFGIKICYASVAHPMSNGQVERANGMILQGIKARVFDRLKPYAGKWVQQLPSVLWSLRTTPSRATGQSPFFLVYGAEAMLPSEVEFESLRFRNFREESYEEDRVDDLHRLEEAREAALIRSARYLQGLRRYHNRNVRSRAFLVGDLVLRKIQTTRDRHKLSPLWEGPFIISEVTRPGSYRLKREDGTLVDNSWNIEHLRRFYA

SEQ ID NO: 149982 - protein, 246 aa, Oryza sativa
  Clone ID: PAT_MRT4530_50261C.1.pep
MEFDMLNSNPEAQLELMNTMLQLEQLSAFPDHHGMVVPCSPTSPCMGAQGGHHHFSSVNHQPAHGVVSSGGANTGDGYRDQYYTQLLPAAAYSNAAGGGRGSEYHTTTTTRPASGGGGDGGVGPAAMREMIFHIAALQPVNIDPETVRPPKRRNVRISTDPQSVAARMRRERISERIRILQRLVPGGTKMDTASMLDEAIHYVKFLKTQVQSLERAAAANGHRPPPPTATSAAAATVAYPGLNGQW

SEQ ID NO: 149983 - protein, 1992 aa, Oryza sativa
  Clone ID: PAT_MRT4530_50262C.1.pep
MGPVSGIDDPVFPPGQAFRFGSLDFVTNNFGKISLLDSESDQSGENRISVPFGFPNAAESYFKTISIESASNHSAEIASSPTSPDQDDGAYPPILMKLPDDLAAVSITTASPSRRPRRKSASTPISPSFREVGVILQPLGSVSTDQLDDYNSSSTVDSRPTDIVEYDEFSSRYNYADLDDFDGSLDDNYTPLYFGVFMANNETEEQRQARETEERRRLEEEHQAQEQERLRREQQESERTAKEAEDRRQRALEAGRRARDLIGQQDVEGTPVFRTPQQNAVAAITLLDTLLRENELNQSDHVVNILNQTKTMIAASVPVNSESVHTPTGSRVPHFRSHDYRHPSLSITGTGSNRRSRGHDERSVHSPPDHHRERRVERPRSPPRRHPFDLRDTIIQRRAARGYHHSPDRHDDDLDGVAAFTDDLRRVDWPAGFKPTGIEKYDGTTNPESWLTVYGLAIRAVGGDSKAMANYLPVALEDSARSWLHGLPRGTIGSWAELRDHFIANFQGTFERPGTQYDLYNVIQKSGESLRDYIRRFSEQRNKISDITDDVIIAAFTKGIRHEELVGKFGRKPPRTVKLMFEKANEYAKAEDAVIASKQSGPSWKPKKDTPATGGGGSNNHKDRKRKPAELVATASHSSRQRSRVNTFDKIMNSQCPHHPNSNHVAKDCFIYKQFADQYTKTTRKNSDEEQSTSKKKDDGDAPAGFQDHRTELNHIFGGPLAYESKRKQKLTEREINAVQPDTPQYLRWSEIAIKFDRLDHPDRVVHPGRYPLVLDPVVRNVKLRRTLIDGGSALNILFAKTLDDMQIPRSELKPSNAPFHGVIPGLSATPLGQITLPVTFGTRENFRTENISFEVADFETAYHAILGRPALAKFMAVPHYTYMMMKMPGPRGVLSLRSDIKQAVTCDKESCDMAQIREMASAREDIRLAAATASEGEIPATKTSKSGESEAKTKKIHLDSSDPTKTANNKDIFAWKPSDMPGIPREVIEHSLHVKEDAKPIKQRLRRFAQDRKDAIKEELTKLLAAGFIKEVLHPDWLANPVLVRKKTGQWRMCVDYTDLNKSCPKDPFGLPRIDQVVDSTAGCELLSFLDCYSGYHQIRLKESDCLKTSFITPFGAYCYVTMPFGLKNAGATYQRMIQRCFSTQIGRNVEAYVDDVVVKTKQKDDLISDLEETFASIRAFRMKLNPEKCTFGVPSGKLLGFMVSHRGIQANPEKVTAILNMKPPSTQKDVQKLTGCMAALSRFVSRLGERGMPFFKLLKKTDDFQWGPEAQKAFEDFKKFLTEPPVVSTVLVVEREEEGHVQKVQRPIYFVSEVLADSKTRYPQVQKLLYGILITTRKLSHYFQGHSVTVVTSFPLGDILHNREANGRIAKWALELMSLDISFKPRISIKSQALADFVAEWTECQEDTPAEKMEHWTMHFDGSKRLSGTGAGVVLISPTGERLSYVLWIHFSASHNVAEYEALLHGLRIAISLGIKRLIVRGDSQLVVNQVMKEWSCLDDNMMAYRQEVRKLEDKFDGLELSHVLRHNNEAADRLANFGSKREMAPSDVFVEHLYAPTVPHKDTTQVAGTHDVAMVEADWREPLIRFLTSQELPQDKDEAERISRRSKLYVMHEAELYKKSPSGILQRCVSLEEGRQLLKDIHSGICGNHAAARTIVGKAYRQGFFWPTAVSDADKIVRTCEGCQFFARQIHLPAQELQTIPLSWPFAVWGLDMVGPFKKAVGGYTHLFVAIDKFSKWIEAKPVVTITADNARDFFINIVHRFGVPNRIITDNGTQFTGGVFKDFCEDFGIKICYASVAHPMSNGQVERANGMILQGIKARVFDRLKPYAGKWVQQLPSVLWSLRTTPSRATGQSPFFLVYGAEAMLPSEVEFESLRFRNFREERYEEDRVDDLHRLEEVREAALIRSARYLQGLRRYHNRNVRSRAFLVGDLVLRKIQTTRDRHKLSPLWEGPFIISEVTRPGSYRLKREDGTLVDNSWNIEHLRRFYA

SEQ ID NO: 149984 - protein, 53 aa, Oryza sativa
  Clone ID: PAT_MRT4530_50263C.1.pep
RTLAEPRISNGRQRGLLHPRPVARQGSRQRCYPPLASIRSSSTATMRSTGPSR

SEQ ID NO: 149985 - protein, 111 aa, Oryza sativa
  Clone ID: PAT_MRT4530_50264C.1.pep
MRFFLKLAPRCSVLLLLLLVTASRGLNIGDLLGSTPAKDQGCSRTCESQFCTNDYLNTMCNENLLSCIDRVSGATFPGNKCNVGQTASVIRGVIETAVFAGKILHKRDDGQ

SEQ ID NO: 149986 - protein, 153 aa, Oryza sativa
  Clone ID: PAT_MRT4530_50265C.1.pep
MRFFLKLAPRCSVLLLLLLVTASRGLNIGDLLGSTPAKDQGCSRTCESQFCTIAPLLRYGKYCGILYSGCPGERPCDALDACCMVHDHCVDTHNDDYLNTMCNENLLSCIDRVSGATFPGNKCNVGQTASVIRGVIETAVFAGKILHKRDDGQ

SEQ ID NO: 149987 - protein, 76 aa, Oryza sativa
  Clone ID: PAT_MRT4530_50266C.1.pep
WYPKEGFGNARHCLCISFINPNGPIDIFYCLGSATHLDVHCFPNVTTMVRSRITPFCSLPSFPTSLPSLCVYREKP

SEQ ID NO: 149988 - protein, 159 aa, Oryza sativa
  Clone ID: PAT_MRT4530_50267C.1.pep
MGTVEQASEAGGGGTKRQRVETSVRRGTWHPTQGYIVFDLRRRDKSNVPSAQAIVSFTSASFEAASGIIGVSAGGEIVAVVRAALRWSATPQRRQRGWGVRRAIETMECRCREQPRSVAQPANIFQELAHRCSALLLIELSRKRHVNAMWDEDLVKGAM

SEQ ID NO: 149989 - protein, 82 aa, Oryza sativa
  unsure (1)..(82): unsure at all Xaa locations
  Clone ID: PAT_MRT4530_50268C.1.pep
MGKEKTHINIVVIGHVYSGRWTTTGHLIYKLVGIRKRVTERFEKEAXETNKRSFKDALVLRKLKAEPARRIPSDLPLREFHT

SEQ ID NO: 149990 - protein, 81 aa, Oryza sativa
  unsure (1)..(81): unsure at all Xaa locations
  Clone ID: PAT_MRT4530_50269C.1.pep
KPPRRCLEAAAPPPXSRRAAPCVTIEPEGVADPSEGQDPQDFEQGKSSLFFEHVDPNREIVLFINKIACNYEHPTCDYTMP

SEQ ID NO: 149991 - protein, 92 aa, Oryza sativa
  Clone ID: PAT_MRT4530_5026C.1.pep
GKEPGGPNLPVNEAPFPRSGGGGGGFRGGGGGYGGGRGGGGYRGGGGGGFGPREGGFGGGGGFGGGRGGGGGGFGGNRGGGFGGGSGGNWRN

SEQ ID NO: 149992 - protein, 270 aa, Oryza sativa
  Clone ID: PAT_MRT4530_50270C.1.pep
MGGRSEAVAVAAGTAVGSGGGGGSGGSGGGDDGRERRRRRRRWSGAVVGTAVAVGTAETADGACGGHGVETVVAAVWKQQQQLAAPASSLHSARPPCELSPQHAADRARPPSDILSPWAAVVAREASDGDGGGESEGKTWRWQQAGEILSPWAAAVGEELARRREVSTLNRHPNRHRRLLRSRPLSQPPPPPPPSSLPTAIPTATAAASFSAPDRRCHRHCSRLPSQPPQPPPPLSLPTAVPSATATAQSYGPSGPKIVSATNGHTTIMD

SEQ ID NO: 149993 - protein, 44 aa, Oryza sativa
  Clone ID: PAT_MRT4530_50271C.1.pep
MSRVAAKPGDLFSKFGMPGDHISLEEVAEYENVITKEFRRIEIL

SEQ ID NO: 149994 - protein, 195 aa, Oryza sativa
  Clone ID: PAT_MRT4530_50272C.1.pep
MAGDLARGVGDDDTGAVLPAGSETRRSIFSWDDKFVKAQALVTKALKPILLLIRSCSWKLPADGSHTEMKTNLDQFICNLMQHSGGNRKMGQRTKMSRGCGVTRVVAESVDPPCLMGRSALDVTLASLVLAVHVDHLMATRAASLQCDGGGGRRRSSLRPLGHRWTTSSALDDDDDAGAAGPPSYDDDDTSCCIY

SEQ ID NO: 149995 - protein, 122 aa, Oryza sativa
  unsure (1)..(122): unsure at all Xaa locations
  Clone ID: PAT_MRT4530_50273C.1.pep
MRNRSLWSMWLRLKSSCFLTANKGFIGVSAGELSXRCIGSXGLHPIGFYWIILLYXYYHQPIAFIXIIYIAHIADCXKPYRYRLDQTDWHARISITFRPALELSRSPRPVCSIFSSTLSEAS

SEQ ID NO: 149996 - protein, 149 aa, Oryza sativa
  unsure (1)..(149): unsure at all Xaa locations
  Clone ID: PAT_MRT4530_50274C.1.pep
MRTSSFLGKADVVLRGFSGYNTRWALRVLARAMEGCXPPWGXADPVAVTVFLGANDTSLPDWKQVHQHVPLDEYQSNLRAICAYFKGHVXGEDDPSKLPERTNEATGTYAQACLTVAKELNHPVIDIWTKMQQFPDWQTSALWFMALAI

SEQ ID NO: 149997 - protein, 238 aa, Oryza sativa
  Clone ID: PAT_MRT4530_50275C.1.pep
MRPRLVLFGDSITELSFADGGWGAALADHFARKADVVLRGFSGYNTRWALRVLARAMEGAAAAADPAAVTVFFGANDASLPERKQVHQHVPLDEYQSNLRSICAYFKEQWPSTKIILITPPPIYEPARIRDMYGEDDPSKLPERTNEAAGTYAQACLTVAKELNHPVIDIWTKMQQFPDWQTSALCDGLHFTPLGNKILFDCVLETLESIGFSQGSLQPDLPLFHDIDPKDPLKAFEI

SEQ ID NO: 149998 - protein, 366 aa, Oryza sativa
  Clone ID: PAT_MRT4530_50276C.1.pep
MAMGRWDASIQVEVNMCSHETLPILIGGDFNILRSPNEKNNDNFDDIWPFLFNSIIDGLCLRELQMSGRNFTWANNLANPTYEKLDRILVSTEWEQKFSLSSVVALNRDISDHTPLLLNTKSSSCTNAQHSFKFELGWLIRDGFVDMDGDQLISGDANLKSNITTYYKGLFGPPHDSDLQLDENNVADIPQVSHLVNEALTKEFSENEVKETIFQMEHNKAPGLDGFPDFHAGNLLLYSLNFGTIILLLKCVEAMKIQQYRPICLLNVSFKIFTKVATKRIMGVAQKRAKETGLLNGVIPHLVDDGSFLIKIGKVLKKELRKSLVVGKAIICLLEIEFSSEWSFSGQPTGSEREHSYKGVMKIRSA

SEQ ID NO: 149999 - protein, 57 aa, Oryza sativa
  Clone ID: PAT_MRT4530_50277C.1.pep
FFFFFFFFFFFFFFFFFFFFFPPKNTLFHFFLKGNRTKFHSRFRQMVYDFSDPWAEG

SEQ ID NO: 150000 - protein, 106 aa, Oryza sativa
  unsure (1)..(106): unsure at all Xaa locations
  Clone ID: PAT_MRT4530_50278C.1.pep
LIRPLSLRARXAXSRRWTSPWWTSRRTSXAPSPGAARRGRRRCARCGXXKRXXRDTGALLXKDPRCPAADNXRFLDVVSHYFXPIPPTSSASRSAPNFTIRLVXKT

SEQ ID NO: 150001 - protein, 108 aa, Oryza sativa
  unsure (1)..(108): unsure at all Xaa locations
  Clone ID: PAT_MRT4530_50279C.1.pep
AKXKVLCSRSTGFXGKXKRGAENXGXGXXRGDXXXRMSXRNXEELKTXKXRCHXXXLXTRDRVRGWTHERRLSPSSRTCWEQSRRHVRRDPKSGSVMILVLVGILSLI

SEQ ID NO: 150002 - protein, 114 aa, Oryza sativa
  Clone ID: PAT_MRT4530_5027C.1.pep
LRTGRSPRPKSFRFFLSEPTLVLLLYGPVFYAVCNFERIFLPPRTRPFPGYAILSPVLFIELSGPPPGPGLPGLGHAPVGCGAWDCPPLALLSERQSSPTGLVYQRYSPRPGLV

SEQ ID NO: 150003 - protein, 87 aa, Oryza sativa
  Clone ID: PAT_MRT4530_50280C.1.pep
MAYHNAELLVKLETNDELMSQKEAKLSGLKQKLGVTLIKKHHRWGQSEWICILQRGRGGPRTGGLHFVRRSDVDANVSPQDSIARRQ

SEQ ID NO: 150004 - protein, 614 aa, Oryza sativa
  Clone ID: PAT_MRT4530_50281C.1.pep
MPLLHAANLRVLLAGAAFAHLSSPAATARASSPSAPPPPAPPPPPRVRAFASYRASPPPPPPPQPSSPSPSRALASAAAACEQGAKPAICTADELHYVPVPGTEWRLALWRYRPPPEAPKRNHPLMLLSGVATNAIGFDLSPGASFARHMSMQGFDTWIVEVRGAGLSMRGSELAVADTTSDMSRSSALDEITTQKLNGAGPAKDDSTCLAQNFEVPVVEDKFEVPVVEDKDVIESNALEEPQLVTKLSNTLARLGDTFSGYVKDSRLRSIADGFFNQVSELVPDASLTSSLEEVSEKILGLLELPQTSAISDQISHLSLRLVNILGEGQQNISPRLFGWQERLSATIEDLQKQLELIISYDWDFDHYLEEDVPAAMNYIKQQSPTKDGKLLAIGHSMGGILLYAMVSKCGCEGAEPELVAIVTLASSVDYTTSNSSLKLLLPLADPAEMLRVPAIPVGTLLSTTYPISSRAPYILSLLRSQISSKDMMDPDLLSKLVLNNFCTVPAKVLLQLTTAFRDGGLRNRAGTFFFKQHLHKIKVPILALAGDEDLICPPEAVYETVKLIPQHLVTYKVFGKPEGPHYAHYDLVGGRKAVHEVYPCIIEFLSQHDEVSS

SEQ ID NO: 150005 - protein, 126 aa, Oryza sativa
  Clone ID: PAT_MRT4530_50282C.1.pep
MADDGGYGRAHRHATNGGLRWRNSTEEGWTRWPSVVRTRRRRRRGSAAALAAASGGRRSGKGGGGGCSSAGAIEGTRGSGGKRKKVEGSAGKLYWGSGVADVAGVLPISPATWEVEREREWEGIQN

SEQ ID NO: 150006 - protein, 71 aa, Oryza sativa
  Clone ID: PAT_MRT4530_50283C.1.pep
WNKYPHRCTLRMQQKKKKKKKKKKKKKKKKKKKKKKKKKKKKKKKKKKKKKKKKKKKEKKKKGGGVLRDQG

SEQ ID NO: 150007 - protein, 445 aa, Oryza sativa
  Clone ID: PAT_MRT4530_50284C.1.pep
MSFRSIVRDVRDSFGSLSRRSFEVTLAGLSGLTGHHRGKSQSTVHELCDADLIIQESRWASLPPELLRDVIRRLEASESTWPSRKDVVSCAAVCKAWREMCKEIVLSPEFCGKLTFPLSLKQPGPRDGMIQCFIKRDKSKSTYHLYLCLSTAVLADSGKFLLSAKRHRKTTCTEYVISMDADNISRSSSTYIGKLRSNFLGTKFIIYDTQPSYNGAVIPPVGRSSRRFNSKKVSPKMPSGSYNIAQVTYELNVLGTRGPRRMHCVMHSIPASSVEPGGIVPGQPEQIVPRAFEESFRSTTSFSKSSIMDRSMDFSSSRDFSSARFSDIAGGTINGDEEGQNKERPLVLRNKAPRWHEQLQCWCLNFRGRVTIASVKNFQLIAAPAQPPAGAPTPSQPAPPEQDKIILQFGKVAKDMFTMDYRYPLSTFQAFAICLSSFDTKLACE

SEQ ID NO: 150008 - protein, 540 aa, Oryza sativa
  unsure (1)..(540): unsure at all Xaa locations
  Clone ID: PAT_MRT4530_50285C.1.pep
QVMAQNTKEADITEQDSLLLTRNLLRIARYNISYIRGLFPEKYFNDKSVPAQEMKIKKLIPMDAASRRLINWMEKGVYDALQKKYLKTLLFCICEKEEGPMIEEYAFSFSYPNMSGDEVAINLSRTESKKNSATFKPNAAEVTPDQMRSSACKMIRTLVSLMRTLDQIPEERTILMKLLYYDDVTPEDYEPPFFKCCADNEAINIWNKNPLKMEVGNVNSKHLVLALKVKSVLDPCDDNNVNSEDDNMSLDNESDQDNDFSDNEXDLRDHIXSIFVNETQDPAHEEELTAQLREWICSRDTESLEVSDVLINFPDISIVMPTDIMERLLKDGLLSRAKNDSYSVNRTKNSNGDLMYMKVYLCRLPXQYEGHHVISPHKYXLLQALYHALPMDYVSVGKLHGKLDGEASQNMVCKLIXKMVQDGYVKNSANRRLGKVVIHSEVTNRKLLEIKRILEINIADYSTNMTLSNMSLFIGHEMRDGSTMGCLQSVGSDLTRTRELPEPQQNLSMQSEQGASTVDKGPKQDSNKPQGEPVSLATHT

SEQ ID NO: 150009 - protein, 668 aa, Oryza sativa
  unsure (1)..(668): unsure at all Xaa locations
  Clone ID: PAT_MRT4530_50286C.1.pep
MVGSRFDFALRLLVMAQKTKEAEITEQDSLLLILTDFSCGFRRVWSMSPGIFVSLPLVLSARSKASGYLRLELVSGVCLNGTGTLFDSTCAKTRNLLRIAIYNISYIRGLFPEKYFNDKSVPALEMKIKKLMPMDTESRRLIDWMEKGVYDALQKKYLKTLLFCICEKEEGPMIEEYAFSFSYPNTSGDEVAMNLSRTGSKKNSATFKSNAAEVTPDQMRSSACKMIRTLVSLMRTLDQMPEERTILMKLLYYDDVTPEDYEPPFFKCCADNEAINIWNKNPLKMEVGNVNSKHLVLALKVKSVLDPCDDNNVNSEDDNMSLDNESDQDNDFSDTEVRPSEAERYIVAPNDGTCKGQNGTISEDDTQDPVHEEELTAQVREWICSRDTESLEVSDVLVNFPDISMEMVEDIMERLLKDGLLSRAKKDSYSVNKALYHALPMDYVSVGKLHGKLDGEASQNMVRKAVIHSEVTNRKLLEIKRILEVDIAEQMAIDTNAEPGEPERKDTTXSGHEMRDGSTMGCLQSVGSDLTRTRELPEPQQNVSMQSGQEASTVDKDPSRTPTSVREQASVCSLESGVLGQKVRKSLAGAGGTQCSQDKRFRKASTVKEPILQYVKRQKSQVQVQVHSSLQPAEPRVSRRNSEGDSRGGLAAVPYGGSLPRGPRLLSA

SEQ ID NO: 150010 - protein, 112 aa, Oryza sativa
  unsure (1)..(112): unsure at all Xaa locations
  Clone ID: PAT_MRT4530_50287C.1.pep
FVVPTGWKFFGNGRDAXMCSICGEQSFGTGSDHIREKDGIWAVLAWLSIIAFKNKDILGGDKLVTVXEDIARQHWSTYGRHDYTRXYDYENAYAGAAKESMVILESMRGSLS

SEQ ID NO: 150011 - protein, 301 aa, Oryza sativa
  Clone ID: PAT_MRT4530_50288C.1.pep
TAQVREWICSRDTESLEVSDVLVNFPDISMEMVEDIMERLLKDGLLSRAKKDSYSVNKIADPTTPHIKKEVIMQNVSPTEGTKNSNGDLMYMKALYHALPMDYVSVGKLHGKLDGEASQNMVRKLIEKMVQDGYVKNSANRRLGKAVIHSEVTNRKLLEIKKILEVDIAEQMAIDTNAEPGEPERKDPPEDGSTMGCLQSVGSDLTRTRELPEPQQNVSMQSGQEASTVDKDPSRTPTSVREASVCSLESGVLGQKVRKSLAGAGGTQCSQDKRFRKASTVKEPILQYVKRQKSQVQVQVQ

SEQ ID NO: 150012 - protein, 48 aa, Oryza sativa
  unsure (1)..(48): unsure at all Xaa locations
  Clone ID: PAT_MRT4530_50289C.1.pep
ARKVLRATQMEAARARLRASGAGTVPYAEFXRLCCDAAARSRASARAR

SEQ ID NO: 150013 - protein, 54 aa, Oryza sativa
  Clone ID: PAT_MRT4530_5028C.1.pep
SSTRPTMRTHTRTDSTKWHALTVHAANDRLLPSLPETSKCAKSENSDNPDLYHY

SEQ ID NO: 150014 - protein, 56 aa, Oryza sativa
  Clone ID: PAT_MRT4530_50290C.1.pep
EFFTHEEAVLYYHHPLQQKAVRIQDAKDQTKQKCILSIGKSYHIKYKECPQTVSKT

SEQ ID NO: 150015 - protein, 69 aa, Oryza sativa
  Clone ID: PAT_MRT4530_50291C.1.pep
LPPLGGVPPGFNPVGCHPWGPQGGMLVLVSGSPRPGPGEPPPRFSQMFQLLPPGGTFFGQNPMFRFNYG

SEQ ID NO: 150016 - protein, 103 aa, Oryza sativa
  unsure (1)..(103): unsure at all Xaa locations
  Clone ID: PAT_MRT4530_50292C.1.pep
LXVGLEEGVVLPLLGLAEEPDLQLGASAAVFSLTTSRRSSTASGTVAAPPPAGTGTDLDRVDMPPPPCDCHRHRRIRSRFGVERCGGGGGGGAPFFGGRXARP

SEQ ID NO: 150017 - protein, 61 aa, Oryza sativa
  Clone ID: PAT_MRT4530_50293C.1.pep
MAEAAAELTNALEYGGVVPCKADFRVQKRCSVKEVSAMPSFGRIGNANCYLLKKREERRGG

SEQ ID NO: 150018 - protein, 789 aa, Oryza sativa
  unsure (1)..(789): unsure at all Xaa locations
  Clone ID: PAT_MRT4530_50294C.1.pep
MIKQEVSASAQNQPGFNPQVLMRQQPQHIGQNIPRVSPKQVAAMFGPNQSVVQPILQTPTRQQVPIPQQQPVNAQFTPDQQAFMANQLPQSHIRGNTNYQFQPHSPQSWANLEKQFHKFFYSGIHEMKLSDLTAIKQKHEESVQYYIQRFRDVRNRCYSLALTDSQLADLAFQGLLSPIKERFSPQDFKSLAHLAQKIATHEQRFQEAKKAFKKIKLPAGHVIPSADELGKRKYCKWHNTGSHSTNECKVFRQQIQLAIELRFCWNEGMRLPSEEVAEEVANPQWCPSGIFSKSQKRRVQRMRNMEQFQENQQDIGRRLKRAKTKQVWRVKSKVVSADEIKADEAERLAKGKAIASSSVNMVFVLPAEFGIDQRHADIMEESCAQMILSPEQAIFEKPEGTENRHFKPLCVKGFVNGKPMSKMLVDGGAAVNLMPYVTFKKSGRSADDLIKTKMVLKDFGGNHTETKGVLNVELTVGSKIVPTTFFVIDGKGSYSLLLGRDWIHANCCIPSTMHHSLIQWQGDKIEVSNIVLVIKKNGKLRVCIDFRDLNKATSKDEYPMPIADQLVDAASGHKIISFIDGNAGYNQIFMVVMTFGLKSAGATYQRVMNYIFHDLIGLLVEIYIDDVVVKSKEVKGHIADLRKVFERTRKYGLKMKPTKCSFGVSAGQFLGFLVHERGIEMPQRSINAIQKIKPPEDKKQLQSLIGKMNFIRRFISNLSGRLEPFTSLLRLKADQEFALGAEQQKALDSIKEYLSSPPVLISPQKXGVPFRLYLSADVKSIGSILTQEF

SEQ ID NO: 150019 - protein, 49 aa, Oryza sativa
  Clone ID: PAT_MRT4530_50295C.1.pep
HASGYVFVSEGCLWLTGISSSIAYNWSRPNMKTSVKIIHARFVPLSHLS

SEQ ID NO: 150020 - protein, 226 aa, Oryza sativa
  unsure (1)..(226): unsure at all Xaa locations
  Clone ID: PAT_MRT4530_50296C.1.pep
CRLGFSPAASSPAALPPPSPPPSSRWRLRRSCSSWRGGCGTSPPRRRTSCRSGGTGRRSRWRGRPRRIGGSPRRSAGSRRNPSGSSGGGTPATPPPPPPPSSSTALASILTRCSARTSRGSGSTRRSGCKPRPAAVPRRRKSPPPPRXRDGGGRRGERRRRRPRPRRGGLPREAPGNPGTLLPHAGARSRGQPSRHQDRRGGWRQLVAVFDRSQPRPPDHPPGGGL

SEQ ID NO: 150021 - protein, 88 aa, Oryza sativa
  Clone ID: PAT_MRT4530_50297C.1.pep
NAICNGVYKNFINIYVGLRLKKKKKKKKKKKKKKKKKKKKKKKKKKKKKKKKKKKKKKKGGGGFFEKKHFFAGGGGEKNFFFWGAKKN

SEQ ID NO: 150022 - protein, 77 aa, Oryza sativa
  unsure (1)..(77): unsure at all Xaa locations
  Clone ID: PAT_MRT4530_50298C.1.pep
IHHCHLYLQGILLNYSQLTDPRTKSFFQLTYRNYPSLKSNKLTAXMQLSSIWRIKSISYLRLSNKLISLMDDKKKKK

SEQ ID NO: 150023 - protein, 527 aa, Oryza sativa
  Clone ID: PAT_MRT4530_50299C.1.pep
MAAAAAGGKIKTVVVLVMENRSFDHMLGWMKSLNPEIDGVTGDEINHLDAADPTSRAIRFGDGAEYVDPDPGHSMQAIYEQVYGTPFVDARATPITPPGVPSPPMAGFAQQAEKEKPGMADTVMNGFRPEAVPVYRELVRQFAVCDRWFASNPASTQPNRLFVHSATSHGLVSNDTKLLVAGLPQRTIFDSLHDAGFSFGIYYQYPPSTLFYRSLRQLKYAGNFHPFDLAFRRHCAEGKLPNYVVVEQRYFDLKMLPGNDDHPSHDVSEGQRFVKEVYEALRGGPQWEEALLVVTYDEHGGFYDHVPTPVDVPSPDGIVSAAPFFFEFNRLGVRVPALFISPWIEPGTVVHRPSGPYPTSEFEHSSIPATVKKLFNLKSFLTNRDAWAGTFDVVLTRDAPRTDCPATLPEPVKMRPATEAAEQAALTEFQEELVQLGAVLNGDHADEDVYPRKLVEGMTVAEAASYCNAAFKAWMDECDRCRKCGEDGSHIPTVVKPPPPPSTSSSGSSSFASKLLSCFACGRPNKN

SEQ ID NO: 150024 - protein, 134 aa, Oryza sativa
  unsure (1)..(134): unsure at all Xaa locations
  Clone ID: PAT_MRT4530_5029C.1.pep
DPTRXLSFIVIRNKLGWQNFNHCISILLLGICHNKWDAREKAWWWFHEFRYGYATWQRRDGWLRMREWRLETGGWISLMLLPSTLLFAVHHICTSSPPTQSTRNLVAAGEHLITSSAAASLCGQDKSASMSLDV

SEQ ID NO: 150025 - protein, 173 aa, Oryza sativa
  unsure (1)..(173): unsure at all Xaa locations
  Clone ID: PAT_MRT4530_502C.1.pep
MASMSASVCVSGSRLTWACAAASAVGATAGYDGAAWGTSNWLVERISVLVWSALATAATFAMSAAFGTCTEAVGAEGGSDGAGAEADGAPPSSATGAEGSAPSSAAISVPASLSFRLVTFSFTTFFGGIRSQWFRSEVPTVGASCCRNDNRIRXKTWSPNSGWKRREFTWLPL

SEQ ID NO: 150026 - protein, 78 aa, Oryza sativa
  Clone ID: PAT_MRT4530_50300C.1.pep
PRFGRTPLITVDPGVWRGRSRSLPNDGCGAVQTLPLRQPSYLTLYKGFTPSFHTHTFKLDLNYKRLYCTILYIRIGRE

SEQ ID NO: 150027 - protein, 48 aa, Oryza sativa
  Clone ID: PAT_MRT4530_50301C.1.pep
DIALLIQTLNNFIGYLMKLILFIGDYSGKVIIRPKTTSRTHINGNIGS

SEQ ID NO: 150028 - protein, 121 aa, Oryza sativa
  Clone ID: PAT_MRT4530_50302C.1.pep
AWRLGFSVSVLGRVGEPEHGGIGGGVGVGGPGGSSCAEVEEGADPGDAIPGLEDDVGGTELEDTGGEGEADHGAEAEGVGLPGGVAGGGGQAGGDPGGLGGEVGPSGAAFSCITSAERRIW

SEQ ID NO: 150029 - protein, 688 aa, Oryza sativa
  Clone ID: PAT_MRT4530_50303C.1.pep
MEAFMASADLPAFPWGAASTPPPPPPPPHHHHQQQQQQVLPPPAAAPAAAAFNQDTLQQRLQSIIEGSRETWTYAIFWQSSIDVSTGASLLGWGDGYYKGCDDDKRKQRSSTPAAAAEQEHRKRVLRELNSLIAGAGAAPDEAVEEEVTDTEWFFLVSMTQSFPNGLGLPGQALFAAQPTWIATGLSSAPCDRARQAYTFGLRTMVCLPLATGVLELGSTDVIFQTGDSIPRIRALFNLSAAAASSWPPHPDAASADPSVLWLADAPPMDMKDSISAADISVSKPPPPPPHQIQHFENGSTSTLTENPSPSVHAPTPSQPAAPPQRQQQQQQSSQAQQGPFRRELNFSDFASNGGAAAPPFFKPETGEILNFGNDSSSGRRNPSPAPPAATASLTTAPGSLFSQHTPTLTAAANDAKSNNQKRSMEATSRASNTNNHPAATANEGMLSFSSAPTTRPSTGTGAPAKSESDHSDLEASVREVESSRVVAPPPEAEKRPRKRGRKPANGREEPLNHVEAERQRREKLNQRFYALRAVVPNVSKMDKASLLGDAISYINELRGKLTALETDKETLQSQMESLKKERDARPPAPSGGGGDGGARCHAVEIEAKILGLEAMIRVQCHKRNHPAARLMTALRELDLDVYHASVSVVKDLMIQQVAVKMASRVYSQDQLNAALYTRIAEPGTAAR

SEQ ID NO: 150030 - protein, 64 aa, Oryza sativa
  Clone ID: PAT_MRT4530_50304C.1.pep
DNRVTDHRLKMNFELTGFLMGDIESAVQSCSSMEQKELLEEMATSVGARRYDQRDRSVCSPPST

SEQ ID NO: 150031 - protein, 330 aa, Oryza sativa
  Clone ID: PAT_MRT4530_50305C.1.pep
MSYLQKPSYYTISLVVVLLLPFTILFASFLLPFSAYLRGPPPIAAGSVVAGGCRHGAADGGGGGGGGGGVRPEISILVGVHTMAKKHSRRHLVRMAYAVQQTAALRGAARVDVRFALCARPMPQEHRAFVALEARAYGDVMLIDCDESPDKGKTYDYFAGLPAMLSSGGGGGGGGEGRPYDYVMKVDDDTYLRLDELAETLRRAPREDMYYGAGLPFLDKESPPFMLGMGYVLSWDLVEWIAGSDMAKALAIGAEDVTTGTWLNMGNKAKNRVNIFPRMYDFKGVKPEDFLEDTIGVHQLKQDLRWAQTLEHFNVTCLDPSSKMTNSLLS

SEQ ID NO: 150032 - protein, 52 aa, Oryza sativa
  Clone ID: PAT_MRT4530_50306C.1.pep
MPHGLGEAAACRSEALPTSEMAQQSAAATRESNFGQQTAALHMLRWCRALGF

SEQ ID NO: 150033 - protein, 66 aa, Oryza sativa
  Clone ID: PAT_MRT4530_50307C.1.pep
MADMHTYLRRDSTRSSVWWRVSNSCGRRRHYIGISNIEIRAQLLQGLMPRGSTGFAGKLSCLALAN

SEQ ID NO: 150034 - protein, 288 aa, Oryza sativa
  Clone ID: PAT_MRT4530_50308C.1.pep
MVGGGRERNGGVRQYNRSKVPRLRWTPDLHHCFVHAIHKLGGQDKATPKRVLQLMGVGGLTISHVKSHLQMYRNMRNDLGMQGIQVQQVDQEHTYGGGVEVWTDMQQCDHDECDVPCCSCHSPKPRKEPLLHLQLKSSGMNIDEPGTRARIAAPNVRSCRDDAAASATETRRRRGGRPEEVDDDANASTSPRISQLQLLRLRGHGIRESDMSPSTSLQCYYVRSQRTTTMPPGAAAAAAGGDGGSQCYAAPRYSSSSKLKFLGLVSSTTSSSSGSRISLDLSLSTLDS

SEQ ID NO: 150035 - protein, 116 aa, Oryza sativa
  unsure (1)..(116): unsure at all Xaa locations
  Clone ID: PAT_MRT4530_50309C.1.pep
TTAGGRCRGKNDLLLLTDVYSRVLELSYSADTDVSEFEGHDAXHFVWSADHVLAVEVRVRNRRIHPYGASVVVQVLIGCXHKHGDHYDMNLDKLKYRLLNANCPEMDVVHYLNGQL

SEQ ID NO: 150036 - protein, 103 aa, Oryza sativa
  Clone ID: PAT_MRT4530_5030C.1.pep
TTAYHSAVRNIIIRWYRTMLLYIVRYNTPHLYGMICRDCMTEISTTHHTLVPATSPHYEDALWRGYLQVYSDCGLLIAQFLTPLVLFTQKSEEAHSAPVSSGL

SEQ ID NO: 150037 - protein, 42 aa, Oryza sativa
  unsure (1)..(42): unsure at all Xaa locations
  Clone ID: PAT_MRT4530_50310C.1.pep
INMKYITPQTYKLKLXXYKLQQKEQIKLKIVIXXSXLYLFFF

SEQ ID NO: 150038 - protein, 396 aa, Oryza sativa
  Clone ID: PAT_MRT4530_50311C.1.pep
MVGGGRERNGGVRQYNRSKVPRLRWTPDLHHCFVHAIHKLGGQDKATPKRVLQLMGVGGLTISHVKSHLQMYRNMRNDLGMQGIQVQQVDQEHTYGGGVEVWTDMQQCDHDECDVPCCSCHSPKPRKEPLLHLQLKSSGMNIDEPGTRARIAAPNVRSCRDDAAASATETRRRRGGRPEEVDDDANASTSPRISQLQLLRLRGHGIRESDMSPSTSLQCYYVRSQRTTTMPPGAAAAAAGGDGGSQCYAAPRYSSSSKLKFLGFVVTSGPPPPRLPPPAACCCGSDDNIPFQVGTFAPHRVAPPTASCGGGGGGGRAEARPSSSYRSVWFEPAAAAAASNNGVAPDGEHDDGCSLSLSLALDTGCAGAGGSLVSSTTSSSSGSRISLDLSLSTLDS

SEQ ID NO: 150039 - protein, 75 aa, Oryza sativa
  Clone ID: PAT_MRT4530_50312C.1.pep
DKIGRSCKSYCRNTLLFIIESPFFIYYTDSITKSSLIGKEYLGHSIPKTLFLYIREVCSKNIVPRNSTHKSKLIN

SEQ ID NO: 150040 - protein, 451 aa, Oryza sativa
  unsure (1)..(451): unsure at all Xaa locations
  Clone ID: PAT_MRT4530_50313C.1.pep
MGQGTPGGMGKQGGLPGDRKPGDGGAGDKKDRKFEPPAAPSRVGRKQRKQKGPEAAARLPAVAPLSKCRLRLLKLERVKDYLLMEEEFVVSQERLRPSEDKTEEDRSKVDDLRGTPMSVGSLEEIIDESHAIVSSSVGPEYYVGILSFVDKDQLEPGCAILMHNKVLSVVGILQDEVDPIFSVMKVEKAPXESYADIGXLDAQIQDFKEAVELPLTPPELYEDIXIKPPKGVILYGRPGTGKTLLAKAVANSTSATFLRVVGSELIQKYLGDGPKLVRELFRVADDLSPSIVFIDEIDAVGTKRYDAHSGGEREIQRTMLELLNQLDGFDSXGEMLKVILATNRIESLDPALLRPGRIDRKIEFPLPDIKTRRRIFQIHTSKMTLADDVNLEEFVMTKDEFSGADIKAICTEAGLLALRERRMKVTHADFKKAKEKVMFKKKEGVPEGLYM

SEQ ID NO: 150041 - protein, 152 aa, Oryza sativa
  Clone ID: PAT_MRT4530_50314C.1.pep
MAARWMRMGGPASSPHHVLVGLHAQRRSGRPCGTASPPPPRLGGLFPATDRLAKRRMDWQGQKLAEMLMQLLLVASAVAAFVVGYAMADFQLMLLVYAGGVVLTALVTVPNWPFFNRHPLKWLDAAEADRHPRPQVSATPSTVGKKKAGKNK

SEQ ID NO: 150042 - protein, 58 aa, Oryza sativa
  Clone ID: PAT_MRT4530_50315C.1.pep
EGGSTGGKAAVKPVACERFDRGQQNYVEISIDLRPKRRQGRPSTAEPGGGRYADGRHW

SEQ ID NO: 150043 - protein, 430 aa, Oryza sativa
  Clone ID: PAT_MRT4530_50316C.1.pep
AKGGPRQPWHDLHCRIDGPAAYDVLKNFEQRWRKATKWRERFRKVSHWKDDALIKLERISWILSPSHTIRNDDISLRVSKEEDPENWHVQVFRSIDSGSLKGFPSDCKEASKQNLICRKDLIIDKSIHTAYVRAIRSAQHFIYIENQYFLGSSYAWPSYVNSGADNLVPIELALKIASKIRAGERFAVYVVIPMWPEGVPTAASVQEILFFQAQTMEMMYRIIAQELKAMNIKNAHPQDYLNFYCLGNREESSSSNGSPESNDKSAAALARKYRRFMIYVHAKGMIVDDEYVILGSANINQRSLGCSRDTEIAMGAYQPHHTWSTKGGHPRGQVYGYRTSLWAEHLGMVDDLFKDPSSLECVNYVNEIAEENWRRFTAEQLITLQGHLLKYPVKVEADGKVGPLPEHECFPDVGGKILGAPTSLPDTLTM

SEQ ID NO: 150044 - protein, 128 aa, Oryza sativa
  Clone ID: PAT_MRT4530_50317C.1.pep
MFKEIKNLFNIFGFVQKIATIQKTYGYQHSFLNIIEELKMYILNPVTLLENACSVTYTYFFMLIIWDEVLISGFGHKGHAVGDIRGVRFEVVKFYSRRSRGLRYSWLASFEYIIHVWMGVCLSSVYVP

SEQ ID NO: 150045 - protein, 37 aa, Oryza sativa
  unsure (1)..(37): unsure at all Xaa locations
  Clone ID: PAT_MRT4530_50318C.1.pep
KEEXGVQINSVSGSEGQLRSLPIRMIPTMYPGSSQDL

SEQ ID NO: 150046 - protein, 53 aa, Oryza sativa
  Clone ID: PAT_MRT4530_50319C.1.pep
VELYSSVHYGLLLIADTQATILVSATERDKRALSPVLLGARHVRGRDITQVWT

SEQ ID NO: 150047 - protein, 1526 aa, Oryza sativa
  Clone ID: PAT_MRT4530_5031C.1.pep
MPISAGPPMAGNENAVAATQGDSMSKDPPAEAEIGTSTTSEPEKDPSVAKPCLSDRNHEPMRVTSEMTRSWCPIHKTRKHTLQAYWVFLNVHAEIRACKERGIQRTSPTRDVYCPIHKTKNHDLSSCKVFLSAMKTTSPKVQQSHIPIRDKDKEQGATPISDRFVGVIDIDPYEPSVLHLLEDYGSSTTSTPREVLAIDDVGTSAHTNAEAGNQVTTPAQHIRAINAILRETLYDPVLNDDLAHWTERLRESVTNLSNTFEEATAAAHPEQPPTGDANDLWQQFVANFQGTYKRHAIEDDLHALTQNSGESLRDYVRRFNRCKNTIPEITDASVIRAFKSGVRDRYTTQELATRRITTTQRLFKIVDRCAYADDALRRKNDKMKTGEEKKPAKDAPESSKKKNRKSGKRKVQAEVLTAEYANPPKRPDPQSSDAKKAWCPIHKTDRHSLEDCLVFKKSLEKHMALEKGKRVRVVEKDAEAATQESDSAYPDSDLHVSHIFGGSTAYCSKREYKKLEREVCSTWQGAAPKMKWSEQKIEFSEEDHPKTAVIPGRYPIVVEPTIRNIKVTRVLIDSGSSINLLFASALDAMGIPRSELTPTDQPFHGITPQSSSKPLGKIMLQITFDVAEFDTAYNAIIGRTALAKFMAASHYAYQVLKMPEPKGTITIQGNAKLAVQCDKRSLDMVEHTPSPPATTEPPKKPSDMPGVPRLVIEHKLMVRPDAKPVKQKLWRFAPDRKQAIREELDKLLKAGFIREVLHPEWLANPVMVRKANGKWRMYVDFTDLNKACPKDHFPLPRIDQLVDSTAGCELLSFLDAYSGSHQISMAKEDEEKTTFITPFGVFCYVKMPFRLITAGNTFQRTVQGALSDQLGNNVEAYVDDIVVKTKTSNSLIDDLRETFDNLRQYRLMLNPEKCTFGVPSGKLLGFLVSGRGIEANPEKIKAIENMKLPTKLKEVQKLNGCMAALSRFVARMGERGQPFFALLKKQDKFVWTQEAEEAFIALKRYLSNPPVLVAPQPNEELFLYIAATPYSVSTVIVVEREKVQRPVYYVSEALHDAKTRYPQMQKLLYAHAIHLNFRATNNTAEYEGLLAGIRAVAALGVKRLIVKGDSELVANQVHKDYKWSNPELSKYLAEVRKLEKRFDEIEVRHVYRKDNIEPDDLARRASRREPLEPGTFLDFLMRPSVKEASGKDSPVAPDISSGATEAERAVADIETTDDWRTSLIKFISSEELPEDDAEAEKISRKAKVYCMIGNDLYKKAPNGVLLKCVSSDDGRHLLLDIHELKGSVGHMPPRCEACQFDSKHTKLPAQALQTIPLTWPFLCWGLDILGPFPRGQGGYRFLFVAIDKFTKWIEAIPTAEIKADNAIKFIKGIFCRFGLPHRIITDNGSQFISADFQDYCIRLGVKICFATVSHPQSNGQVERGNNIVLQGIKTRVYDRLMLHDKKWVEELPSVLWAVRTTPTTSNKETHFFLVYGSEAMLPTELRHQSTRVQNYSDEGQEEQRYDDVNLLEEHRERVAVRAASYQ

SEQ ID NO: 150048 - protein, 56 aa, Oryza sativa
  Clone ID: PAT_MRT4530_50320C.1.pep
GRSHRCCLGARATTVAGRNSPAVAGRNHCPCRHSMSQPPGEVETARVGNGDGGFRV

SEQ ID NO: 150049 - protein, 892 aa, Oryza sativa
  Clone ID: PAT_MRT4530_50321C.1.pep
MAGQTVYYAGQTVPTIAGQTVLYPGQIAPPVAGLTASLTTGQTGPWAGLTGCLDAKDRARENQKPYPDFYDALPYPPDYKIPEFTKFSGEDSRTTYEHVDQFLAQCGRASSMNTYLANIAYDGLLDSIKERLNGQIFLDVDHVLNEALAQESRVDDNSLQASLDENTISCIAEPSDDSDCVNNLCNDAITIIAEPNVGSDCLASLDNDATTIMAEPSNGSECVTSLDNDGIAEPSDDLDCVASLENNAIEDIAELNDDSDCIISESEIALSPKTESQIGHVDVGKDDDNVLRDNSEIESKVAMHTYQRPYPEHVDSVPYPQGFEVPNFTKFTGENAMTTMEHIGCFIDQCGKAGSDDLLKLKLFPLSLSNFASTWYSLLAPSSISTWSQMEHEFHDYFKDASLMEKRPVDDSSVTCETILVTSMPKTGVVSNPLPISPIDVDKKKGKNIIIGDPRPKTIRINNAKAEDRKVTKDELSSSIKTKKPKLTFEMLMAKYKKELAGQRFDNQTSDSKRPKSSRRKIFGQSPKQSESSPTPYKPPVVMPWCPYPMSLYGYPFMYYMPWMPQPPMPCHQGWKQSPRTVPSHSNSKQDRFPQKNRSGRSKVKKVKKVWVRKEAKAPEVVAIKEGSQDVHVPTRDVVETIQVKEIKADTVIVKSGGLTEASSRSDRQTTVGLTDSPGRSDRWLVAGLTGPRGQFDRGTLEKSRKIESNTGASTSTKNMKNHCLAPEKQSQPKWIPSGLSRSQKRRLQRLRAIGQKEKEAEDEENKTFEVNLGSLRYFKQDDLSVEDYKTLMGSNFEDVIDKRSKTLKEMKTLQDGVFREQLMGDSLKKYFPSIWFTYVHQKGRGGMCLHPNLAPMDEIGKITKVWIVLGFLHRADQTTGVWAVDRLVGPV

SEQ ID NO: 150050 - protein, 70 aa, Oryza sativa
  Clone ID: PAT_MRT4530_50322C.1.pep
PAGNRNSGDGVVRIGGVRRRRRGEALGVTRPAPPLVDQSALLRFSRCRDISSPSSVLSGFNSLSRDLELL

SEQ ID NO: 150051 - protein, 730 aa, Oryza sativa
  Clone ID: PAT_MRT4530_50323C.1.pep
MTSRNEIDKITWEDLDEEQRQVMNKLGSFLADFISKESLYQCYHATPHIPKAYNGPNSGYLHDTGYGQYNNIVPQQPPLRLPNPPPNRHKPENMEELTSIVIRDKFGIEAMDRAKECQKPYPDYYDNLPYPHGYRISEFTKFSDLADIAYDGLLDSIKERLNGQIFLDVDHVLHEALAQESQVDDNSLNASLDDSAISCVAEPSDGSDCANNLCNDAVTSIAELSAGSDCVTSLDNDGITEPSDGSDYVASLDNDTIESITELNDGSDCFTSKREIALSPKTESHIGHVDVGKDDDNILQDSSEIESKVVMPWYPYPMSLYGYPFMYYMMWMHQPPMPCHQEWKQSPRTVPSHSNSRQDRLPQKNRSGVLKVKKVKKVWVRKEAKAPEVVTIKEESQDVQVPTGDAAKTIQAEKTEADTVIVKSGGLPKQLAGLTETAGWSDRQPVASLTDPTGRSDRRLVAGLTGPRGRSDRGALEKSGKIESNTGASTSTKYIKNHCLALGTQPQPKWIPSGLSHSQKRRLQYLRAIGQKEKEAEDVKNETCNNSEPRTTPNRVWRPKEKADFAWGQDINMLMKKSRKMNGDGYDITSLSRRLSDAKASLTGGSLRPDRFCIAGLTGRTRRSDRHCVAVKNKIEEHSKKWHEVLSEVLWAHWISKHGAAKVTPFELVYGQKTVLLVEVNLGSDDLSVEDYKTLMGGNCEDVIDKRLKTLKEMETLQDGVFREQSMGNS

SEQ ID NO: 150052 - protein, 855 aa, Oryza sativa
  Clone ID: PAT_MRT4530_50324C.1.pep
MGDYTADYTGIGYMQNLANGMTGHDTGLTASYAGPDRALFWPDRTSYGRSDRTTNQGVSPSFHTITSSTDFNYYSSPVNTVSHAIPHIPNAYNDINRGYPPDTRYGQYNNIVPQQPPFRPPSPPPDPPKPETVEDWFRNTIRENFTKLRNRAREYQKPYPDFYDAVPYPPDYKIPKFTKFSGENSRTTYEHIDQFLAQCGRASSMNTCKLRLFSLSLSGTAFAWSTSLPENSIFSWAQLEQKFHDYFHTSETELRLSDLTSAGNDDLLKLKLFPLSLSNFASTCSIDVGKKKGKSVIIGDPRPKNRIKNAKAEDHKVTKDESSSSQKTKKPKLTFEMLMAKYKKGLAGQRFDNQTSDSKRPRSSRRKRFGQTSKQSKPSTIPTPYKPPVVMPWYPHPMSLFGYTFMYYMPWIPQPHMPYHRGWKQPPRTIPSQYNSRQDCFPQKNRSGRSKVKSVKKVWVRKEAKAPEVVAIKEKSQDVQVPTEDAAKTIQAEKTETNAVAVDIGGLTEPASQSNRQTTAGLTNPPSRVLKDPTLKVDRKIRRGSEACQWIGNVQLASTAVLNPIIKLWPFRGWVWDFIGQIYSSSSKGYWFVLIAMDYFTKWAEAVPLENITCTEQDDLSVEDYKTLMRSNFEDVIDKRLKILKDMKTLQDGVSREQLMGDSLKKYFLSIWFTYVHQKGRGSMCLHLNLAPMDEIGKNCQSLESVGFPSQGPVRPQRLGVAIVLVDLSRKVTNNLLLLDQTKTSTEPEAEAPALSFTPALTSADGAHQEPLVVATKNSIPRIAHMPMVPTRRLSCPEHFVTTSEGVHQLSRYSLADWFRNELGNGIWGSWIFLALSFVILGLNREIWRQPQILN

SEQ ID NO: 150053 - protein, 88 aa, Oryza sativa
  Clone ID: PAT_MRT4530_50325C.1.pep
FSYSLALPLAQTTTGGKYTRALVNQADHTGQGHVRHHRYGELRIQIRLAETLGPKNWGEQTGSRYMDRRAPATRGTDHVARMVTLRRS

SEQ ID NO: 150054 - protein, 957 aa, Oryza sativa
  Clone ID: PAT_MRT4530_50326C.1.pep
MAGQTVYYAGQTMPTINGQTVSYPGQIAPPVAGLTVPLTTGQTGHGLVRLGAWPVIPQTGSLEISPGFHTTTSSADFNYYSSSVNTVSHATPHVPNAYNDHNRGYSHDTGYGQYDNIAPQQPPFRPSNPPPNPPRPEIMEVRNHARVYQMPYPNFYDVVPYPPDYKIPEFAKFSGKDSRTTCEHVGQFLAQCGRASSMDTCKLRLFSLSLSGTAFTWFTSLPSNSISAWAQLEQKFHDYFHTNETELKLSDLTLVRHKYNESVVDYIERIGDVKNRCFNLKITDKDLADIAYNGLLDSIKEKLNGQIFLDIDHVLHEALAQESRVDDNSLQASLDENAISCIAEPSDGSDCVNNLCNDAVTSIAESNVGPDCLTSLDDNATTIIAEPSIGSDFVTSLDNDGIAEPSNGSDCVASLENSIIENIAELSDGSGYITSIALSPKTESLIGYVDVGKDDDNVLRDSSEIEPKVAMHTYQRPYPEHVDSVPYPQGFEVPNFTKFIGEDTRTTKEHIGQFIEQCGKAGSDDLLKLKLFPLSLSNFASTWYSLLAPNSISTWSQMEHEFHDYFKDASLIEKRPVDDLSVTCETISVTPMPKTGIVSNPFPISPIDDDKWKGKSVIIGDPRPKNRIKNAKAEDHKVAKDESSSSQKTKKPKLTFEMLMGKYKKGLAGQRFDNQTSDSKRPRSSRRERFGQTPKQSEPSTITTPYKPPVVMPWYPHPMSPFGYPFMYYMPWMPQPPMPCHQGWKQSPRTVPSNSNSRQDRFSQKNRSGGSKVKKVWVRKEAKAPEVVAIKEKSQDVQVPTEDAAKTIQAEKTEADAVAVNIGGLTKLVGWSNRQTTAGLTDGLWPPKWIPSGLSRSQKRRLQRLRAIGQKEKEAEDVENKTCNNLEPRTAPRQVWRSKELDDLSVGDYKTLMGSNFEDVIDKRLKTLKEMKTLQDGRKHTERYRRGPALNAFKNNL

SEQ ID NO: 150055 - protein, 60 aa, Oryza sativa
  unsure (1)..(60): unsure at all Xaa locations
  Clone ID: PAT_MRT4530_50327C.1.pep
MGAKGMGTWLFLFFSDGADGMETCGWSRGGXAGLLLRAQGSCLRRMHPLPGASVMRGWHF

SEQ ID NO: 150056 - protein, 832 aa, Oryza sativa
  Clone ID: PAT_MRT4530_50328C.1.pep
MDPADDDEETPTSRSSSSLPDDPRLREAIGEETRHLRLCLPLFACLLSCSRAIGCILDDLYIYVHLVFFRLAEQMPTADAETVTSESTAVIQQDSTMVNVDAAGLHEQDELPHWMSQLFEKLDLEVDEDVVDEDICSIGNMTHEEEEADLERGIHSILKNHPIMKKLNKGIHPVVLALHVLLEEEEEEEVVQEEDMAKGLAELDEYLSRHTYHTIEEATASFTGVIGHGGSGVVYKGVLDDERAVAVKVLKNVSRMWGCCSQGKHRILVSEYIENGSLAHKLFGRDGFDDDVLDWNQRFRIALCVAKGLAYLHSECSEWIVPCDMKPENILLDKDLEPKITDFGLSKLLNRDGSDAILTRIRGTRGYMAPEWVTNLPVIEKVDVYSYGVILLELVKGIWISEWVIHGIKVCEMDIRIVVRVTREKMESNEEKSIEDLVDYRLNGDFNHVQVKLMLEIALSCLEEDRSKRPNMNSVVQALISFEDIVVKRQLRHIERRGSLNEIEENCQSLESAEFPSQGRSDRRGYPPDTRYGQYNNIVPQQPPFRPPSPPPDPPKPETVEDWFRNTIRENFAKLRNHAREYQKPYLDFYDIIPYPRGYKIPEFTKFSGEESRTTWEHIRSRTCKDLKCPTSRNSQVRMLEQQWSISVNLLNNVTRPFPQKNRSGGSKVKKVKKVWVRKEAKAPEVVAINEESQDVHVPTGDAAKTIQTEKTKANTVVVDISGLTEPAGRSNRQSTAGLTDLTGRRLQRLRAIGQKEKEAEDVENKTCNNLEPRKAPRQMWRSNEQDDLSVEDYKTLMGSNFEDVIDKRLKTLKEMKTLQDGVFIEQLMGNT

SEQ ID NO: 150057 - protein, 172 aa, Oryza sativa
  Clone ID: PAT_MRT4530_50329C.1.pep
MKPPGRGGEERRWRLLACREDGSSAGYLGEDGRISRAMRGDRDVAIKKDRVRWWMREMGRGGGRAGEGLGQRGGKRPGMGISMESKERGDEEEGGGRRRKQSSRERTETKEEKVWEQPTIRRFVIVHSVRDTRGPSTDYSIHTRIHLVYVDLVTSYWATLVWAMNHDPSPPI

SEQ ID NO: 150058 - protein, 227 aa, Oryza sativa
  unsure (1)..(227): unsure at all Xaa locations
  Clone ID: PAT_MRT4530_5032C.1.pep
PAGAVGPTHQPHPRARAADSRPPRGGHSARPKAATPVRPAHGGAAPEKGEGKGETKRRSTAHPGSTAMTKTATGAEEGGGEARVDGVDGAPAVGDRNGEVDEVGEDAAKPKEAAPRWEVVRGDNGGGPELGGDGGERXERGREKWGERERESRGIIPPTLLRTGTAGGGGRKGMTGGPHPSARVAGGPARQRRARGERPDGPWGEEREGEGDGPSRPKKEREGKGTF

SEQ ID NO: 150059 - protein, 700 aa, Oryza sativa
  Clone ID: PAT_MRT4530_50330C.1.pep
MSYMAGFNQGISSSTMTSGNGFNNITTQYIRTDQGVVKENVPLPQVVVSPKNLANGITASYASQTVPTIAGQTVPYSGQIRPPVAGLTTPLTIEFLNLPSLVESRVDDNSLQASLDENAISCIAEPSDGSDCANNLCNDAIISIAEPKVGSDCLASLDNDATTIMAEPSDGSDCFMSLNDDGIAESSSGSDCVASLDNDIIENIAELSDGSDYITSETEIALSSKTESQIGHVDVGKDNDNVLRDSRFEVPNFTKFTCEDARTTMEHISQFIDQCDASLMEQRPIDTSSVTCETISVTSMPKPEIVSDPLPVSSIDVGKKKGKSVIIGDPWPKNRIKNAKAEDHKVAKDESSSSQKTKKPKLTFEMLIAKYKKGLAGWKESPRTVPNHSSNSRQDRFSQKNRSGRSKVKKVKKVWVRKEAKTLEVVTIKEESQDVQVPTGDAAKTIQAEKTEADAVAVDIGGLTKTDVDSLTETVGRSDRGALEKSGKIESNTGASTSTKNIKNHCLAPRKQPQPKWIPSGLSRSQKRRLQCLRAIGQKEKEAEDVKDKACEDLESRTASKRVWRPKEPMLDFKTLDEIGKAIDQGRSDRWYRRGSEACQRIGNVQLAPTAVLNPIIKLWAFQGWALDFIVKFILRHQKGIVEVNLSSLRYFEQDDLLIEDYKTLMGGNIEDVIDKRLKTLKEMKTLQDGVFREQLMGNT

SEQ ID NO: 150060 - protein, 362 aa, Oryza sativa
  Clone ID: PAT_MRT4530_50331C.1.pep
MAAPMGDGGDLVMLMEVSQLKKLALLLRNNEEAQITQAVKSQNERVKYLHSVNHAYNHAVDLLDDGSATRDKYAAAAAGGGGEAKASIAEDVLEYVKYGLNMSMQNVRNCCLRVDCIGKIRAHYDSLVADLAGLHADDVANLRRLAKDTAMFKECMFEHCNKLRSGSARAMSKAFSMMLKQEGIKFPDLVKRHKNKLGFEGEFEHLTDAQKLEVYNSIIEESGRAKMPVKEMVSTAAGVAVLLATAGLMVWDIFTAEHTVEAVLRNSLNALAEVGAFAVQVVVEGAVTEAVADLELGVFVVSMAGFVAGAVAGLLFVAVAGVLVDLIMGTGGNVAPPVTDLKFHTATMPDGMQLAYIISHRG

SEQ ID NO: 150061 - protein, 566 aa, Oryza sativa
  Clone ID: PAT_MRT4530_50332C.1.pep
MAGQTVYYAGQTVPTIASQTVPYPGQIAPPVAGLTALLTTGQTGPWAGQTGSLGDSLGFHTTTSNIDFNYYSSPVNTISHATPHIPNAYNDINRGYPPDTRYGQYNNIVPQQPPFRPPSPPPDPPRPETVEDWFRNIIRENLAKLRNRTREYQKPYPDYYDIFPYPRDYKIPEFTKFSAEPSDGSDCVNNLCNDAIVIIAESNVGSDCLTSLDDNATIIIAESSVGSDCVTNLDNNGIAEPNDGSDCVASLENNIIENIAELNDGSDCITSKSEIALSPKTESQIGYVDAGKNDDNVLRDSSEIESKVAIHTYQMPYPEHVDSVPYPQGFEVSNFTKFTGENAMTTMEHIGQFIDQCGKAGSNDLLKLKLFPLSLSNFASTWYSLLAPNSISTWSQMEHEFHDYFKDTSLMEQRPIDTSSVTCETISVTSMPKTGIVSDPLPVSFIDVGKKKGKSVIIGDPRPKNRIKNAKTEDHKVAKDESSRSQKTKKPKLTFEMLMAKYNKGLAVEVNLGSLRYFKQDDLLVEDYKTLMGSNFEDVIDKRLQTLKEMKALQDGVFIEQLMGNV

SEQ ID NO: 150062 - protein, 60 aa, Oryza sativa
  Clone ID: PAT_MRT4530_50333C.1.pep
MGQEFVLEKRNVNVANRTYRDAPGVVVGQESDVSEWHRVGTTGESLGGWDPRRPTEYERS
